(19) United States
(12) Patent Application Publication
(10) Pub. No.: US 2010/0284995 A1
(43) Pub. Date: Nov. 11, 2010

(54) Temperature sensitive mutants of matrix metalloproteases and uses thereof

(76) Inventors: Louis Bookbinder, San Diego, CA (US); Gregory I. Frost, Del Mar, CA (US); Gilbert Keller, Belmont, CA (US); Gerhard Johann Frey, San Diego, CA (US); Hwai Wen Chang, San Marcos, CA (US); Jay Milton Short, Del Mar, CA (US)

Correspondence Address: K&L Gates LLP, 3580 Carmel Mountain Road, Suite 200, San Diego, CA, 92130, US

(21) Appl. No.: 12/660,894

(22) Filed: Mar. 5, 2010

Related U.S. Application Data
(60) Provisional application No. 61/209,366, filed on Mar. 6, 2009.

(51) Int. Cl. A61K 38/48; A61K 38/47; A61P 17/02; A61P 19/00; A61P 17/00; C12N 9/50; C12N 9/96; C07H 21/04; C12N 15/63; C12N 5/10

(52) U.S. Cl. 424/94.62; 424/94.67; 435/219; 435/188; 536/23.2; 435/320.1; 435/325

(57) ABSTRACT

Provided are modified matrix metalloprotease (MMP) enzymes that exhibit temperature-dependent activity and uses thereof. The MMPs can be used, for example, to treat ECM-mediated diseases or disorders characterized by increased deposition or accumulation of one or more ECM components.

### RELATED APPLICATIONS

[0001] Benefit of priority is claimed to U.S. Provisional Application Ser. No. 61/209,366, to Louis Bookbinder, Gregory I. Frost, Gilbert Keller, Gerhard Johann Frey, Hwai Wen Chang and Jay Milton Short, entitled “Temperature Sensitive Mutants of Matrix Metalloproteases and Uses Thereof,” filed Mar. 6, 2009. The subject matter of the above-noted application is incorporated by reference in its entirety.

[0002] This application is related to International PCT Application Serial No. (Attorney Dkt. No. 3800020.00252/3077PC), entitled “Temperature Sensitive Mutants of Matrix Metalloproteases and Uses Thereof,” which claims priority to U.S. Provisional Application Ser. No. 61/209,366. This application is related to International PCT Application Serial No. PCT/US2009/001486 to Gilbert Keller and Gregory Frost, and to U.S. application Ser. No. 12/381,063 to Gilbert Keller and Gregory Frost, each entitled “In Vivo Temporal Control of Activatable Matrix-Degrading Enzymes,” and each which claim priority to U.S. Provisional Application Ser. No. 61/068,667 and to U.S. Provisional Application Ser. No. 61/127,725.

[0003] The subject matter of the above-noted related applications is incorporated by reference in its entirety.

### Incorporation by Reference of Sequence Listing Provided on Compact Discs

[0004] An electronic version on compact disc (CD-R) of the Sequence Listing is filed herewith in duplicate (labeled Copy #1 and Copy #2), the contents of which are incorporated by reference in their entirety. The computer-readable file on each of the aforementioned compact discs, created on Mar. 5, 2010, is identical, 12.8 megabytes in size, and titled 3077SEQ.001.txt.

### FIELD OF THE INVENTION

[0005] Provided are modified matrix metalloprotease (MMP) enzymes that exhibit temperature-dependent activity and uses thereof. MMPs having a controlled duration of action can be used, for example, to treat ECM-mediated diseases or disorders characterized by increased deposition or accumulation of one or more ECM components.

### BACKGROUND

[0006] The extracellular matrix (ECM) provides a critical structural support for cells and tissues. Defects or changes in the extracellular matrix as a result of excessive deposition or accumulation of ECM components can lead to ECM-mediated diseases or conditions. Among these are collagen-mediated diseases or conditions characterized by the presence of abundant fibrous septae of collagen. Often the only approved treatment for such diseases or conditions is surgery, which can be highly invasive. Other treatments, such as needle aponeurotomy for the treatment of Dupuytren's syndrome or liposuction for cellulite, also are highly invasive. Bacterial collagenase (also called matrix metalloproteinase-1; MMP-1), an enzyme active at neutral pH that degrades collagen, has been used to treat ECM-mediated conditions such as cellulite (see e.g., published U.S. application serial No. US20070224184); Dupuytren's syndrome (see e.g. U.S. Pat. Nos. RE39941; 5,589,171; 6,086,872); and Peyronie's disease (see e.g., U.S. Pat. No. 6,022,539). Collagenase, however, irreversibly cleaves collagens of type I, II and III. Bacterial collagenase also cleaves type IV collagen, associated with blood vessels, and thus its administration can cause haemorrhage and leaky blood vessels. The prolonged activity of collagenase limits the dosages that can be administered and also risks side effects associated with prolonged activity. Hence, there is a need for alternative treatments of ECM-mediated diseases and conditions. Accordingly, it is among the objects herein to provide alternatives for the treatment of ECM-mediated diseases and conditions.

### SUMMARY

[0007] Provided are modified matrix metalloprotease (MMP) enzymes and their use, among others, for treating ECM-mediated diseases or conditions. The enzymes include modified MMPs that are modified to exhibit activity at temperatures different from the unmodified enzymes. Hence, provided are temperature-sensitive mutants of MMP. In particular, the mutants are more active at a lower temperature then a higher temperature and typically are substantially inactive at the higher temperature. For example, the mutants are more active at a temperature that is or is about 25° C. then at a higher temperature that is or is about between 34° C. to 37° C. The mutants also retain an activity of the unmodified enzyme at the lower temperature.

[0008] Hence, provided herein are modified matrix metalloproteases (MMP). The MMPs contain one or more modification(s) in the sequence of amino acid residues of an MMP polypeptide or modifications in an allelic or species variant of the MMP, or modifications in a mature form thereof, or a catalytically active fragment of the MMP. The modifications, which are in the primary amino acid sequence, include amino acid replacement(s), insertion(s), deletion(s) and combinations thereof. The MMP can include only one modification, only 2, only 3, 4, 5, 6, 7, 8, 9, 10, 11, 12, 13, 14, 15, 16, 17, 18, 19, 20 or more replacements. The modification be effected on a wildtype MMP, or on an MMP already modified for some other purpose or activity or already mutated. The modification(s) provided herein, confer to the MMP, allelic or species variant thereof or an active fragment thereof, a ratio of enzymatic activity at a permissive temperature compared to at a nonpermissive temperature of at least 1.2, 1.3, 1.4, 1.5, 1.6, 1.7, 1.8, 1.9, 2.0, 2.5, 3.0, 3.5, 4.0, 4.5, 5.0, 6.0, 7.0, 8.0, 9.0, 10.0, 20.0, 30, 40, 50, 60, 70, 80, 90, 100 or more. The MMP can include only 1, only 2, 4, 5, 6, 7, 8, 9, 10, 11, 12, 13, 14, 15, 16, 17, 18, 19, 20 or more replacements to confer a specified ratio of enzymatic activity.

[0009] In some embodiments, the modified MMP polypeptide can retain the modified activity of a wildtype MMP at the permissive temperature. For example, it can retain or exhibit at least or about 10%, 20%, 30%, 40%, 50%, 60%, 70%, 80%, 90%, 100%, 110%, 120%, 140%, 150% or more activity.

[0010] The modified MMPs include, but are not limited to, collagenases, gelatinases, stromelysins, matrilysins, metalloelastases, enamelysins and membrane-type MMPs, allelic or species variants thereof and active fragments thereof that include such modification. Exemplary MMPs, include those listed in the Tables herein, such as MMP-1 (collagenase-1), MMP-8 (collagenase-2), MMP-13 (collagenase-3), MMP-18 (collagenase-4), MMP-2 (gelatinase A), MMP-9 (gelatinase B), MMP-3 (stromelysin-1), MMP-10 (stromelysin-2), MMP-11 (atromelysin-3; stromelysin-3), MMP-7 (matrilysin), MMP-26 (matrilysin-2), MMP-12 (metalloelastase), MMP-14 (MT1-MMP), MMP-15 (MT2-MMP), MMP-16 (MT3-MMP), MMP-17 (MT4-MMP), MMP-24 (MT5-MMP), MMP-25 (MT6-MMP), MMP-20 (enamelysin), MMP-19, MMP-21, MMP-23, CA-MMP, MMP-27, CMMP and MMP-28 (epilysin). These include allelic variants and species variants as well as active fragments thereof. The allelic and species variants contain the corresponding modification, which readily can be identified, such as by alignment. The active fragment, includes at least one such modification.

[0011] The modified MMPs include those that have lower activity at the nonpermissive temperature than the MMP that does not include the modification at the nonpermissive temperature. The permissive temperature can be lower or higher than the nonpermissive temperature. The modified MMPs can have altered activity compared to the unmodified MMP. The activity can be reduced, such as less than 95%, 90%, 80%, 70%, 60%, 50%, 40%, 30%, 25%, 20%, 15%, 10%, 5%, 3%, 1% or less than the activity of the unmodified MMP. The activity also can be increased, such as by the same percentages. Permissive temperatures include, but are not limited to, 21° C., 22° C., 23° C., 24° C., 25° C., 26° C., 27° C., 28° C., 29° C. or 30° C. or about 20° C., 21° C., 22° C., 23° C., 24° C., 25° C., 26° C., 27° C., 28° C., 29° C. or 30° C., such as at or about 25° C. Nonpermissive temperatures include, but are not limited to, 34° C., 35° C., 36° C., 37° C., 38° C. or 39° C. or about 34° C., 35° C., 36° C., 37° C., 38° C. or 39° C. For example, in one embodiment, the nonpermissive temperature is or is about 34° C. or 37° C. and the permissive temperature is 25° C. or about 25° C.

[0012] In some embodiments, only a catalytically active fragment is provided or used in any of the methods herein. The catalytically active fragment can be linked, such as fusion protein or chemical conjugate to additional amino acids derived from a different protein, or to another moiety, such as a therapeutic agent. When a catalytically active fragment, such as a catalytic domain is provided, it contains at least one of the amino acid replacements that confer the ratio of enzymatic activity.

[0013] Provided herein are modified MMP-1 polypeptides. Exemplary modified MMP-1 polypeptides are any provided herein having a sequence of amino acids set forth in any of SEQ ID NOS:3-705, 779-3458, 3507-3536 or allelic or species variants thereof, zymogen forms, mature forms, or catalytically active fragments thereof.

[0014] Among the modified MMPs provided herein that contain a modification that confers a ratio as noted above, are those in which the modification is an amino acid replacement(s), and the replacement(s) is at a position corresponding any one or more positions 84, 85, 95, 98, 99, 100, 103, 104, 105, 106, 109, 110, 111, 112, 118, 123, 124, 126, 147, 150, 151, 152, 153, 155, 156, 158, 159, 170, 171, 176, 178, 179, 180, 181, 182, 183, 185, 187, 188, 189, 190, 191, 192, 194, 195, 197, 198, 206, 207, 208, 210, 211, 212, 218, 223, 227, 228, 229, 230, 233, 234, 237, 240, 251, 254, 255, 256, 257 and 258 in an MMP-1 polypeptide comprising the sequence of amino acids set forth in SEQ ID NO:2 or in corresponding residues in an MMP polypeptide. As described herein, corresponding residues can be identified, for example, using standard alignment programs among proteins with substantial homology.

[0015] In particular, provided are modified MMP-1 polypeptides, where the unmodified MMP-1 polypeptide contains the sequence of amino acids set forth in SEQ ID NO:2 or is an allelic or species variant thereof or a mature form thereof that contains an amino acid replacement. Such modifications include, but are not limited to, T84F, E85F, L95K, L95I, R98D, 199Q, E100V, E100R, E100S, E100T, E100F, E100I, E100N, T103Y, P104A, P104M, D105A, D105F, D105G, D105I, D105L, D105N, D105R, D105S, D105T, D105W, D105E, L106C, L106S, A109H, D110A, V111R, D112S, A118T, S123V, N124D, T126S, G147P, R150P, R150V, R150D, R150I, R150H, D151G, N152A, N152S, S153T, F155L, F155A, D156H, D156L, D156A, D156W, D156V, D156K, D156T, D156R, D156M, P158T, P158G, P158K, P158N, G159V, G159T, G159M, G159I, G159W, G159L, G159C, P170D, P170A, G171P, G171E, G171D, A176F, A176W, F178T, F178L, D179N, D179V, D179C, E180Y, E180R, E180T, E180F, E180G, E180S, E180N, E180D, E181T, D181L, D181K, D181C, D181G, E182T, E182Q, E182M, E182G, E183G, R183S, T185R, T185Y, T185H, T185G, T185V, T185Q, T185A, T185E, T185D, N187R, N187M, N187W, N187F, N187K, N187I, N187A, N187G, N187C, N187H, F188V, R189N, R189T, R189Q, E190G, E190Y, E190D, Y191V, N192H, N192S, N192D, N192C, H194P, R195C, R195W, R195L, R195G, R195Q, R195A, R195D, R195V, A197V, A197C, A198G, A198L, A198M, G206A, G206S, L207R, L207V, L207I, L207G, S208R, S208L, S210V, S210A, T211L, D212G, D212H, Y218S, F223C, F223E, F223G, F223A, F223S, F223K, F223M, V227C, V227D, V227E, V227L, V227S, V227W, V227G, V227H, V227Q, V227R, Q228P, L229A, L229T, L29I, A230V, D233E, I234A, I234T, I234E, I234Q, I237L, I237W, I237N, I240S, I240A, I240C, I251S, I251W, Q254S, T255H, P256C, K257P, K257T and A258P, such as L95K, D105I, D105N, D105L, D105A, D105G, R150P, D156R, D156H, D156K, D156T, G159V, G159T, D179N, E180T, E180F, E182T, T185Q, N187I, A198L, V227E, I234E and I240S, or L95K, D105N, R150P, D156K, D156T, G159V, D179N, E180T, A198L, V227E, and I240S.

[0016] Other modified MMP polypeptides are those where the modification is an amino acid replacement(s) and the replacement(s) is at a position corresponding any one or more of positions 95, 105, 150, 151, 155, 156, 159, 176, 179, 180, 181, 182, 185, 187, 195, 198, 206, 210, 212, 218, 223, 227, 228, 229, 230, 233, 234, and 240 in an MMP-1 polypeptide having a sequence of amino acids set forth in SEQ ID NO:2 or in corresponding residues in an MMP polypeptide; where the modification(s) confers to the MMP, allelic or species variant thereof or an active fragment thereof, a ratio of enzymatic activity at a permissive temperature compared to at a nonpermissive temperature of at least 1.5. Such modifications, with reference to MMP-1, include, but are not limited to, L95K, D105A, D105F, D105G, D105I, D105L, D105N, D105R, D105S, D105T, D105W, R150P, D151G, F155A, D156K, D156T, D156L, D156A, D156W, D156V, D156H, D156R, G159V, G159T, A176F, D179N, E180Y, E180T, E180F, D181L, D181K, E182T, E182Q, T185R, T185H, T185Q, T185A, T185E, N187R, N187M, N187F, N187K, N187I, R195V, A198L, A198M, G206A, G206S, S210V, Y218S, F223E, V227C, V227E, V227W, Q228P, L229T, L229I, D233E, I234A, I234T, I234E, I240S, and I240C.

[0017] Other modified MMP polypeptides are those where the modification is an amino acid replacement(s) and the replacement(s) is at a position corresponding any one or more positions 95, 105, 150, 156, 159, 179, 180, 182, 185, 187, 195, 198, 212, 223, 227, 234, and 240 in an MMP-1 polypeptide having a sequence of amino acids set forth in SEQ ID NO:2 or in corresponding residues in an MMP polypeptide; and the modified MMP polypeptide retains at least or about 30%, 40%, 50%, 60%, 70%, 80%, 90%, 100%, 110%, 120%, 140%, 150% or more activity at 25° C. compared to wildtype MMP-1 at 25° C. This includes modified MMP polypeptides where a modification is selected from among L95K, D105A, D105G, D105I, D105L, D105N, D105S, D105W, D105T, R150P, D156K, D156T, D156V, D156H, D156R, G159V, G159T, D179N, E180Y, E180T, E180F, E182T, T185H, T185Q, T185E, N187M, N187K, N187I, R195V, A198L, F223E, V227E, I234E and I240S.

[0018] Among the modified MMP polypeptides are those in which the activity of the polypeptide is reversible upon exposure to the nonpermissive temperature, such as, for example, where upon exposure to the nonpermissive temperature and return to the permissive temperature the polypeptide exhibits at or about 120%, 125%, 130%, 140%, 150%, 160%, 170%, 180%, 200% or more or the activity compared to at the nonpermissive temperature. These include modified MMP polypeptides where the modification is an amino acid replacement(s) and the replacement(s) is at a position corresponding to any one or more positions D105A, D105F, D105G, D105S, D105T, R150P, G159T, E180Y, E180T, E180F, T185H, T185Q, T185A, T185E, N187R, N187M, N187K, R195V, A198L, A198M, S210V, Y218S, F223E, V227W, L229I and I240C in an MMP polypeptide.

[0019] Among the modified MMP polypeptides are those in which the activity of the polypeptide is irreversibly inactive upon exposure to the nonpermissive temperature, such as for example, modified MMP polypeptides, that, upon exposure to the nonpermissive temperature and return to the permissive temperature the polypeptide, exhibit at or about 50%, 60%, 70%, 80%, 90%, 100%, 105%, 110%, 115%, or less than 120% the activity at the non-permissive temperature. These include, but are not limited to, modified MMP polypeptides with a modification in an MMP polypeptide selected from among L95K, D105I, D105L, D105N, D105R, D105W, D151G, F155A, D156K, D156T, D156L, D156A, D156W, D156V, D156H, D156R, G159V, A176F, D179N, D181L, D181K, E182T, E182Q, T185R, N187F, N187I, G206A, G206S, V227C, V227E, Q228E, L229T, D233E, I234A, I234T, I234E and I240S.

[0020] Any of the modified MMP-1 polypeptides provided herein above can further include an activity mutation, whereby the mutations confers increased activity compared to the MMP-1 not containing the modification. For example, such a modified MMP-1 polypeptide can include amino acid replacement(s) at a position corresponding to any one or more of positions 81, 84, 85, 86, 87, 89, 104, 105, 106, 107, 108, 109, 124, 131, 133, 134, 135, 143, 146, 147, 150, 152, 153, 154, 157, 158, 160, 161, 164, 166, 167, 180, 183, 189, 190, 207, 208, 211, 213, 214, 216, 218, 220, 222, 223, 224, 225, 226, 227, 228, 229, 230, 231, 232, 235, 236, 238, 239, 244, 249, 254, 256, 257 and 258 in an MMP-1 polypeptide comprising the sequence of amino acids set forth in SEQ ID NO:2. For example, amino acid replacement can be F81L, F81A, F81G, F81Q, F81R, F81H, T84H, T84L, T84D, T84R, T84G, T84A, E85S, E85V, G86S, N87P, N87R, N87G, N87Q, R89A, R89T, R89G, R89K, P104E, P104D, P104Q, D105V, L106V, P107T, P107S, P107A, R108E, R108A, R108K, R108S, A109S, A109R, A109G, A109M, A109V, N124G, T131D, K132R, V133T, V133L, S134E, S134D, E135M, S143I, R146S, G147R, G147F, R150E, R150G, R150M, T150T, R150A, R150N, R150K, R150L, R150V, R150D, N152G, N152F, N152L, N152I, S153T, S153P, S153F, S153D, S153Y, P154S, P154I, G157F, P158V, P158I, G160Q, N161L, N161R, N161Y, N161E, N161T, N161I, N161V, N161F, N161Q, H164S, F166W, Q167R, Q167A, Q167S, Q167F, Q167P, Q167T, Q167V, Q167M, E180D, R183S, R189N, R189T, R189Q, E190D, L207M, S208K, S208R, S208L, T211N, I213G, G214L, G214E, L216I, Y218W, S220R, S220A, S220Q, S220T, S220G, S220M, S220V, S220N, T222R, T222P, T222S, T222F, T222N, F223Y, F223H, S224Q, S224K, S224D, G225Q, G225E, G225H, D226S, D226E, D226P, D226I, V227T, Q228A, Q228D, Q228E, Q228G, Q228H, Q228K, Q228L, Q228M, Q228N, Q228R, Q228S, Q228T, Q228W, Q228Y, L229Q, L229P, L229V, A230G, A230W, A230D, A230I, A230S, A230C, A230V, A230T, A230M, A230N, A230H, Q231I, Q231A, Q231F, Q231D, Q231G, Q231V, Q231W, Q231S, Q231H, Q231M, D232H, D232G, D232R, D232P, D232Y, D232S, D232F, D232V, D232K, D232W, D232Q, D232E, D232T, D232L, D235G, D235A, D235L, D235E, D235R, D235Q, D235T, D235N, G236M, G236R, G236S, G236T, G236C, G236K, G236E, G236L, G236N, Q238T, A239S, A239V, A239L, A239I, A239G, A239K, A239H, A239R, S244W, S244Q, Q249W, Q254S, P256S, K257E, K257R, or A258P. Exemplary modified MMP-1 polypeptides containing at least one temperature sensitive mutant and at least one activity mutant include those having amino acid replacements S208K/G159V; S208K/D179N; S208K/V227E; G214E/G159V; G214E/D179N; and I213G/D179N.

[0021] Also provided herein are modified MMP-1 polypeptides that are activity mutants, whereby the modified MMP-1 polypeptide exhibits increased activity compared to the MMP-1 not containing the modification. Exemplary activity mutants are any having an amino acid replacement in the above paragraph, and further herein in Section D.2.

[0022] MMPs that can be modified include, but are not limited to, MMP-1, MMP-8, MMP-13, MMP-18, MMP-2, MMP-9, MMP-3, MMP-10, MMP-7, MMP-6, MMP-12, and allelic or species variants, mature forms, or catalytically active fragments thereof. Exemplary modified MMPs include any in which the unmodified MMP polypeptide has a sequence of amino acids set forth in any of SEQ ID NOS:1, 711, 714, 717, 720, 723, 726, 729, 732, 735, 738, 741, 744, 747, 750, 753, 756, 759, 762, 765, 768, 771, 774 or 777, zymogen forms, allelic or species variants thereof or active fragments thereof. Such modified MMPs can have a modification at a corresponding position in the MMP compared to any of the modifications in MMP-1 provided herein. Exemplary of such corresponding positions are set forth in FIGS. 2 and 3, and exemplary mutations set forth in Section D herein. These include, for example polypeptides containing amino acid replacement(s) at a position corresponding to any two or more positions 95, 105, 151, 156, 159, 176, 179, 180, 181, 182, 185, 195, 198, 206, 210, 212, 218, 223, 228, 229, 233, 234, and 240 in an MMP-1 polypeptide having a sequence of amino acids set forth in SEQ ID NO:2 or in corresponding residues in an MMP polypeptide.

[0023] Provided are modified MMP polypeptides with two or more modifications, where at least one of the modifications confers the ratio, or where two do so, or more do so. The modified MMP polypeptides can contain 3, 4, 5, 6, 7, 8, 9, 10, 11, 12, 13, 14, 15, 16, 17, 18, 19, 20 or more modifications. Some or all of these can confer or contribute to a desired ratio of activity between the permissive and non-permissive temperature. Exemplary of modified MMP polypeptides are those that contain two or more amino acid replacement(s) and the replacement(s) are at a position corresponding to any two or more of positions 95, 105, 150, 156, 159, 179, 180, 182, 185, 187, 198, 227, 234 and 240 in an MMP-1 polypeptide having a sequence of amino acids set forth in SEQ ID NO:2 or in corresponding residues in an MMP polypeptide, such as, for example, where the two or more modifications in an MMP polypeptide are selected from among L95K, D105N, R150P, D156K, D156T, G159V, D179N, E180T, A198L, V227E, and I240S, or any where the two or more modifications in an MMP polypeptide are selected from among any set forth in Table 15.

[0024] As noted, the modified MMP polypeptide can be a zymogen, an active enzyme, can contain only a catalytically active fragment, such as the catalytic active domain, or can lack all or a portion of a proline rich linker and/or a hemopexin domain.

[0025] The modified MMP polypeptides can contain one or more additional modifications in addition to those that confer the activity ratio, such as, but not limited to, modifications that confer increased stability, increased half-life, altered substrate specificity and/or increased resistance to inhibitors. For example, the modified MMP polypeptide can be glycosylated as expressed or can be modified to be glycosylated, or can contain other modifications, such as PEGylation. The modified MMP polypeptide can be a fusion protein with another protein, such as an Fc fusion, or it can be provided as a dimer or a heterodimer or other multimer.

[0026] Also provided are nucleic acid molecules and/or vectors that encode any of the modified MMP polypeptides. Vectors include prokaryotic, viral and eukaryotic vectors, including mammalian vector and yeast vectors, such as, for example, adenovirus, an adeno-associated virus, a retrovirus, a herpes virus, a lentivirus, a poxvirus, a cytomegalovirus and Pichia vectors and artificial chromosomes. Cells, including prokaryotic, such as bacterial and algael cells, and eukaryotic, such as mammalian cells, containing the vectors are provided. The cells can express the modified MMP polypeptide, which can be encoded by nucleic acid that directs its secretion or trafficking to other loci in a cell. Methods for producing the MMPs by expressing the encoded MMP in a cell are provided. The MMPs provided herein can be provided in lyophilized or other dried or non-liquid forms.

[0027] Also provided are compositions, including pharmaceutical compositions, containing any or mixtures of the modified MMP polypeptides. The pharmaceutical compositions can be formulated for treatment of any disease amenable to treatment by an MMP, and particularly in the methods provided herein, for treatment of disease or conditions of the extracellular matrix (ECM). The compositions can be formulated for single dosage administration and contain multiple dosages or can require dilution or addition of other agents. Amounts per dosage, include for example, 10 μg to 100 mg, 50 μg to 75 mg, 100 μg to 50 mg, 250 μg to 25 mg, 500 μg to 10 mg, 1 mg to 5 mg, or 2 mg to 4 mg per dosage.

[0028] Also provided are uses of the modified MMPs for treating a disease or condition of the ECM or formulation of a medicament therefore, and methods for treating a disease or condition of the extracellular matrix (ECM), and processes for treating a disease or condition of the ECM. In practicing the methods, the MMP polypeptide or pharmaceutical compositions containing the MMP polypeptide is administered to the ECM with an activator that when administered or provided to the ECM, provides a temperature activating condition for the enzyme such that the MMP is active. The modified MMP polypeptide is more active at a permissive temperature then at the nonpermissive physiologic temperature, and the activating condition is not present in the ECM prior to administration of the activator.

[0029] Also provided herein are methods for treating a disease or condition of the ECM by administering to the ECM a modified MMP-1 polypeptide or composition thereof, or other modified MMP, that exhibits temperature sensitivity, whereby the modified MMP-1 exhibits activity at a permissive temperature that is below the physiologic temperature of the body. In the method, the MMP-1 is administered at or below the permissive temperature. The modified MMP-1 can be mixed with a composition that is at or below the permissive temperature immediately before administration or it can be provided in a composition that is at or below the permissive temperature. In the methods, prior to administration, the ECM can be cooled to below the physiological temperature of the body, for example, by using a cold pack administered at the locus of administration of the MMP. Further, conditional activation of the MMP can be controlled for a predetermined time. For example, the ECM can be maintained at below the physiological temperature of the body for a predetermined time.

[0030] Also provided herein are methods similar to above, whereby the modified MMP exhibits is active at a permissive temperature that is above the physiologic temperature of the body. Hence, the MMP, when administered at or above the permissive temperature, can be mixed with a composition that is at or above the permissive temperature immediately before administration or it can be provided in a composition that is at or above the permissive temperature. Conditional activation can be achieved by exposure of the locus of administration by heat to warm the ECM. This can be for a predetermined time.

[0031] In the methods, uses and processes herein, the MMP can be a zymogen that is processed, such by a processing agent, before administration. Processing agents include, but are not limited to, plasmin, plasma kallikrein, trypsin-1, trypsin-2, neutrophil elastase, cathepsin G, tryptase, chymase, proteinase-3, proteinase-3, urinary plasminogen activator (uPA), an active MMP, 4-aminophenylmercuric acetate (AMPA), HgCl₂, N-ethylmaleimide, sodium dodecyl sulfate (SDS), chaotropic agents, oxidized glutathione, reactive oxygen, Au(I) salts, acidic pH and heat. The modified MMP includes any provided herein, including, but are not limited to, modified MMP-1, MMP-2, MMP-3, MMP-7, MMP-10, MMP-26 and MT1-MMP. The processing agent is purified away from the modified MMP polypeptide before administration as can any non-active cleavage products of the MMP polypeptide. The modified MMP polypeptide is administered in an amount to treat the disease or condition under the activating conditions (i.e., during the period when it is exposed to the permissive temperature). The activator can be administered or provided prior to, simultaneously, subsequently or intermittently from the MMP. Exemplary activator include, a hot pack or a cold pack, a hot or cold liquid, buffer or solution, such as provision of the MMP in chilled buffer, wherein the chilled buffer is the activator. The buffer can be chilled to 4° C., 5° C., 6° C., 7° C., 8° C., 9° C., 10° C., 11° C., 12° C., 13° C., 14° C., 15° C., 16° C., 17° C., 18° C., 19° C., 20° C. or more or about any of these temperatures.

[0032] Administration can be effected by any suitable route, including but not limited to, subcutaneous, intramuscular, intralesional, intradermal, topical, transdermal, intravenous, oral and rectal administration, such as for example, sub-epidermal administration, including, subcutaneous administration.

[0033] The modified MMP polypeptide can be administered simultaneously, intermittently, sequentially or in the same composition with other active agents, such as a pharmacologic agent, including, for example, a small molecule drug compound (i.e., a compound that is not a macromolecule or biomolecule), dispersing agents, anesthetics and vasoconstrictors and combinations thereof. Exemplary of dispersing agents is a hyaluronan-degrading enzyme, such as, for example, a hyaluronidase. Exemplary of hyaluronidases is PH20, such as a soluble truncated form thereof, including, a hyaluronidase that contains or has a sequence of amino acids set forth in SEQ ID NO:3475, or an allelic or species variant or other variant thereof, including those having at least 60%, 70%, 80%, 90%, 91%, 92%, 93%, 95% 95%, 96%, 97%, 98%, 99% or more sequence identity to the sequence of amino acids set forth in SEQ ID NO:3475, such as 91% or greater sequence identity. The hyaluronidase can be one that is glycosylated. The anesthetics include any suitable anesthetic, such as, for example, lidocaine. The vasoconstrictor can be any suitable vasoconstrictor, such as an alpha adrenergic receptor agonist, such as, for example, levonordefrin, epinephrine or norepinephrine. In the methods, the other agent can be administered prior to administration of the MMP.

[0034] The ECM component that is affected by the treatment can include, for example, a collagen, an elastin, a fibronectin or a proteoglycan. The component affected depends upon the MMP selected. Where the ECM component is collagen, the collagen can be selected from among type I, type II, type III or type IV collagen. In any embodiment, the MMP is selected to be one that degrades a particular target, such as selection of a collagenase where the target is collagen. Mixtures of MMP can be used to degrade a plurality of ECM components. Diseases and conditions treated include, collagen-mediated diseases or conditions, such as, but not limited to, cellulite, Dupuytren's disease, Peyronie's disease, Ledderhose fibrosis, stiff joints, existing scars, scleroderma, lymphedema and collagenous colitis, herniated discs, stiff joints, such as a frozen shoulder, scars, such as a scar resulting from among surgical adhesions or keloids, hypertrophic scars and depressed scars.

[0035] Also provided are combinations of any modified MMP polypeptide provided herein and an activator thereof. Also provided are kits containing the combinations and one or more of a device for administration and, optionally instructions for administration, and other containers and components, such as reducing agents that increase activity, such as for enzyme with free sulfhydryl groups.

### BRIEF DESCRIPTION OF THE FIGURES

[0036] FIG. 1: FIG. 1 is an alignment of zymogen MMPs, indicating the propeptide, the catalytic domain, linker region, hemopexin domains 1-4, fibronectin type II repeats, the basic region, the cysteine switch, the calcium (Ca) binding sites I and II, and the zinc binding site. The alignment includes zymogen MMPs, including MMP-1 (SEQ ID NO:2), MMP-8 (amino acids 21-467 of SEQ ID NO:711), MMP-13 (amino acids 20-471 of SEQ ID NO:714), MMP-18 (amino acids 18-467 of SEQ ID NO:717), MMP-2 (amino acids 30-660 of SEQ ID NO:720), MMP-9 (amino acids 20-707 of SEQ ID NO:723), MMP-3 (amino acids 18-477 of SEQ ID NO:726), MMP-10 (amino acids 18-476 of SEQ ID NO:729), MMP-11 (amino acids 32-488 of SEQ ID NO:732), MMP-7 (amino acids 18-267 of SEQ ID NO:735), MMP-26 (amino acids 18-261 of SEQ ID NO:738), MMP-12 (amino acids 17-470 of SEQ ID NO:741), and MMP-19 (amino acids 19-508 of SEQ ID NO:765). A “*” means that the residues or nucleotides in that column are identical in all sequences in the alignment, a “:” means that conserved substitutions have been observed, and a “.” means that semi-conserved substitutions are observed.

[0037] FIG. 2: FIG. 2 is an alignment of the catalytic domains of exemplary MMPs, indicating exemplary conserved and conservative amino acid residues. It is understood that other conserved and conservative amino acid residues exist between and among MMPs. Thus, this figure and identification of residues is not intended to limit corresponding residues between and among MMPs. The exemplary MMPs include: MMP-1 (amino acids 81-242 of SEQ ID NO:2), MMP-8 (amino acids 101-242 of SEQ ID NO:711), MMP-13 (amino acids 104-248 of SEQ ID NO:714), MMP-18 (amino acids 100-246 of SEQ ID NO:717), MMP-2 (amino acids 110-417 of SEQ ID NO:720), MMP-9 (amino acids 94-425 of SEQ ID NO:723), MMP-3 (amino acids 100-247 of SEQ ID NO:726), MMP-10 (amino acids 99-246 of SEQ ID NO:729), MMP-11 (amino acids 98-228 of SEQ ID NO:732), MMP-7 (amino acids 95-242 of SEQ ID NO:735), MMP-26 (amino acids 90-236 of SEQ ID NO:738), MMP-12 (amino acids 106-247 of SEQ ID NO:741), and MMP-19 (amino acids 98-239 of SEQ ID NO:765). Exemplary conserved and conservative positions between and among MMPs are highlighted.

[0038] FIG. 3: FIG. 3 is an alignment similar to that depicted in FIG. 2. In the alignment, exemplary conserved and conservative positions corresponding to MMP-1 activity mutants are highlighted between and among other MMPs.

### DETAILED DESCRIPTION

### Outline

[0039] A. Definitions
[0040] B. Overview—Temperature Sensitive Matrix Metalloproteases
[0041] C. Matrix Metalloproteases and the Extracellular Matrix
   [0042] 1. The Extracellular Matrix
      [0043] a. Components of the ECM
         [0044] i. Collagens
         [0045] ii. Elastin
         [0046] iii. Fibronectin
         [0047] iv. Glycosaminoglycans (GAGs)
            [0048] 1) Proteoglycans
            [0049] 2) Hyaluronic Acid
      [0050] b. Histology of the Skin
         [0051] i. The Epidermis
         [0052] ii. The Dermis
         [0053] iii. The Hypodermis
      [0054] c. Diseases of the ECM
   [0055] 2. Matrix Metalloproteases
      [0056] a. Function
      [0057] b. Structure and Activation
   [0058] 3. Matrix Metalloprotease 1 (MMP-1)
[0059] D. Modified Matrix Metalloprotease-1 Polypeptides
   [0060] 1. Temperature-Sensitive Matrix Metalloprotease-1 (tsMMP-1 Mutants)
   Exemplary Temperature Sensitive Modifications
   [0061] 2. Matrix Metalloprotease Activity Mutants
   [0062] 3. Combinations
   [0063] 4. Additional Modifications
   [0064] 5. Other MMPs
[0065] E. Methods of Producing Nucleic Acids Encoding tsMMPs, and Polypeptides Thereof
   [0066] 1. Vectors and Cells
   [0067] 2. Expression
      [0068] a. Prokaryotic Cells
      [0069] b. Yeast Cells
      [0070] c. Insect Cells
      [0071] d. Mammalian Cells
      [0072] e. Plants
   [0073] 3. Purification Techniques
[0074] F. Preparation, Formulation and Administration of tsMMPs
   [0075] 1. Injectables, solutions and emulsions
   Lyophilized Powders
   [0076] 2. Topical Administration
   [0077] 3. Compositions for other routes of administration
   [0078] 4. Activator
   [0079] 5. Combination Therapies
   Hyaluronidases
[0080] G. Packaging and Articles of Manufacture of tsMMPs
   [0081] 1. Single Chamber Apparatus
   [0082] 2. Dual Chamber Apparatus
   [0083] 3. Kits
[0084] H. Methods of Assessing Activity of tsMMPs
   [0085] 1. Methods of Assessing Enzymatic Activity
   [0086] 2. Methods of Assessing ECM Degradation
      [0087] a. In vitro assays
      [0088] b. In vivo assays
      [0089] c. Non-human animal models
[0090] I. Exemplary Methods of Treating Diseases or Defects of ECM
   [0091] 1. Collagen-Mediated Diseases or Conditions
      [0092] a. Cellulite
      [0093] b. Dupuytren's Disease
      [0094] c. Peyronie's Disease
      [0095] d. Ledderhose Fibrosis
      [0096] e. Stiff Joints
      [0097] f. Existing Scars
         [0098] i. Surgical Adhesions
         [0099] ii. Keloids
         [0100] iii. Hypertrophic scars
         [0101] iv. Depressed Scars
      [0102] g. Scleroderma
      [0103] h. Lymphedema
      [0104] i. Collagenous colitis
   [0105] 2. Spinal Pathologies
[0106] J. Examples

### A. DEFINITIONS

[0107] Unless defined otherwise, all technical and scientific terms used herein have the same meaning as is commonly understood by one of skill in the art to which the invention(s) belong. All patents, patent applications, published applications and publications, Genbank sequences, databases, websites and other published materials referred to throughout the entire disclosure herein, unless noted otherwise, are incorporated by reference in their entirety. In the event that there are a plurality of definitions for terms herein, those in this section prevail. Where reference is made to a URL or other such identifier or address, it understood that such identifiers can change and particular information on the interne can come and go, but equivalent information can be found by searching the interne. Reference thereto evidences the availability and public dissemination of such information.

[0108] As used herein, the extracellular matrix (ECM) refers to a complex meshwork structure that surrounds and provides structural support to cells of specialized tissues and organs. The ECM is made up of structural proteins such as collagen and elastin; specialized proteins such as fibronectin; and proteoglycans. The exact biochemical composition varies from tissue to tissue. In the skin, for example, it is the dermal layer that contains the ECM. Reference to the “interstitium” is used interchangeably herein to refer to the ECM.

[0109] As used herein, components of the ECM refers to any material produced by cells of connective tissue and secreted into the interstitium. For purposes herein, reference to ECM components refers to proteins and glycoproteins, and not to other cellular components or other components of the ECM. Exemplary ECM components include, but are not limited to, collagen, fibronectin, elastin and proteoglycans.

[0110] As used herein, a matrix degrading enzyme refers to any enzyme that degrades one or more components of the ECM. Matrix-degrading enzymes include proteases, which are enzymes that catalyze the hydrolysis of covalent peptide bonds. Matrix-degrading enzyme include any known to one of skill in the art. Exemplary matrix-degrading enzymes include matrix metalloproteases, allelic or species variants or other variants thereof.

[0111] As used herein, a matrix metalloprotease (MMP) refers to a type of matrix degrading enzyme that is a zinc-dependent endopeptidase that contain an active site Zn²⁺ required for activity. MMPs include enzymes that degrade components of the ECM including, but not limited to, collagen, fibronectin, elastin and proteoglycans. MMPs generally contain a propeptide, a catalytic domain, a proline linker and a hemopexin (also called haemopexin-like C-terminal) domain. Some MMPs contain additional domains. Exemplary MMPs are set forth in Table 5. Reference to an MMP includes all forms, for example, the precursor form (containing the signal sequence), the proenzyme form (containing the propeptide), the processed active form, and forms thereof lacking one or more domains. For example, reference to an MMP refers to MMPs containing only the catalytically active domain. Domains of exemplary MMPs are identified in FIG. 1. MMPs also include allelic or species variants or other variants thereof

[0112] As used herein, a modified matrix degrading enzyme or a modified MMP (also interchangeably referred to as a variant or mutant) refers to an enzyme that has one or more modifications in primary sequence compared to a wildtype enzyme. The one or more mutations can be one or more amino acids replacements (substitutions), insertions, deletions, and any combination thereof. A modified enzyme includes those with 1, 2, 3, 4, 5, 6, 7, 8, 9, 10, 11, 12, 13, 14, 15, 16, 17, 18, 19, 20 or more modified positions. The modifications can provide altered properties of the enzyme. Exemplary of modifications include those described herein that confer temperature-sensitive activity of the enzyme. Other modifications include those that confer altered substrate specificity, stability and/or sensitivity to inhibitors (e.g. TIMPs). A modified enzyme typically has 60%, 70%, 80%, 85%, 90%, 91%, 92%, 93%, 94%, 95%, 96%, 97%, 98%, 99% or more sequence identity to a corresponding sequence of amino acids of a wildtype enzyme. Typically, a modified enzyme retains an activity or sufficient activity (e.g. degradation of an ECM component) of a wildtype enzyme. It is understood that modifications conferring temperature sensitivity retain an activity or sufficient activity at the requisite temperature compared to a wildtype enzyme at the physiologic temperature.

[0113] As used herein, an activity mutant or mutation or variant or modification refers to a modified enzyme, for example a modified matrix metalloprotease such as a modified MMP-1, that exhibits increased enzymatic activity compared to the enzyme that does not contain the particular modification. For example, the enzyme exhibits 1.2-fold to 100-fold or higher increased enzymatic activity, for example, 1.2-fold, 1.3, 1.4, 1.5, 1.6, 1.7, 1.8, 1.9, 2.0, 3.0, 4.0, 5.0, 6.0, 7.0, 8.0, 9.0, 10, 20, 30, 40, 50, 60, 70, 80, 90, 100-fold or more increased enzymatic activity. It is understood that in determining enzymatic activity, the enzymatic activity of the mutant and the unmodified enzyme (e.g. wildtype) is measured under the same assay conditions. Reference to an activity mutant herein is not dependent on temperature. For example, an activity mutant provided herein can exhibit increased activity compared to the enzyme that does not contain the modification at both the permissive and nonpermissive temperature.

[0114] As used herein, a temperature sensitive (ts) mutant or mutation or variant or modification conferring temperature sensitivity refers to a polypeptide that is modified to exhibit higher enzymatic activity at some temperatures called permissive temperatures compared to other temperatures called nonpermissive temperatures. Generally, a temperature-sensitive mutant exhibits higher enzymatic activity at lower temperatures then at higher temperatures.

[0115] As used herein, permissive temperature is the temperature at which a polypeptide exhibits a higher enzymatic activity then at a second temperature called the nonpermissive temperature. Hence, the modified enzymes provided herein exhibit different activities at different temperatures that is higher at one temperature then at another temperature. The temperature at which it exhibits more activity is the permissive temperature. For example, the permissive temperature is a temperature that is below the physiological temperature of the body, for example, 18° C. to 30° C., and in particular 20° C. to 25° C. Hence, the enzyme exhibits increased activity at a temperature below the physiological temperature of the body then activity at the physiological temperature of the body, such as exists in the interstitium. For example, the permissive temperature is or is about 18° C. 19° C., 20° C., 21° C., 22° C., 23° C., 24° C., 25° C., 26° C., 27° C., 28° C., 29° C. or 30° C.

[0116] As used herein, a nonpermissive temperature is the temperature where a polypeptide exhibits lower enzymatic activity then at the permissive temperature and exhibits reduced activity compared to the enzyme that is not modified. Temperature-sensitive mutants provided herein exhibit enzymatic activity at the nonpermissive temperature that is at or about 1%, 2%, 3%, 4%, 5%, 6%, 7%, 8%, 9%, 10%, 20%, 30%, 40%, 50%, 60%, 70%, 80% or 90% up to less then 100% the activity at the permissive temperature. The temperature sensitive mutants provided herein also exhibit 1%, 2%, 3%, 4%, 5%, 6%, 7%, 8%, 9%, 10%, 20%, 30%, 40%, 50%, 60%, 70%, 80% or 90% up to less then 100% of the activity at the nonpermissive temperature compared to the enzyme that is not modified (e.g. wildtype enzyme) at the nonpermissive temperature. For example, the nonpermissive temperature is a temperature that is near to, at or above the physiological temperature of the body, for example, 32° C. to 39° C., for example, 32° C., 33° C., 34° C., 35° C., 36° C., 37° C., 38° C., or 39° C.

[0117] As used herein, the ratio of enzymatic activity at the permissive temperature compared to the nonpermissive temperature refers to the relation of enzymatic activity at the permissive and nonpermissive temperatures. It is expressed by the quotient of the division of the activity at the permissive temperature by the activity at the nonpermissive temperature. It is understood that in determining enzymatic activity and the ratio of enzymatic activity, the enzymatic activity at the permissive and nonpermissive temperatures is measured under the same assay conditions, except for the difference in temperature.

[0118] As used herein, physiological temperature refers to temperature conditions maintained in the body, which is approximately 37° C., for example, at or about 34° C., 35° C., 36° C., 37° C., 38° C. or 39° C. It is understood that the normal range of a human body temperature varies depending on factors such as the rate of metabolism, the particular organ and other factors. For purposes herein, physiological temperature is the temperature that exists for a non-fasting, comfortably dressed subject that is indoors in a room that is kept at a normal room temperature (e.g. 22.7 to 24.4° C.).

[0119] As used herein, reversible refers to a modified enzyme whose activity at the permissive temperature is capable of being recovered or partially recovered upon exposure to the nonpermissive temperature and reexposure to the permissive temperature. Hence, the activity of a reversible enzyme once it is exposed to the nonpermissive temperature is the same or substantially retained compared to the activity of the enzyme exposed only to the permissive conditions and is greater then the activity of the enzyme exposed only to the nonpermissive temperature. For example, upon return to permissive conditions from nonpermissive conditions, reversible enzymes exhibit at or about 120%, 125%, 130%, 140%, 150%, 160%, 170%, 180%, 200% or more the activity of the enzyme exposed only to the nonpermissive temperatures and retain the activity of the enzyme exposed only to the permissive temperature.

[0120] As used herein, irreversible or nonreversible refers to a modified enzyme whose enzymatic activity at the permissive temperature is not recovered upon exposure to the nonpermissive temperature and reexposure to the permissive temperature. Hence, the activity of an irreversible enzyme once it is exposed to the nonpermissive temperature is less then the activity of the enzyme exposed only to the permissive temperature and also is less then or the same or substantially the same as the activity of the enzyme exposed only to the nonpermissive conditions. For example, upon return to permissive conditions, irreversible enzymes exhibit at or about 20%, 30%, 40%, 50%, 60%, 70%, 80%, 90%, 100%, 105%, 110%, 115%, or 120% the activity at nonpermissive temperatures and less then 100% of the activity at the activity of the enzyme exposed only to the permissive temperature.

[0121] As used herein, a domain refers to a portion (a sequence of three or more, generally 5 or 7 or more amino acids) of a polypeptide that is a structurally and/or can form an independently folded structure within a protein made up of one or more structural motifs (e.g. combinations of alpha helices and/or beta strands connected by loop regions) and/or that is recognized by virtue of a functional activity, such as kinase activity. A protein can have one, or more than one, distinct domain. For example, a domain can be identified, defined or distinguished by homology of the sequence therein to related family members, such as homology and motifs that define an extracellular domain. In another example, a domain can be distinguished by its function, such as by enzymatic activity, e.g. kinase activity, or an ability to interact with a biomolecule, such as DNA binding, ligand binding, and dimerization. A domain independently can exhibit a function or activity such that the domain independently or fused to another molecule can perform an activity, such as, for example proteolytic activity or ligand binding. A domain can be a linear sequence of amino acids or a non-linear sequence of amino acids from the polypeptide. Many polypeptides contain a plurality of domains. For example, the domain structure of MMPs is set forth in FIG. 1. Those of skill in the art are familiar with domains and can identify them by virtue of structural and/or functional homology with other such domains.

[0122] As used herein, a catalytic domain refers to any part of a polypeptide that exhibits a catalytic or enzymatic function. Such domains or regions typically interact with a substrate to result in catalyis thereof. For MMPs, the catalytic domain contains a zinc binding motif, which contains the Zn²⁺ ion bound by three histidine residues and is represented by the conserved sequence HExxHxxGxxH.

[0123] As used herein, a proline rich linker (also called the hinge region) refers to a flexible hinge or linker region that has no determinable function. Such a region is typically is found between domains or regions and contributes to the flexibility of a polypeptide.

[0124] As used herein, a hemopexin binding domain or haemopexin-like C-terminal domain refers to the C-terminal region of MMP. It is a four bladed β-propeller structure, which is involved in protein-protein interactions. For example, the hemopexin binding domain of MMPs interact with various substrates and also interact with inhibitors, for example, tissue inhibitor of metalloproteases (TIMPs).

[0125] As used herein, consisting essentially of or recitation that a polypeptide consists essentially of a particular domain, for example the catalytic domain means that the only MMP portion of the polypeptide is the domain or a catalytically active portion thereof. The polypeptide optionally can include additional non-MMP-derived sequences of amino acids, typically at least 3, 4, 5, 6 or more, such as by insertion into another polypeptide or linkage thereto.

[0126] As used herein, a “zymogen” refers to an enzyme that is an inactive precursor of and requires some change, such as chemical modification or proteolysis of the polypeptide, to become active. Some zymogens also require the addition of co-factors such as, but not limited to, pH, ionic strength, metal ions, reducing agents, or temperature for activation. Zymogens include the proenzyme form of enzymes. Hence, zymogens, generally, are inactive and can be converted to a mature polypeptide by chemical modification or catalytic or autocatalytic cleavage of the proregion from the zymogen in the presence or absence of additional cofactors.

[0127] As used herein, a prosegment or proregion or propeptide refers to a region or a segment that is cleaved to produce a mature protein. A propeptide is a sequence of amino acids positioned at the amino terminus of a mature polypeptide and can be as little as a few amino acids or can be a multidomain structure. This can include segments that function to suppress the enzymatic activity by masking the catalytic machinery. Propeptides also can act to maintain the stability of an enzyme.

[0128] As used herein, a “processing agent” refers to an agent that activates a MMP by facilitating removal of the propeptide or proregion from the zymogen or inactive form of the enzyme. A processing agent includes chemical agents, proteases and other agents such as acidic pH or heat. Exemplary processing agents include, but are not limited to, trypsin, furin, or 4-aminophenylmercuric acetate (AMPA). Other exemplary processing agents are listed in Table 4.

[0129] As used herein, a “catalytically active fragment” refers to a polypeptide fragment that contains the catalytically active domain of the enzyme. It is understood that reference to a catalytically active fragment does not necessarily mean that the fragment exhibits activity, but only that is contains the catalytically active domain or portion thereof that is required for activity. Hence, a catalytically active fragment is the portion that, under appropriate conditions (e.g. permissive temperature), can exhibit catalytic activity. For example, a catalytically active fragment of a tsMMP-1 (containing at least one mutation that confers a temperature sensitive phenotype) exhibits activity when it is provided at the requisite permissive temperature (e.g. 18° C. to 25° C.), but exhibits substantially reduced or no activity at the non-permissive temperature (e.g. physiological temperature of the body).

[0130] As used herein, an active enzyme refers to an enzyme that exhibits enzymatic activity. For purposes herein, active enzymes are those that cleave any one or more components of the ECM, such as collagen. Active enzymes include those that are processed from the zymogen form into the mature form.

[0131] As used herein, reference to the “mature” form or “processed mature” form of an enzyme refers to enzymes that do not include the prosegment or proregion of the enzyme. It can be produced from the zymogen or pro-enzyme by activation cleavage in which a prosegment or proregion of the proenzyme is processed to produce the mature form. Hence, a processed mature enzyme lacks the sequence of amino acids that correspond to the prosegment or proregion. It is understood that reference to a processed mature form of an enzyme includes synthetic sequences, and thus does not necessarily require that the enzyme actually is processed to remove the prosegment or proregion. It is understood that any MMP enzyme that lacks the prosegment or proregion sequence is a mature enzyme. For example, SEQ ID NO:709 is the mature sequence of MMP-1. The processed mature form of an enzyme can exhibit activity, and is thus an active enzyme, under appropriate conditions. For example, under physiological conditions, the mature form of MMP-1 is an active enzyme. In contrast, tsMMP-1 variants provided herein exhibit enzymatic activity at the permissive temperature of 18° C. to 25° C. and substantially reduced or no activity at the physiological temperature of the body.

[0132] As used herein, an activating condition refers to any physical condition or combination of conditions that is required for an enzyme's activity. For purposes herein, an activating condition for an activatable matrix-degrading enzyme (AMDE), for example, a matrix metalloprotease (MMP) includes those that are not present at the site of administration, for example, not present in the extracellular matrix, in amounts (i.e. quantity, degree, level or other physical measure) required for activation of the enzyme. Exemplary of activating conditions include temperature. For example, in the case of the interstitium, the physiological temperature is at or about 37° C. An activating condition is a temperature that is not at or about 37° C., but that is cooler or warmer. By virtue of the fact that the activating condition is not present at the site of administration of the enzyme, but must be added exogenously, the activating condition will dissipate over time as the temperature adjusts, such that the activating condition is no longer present to activate the enzyme. Hence, the enzyme will be active for a limited or predetermined time upon administration.

[0133] As used herein, an activator refers to any composition or other material or item that provides an activating condition for an activatable matrix-degrading enzyme. For purposes herein, an activator refers to any item that is capable of providing a temperature condition at the permissive temperature of the enzyme. Examples of activators include, but are not limited to hot or cold buffers or hot or cold packs.

[0134] As used herein, an “activatable matrix-degrading enzyme (AMDE)” refers to a matrix degrading enzyme that requires an activating condition in order to be active. For purposes herein, for example, an AMDE is substantially inactive in the ECM unless exposed to activators before, with or subsequent to administration of the AMDE, thereby providing an activating condition for the enzyme. Hence, activation of a activatable enzymes is controlled by exogenous conditions so that the period of time at an in vivo locus or site during which the enzyme is active can be predetermined and/or controlled as a result of the dissipation and/or neutralization of the activation condition (i.e. temporally controllable or time-controlled). Thus, by virtue of exposure to an activating condition, the enzymes are active for a limited time and/or to a limited extent in the ECM (i.e. are conditionally active). The extent and time of activation can be controlled by selection of activator or activating conditions, and can be for a predetermined time. For example, temperature sensitive enzyme, such as a tsMMP, is activatable in that it can be activated by exposure to the activating condition of temperature, such as provided by a cold buffer or other liquid solution. Upon administration of the activated enzyme with the activator to the physiologic temperature environment of the ECM, the temperature will adjust to and eventually return to the physiologic temperature in a time period that can be predetermined based upon the initial temperature of the activator, the site of administration, the depth of administration and other factors, such that the enzyme will become inactive or less active.

[0135] As used herein, a “therapeutically effective amount” or a “therapeutically effective dose” refers to an agent, compound, material, or composition containing a compound that is at least sufficient to produce a therapeutic effect.

[0136] As used herein, an enzyme that is active for a limited time or for limited duration refers to an active enzyme having activity that dissipates and/or is neutralized over time. Thus, by virtue of the absence of an activation condition, the enzyme is rendered inactive.

[0137] As used herein, predetermined time means a limited time that is known before and can be controlled. The dissipation and/or neutralization of an activation condition required for an enzyme's activity can be titrated or otherwise empirically determined so that the time required for an active enzyme to become inactive is known. For purposes herein, for example, an enzyme can be active for a predetermined time that is or is about 1 minutes, 2 minutes, 3 minutes, 4 minutes, 5 minutes, 6 minutes, 7 minutes, 8 minutes, 9 minutes, 10 minutes, 15 minutes, 20 minutes, 30 minutes, 1 hour, 2 hour, 3 hour, or 4 hour. The predetermined time can be controlled by the subject or the treating physician, for example, where a cold pack or hot pack is used as the activator. Further, it is understood that reversible enzymes can be re-activated by exposure to permissive conditions, and thereby can be active for an additional predetermined time.

[0138] As used herein, sub-epidermal administration refers to any administration that results in delivery of the enzyme under the outer-most layer of the skin. Sub-epidermal administration does not include topical application onto the outer layer of the skin. Examples of sub-epidermal administrations include, but are not limited to, subcutaneous, intramuscular intralesional and intradermal routes of administration.

[0139] As used herein, substrate refers to a molecule that is cleaved by an enzyme.

[0140] Minimally, a target substrate includes a peptide containing the cleavage sequence recognized by the protease, and therefore can be two, three, four, five, six or more residues in length. A substrate also includes a full-length protein, allelic variant, isoform or any portion thereof that is cleaved by an enzyme. Additionally, a substrate includes a peptide or protein containing an additional moiety that does not affect cleavage of the substrate by the enzyme. For example, a substrate can include a four amino acid peptide, or a full-length protein chemically linked to a fluorogenic moiety.

[0141] As used herein, cleavage refers to the breaking of peptide bonds or other bonds by an enzyme that results in one or more degradation products.

[0142] As used herein, activity refers to a functional activity or activities of a polypeptide or portion thereof associated with a full-length (complete) protein. Functional activities include, but are not limited to, biological activity, catalytic or enzymatic activity, antigenicity (ability to bind or compete with a polypeptide for binding to an anti-polypeptide antibody), immunogenicity, ability to form multimers, and the ability to specifically bind to a receptor or ligand for the polypeptide.

[0143] As used herein, enzymatic activity or catalytic activity or cleavage activity refers to the activity of a protease as assessed in in vitro proteolytic assays that detect proteolysis of a selected substrate.

[0144] As used herein, an inactive enzyme refers to an enzyme that exhibits substantially no activity (i.e. catalytic activity or cleavage activity), such as less than 10% of the maximum activity of the enzyme. The enzyme can be inactive by virtue of its conformation, the absence of an activating conditions required for its activity, or the presence of an inhibitor or any other condition or factor or form that renders the enzyme substantially inactive.

[0145] As used herein, “retains an activity” refers to the activity exhibited by a modified MMP polypeptide at a particular condition compared to at another condition or to another polypeptide. For example, it is the activity a modified MMP polypeptide exhibits as compared to an unmodified MMP polypeptide of the same form and under the same conditions. It also can be the activity a modified MMP polypeptide exhibits as compared to the modified MMP polypeptide under different conditions, for example, different temperature conditions. Generally, a modified MMP polypeptide that retains an activity exhibits increased or decreased activity compared to an unmodified polypeptide under the same conditions or compared to the unmodified polypeptide under different conditions. For example, the modified MMP polypeptide can retain 40%, 50%, 60%, 70%, 80%, 90%, 100%, 110%, 120%, 130%, 140%, 150%, 160%, 170%, 180%, 190%, 200%, 300%, 400%, 500% or more of the enzymatic activity.

[0146] As used herein, a human protein is one encoded by a nucleic acid molecule, such as DNA, present in the genome of a human, including all allelic variants and conservative variations thereof. A variant or modification of a protein is a human protein if the modification is based on the wildtype or prominent sequence of a human protein.

[0147] As used herein, hyaluronidase refers to an enzyme that degrades hyaluronic acid. Hyaluronidases include bacterial hyaluronidases (EC 4.2.99.1), hyaluronidases from leeches, other parasites, and crustaceans (EC 3.2.1.36), and mammalian-type hyaluronidases (EC 3.2.1.35). Hyaluronidases also include any of non-human origin including, but not limited to, murine, canine, feline, leporine, avian, bovine, ovine, porcine, equine, piscine, ranine, bacterial, and any from leeches, other parasites, and crustaceans. Exemplary non-human hyaluronidases include any set forth in any of SEQ ID NOS: 3482-3505. Exemplary human hyaluronidases include HYAL1 (SEQ ID NO:3469), HYAL2 (SEQ ID NO:3470), HYAL3 (SEQ ID NO:3471), HYAL4 (SEQ ID NO:3472), and PH20 (SEQ ID NO:3473). Also included amongst hyaluronidases are soluble human PH20 and soluble rHuPH20.

[0148] Reference to hyaluronidases includes precursor hyaluronidase polypeptides and mature hyaluronidase polypeptides (such as those in which a signal sequence has been removed), truncated forms thereof that have activity, and includes allelic variants and species variants, variants encoded by splice variants, and other variants, including polypeptides that have at least 40%, 45%, 50%, 55%, 65%, 70%, 75%, 80%, 85%, 90%, 95%, 96%, 97%, 98%, 99% or more sequence identity to the precursor polypeptide set forth any of SEQ ID NO: 3473 or the mature form thereof. Hyaluronidases also include those that contain chemical or posttranslational modifications and those that do not contain chemical or posttranslational modifications. Such modifications include, but are not limited to, PEGylation, albumination, glycosylation, farnesylation, carboxylation, hydroxylation, phosphorylation, and other polypeptide modifications known in the art.

[0149] As used herein, soluble human PH20 or sHuPH20 include mature polypeptides lacking all or a portion of the glycosylphospatidylinositol (GPI) attachment site at the C-terminus such that upon expression, the polypeptides are soluble. Exemplary sHuPH20 polypeptides include mature polypeptides having an amino acid sequence set forth in any one of SEQ ID NOS:3476-3481. The precursor polypeptides for such exemplary sHuPH20 polypeptides include an amino acid signal sequence. Exemplary of a precursor is set forth in SEQ ID NO:3473, which contains a 35 amino acid signal sequence at amino acid positions 1-35. Soluble HuPH20 polypeptides can be degraded during or after the production and purification methods described herein.

[0150] As used herein, soluble rHuPH20 refers to a soluble form of human PH20 that is recombinantly expressed in Chinese Hamster Ovary (CHO) cells. Soluble rHuPH20 is encoded by nucleic acid that includes the signal sequence and is set forth in SEQ ID NO:3475. Also included are DNA molecules that are allelic variants thereof and other soluble variants. The nucleic acid encoding soluble rHuPH20 is expressed in CHO cells which secrete the mature polypeptide. As produced in the culture medium there is heterogeneity at the C-terminus so that the product includes a mixture of species of SEQ ID NOS:3476-3481. Corresponding allelic variants and other variants also are included. Other variants can have 60%, 70%, 80%, 85%, 90%, 91%, 92%, 93%, 94%, 95%, 96%, 97%, 98%, 99% or more sequence identity with any of SEQ ID NOS:3476-3481 as long they retain a hyaluronidase activity and are soluble.

[0151] As used herein, hyaluronidase activity refers to any activity exhibited by a hyaluronidase polypeptide. Such activities can be tested in vitro and/or in vivo and include, but are not limited to, enzymatic activity, such as to effect cleavage of hyaluronic acid, ability to act as a dispersing or spreading agent and antigenicity.

[0152] As used herein, the residues of naturally occurring α-amino acids are the residues of those 20 α-amino acids found in nature which are incorporated into protein by the specific recognition of the charged tRNA molecule with its cognate mRNA codon in humans.

[0153] As used herein, nucleic acids include DNA, RNA and analogs thereof, including peptide nucleic acids (PNA) and mixtures thereof. Nucleic acids can be single or double-stranded. When referring to probes or primers, which are optionally labeled, such as with a detectable label, such as a fluorescent or radiolabel, single-stranded molecules are contemplated. Such molecules are typically of a length such that their target is statistically unique or of low copy number (typically less than 5, generally less than 3) for probing or priming a library. Generally a probe or primer contains at least 14, 16 or 30 contiguous nucleotides of sequence complementary to or identical to a gene of interest. Probes and primers can be 10, 20, 30, 50, 100 or more nucleic acids long.

[0154] As used herein, a peptide refers to a polypeptide that is from 2 to 40 amino acids in length.

[0155] As used herein, the amino acids which occur in the various sequences of amino acids provided herein are identified according to their known, three-letter or one-letter abbreviations (Table 1). The nucleotides which occur in the various nucleic acid fragments are designated with the standard single-letter designations used routinely in the art.

[0156] As used herein, an “amino acid” is an organic compound containing an amino group and a carboxylic acid group. A polypeptide contains two or more amino acids. For purposes herein, amino acids include the twenty naturally-occurring amino acids, non-natural amino acids and amino acid analogs (i.e., amino acids wherein the α-carbon has a side chain).

[0157] As used herein, “amino acid residue” refers to an amino acid formed upon chemical digestion (hydrolysis) of a polypeptide at its peptide linkages. The amino acid residues described herein are presumed to be in the “L” isomeric form. Residues in the “D” isomeric form, which are so designated, can be substituted for any L-amino acid residue as long as the desired functional property is retained by the polypeptide. NH₂ refers to the free amino group present at the amino terminus of a polypeptide. COOH refers to the free carboxy group present at the carboxyl terminus of a polypeptide. In keeping with standard polypeptide nomenclature described in J. Biol. Chem., 243: 3552-3559 (1969), and adopted 37 C.F.R, §§1.821-1.822, abbreviations for amino acid residues are shown in Table 1:

TABLE 1
Table of Correspondence

SYMBOL

| 1-Letter | 3-Letter | AMINO ACID |
|---|---|---|
| Y | Tyr | Tyrosine |
| G | Gly | Glycine |
| F | Phe | Phenylalanine |
| M | Met | Methionine |
| A | Ala | Alanine |
| S | Ser | Serine |
| I | Ile | Isoleucine |
| L | Leu | Leucine |
| T | Thr | Threonine |
| V | Val | Valine |
| P | Pro | proline |
| K | Lys | Lysine |
| H | His | Histidine |
| Q | Gln | Glutamine |
| E | Glu | glutamic acid |
| Z | Glx | Glu and/or Gln |
| W | Trp | Tryptophan |
| R | Arg | Arginine |
| D | Asp | aspartic acid |
| N | Asn | asparagine |
| B | Asx | Asn and/or Asp |
| C | Cys | Cysteine |
| X | Xaa | Unknown or other |

[0158] It should be noted that all amino acid residue sequences represented herein by formulae have a left to right orientation in the conventional direction of amino-terminus to carboxyl-terminus. In addition, the phrase “amino acid residue” is broadly defined to include the amino acids listed in the Table of Correspondence (Table 1) and modified and unusual amino acids, such as those referred to in 37 C.F.R. §§1.821-1.822, and incorporated herein by reference. Furthermore, it should be noted that a dash at the beginning or end of an amino acid residue sequence indicates a peptide bond to a further sequence of one or more amino acid residues, to an amino-terminal group such as NH₂ or to a carboxyl-terminal group such as COOH.

[0159] As used herein, “naturally occurring amino acids” refer to the 20 L-amino acids that occur in polypeptides.

[0160] As used herein, “non-natural amino acid” refers to an organic compound that has a structure similar to a natural amino acid but has been modified structurally to mimic the structure and reactivity of a natural amino acid. Non-naturally occurring amino acids thus include, for example, amino acids or analogs of amino acids other than the 20 naturally-occurring amino acids and include, but are not limited to, the D-isostereomers of amino acids. Exemplary non-natural amino acids are described herein and are known to those of skill in the art.

[0161] As used herein, suitable conservative substitutions of amino acids are known to those of skill in this art and can be made generally without altering the biological activity of the resulting molecule. Those of skill in this art recognize that, in general, single amino acid substitutions in non-essential regions of a polypeptide do not substantially alter biological activity (see, e.g., Watson et al. Molecular Biology of the Gene, 4th Edition, 1987, The Benjamin/Cummings Pub. co., p. 224). Such substitutions can be made in accordance with those set forth in TABLE 2 as follows:

TABLE 2

| Original residue | Exemplary conservative substitution |
|---|---|
| Ala (A) | Gly; Ser |
| Arg (R) | Lys |
| Asn (N) | Gln; His |
| Cys (C) | Ser |
| Gln (Q) | Asn |
| Glu (E) | Asp |
| Gly (G) | Ala; Pro |
| His (H) | Asn; Gln |
| Ile (I) | Leu; Val |
| Leu (L) | Ile; Val |
| Lys (K) | Arg; Gln; Glu |
| Met (M) | Leu; Tyr; Ile |
| Phe (F) | Met; Leu; Tyr |
| Ser (S) | Thr |
| Thr (T) | Ser |
| Trp (W) | Tyr |
| Tyr (Y) | Trp; Phe |
| Val (V) | Ile; Leu |

Other substitutions also are permissible and can be determined empirically or in accord with known conservative substitutions.

[0162] As used herein, a DNA construct is a single or double stranded, linear or circular DNA molecule that contains segments of DNA combined and juxtaposed in a manner not found in nature. DNA constructs exist as a result of human manipulation, and include clones and other copies of manipulated molecules.

[0163] As used herein, a DNA segment is a portion of a larger DNA molecule having specified attributes. For example, a DNA segment encoding a specified polypeptide is a portion of a longer DNA molecule, such as a plasmid or plasmid fragment, which, when read from the 5′ to 3′ direction, encodes the sequence of amino acids of the specified polypeptide.

[0164] As used herein, the term polynucleotide means a single- or double-stranded polymer of deoxyribonucleotides or ribonucleotide bases read from the 5′ to the 3′ end. Polynucleotides include RNA and DNA, and can be isolated from natural sources, synthesized in vitro, or prepared from a combination of natural and synthetic molecules. The length of a polynucleotide molecule is given herein in terms of nucleotides (abbreviated “nt”) or base pairs (abbreviated “bp”). The term nucleotides is used for single- and double-stranded molecules where the context permits. When the term is applied to double-stranded molecules it is used to denote overall length and will be understood to be equivalent to the term base pairs. It will be recognized by those skilled in the art that the two strands of a double-stranded polynucleotide can differ slightly in length and that the ends thereof can be staggered; thus all nucleotides within a double-stranded polynucleotide molecule can not be paired. Such unpaired ends will, in general, not exceed 20 nucleotides in length.

[0165] As used herein, “similarity” between two proteins or nucleic acids refers to the relatedness between the sequence of amino acids of the proteins or the nucleotide sequences of the nucleic acids. Similarity can be based on the degree of identity and/or homology of sequences of residues and the residues contained therein. Methods for assessing the degree of similarity between proteins or nucleic acids are known to those of skill in the art. For example, in one method of assessing sequence similarity, two amino acid or nucleotide sequences are aligned in a manner that yields a maximal level of identity between the sequences. “Identity” refers to the extent to which the amino acid or nucleotide sequences are invariant. Alignment of amino acid sequences, and to some extent nucleotide sequences, also can take into account conservative differences and/or frequent substitutions in amino acids (or nucleotides). Conservative differences are those that preserve the physico-chemical properties of the residues involved. Alignments can be global (alignment of the compared sequences over the entire length of the sequences and including all residues) or local (the alignment of a portion of the sequences that includes only the most similar region or regions).

[0166] “Identity” per se has an art-recognized meaning and can be calculated using published techniques. (See, e.g.: Computational Molecular Biology, Lesk, A. M., ed., Oxford University Press, New York, 1988; Biocomputing: Informatics and Genome Projects, Smith, D. W., ed., Academic Press, New York, 1993; Computer Analysis of Sequence Data, Part I, Griffin, A. M., and Griffin, H. G., eds., Humana Press, New Jersey, 1994; Sequence Analysis in Molecular Biology, von Heinje, G., Academic Press, 1987; and Sequence Analysis Primer, Gribskov, M. and Devereux, J., eds., M Stockton Press, New York, 1991). While there exists a number of methods to measure identity between two polynucleotide or polypeptides, the term “identity” is well known to skilled artisans (Carillo, H. & Lipton, D., SIAM J Applied Math 48:1073 (1988)).

[0167] As used herein, homologous (with respect to nucleic acid and/or amino acid sequences) means about greater than or equal to 25% sequence homology, typically greater than or equal to 25%, 40%, 50%, 60%, 70%, 80%, 85%, 90% or 95% sequence homology; the precise percentage can be specified if necessary. For purposes herein the terms “homology” and “identity” are often used interchangeably, unless otherwise indicated. In general, for determination of the percentage homology or identity, sequences are aligned so that the highest order match is obtained (see, e.g.: Computational Molecular Biology, Lesk, A. M., ed., Oxford University Press, New York, 1988; Biocomputing: Informatics and Genome Projects, Smith, D. W., ed., Academic Press, New York, 1993; Computer Analysis of Sequence Data, Part I, Griffin, A. M., and Griffin, H. G., eds., Humana Press, New Jersey, 1994; Sequence Analysis in Molecular Biology, von Heinje, G., Academic Press, 1987; and Sequence Analysis Primer, Gribskov, M. and Devereux, J., eds., M Stockton Press, New York, 1991; Carillo et al. (1988) SIAM J Applied Math 48:1073). By sequence homology, the number of conserved amino acids is determined by standard alignment algorithms programs, and can be used with default gap penalties established by each supplier. Substantially homologous nucleic acid molecules would hybridize typically at moderate stringency or at high stringency all along the length of the nucleic acid of interest. Also contemplated are nucleic acid molecules that contain degenerate codons in place of codons in the hybridizing nucleic acid molecule.

[0168] Whether any two molecules have nucleotide sequences or amino acid sequences that are at least 60%, 70%, 80%, 85%, 90%, 95%, 96%, 97%, 98% or 99% “identical” or “homologous” can be determined using known computer algorithms such as the “FASTA” program, using for example, the default parameters as in Pearson et al. (1988) Proc. Natl. Acad. Sci. USA 85:2444 (other programs include the GCG program package (Devereux, J., et al., Nucleic Acids Research 12(I):387 (1984)), BLASTP, BLASTN, FASTA (Atschul, S. F., et al., J Molec Biol 215:403 (1990)); Guide to Huge Computers, Martin J. Bishop, ed., Academic Press, San Diego, 1994, and Carillo et al. (1988) SIAM J Applied Math 48:1073). For example, the BLAST function of the National Center for Biotechnology Information database can be used to determine identity. Other commercially or publicly available programs include, DNAStar “MegAlign” program (Madison, Wis.) and the University of Wisconsin Genetics Computer Group (UWG) “Gap” program (Madison Wis.). Percent homology or identity of proteins and/or nucleic acid molecules can be determined, for example, by comparing sequence information using a GAP computer program (e.g., Needleman et al. (1970) J. Mol. Biol. 48:443, as revised by Smith and Waterman ((1981) Adv. Appl. Math. 2:482). Briefly, the GAP program defines similarity as the number of aligned symbols (i.e., nucleotides or amino acids), which are similar, divided by the total number of symbols in the shorter of the two sequences. Default parameters for the GAP program can include: (1) a unary comparison matrix (containing a value of 1 for identities and 0 for non-identities) and the weighted comparison matrix of Gribskov et al. (1986) Nucl. Acids Res. 14:6745, as described by Schwartz and Dayhoff, eds., ATLAS OF PROTEIN SEQUENCE AND STRUCTURE, National Biomedical Research Foundation, pp. 353-358 (1979); (2) a penalty of 3.0 for each gap and an additional 0.10 penalty for each symbol in each gap; and (3) no penalty for end gaps.

[0169] Therefore, as used herein, the term “identity” or “homology” represents a comparison between a test and a reference polypeptide or polynucleotide. As used herein, the term at least “90% identical to” refers to percent identities from 90 to 99.99 relative to the reference nucleic acid or amino acid sequence of the polypeptide. Identity at a level of 90% or more is indicative of the fact that, assuming for exemplification purposes a test and reference polypeptide length of 100 amino acids are compared, no more than 10% (i.e., 10 out of 100) of the amino acids in the test polypeptide differs from that of the reference polypeptide. Similar comparisons can be made between test and reference polynucleotides. Such differences can be represented as point mutations randomly distributed over the entire length of a polypeptide or they can be clustered in one or more locations of varying length up to the maximum allowable, e.g. 10/100 amino acid difference (approximately 90% identity). Differences are defined as nucleic acid or amino acid substitutions, insertions or deletions. At the level of homologies or identities above about 85-90%, the result should be independent of the program and gap parameters set; such high levels of identity can be assessed readily, often by manual alignment without relying on software.

[0170] As used herein, an aligned sequence refers to the use of homology (similarity and/or identity) to align corresponding positions in a sequence of nucleotides or amino acids. Typically, two or more sequences that are related by 50% or more identity are aligned. An aligned set of sequences refers to 2 or more sequences that are aligned at corresponding positions and can include aligning sequences derived from RNAs, such as ESTs and other cDNAs, aligned with genomic DNA sequence.

[0171] As used herein, “primer” refers to a nucleic acid molecule that can act as a point of initiation of template-directed DNA synthesis under appropriate conditions (e.g., in the presence of four different nucleoside triphosphates and a polymerization agent, such as DNA polymerase, RNA polymerase or reverse transcriptase) in an appropriate buffer and at a suitable temperature. It will be appreciated that certain nucleic acid molecules can serve as a “probe” and as a “primer.” A primer, however, has a 3′ hydroxyl group for extension. A primer can be used in a variety of methods, including, for example, polymerase chain reaction (PCR), reverse-transcriptase (RT)-PCR, RNA PCR, LCR, multiplex PCR, panhandle PCR, capture PCR, expression PCR, 3′ and 5′ RACE, in situ PCR, ligation-mediated PCR and other amplification protocols.

[0172] As used herein, “primer pair” refers to a set of primers that includes a 5′ (upstream) primer that hybridizes with the 5′ end of a sequence to be amplified (e.g. by PCR) and a 3′ (downstream) primer that hybridizes with the complement of the 3′ end of the sequence to be amplified.

[0173] As used herein, “specifically hybridizes” refers to annealing, by complementary base-pairing, of a nucleic acid molecule (e.g. an oligonucleotide) to a target nucleic acid molecule. Those of skill in the art are familiar with in vitro and in vivo parameters that affect specific hybridization, such as length and composition of the particular molecule. Parameters particularly relevant to in vitro hybridization further include annealing and washing temperature, buffer composition and salt concentration. Exemplary washing conditions for removing non-specifically bound nucleic acid molecules at high stringency are 0.1×SSPE, 0.1% SDS, 65° C., and at medium stringency are 0.2×SSPE, 0.1% SDS, 50° C. Equivalent stringency conditions are known in the art. The skilled person can readily adjust these parameters to achieve specific hybridization of a nucleic acid molecule to a target nucleic acid molecule appropriate for a particular application. Complementary, when referring to two nucleotide sequences, means that the two sequences of nucleotides are capable of hybridizing, typically with less than 25%, 15% or 5% mismatches between opposed nucleotides. If necessary, the percentage of complementarity will be specified. Typically the two molecules are selected such that they will hybridize under conditions of high stringency.

[0174] As used herein, substantially identical to a product means sufficiently similar so that the property of interest is sufficiently unchanged so that the substantially identical product can be used in place of the product.

[0175] As used herein, it also is understood that the terms “substantially identical” or “similar” varies with the context as understood by those skilled in the relevant art.

[0176] As used herein, an allelic variant or allelic variation references any of two or more alternative forms of a gene occupying the same chromosomal locus. Allelic variation arises naturally through mutation, and can result in phenotypic polymorphism within populations. Gene mutations can be silent (no change in the encoded polypeptide) or can encode polypeptides having altered amino acid sequence. The term “allelic variant” also is used herein to denote a protein encoded by an allelic variant of a gene. Typically the reference form of the gene encodes a wildtype form and/or predominant form of a polypeptide from a population or single reference member of a species. Typically, allelic variants, which include variants between and among species typically have at least 80%, 90% or greater amino acid identity with a wildtype and/or predominant form from the same species; the degree of identity depends upon the gene and whether comparison is interspecies or intraspecies. Generally, intraspecies allelic variants have at least about 80%, 85%, 90% or 95% identity or greater with a wildtype and/or predominant form, including 96%, 97%, 98%, 99% or greater identity with a wildtype and/or predominant form of a polypeptide. Reference to an allelic variant herein generally refers to variations n proteins among members of the same species.

[0177] As used herein, “allele,” which is used interchangeably herein with “allelic variant” refers to alternative forms of a gene or portions thereof. Alleles occupy the same locus or position on homologous chromosomes. When a subject has two identical alleles of a gene, the subject is said to be homozygous for that gene or allele. When a subject has two different alleles of a gene, the subject is said to be heterozygous for the gene. Alleles of a specific gene can differ from each other in a single nucleotide or several nucleotides, and can include substitutions, deletions and insertions of nucleotides. An allele of a gene also can be a form of a gene containing a mutation.

[0178] As used herein, species variants refer to variants in polypeptides among different species, including different mammalian species, such as mouse and human.

[0179] As used herein, a splice variant refers to a variant produced by differential processing of a primary transcript of genomic DNA that results in more than one type of mRNA.

[0180] As used herein, modification is in reference to modification of a sequence of amino acids of a polypeptide or a sequence of nucleotides in a nucleic acid molecule and includes deletions, insertions, and replacements of amino acids and nucleotides, respectively. Methods of Modifying a polypeptide are routine to those of skill in the art, such as by using recombinant DNA methodologies.

[0181] As used herein, the term promoter means a portion of a gene containing DNA sequences that provide for the binding of RNA polymerase and initiation of transcription. Promoter sequences are commonly, but not always, found in the 5′ non-coding region of genes.

[0182] As used herein, isolated or purified polypeptide or protein or biologically-active portion thereof is substantially free of cellular material or other contaminating proteins from the cell or tissue from which the protein is derived, or substantially free from chemical precursors or other chemicals when chemically synthesized. Preparations can be determined to be substantially free if they appear free of readily detectable impurities as determined by standard methods of analysis, such as thin layer chromatography (TLC), gel electrophoresis and high performance liquid chromatography (HPLC), used by those of skill in the art to assess such purity, or sufficiently pure such that further purification would not detectably alter the physical and chemical properties, such as enzymatic and biological activities, of the substance. Methods for purification of the compounds to produce substantially chemically pure compounds are known to those of skill in the art. A substantially chemically pure compound, however, can be a mixture of stereoisomers. In such instances, further purification might increase the specific activity of the compound.

[0183] The term substantially free of cellular material includes preparations of proteins in which the protein is separated from cellular components of the cells from which it is isolated or recombinantly-produced. In one embodiment, the term substantially free of cellular material includes preparations of enzyme proteins having less that about 30% (by dry weight) of non-enzyme proteins (also referred to herein as a contaminating protein), generally less than about 20% of non-enzyme proteins or 10% of non-enzyme proteins or less that about 5% of non-enzyme proteins. When the enzyme protein is recombinantly produced, it also is substantially free of culture medium, i.e., culture medium represents less than about or at 20%, 10% or 5% of the volume of the enzyme protein preparation.

[0184] As used herein, the term substantially free of chemical precursors or other chemicals includes preparations of enzyme proteins in which the protein is separated from chemical precursors or other chemicals that are involved in the synthesis of the protein. The term includes preparations of enzyme proteins having less than about 30% (by dry weight) 20%, 10%, 5% or less of chemical precursors or non-enzyme chemicals or components.

[0185] As used herein, synthetic, with reference to, for example, a synthetic nucleic acid molecule or a synthetic gene or a synthetic peptide refers to a nucleic acid molecule or polypeptide molecule that is produced by recombinant methods and/or by chemical synthesis methods.

[0186] As used herein, production by recombinant means by using recombinant DNA methods means the use of the well known methods of molecular biology for expressing proteins encoded by cloned DNA.

[0187] As used herein, vector (or plasmid) refers to discrete elements that are used to introduce a heterologous nucleic acid into cells for either expression or replication thereof. The vectors typically remain episomal, but can be designed to effect integration of a gene or portion thereof into a chromosome of the genome. Also contemplated are vectors that are artificial chromosomes, such as yeast artificial chromosomes and mammalian artificial chromosomes. Selection and use of such vehicles are well known to those of skill in the art.

[0188] As used herein, an expression vector includes vectors capable of expressing DNA that is operatively linked with regulatory sequences, such as promoter regions, that are capable of effecting expression of such DNA fragments. Such additional segments can include promoter and terminator sequences, and optionally can include one or more origins of replication, one or more selectable markers, an enhancer, a polyadenylation signal, and the like. Expression vectors are generally derived from plasmid or viral DNA, or can contain elements of both. Thus, an expression vector refers to a recombinant DNA or RNA construct, such as a plasmid, a phage, recombinant virus or other vector that, upon introduction into an appropriate host cell, results in expression of the cloned DNA. Appropriate expression vectors are well known to those of skill in the art and include those that are replicable in eukaryotic cells and/or prokaryotic cells and those that remain episomal or those which integrate into the host cell genome.

[0189] As used herein, vector also includes “virus vectors” or “viral vectors.” Viral vectors are engineered viruses that are operatively linked to exogenous genes to transfer (as vehicles or shuttles) the exogenous genes into cells.

[0190] As used herein, operably or operatively linked when referring to DNA segments means that the segments are arranged so that they function in concert for their intended purposes, e.g., transcription initiates in the promoter and proceeds through the coding segment to the terminator.

[0191] As used herein the term assessing is intended to include quantitative and qualitative determination in the sense of obtaining an absolute value for the activity of a protease, or a domain thereof, present in the sample, and also of obtaining an index, ratio, percentage, visual or other value indicative of the level of the activity. Assessment can be direct or indirect and the chemical species actually detected need not of course be the proteolysis product itself but can for example be a derivative thereof or some further substance. For example, detection of a cleavage product of a substrate, such as by SDS-PAGE and protein staining with Coomasie blue.

[0192] As used herein, biological activity refers to the in vivo activities of a compound or physiological responses that result upon in vivo administration of a compound, composition or other mixture. Biological activity, thus, encompasses therapeutic effects and pharmaceutical activity of such compounds, compositions and mixtures. Biological activities can be observed in in vitro systems designed to test or use such activities. Thus, for purposes herein a biological activity of a protease is its catalytic activity in which a polypeptide is hydrolyzed.

[0193] As used herein equivalent, when referring to two sequences of nucleic acids, means that the two sequences in question encode the same sequence of amino acids or equivalent proteins. When equivalent is used in referring to two proteins or peptides, it means that the two proteins or peptides have substantially the same amino acid sequence with only amino acid substitutions that do not substantially alter the activity or function of the protein or peptide. When equivalent refers to a property, the property does not need to be present to the same extent (e.g., two peptides can exhibit different rates of the same type of enzymatic activity), but the activities are usually substantially the same.

[0194] As used herein, “modulate” and “modulation” or “alter” refer to a change of an activity of a molecule, such as a protein. Exemplary activities include, but are not limited to, biological activities, such as signal transduction. Modulation can include an increase in the activity (i.e., up-regulation or agonist activity) a decrease in activity (i.e., down-regulation or inhibition) or any other alteration in an activity (such as a change in periodicity, frequency, duration, kinetics or other parameter). Modulation can be context dependent and typically modulation is compared to a designated state, for example, the wildtype protein, the protein in a constitutive state, or the protein as expressed in a designated cell type or condition.

[0195] As used herein, a composition refers to any mixture. It can be a solution, suspension, liquid, powder, paste, aqueous, non-aqueous or any combination thereof.

[0196] As used herein, a combination refers to any association between or among two or more items. The combination can be two or more separate items, such as two compositions or two collections, can be a mixture thereof, such as a single mixture of the two or more items, or any variation thereof. The elements of a combination are generally functionally associated or related.

[0197] As used herein, a kit is a packaged combination that optionally includes other elements, such as additional reagents and instructions for use of the combination or elements thereof.

[0198] As used herein, “disease or disorder” refers to a pathological condition in an organism resulting from cause or condition including, but not limited to, infections, acquired conditions, genetic conditions, and characterized by identifiable symptoms. Diseases and disorders of interest herein are those involving components of the ECM.

[0199] As used herein, an ECM-mediated disease or condition is one where any one or more ECM components is involved in the pathology or etiology. For purposes herein, an ECM-mediated disease or conditions includes those that are caused by an increased deposition or accumulation of one or more ECM component. Such conditions include, but are not limited to, cellulite, Duputyren's syndrome, Peyronie's disease, frozen shoulders, existing scars such as keloids, scleroderma and lymphedema.

[0200] As used herein, “treating” a subject with a disease or condition means that the subject's symptoms are partially or totally alleviated, or remain static following treatment. Hence treatment encompasses prophylaxis, therapy and/or cure. Prophylaxis refers to prevention of a potential disease and/or a prevention of worsening of symptoms or progression of a disease. Treatment also encompasses any pharmaceutical use of a modified interferon and compositions provided herein.

[0201] As used herein, a pharmaceutically effective agent, includes any therapeutic agent or bioactive agents, including, but not limited to, for example, anesthetics, vasoconstrictors, dispersing agents, conventional therapeutic drugs, including small molecule drugs and therapeutic proteins.

[0202] As used herein, treatment means any manner in which the symptoms of a condition, disorder or disease or other indication thereof is/are ameliorated or otherwise beneficially altered.

[0203] As used herein therapeutic effect means an effect resulting from treatment of a subject that alters, typically improves or ameliorates the symptoms of a disease or condition or that cures a disease or condition. A therapeutically effective amount refers to the amount of a composition, molecule or compound which results in a therapeutic effect following administration to a subject. A therapeutically effective amount effects treatment.

[0204] As used herein, the term “subject” refers to an animal, including a mammal, such as a human being.

[0205] As used herein, a patient refers to a human subject.

[0206] As used herein, amelioration of the symptoms of a particular disease or disorder by a treatment, such as by administration of a pharmaceutical composition or other therapeutic, refers to any lessening, whether permanent or temporary, lasting or transient, of the symptoms that can be attributed to or associated with administration of the composition or therapeutic.

[0207] As used herein, prevention or prophylaxis refers to methods in which the risk of developing disease or condition is reduced.

[0208] As used herein, an effective amount is the quantity of a therapeutic agent necessary for preventing, curing, ameliorating, arresting or partially arresting a symptom of a disease or disorder.

[0209] As used herein, unit dose form refers to physically discrete units suitable for human and animal subjects and packaged individually as is known in the art.

[0210] As used herein, a single dosage formulation refers to a formulation for direct administration.

[0211] As used herein, an “article of manufacture” is a product that is made and sold. As used throughout this application, the term is intended to encompass activatable matrix degrading enzymes contained in articles of packaging.

[0212] As used herein, fluid refers to any composition that can flow. Fluids thus encompass compositions that are in the form of semi-solids, pastes, solutions, aqueous mixtures, gels, lotions, creams and other such compositions.

[0213] As used herein, a “kit” refers to a combination of an activatable matrix-degrading enzyme provided herein and another item for a purpose including, but not limited to, activation, administration, diagnosis, and assessment of a biological activity or property. Kits optionally include instructions for use.

[0214] As used herein, a cellular extract or lysate refers to a preparation or fraction which is made from a lysed or disrupted cell.

[0215] As used herein, animal includes any animal, such as, but are not limited to primates including humans, gorillas and monkeys; rodents, such as mice and rats; fowl, such as chickens; ruminants, such as goats, cows, deer, sheep; ovine, such as pigs and other animals. Non-human animals exclude humans as the contemplated animal. The enzymes provided herein are from any source, animal, plant, prokaryotic and fungal. Most enzymes are of animal origin, including mammalian origin.

[0216] As used herein, a control refers to a sample that is substantially identical to the test sample, except that it is not treated with a test parameter, or, if it is a plasma sample, it can be from a normal volunteer not affected with the condition of interest. A control also can be an internal control.

[0217] As used herein, the singular forms “a,” “an” and “the” include plural referents unless the context clearly dictates otherwise. Thus, for example, reference to a compound, comprising “an extracellular domain” includes compounds with one or a plurality of extracellular domains.

[0218] As used herein, ranges and amounts can be expressed as “about” a particular value or range. About also includes the exact amount. Hence “about 5 bases” means “about 5 bases” and also “5 bases.”

[0219] As used herein, “optional” or “optionally” means that the subsequently described event or circumstance does or does not occur, and that the description includes instances where said event or circumstance occurs and instances where it does not. For example, an optionally substituted group means that the group is unsubstituted or is substituted.

[0220] As used herein, the abbreviations for any protective groups, amino acids and other compounds, are, unless indicated otherwise, in accord with their common usage, recognized abbreviations, or the IUPAC-IUB Commission on Biochemical Nomenclature (see, (1972) Biochem. 11:1726).

### B. OVERVIEW

### Temperature Sensitive Matrix Metalloproteases and Other Modified Metalloproteases

[0221] Provided herein are modified MMP polypeptides, for example temperature sensitive (ts) mutants of matrix metalloproteases (tsMMPs), that degrade one or more components of the extracellular matrix (ECM). The tsMMPs can degrade one or more components of the ECM in a temperature-dependent manner. In particular, mutants provided herein degrade a collagen. In some examples, the mutants display higher activity at lower temperatures (e.g. 25° C.) then at higher temperatures, for example, physiologic temperatures (e.g. 37° C.). In other examples, the mutants display higher activity at physiologic temperatures then at lower temperatures. Thus, the activation of the tsMMPs, for example upon administration to the body, can be temporally and conditionally controlled by virtue of changes in temperature.

[0222] Uncontrolled MMP activity can be highly disruptive to tissue integrity. By virtue of the conditional activation of activatable tsMMPs, temporary activation is achieved, thereby regulating the duration of enzymatic action on extracellular matrix (ECM) components to reduce deleterious side effects associated with unwanted prolonged activation of enzymes. This is an advantage of the present tsMMPs over existing collagenase treatments. Hence, an advantage of such mutants is that their activity can be regulated, thereby permitting the use of tsMMPs to treat diseases and/or conditions of the ECM.

[0223] Modified MMP polypeptides provided herein are modified to exhibit temperature sensitivity via increased activity at a permissive temperature compared to a nonpermissive temperature and/or are modified as activity mutants to exhibit increased activity compared to the MMP polypeptide not containing the modification. The modified MMP polypeptides provided herein are modified, for example, by amino acid substitution, insertion or replacement. For example, tsMMPs contain one or more amino acid replacements in their primary sequence rendering the protein more active at permissive temperatures then at non-permissive temperatures. Modified MMP polypeptides provided herein can contain 1, 2, 3, 4, 5, 6, 7, 8, 9, 10, 11, 12, 13, 14, 15, 16, 17, 18, 19, 20 or more amino acid modifications. In particular, modified MMP polypeptides, for example tsMMPs, provided herein contain 1, 2, 3, 4, 5, 6, 7, 8, 9 or 10 amino acids modifications.

[0224] tsMMPs provided herein are activatable at a permissive temperature, but are less active or inactive at other non-permissive temperatures. The tsMMPs provided herein have a ratio of activity at a permissive temperature compared to a non-permissive temperature that is or is about 1.1, 1.2, 1.3, 1.4, 1.5, 1.6, 1.7, 1.8, 1.9, 2.0, 2.5, 3.0, 3.5, 4.0, 4.5, 5, 5.5, 6, 6.5, 7, 7.5, 8, 8.5, 9, 9.5, 10, 15, 20, 30, 40, 50 or more. Thus, the activity of the tsMMPs provided herein at the non-permissive temperature is or is about 70%, 65%, 60%, 55%, 50%, 45%, 40%, 35%, 30%, 25%, 20%, 15%, 10%, 5%, 4%, 3%, 2%, 1%, 0.5% or less of the activity at a permissive temperature.

[0225] For example, MMPs that are normally active at physiological temperature (e.g. 37° C.) are modified and enzymes selected that are active at lower temperatures, i.e. temperatures below the physiological temperature of the body (e.g. less than 37° C.; e.g. at or about 20° C., 21° C., 22° C., 23° C., 24° C., 25° C., 26° C., 27° C., 28° C., 29° C. or 30° C.), but that are less active or inactive at physiologic temperature. Such modified enzymes can be used as activatable matrix-degrading enzymes (AMDE) where the activation condition is low temperature. The activation of the enzyme is temporally controlled as the in vivo temperature returns to the physiological temperature of 37° C. Thus, for example, tsMMPs provided herein are active at a permissive temperature that is at or about 25° C., but are less active at higher temperatures such as at or about 33° C., 34° C., 35° C., 36° C., 37° C., 38° C. or 39° C. The tsMMPs provided herein have a ratio of activity at the permissive temperature of at or about 25° C. compared to a non-permissive temperature of at or about 34° C. or 37° C., for example, 33° C., 34° C., 35° C., 36° C., 37° C., 38° C. or 39° C., that is or is about 1.1, 1.2, 1.3, 1.4, 1.5, 1.6, 1.7, 1.8, 1.9, 2.0, 2.5, 3.0, 3.5, 4.0, 4.5, 5, 5.5, 6, 6.5, 7, 7.5, 8, 8.5, 9, 9.5, 10, 15, 20, 30, 40, 50 or more. Thus, the activity of the tsMMPs provided herein at the non-permissive temperature of at or about 34° C. or 37° C. is or is about 70%, 65%, 60%, 55%, 50%, 45%, 40%, 35%, 30%, 25%, 20%, 15%, 10%, 5%, 4%, 3%, 2%, 1%, 0.5% or less of the activity at the permissive temperature at or about 25° C.

[0226] For example, modified MMPs polypeptides provided herein, in particular modified MMP-1 polypeptides, that exhibit temperature sensitivity are conditionally active and can be used in uses, methods and processes of treating ECM-mediated diseases and disorders. For example, such tsMMP polypeptides are active at a permissive temperature that is below the normal temperature of the ECM. Thus, when administered to the ECM at or below the permissive temperature, the enzymes exhibit activity. In one example, before administration, a tsMMP, for example tsMMP-1, can be reconstituted in a cold buffer and/or can be stored at a cold temperature that that is at or below the permissive temperature. The tsMMP exhibits activity when exposed to the permissive temperature (e.g. 18° C. to 25° C.). As the tsMMP is exposed to a steadily warmer temperature approaching or reaching the nonpermissive temperature, for example upon administration to the body due to the physiologic temperature of the body, the activity of the MMP is reduced. Thus, the tsMMP exhibits conditional activity, conditioned upon maintenance of a permissive temperature. For example, the activity of the ECM can be controlled for a predetermined time by maintaining the ECM below the physiological temperature of the body.

[0227] Thus, where the activating condition is temperature, an activator can be provided that exposes the tsMMP to the permissive temperature required for activation. The exposure to the activator can be in vitro or in vivo. The activator can be exposed to the tsMMP prior to, simultaneously, subsequently or intermittently upon in vivo administration. The activator can provide the requisite heat or cold required for activation. For example, where the activating condition is low temperature, the activator can be provided as a cold buffer or as an ice pack to be applied to the site of administration. Where the activating condition is heat, the activator can be provided as a warm buffer or as a heat pack to be applied to the site of administration. The activating condition also can be provided by storage of the tsMMP at the permissive temperature immediately and just prior to use. The duration of exposure to the activator can be continuous, can be for a predetermined time, or can be intermittent (for example, if the tsMMP is reversible). Thus, the time period permitting activation is flexible and can be adapted to the particular enzyme that is used, the disease or condition being treated, the site of administration or other factors. It is within the level of the skilled artisan to determine the duration of exposure to the activator.

[0228] In the absence of exposure to the activator providing the activating condition, the tsMMPs present at the non-permissive temperature are inactive or substantially inactive compared to the activity at the permissive temperature. The activating condition of a permissive temperature (e.g. low temperature) not normally present at the site of administration permits the temporal regulation of, and alteration of, the physiological parameters of organs and tissues, such as the interstitium that exhibits a physiologic temperature of approximately 37° C. Under normal physiological conditions, the temperature of the interstitium is approximately 37° C. Thus, for example, tsMMPs active at low temperatures, when present in the interstitium would normally be catalytically inactive because of the physiologic temperature of the interstitium. When the temperature of the interstitium is temporarily rendered cold, for example, by exposure to a cold buffer or to a cold pack administered on the adjacent surface, tsMMPs when administered to the interstitium will become activated. When the temperature increases and returns to physiological levels, then the tsMMPs become inactive or substantially inactive and cease to exert their enzymatic activity. Hence, by taking advantage of the requirement for exogenous activating conditions, tsMMPs are activatable and can be made temporally active for a limited duration during use, such as upon in vivo administration to the body.

[0229] The tsMMPs provided herein include those that are irreversibly inactive following exposure to non-permissive temperatures. Such mutants are active when exposed to permissive temperature conditions (e.g. 25° C.), but are less active or inactive when the temperature is altered to a non-permissive temperatures (e.g. 37° C., such as can occur upon in vivo administration to the body and removal of an exogenous activator (e.g. cold pack)). Upon return to permissive conditions, irreversible tsMMP polypeptides provided herein exhibit at or about 50%, 60%, 70%, 80%, 90%, 100%, 105%, 110%, 115%, or 120% the activity at non-permissive temperatures. The activity is not reversible.

[0230] Also provided herein are tsMMPs that are reversibly inactive following exposure to a non-permissive temperature. Such mutants are active when exposed to a permissive temperature condition, but are less active or inactive when the temperature is altered to a non-permissive temperatures. Upon renewed exposure to an activating condition providing the permissive temperature (e.g. cold pack), the activity of the tsMMP is restored, thereby rendering the enzyme sufficiently active to degrade one or more components of the ECM. For example, upon return to permissive conditions from nonpermissive conditions, reversible tsMMP polypeptides provided herein exhibit at or about 120%, 125%, 130%, 140%, 150%, 160%, 170%, 180%, 200% or more the activity at non-permissive temperatures.

[0231] tsMMPs provided herein retain one or more activities of wildtype MMP, for example, enzymatic activity for cleavage of an ECM component such as collagen. For example, a tsMMP provided herein retains an activity at the permissive temperature that is or is about 30%, 40%, 50%, 60%, 70%, 80%, 90%, 100%, 110%, 120%, 140%, 150% or more the activity of wildtype MMP at the permissive temperature. Thus, tsMMPs provided herein include those that are more active than wildtype MMP-1 at the permissive temperature, and also those that are less active than wildtype MMP-1 at the permissive temperature. Generally, tsMMPs provided herein, however, are less active then wildtype MMP-1 at the nonpermissive temperature. For example, tsMMPs provided herein exhibit 95%, 90%, 80%, 70%, 65%, 60%, 55%, 50%, 45%, 40%, 35%, 30%, 25%, 20%, 15%, 10%, 5%, 4%, 3%, 2%, 1%, 0.5%, generally 40%, 30%, 25%, 20%, 15%, 10%, or 5% residual activity of wildtype MMP-1 at physiologic temperature (e.g. 34 or 37° C.).

[0232] Typically, modified MMP polypeptides, for example tsMMPs, provided herein are zymogens (containing a propeptide) or processed enzymes (e.g. mature enzymes, lacking a propeptide), or catalytically active forms thereof. As discussed below, most enzymes, including MMPs, are zymogens and require an initial processing event for activity by removal of a propeptide segment from the N-terminal end of the polypeptide. A processing agent, such as a protease or chemical agent, directly or indirectly initiates one or more cleavage events to generate an active MMP by virtue of removal of the propeptide segment and/or conformational changes that expose the active site of the MMP. Hence, normally, upon processing of an enzyme to a mature form, the enzyme is active. The activity of a processed enzyme is not reversible, thereby leading to uncontrolled degradation of the ECM upon administration of the processed enzyme to the body. It is contemplated herein that modification of the enzyme to additionally confer temperature sensitivity provides a mechanism to conditionally and temporally control activation of the MMP to avoid continued activation of the processed MMP.

[0233] Any MMP, whether synthetic or isolated from natural sources, such as those set forth in Table 5 or elsewhere herein, mature forms thereof lacking the propeptide, and catalytically active forms including polypeptides containing only the catalytically active domain or a portion thereof, and allelic or species variants or other variants thereof, or any known to those of skill in the art can be modified as described herein to be temperature sensitive and/or have increased activity and is intended for use in the compositions, combinations, methods and apparatus provided herein. It is understood that any modified enzyme form provided herein exhibits increased activity and/or temperature sensitivity, i.e. the enzyme is activatable due to the requirement of a temperature activating condition. Exemplary MMPs that can be modified, for example to be temperature sensitive, are set forth in Table 1 and include, for example, any of SEQ ID NOS: 1, 711, 714, 717, 720, 723, 726, 729, 732, 735, 738, 741, 744, 747, 750, 753, 756, 759, 762, 765, 768, 771, 774 or 777, zymogen forms or mature forms thereof, catalytically active forms thereof, and allelic or species variants or other variants thereof, so long as the other forms contain the mutation conferring temperature sensitivity and/or increased activity. For example, SEQ ID NO:2 is the zymogen form of SEQ ID NO:1. FIG. 1 exemplifies the zymogen form of other exemplary MMPs. One of skill in the art knows or could identify tsMMPs. For example, one of skill in the art could use routine molecular biology techniques to introduce amino acid mutation(s) herein into an MMP, and test each for enzyme activation under temperature permissive and non-permissive temperatures to assess the requirement of an exogenous activating condition for sustained or reversible activation of any desired enzyme. Exemplary assays for enzyme activation are provided herein and known in the art.

[0234] Hence, modified MMP polypeptides, for example tsMMPs, provided herein include zymogen forms (e.g. proenzyme), processed mature forms lacking a propeptide, and polypeptides containing only the catalytically active domains thereof. For example, tsMMPs include zymogen forms (e.g. proenzyme), processed mature forms lacking a propeptide, and polypeptides containing only the catalytically active domains thereof, so long as the tsMMPs exhibits enzymatic activity at the permissive temperature. Exemplary of such a tsMMP is a tsMMP-1. tsMMP-1 provided herein contains one or more amino acid modifications in its primary sequence corresponding to amino acid replacements in a wildtype MMP-1 set forth in SEQ ID NO:2. Exemplary modifications are described elsewhere herein in Section D. The modified MMPs, for example tsMMP-1 mutants or activity mutants, provided herein include those that are zymogens or those that are in a mature form lacking a propeptide. The zymogen or mature polypeptides provided herein include those that are full-length, include all or a portion of the proline rich linker or the hemopexin binding domain, lack all or a portion of the proline rich linker or the hemopexin binding domain, or polypeptides that include only the catalytically active domains thereof (e.g. corresponding to amino acids 81-242 of the sequence of amino acids set forth in SEQ ID NO:1) so long as the tsMMP-1 retains enzymatic activity at the permissive temperature and/or exhibits increased activity.

[0235] It is understood that when provided in zymogen form, the modified MMP polypeptides, for example tsMMPs, are inactive and that processing by a processing agent is required for activity. Generally, the processing of the enzyme is effected prior to use, such as prior to administration in vivo. For example, the processing agent can be applied simultaneously, intermittently or subsequently to exposure of the tsMMP to the activating condition (e.g. low temperature) and administration to the body. Generally, the processing agent is chosen that is acceptable for administration to a subject. If desired, the processing agent can be dialyzed or otherwise purified away from the enzyme preparation before administrations. Thus, for zymogen forms of the enzyme, two steps are required for activation: 1) exposure to a processing agent; and 2) exposure to an activating condition. Whether in zymogen or processed form, exposure of the tsMMP to an activator at the permissive temperature temporally controls activity of a tsMMP.

[0236] Modified MMP polypeptides, for example tsMMPs, provided herein can be further modified to alter any one or more properties or activities. For example, altered properties or activities include, but are not limited to, modification that render the enzyme more stable, alter the substrate specificity and/or increase resistance to one or more inhibitors. In one example, modified MMP polypeptides, for example tsMMPs, can be modified to alter its substrate specificity. For example, an enzyme can be modified to have increased specificity for a particular substrate. Thus, for example, a modified MMP polypeptide, which exhibits substrate specificity for type I and type IV collagen can be modified so that it has increased substrate specificity for type I collagen, and not type IV collagen, and vice versa. If desired, enzyme stability also can be increased by PEGylation or glycosylation of the enzyme.

[0237] Modifications of polypeptides can be achieved by routine molecular biology techniques, and are within the skill of one in the art. For purposes herein, modified MMP polypeptides, for example tsMMPs, retain one or more activities of the wildtype MMP at the permissive temperature. Retained activity can be 40%, 50%, 60%, 70%, 80%, 90%, 95% or more activity of the wildtype MMP at the permissive temperature. Modified enzymes can be tested for their substrate specificity using routine assays for substrate cleavage such as is described herein, or known in the art. For example, substrate cleavage can be assessed on fluorogenic peptides or on purified proteins. Cleavage can be assessed using in vitro or in vivo assays. For example, cleavage can be assessed by incubating the enzyme with the substrate, and then running the mixture on an SDS-PAGE gel. Degradation can be assessed by Western Blot or by using standard protein stains such as Coomasie Blue or Silver Stain reagents.

[0238] The modified MMP polypeptides, for example tsMMPs, are provided herein as compositions, combinations and containers. The modified MMPs, for example tsMMP, are provided in a therapeutically effective amount, that when activated, degrade one or more components of the ECM upon administration, such as upon sub-epidermal administration. The resulting modified MMPs, for example tsMMPs, can be used as therapeutics to treat ECM-mediated diseases or conditions. A description of compositions, combinations, containers and methods of using activatable matrix-degrading proteins is provided in related U.S. Provisional Application Nos. 61/068,667 and 61/127,725, U.S. patent application Ser. No. 12/81,063 and International PCT Application No. PCT/US2009/001489, each incorporated by reference in their entirety. Such description of the compositions, combinations, containers and methods can be used for the purpose of preparing and providing compositions, combinations and containers of modified MMPs, for example tsMMPs, and use thereof for treating ECM-mediated diseases and conditions.

[0239] For example, the tsMMPs are provided in compositions, combinations and/or containers with an activator that provides the activating condition. In some examples, modified MMPs, for example tsMMPs, also are provided in compositions, combinations and/or containers with a processing agent. The activator and/or processing agent can be in the same composition or in separate compositions and in the same container or separate containers with the tsMMP. In addition, the modified MMPs, for example tsMMP, also can be combined or provided in combination, such as in containers, with other agents such as any one or more of an anesthetic, alpha-adrenergic agent, dispersing agent, or therapeutic agent. The modified MMPs, for example tsMMPs, can be provided in the same or separate composition as other agents and/or can be provided in the same or separate containers.

[0240] The modified MMPs, for example tsMMPs, can be provided as a liquid or in lyophilized form at a therapeutically effective concentration. Alternatively, the tsMMPs can be provided as a concentrated liquid, such that addition of a sufficient amount of activator results in a therapeutically effective concentration of enzyme. The enzymes can be provided as a solution or suspension or encapsulated into a suitable delivery vehicle, such as a liposome, glass particle, capillary tube, drug delivery vehicle, gelatin, gel, tablet, capsule, pill, time release coating, as well as transdermal patch preparation and dry powder inhalers or other such vehicle. The activator typically is provided as a liquid solution or suspension for administration into the interstitium either alone or following reconstitution of and/or exposure to the tsMMP. In some examples, the activator is provided exogenously and applied at the site of administration. For example, an activator can be a hot or cold pack that can be applied to the site of administration, e.g. the skin, prior to, simultaneously, subsequently or intermittently following administration of a tsMMP. As described below, kits containing these combinations and also articles of manufacture, such as containers, also are provided.

[0241] Thus, when desired, the tsMMP enzyme is subjected to activating conditions in which the enzyme is exposed to an activator to generate an enzyme that is active. Exposure to an activator can be achieved in vitro or in vivo. For example, where an activatable enzyme and activator are separately provided, they can be administered together or separately. Where administered separately, the tsMMP can be administered simultaneously, subsequently or intermittently from the activator. In another example, the tsMMP, in a lyophilized or concentrated liquid form, can be reconstituted with the activator just prior to use. In such an example, the mixture of the tsMMP and activator are administered together. Such methods of activation can be empirically determined by one of skill in the art, and may differ depending on the choice of enzyme and activator, and the method of treatment and treatment regime desired.

[0242] The tsMMP, can be provided in an article or manufacture alone or in combination with the activator. For example, if the enzyme is provided in combination with the activator, an article of manufacture can contain an enzyme, either lyophilized or in liquid form, in one compartment, and buffer that is cold or can be rendered cold in an adjacent compartment. The compartments can be separated by a dividing member. Articles of manufacture can additionally contain a processing agent. Such articles of manufacture are described elsewhere herein.

[0243] The combinations of also can further contain other agents, discussed in detail below. For example, modified MMP polypeptides, for example tsMMP, are provided in combinations containing one or more of a anesthetic, vasoconstrictor, dispersing agent or other therapeutic agent.

[0244] The following sections provide a general overview of the extracellular matrix and diseases thereof, and provide exemplary MMPs for preparation as modified MMPs, for example as temperature-sensitive activatable enzymes; methods of making such modified MMPs; exemplary modified MMPs, for example tsMMPs, that are modified MMP-1 polypeptides; compositions and combinations thereof, and methods of using modified MMP, for example modified MMP-1 polypeptides or compositions to treat ECM-mediated diseases and conditions.

### C. MATRIX METALLOPROTEASES AND THE EXTRACELLULAR MATRIX

[0245] Provided herein are modified matrix metalloproteases (MMPs). The modified MMPs include those that are activatable by temperature and degrade one or more protein components of the extracellular matrix (ECM) in a temperature controlled manner by virtue of increased activity at a permissive temperature compared to a non-permissive temperature. Hence, the modified MMPs are temperature sensitive. By virtue of such temporal in vivo activation, diseases and/or conditions of the ECM can be treated. In another example, also provided herein are modified MMPs that exhibit increased activity compared to an MMP not containing the modifications. Mutations that confer increased activity can be combined with at least one mutation that confers temperature sensitivity to generate modified MMP polypeptides that have increased activity at the permissive temperature compared to the tsMMP not containing the activity mutation. The modified MMP polypeptides, for example tsMMPs, can degrade any component of the ECM; enzyme selection can depend upon the targeted component and/or the particular disease or condition to be treated.

[0246] 1. The Extracellular Matrix

[0247] The ECM makes up the connective tissue or interstitium that surrounds the spaces outside cells and the vascular and lymphatic system, thereby providing mechanical and structural support with and between different tissues. The complex and dynamic microenvironment of the ECM represents a structural and signaling system within connective tissues, such as the skin. Due to the complex nature of the ECM, it can serve diverse functions such as providing support and anchorage for cells, segregating tissues, regulating intercellular communication, and sequestering cellular growth factors. Defects or changes in the organization, or make-up, of the ECM can contribute to a number of diseases or conditions. For example, changes in the synthesis, degradation and organization of collagen fibers contribute to lipodystrophy (e.g., cellulite) and lymphedema.

[0248] The ECM is composed of fibrous structural proteins, such as collagens, polysaccharides, such as proteoglycans and hyaluronic acid, and adhesion proteins that link components of the matrix to each other and to cells. Some connective tissues, such as tendon and cartilage, are principally made up of ECM. The ECM making up the connective tissue of the skin, however, also is distributed with fibroblasts, blood vessels and other components. The ECM also serves as the space where water and its dissolved constituents move from the blood plasma to the lymphatics. The interstitial fluid is nearly isosmotic with the cytoplasm and is bicarbonate buffered providing an extracellular environment that is at neutral pH.

[0249] a. Components of the ECM

[0250] The ECM (also called the interstitial matrix) is a complex three-dimensional dynamic structure that contains numerous structural macromolecules including fibrous proteins such as collagens, elastin and fibronectin, in which glycosyaminoglycans (GAGs) form a hydrated gel-like substance. The components of the ECM are produced by resident cells, typically fibroblasts or cells of the fibroblast family, and are secreted via exocytosis where they interact with other components of the ECM. It is the variation in the relative amount and the way in which the components organize and form together that give rise to diverse connective tissues such as bone, skin or cornea (Albert et al., “Cell Junctions, Cell Adhesions and the Extracellular Matrix.” Molecular Biology of the Cell. New York: Garland Publishers, 1994. Page 972.)

[0251] i. Collagens

[0252] Collagen is the major structural constituent of connective tissues, such as the skin, and plays a role in the development and maintenance of tissue architecture, tissue strength and cell-cell interactions. Collagens include a family of structurally-related proteins of the ECM that contain one or more domains having the conformation of a collagen triple helix (Van der Rest et al. (1991) FASEB J., 5:2814-2823). Collagens contain a Gly-X-Y repeating structure, which allows collagen chains to twist into a helical structure. Each collagen molecule contains three chains twisted around each other to form a triple helix, designated α1-α3. The triple helix structure provides a high mechanical strength to a collagen molecule. There are at least 27 different types of collagens, which differ in amino acid sequence and chain composition. For example, depending on the type of collagen, the three chains forming the triple helix can be the same or different. Collagens can be homotrimeric (i.e. all three polypeptide chains of the triple helix are made up of the same collagen) or can be heterotypic (i.e. fibrils made of more than one collagen type). Collagens can be divided into several families depending on the structure they form. These include fibrillar collagens (also called interstitial collagens; e.g., Type I, II, III, V and XI) and non-fibrillar collagens such as facit (e.g., Type IX, XII, XIV), short chain (e.g., Type VIII, X), basement membrane (e.g., Type IV), and other collagens (e.g., Type VI, VII, and XIII). Table 3 below sets forth common collagen types and their representative location (Van der Rest et al. (1991) FASEB J., 5:2814-2823); www.collagenlife.com/page_{—}1167323108078.html; www.indstate.edu/thcme/mwking/extracellularmatrix.html).

[0253] Among the interstitial collagens, collagen molecules associate to form large fibrils, which have a distinctive banding pattern. The banding pattern results from overlap between adjacent molecules. The strength of collagen fibers is based on a multiplicity of intra- and intermolecular linkages of the collagen fibers that form the dense collagen fiber network of connective tissues. The most common of fibrillar collagens include type I, II and III collagens. Type I collagen is found in most connective tissues such as skin, bone, tendon and cornea, and is a made up of two α1(I) chains and one α2(I) chain ([α1(I)]₂ α2(I)). Type II collagen is homotrimeric ([α1(II)]₃) and is predominantly found in the cartilage. Type III collagen also is homotrimeric gal ([α1(III)]₃) and is predominantly found in the skin and vessels.

[0254] Not all collagens form fibril networks. For example, the basement membrane type IV collagen is non-fibrous and has non-helical interruptions in the helix, which acts as a hinge giving the molecule greater flexibility. Thus, type IV collagen forms a sheet made by a meshwork of filaments rather than by linear fibrils.

[0255] The most abundant protein of the skin is collagen, which is primarily made up of type I (80-85%) and type III (8-11%) collagen. Type I collagen associates with type III collagen to form the major collagen fibers of the dermis. The tensile strength of skin is due predominantly to these fibrillar collagen molecules, which assemble into microfibrils in a head-to-tail and staggered side-to-side lateral arrangement. Collagen molecules become cross-linked to adjacent collagen molecules, creating additional strength and stability in collagen fibers. For example, type V collagen also associates with type I/III collagen fibers, and regulates the fibril diameter. Other collagen types in the skin include, for example, type IV, type VI, type VII, type XII, type XIV and type XVII.

TABLE 3
Types of Collagens

| | | |
|---|---|---|
| Type | Molecule Composition | Representative tissue |

Fibrillar Collagens

| | | |
|---|---|---|
| I | [α1(I)]₂ [α2(I)] | Skin, bone, tendon, dentin, |
| | | ligaments, interstitial tissues |
| II | [α1(II)]₃ | Cartilage, vitreous humor |
| III | [α1(III)]₃ | Skin, muscle, blood vessels; |
| | | frequently associated with type |
| | | I |
| V | [α1(V)][α2(v)][α3(V)] | Similar to Type I, also cell |
| | | cultures, fetal tissues; |
| | | associates with Type I |
| XI | [α1(XI)][α2(XI)][α3(XI)] | Cartilage, intervertebral |
| | | cartilage and bone enamel |

Non-fibrillar collagens

| | | |
|---|---|---|
| IV | [α1(IV)]₂ [α2 (IV)] | Basement membrane |
| VI | [α1(VI)][α2(VI)][α3(VI)] | Most interstitial tissues; |
| | | associates with type I |
| VII | [α1(VII)]₃ | epithelia |
| VIII | [α1(VIII)]₃ | Unknown, some endothelial |
| | | cells |
| IX | [α1(IX)][α2(IX)][α3(IX)] | Cartilage; associates with Type |
| | | II |
| X | [α1(X)]₃ | Heterotrophic and mineralizing |
| | | cartilage |
| XII | [α1(XII)]₃ | Ligaments, tendons and tooth |
| | | enamel; interacts with types I |
| | | and III |

[0256] ii. Elastin

[0257] A network of elastic fibers in the ECM provides flexibility to tissues that require resilience to recoil after stretching, such as the skin, arteries and lungs. The main component of elastic fibers is the elastin molecule, which creates cross-links to adjacent elastin molecules. These molecules form a core of elastic fibers and are covered by fibrillin, a large glycoprotein that binds to elastin and is important for the integrity of elastic fibers.

[0258] iii. Fibronectin

[0259] Fibronectin is a glycoprotein that exists as a pair of two large subunits joined by a pair of disulfide bonds near the carboxyl termini. Each subunit contains functionally distinct domains specific for other matrix macromolecules and receptors on the surface of cells. For example, distinct domains on fibronectin bind collagen (separate domains for types I, II and III), heparin, fibrin and cell surface receptors such as integrins. Fibronectin is present in both plasma and tissue. In tissue, fibronectin functions to link together different types of ECM molecules and cells. It also contains an important cell-binding domain made up of the three amino acids, Arg-Gly-Asp (RGD), which is recognized by integrin receptors in the plasma membranes of cells. The binding of fibronectin molecules to integrin receptors on cells leads to the stimulation of signaling pathways that promote cell attachment, migration and differentiation. These characteristics allow fibronectin to play an important role in cell adhesion and to communicate signals between cells and components of the ECM.

[0260] iv. Glycosaminoglycans (GAGs)

[0261] GAGs are unbranched polysaccharide chains made of repeating disaccharide units that are strongly hydrophilic. GAGs are highly negatively charged and therefore attract osmotically active Na⁺, causing large amounts of water to be drawn into their structure to keep the ECM hydrated. GAGs, such as dermatan sulfate, typically contain multiple glycosaminoglycan chains of 70-200 sugars long (formed from repeating disaccharide units) that branch from a linear protein core. This results in GAGs occupying a huge volume relative to their mass and forming gels at very low concentrations. The hydrophilic nature of GAGs causes a swelling pressure, or turgor, which allows the ECM to withstand compression forces.

[0262] In the ECM, GAGs are attached to ECM proteins to form proteoglycans or, in the case of hyaluronic acid (also called hyaluronan), exist as a non-proteoglycan matrix component. Extracellular proteoglycans are large, highly hydrated molecules that help cushion cells in the ECM. Glycosaminoglycans such as hyaluronan contribute to the “ground substance” by creating a barrier to bulk fluid flow through the interstitial collagenous matrix by way of their viscosity and water of hydration. Proteoglycans and non-proteoglycan GAGs associate to form large polymeric complexes in the ECM. They associate with each other, and also with fibrous proteins such as collagen.

### 1) Proteoglycans

[0263] There are three main types of GAGs that form proteoglycans of the ECM, including dermatan sulfate and chondroitin sulfate, heparin and heparan sulfate, and keratan sulfate. Generally, a proteoglycan is 95% carbohydrate by weight, typically in the form of long unbranched GAG chains. Besides providing hydrated space around cells, proteoglycans also regulate traffic of molecules and cells, bind signaling molecules thereby playing a role in cell activation, and bind other secreted proteins such as proteases and protease inhibitors to regulate the activities of secreted proteins (Albert et al., “Cell Junctions, Cell Adhesions and the Extracellular Matrix” Molecular Biology of the Cell. New York: Garland Publishers, 1994. pp. 972-978). For example, the heparin sulfate chains of proteoglycans bind to several different growth factors, including fibroblast growth factors (FGFs), helping them to bind to their specific cell surface receptors.

[0264] Aggrecan is a proteoglycan, which principally contains chondroitin sulfate and heparan sulfate GAGs, and is typically found in cartilage forming large aggregates with hyaluronan to provide mechanical support. Decorin is another exemplary GAG of connective tissues made up primarily of chondroitin sulfate and dermatan sulfate GAGs. It binds to type I collagen fibrils. Perlecan and betaglycan are other exemplary proteoglycans of the ECM. Not all proteoglycans are associated with the ECM: for example, serglycin is associated with secretory vesicles where it helps to package and store secretory molecules, and syndecans are found on the cell surface and act as co-receptors (Albert et al., “Cell Junctions, Cell Adhesions and the Extracellular Matrix” Molecular Biology of the Cell, New York: Garland Publishers, 1994. pp. 972-978).

[0265] Heparan sulfate proteoglycans (HSPGs) are ubiquitous macromolecules associated with the cell surface and extracellular matrix (ECM) of a wide range of cells of vertebrate and invertebrate tissues (Wight, T. N., Kinsella, M. G., and Qwarnstromn, E. E. (1992) Curr. Opin. Cell Biol., 4, 793-801; Jackson, R. L., Busch, S. J., and Cardin, A. L. (1991) Physiol. Rev., 71, 481-539; Wight, T. N. (1989) Arteriosclerosis, 9, 1-20; Kjellen, L., and Lindahl, U. (1991) Annu. Rev. Biochem., 60, 443-475; and Ruoslahti, E., and Yamaguchi, Y. (1991) Cell, 64, 867-869). The basic HSPG structure has a protein core to which several linear heparan sulfate chains are covalently attached. The polysaccharide chains are typically composed of repeating hexuronic and D-glucosamine disaccharide units that are substituted to a varying extent with N- and O-linked sulfate moieties and N-linked acetyl groups. Studies on the involvement of ECM molecules in cell attachment, growth and differentiation revealed a central role of HSPGs in embryonic morphogenesis, angiogenesis, metastasis, neurite outgrowth and tissue repair. The heparan sulfate (HS) chains, which are unique in their ability to bind a multitude of proteins, ensure that a wide variety of effector molecules cling to the cell surface. HSPGs are also prominent components of blood vessels. In large vessels they are concentrated mostly in the intima and inner media, whereas in capillaries they are found mainly in the subendothelial basement membrane where they support proliferating and migrating endothelial cells and stabilize the structure of the capillary wall. The ability of HSPGs to interact with ECM macromolecules such as collagen, laminin and fibronectin, and with different attachment sites on plasma membranes suggests a key role for this proteoglycan in the self-assembly and insolubility of ECM components, as well as in cell adhesion and locomotion.

### 2) Hyaluronic Acid

[0266] Hyaluronic acid (HA; also called hyaluronan) is a large GAG that attracts water, and when bound to water exists in a viscous, gel-like form. Thus, HA serves as a lubricant, holding together gel-like connective tissues. HA is a polymer of disaccharides (sometimes as many as 25,000 repeats in length) and is composed of repeating units of two modified simple sugars: glucuronic acid and N-acetyl glucosamine. HA is part of the ECM of many connective tissues. HA is found in the greatest amount in the skin with almost 50% of the body's HA found in the skin. The HA provides continuous moisture to the skin by binding up water. Decreased production of HA, such as by age, results in wrinkled and unhealthy skin.

[0267] HA, principally through its receptor CD44, also functions to regulate cell behavior during embryonic development and morphogenesis, wound healing, repair and regeneration, inflammation and tumor progression and invasion (Harada et al. (2006) J. Biol. Chem., 8:5597-5607). HA is degraded by hyaluronidases. The degradation products of HA can be found in increased amounts in damaged or growing tissues, and in a variety of inflammatory conditions. HA fragments promote angiogenesis and can stimulate cytokine production by macrophages and dendritic cells in tissue injury and skin transplant.

[0268] b. Histology of the Skin

[0269] The skin helps to maintain the body's temperature at a physiologic temperature of 37° C. The skin is composed of several distinct layers, principally the epidermis and dermis. The epidermis is a specialized epithelium derived from the ecotoderm, and beneath this is the dermis, which is a derivative of the mesoderm and is a vascular dense connective tissue. These two layers are firmly adherent to one another and form a region which varies in overall thickness form approximately 0.5 to 4 mm in different areas of the body. Beneath the dermis is a layer of loose connective tissue, which varies from areolar to adipose in character. This is referred to as the hypodermis, but is typically considered not to be part of the skin. The dermis is connected to the hypodermis by connect tissue fibers that pass from one layer to the other.

[0270] i. The Epidermis

[0271] The epidermis is the skin layer directly above the dermis, and is the surface layer of the skin. The principle function of the epidermis is to act as a protective barrier against water loss, chemical injury and invading pathogens. The epidermis is a thin layer of approximately fifteen cell layers that is about 0.1 to 1.5 millimeters thick composed primarily of keratinocytes (Inlander, Skin, New York, N.Y.: People's Medical Society, 1-7 (1998)). The epidermis is itself divided into several layers (e.g., stratum basale, stratum spinosum, stratum granulosum, stratum lucidum, stratum corneum) based on the state of differentiation of the keratinocytes. Keratinocytes originate in the basal layer from keratinocyte stem cells. As the keratinocytes grow and divide, they undergo gradual differentiation eventually reaching the stratum corneum where they form a layer of enucleated, flattened, highly keratinized cells called squamous cells (also called corneocytes). Besides being made up of corneocytes, the stratum corneum also contains sebum. The sebum is secreted by sebaceous glands, which are usually found in hair-covered areas connected to hair follicles. Sebum is a slightly acid layer that helps to hold the corneocytes together and holds moisture in. This acidity is due to the presence of amphoteric amino acids, lactic acid and fatty acids that make up sebum. Thus, the pH of the skin surface is normally between 5 and 6, typically about 5.5. Sebum acts to waterproof hair and skin, and keep them from becoming dry, brittle and cracked, and it also inhibits the growth of microorganisms on skin. The term “acid mantle” refers to the presence of the water-soluble substances on most regions of the skin.

[0272] ii. The Dermis

[0273] The connective tissue of the skin is called the dermis. The dermis is 1.5 to 4 millimeters thick. In the skin, the dermis contains ECM components; the main protein components are collagen and elastin. The dermis also is home to most of the skin's structures, including sweat and oil glands that secrete substances through openings in the skill called pores, or comedos, hair follicles, nerve endings, and blood and lymph vessels (Inlander, Skin, New York, N.Y.: People's Medical Society, 1-7 (1998)). In addition, the dermis contains blood vessels that play a role in temperature regulation.

[0274] iii. The Hypodermis

[0275] Below the dermis is the hypodermis, which is a fatty layer and is the deepest layer of the skin. It acts as an insulator for body heat conservation and as a shock absorber for organ protection (Inlander, Skin, New York, N.Y.: People's Medical Society, 1-7 (1998)). In addition, the hypodermis also stores fat for energy reserves.

[0276] c. Diseases of the ECM

[0277] Certain diseases and conditions result from defects or changes in the architecture of the extracellular matrix due to aberrant expression or production of ECM components. For example, in some inflammatory conditions such as occur upon wound healing, cytokines are secreted, which stimulate fibroblasts to secrete ECM components such as collagen. The ECM components accumulate and become locally deposited, resulting in a wide range of fibrotic conditions. Matrix deposition is a frequent feature in many chronic inflammatory diseases and in other diseases and conditions. Included among these are collagen-mediated disease conditions such as, but not limited to, scars such as keloid and hypertrophic scars, Duputyren's syndrome, Peyronie's disease and lymphedema. Cellulite also is a prominent disease of the ECM that, in addition to increased adipogenicity, is characterized by alterations in the connective tissue matrix resulting in an abnormal fibrous septae network of collagen (Rawlings et al. (2006) Int. J. Cos. Science, 28:175-190).

[0278] Diseases and conditions of the ECM that are characterized by aberrant expression or overproduction of matrix components, resulting in their accumulation and unwanted deposition, can be treated by the tsMMPs provided herein. By virtue of the temporal activation of such enzymes upon in vivo administration, the treatment of such diseases and conditions is regulated to limit the enzymatic degradation of the matrix components. For example, by limiting the duration of action of matrix degradation, unwanted side effects associated with uncontrolled protein degradation is minimized.

[0279] 2. Matrix Metalloproteases

[0280] Provided herein are modified MMPs that are temperature sensitive (tsMMPs). The modified MMPs include those that exhibit increased activity at a lower temperature then a higher temperature and also those that exhibit increased activity at a higher temperature then a lower temperature. The tsMMPs are provided as compositions, combinations and containers, and can be used in methods, processes and uses to treat ECM-mediated diseases or conditions. MMPs are matrix-degrading enzymes that degrade protein components of the extracellular matrix (ECM), including, but not limited to, collagen, elastin, fibronectin and proteoglycans. By virtue of their ability to cleave one or more ECM components, activatable tsMMPs provided herein can be used to modify the matrix of tissues, particularly those exhibiting structural defects or changes due to excess of one or more ECM protein or unwanted accumulation of fibrous tissue rich in one or more ECM protein, such as collagen. Thus, such enzymes are useful in treating diseases or conditions in which ECM proteins are involved.

[0281] a. Function

[0282] Matrix metalloproteinases (MMPs) are a family of zinc-dependent and calcium-dependent endopeptidases. For example, MMPs contain an active site Zn²⁺ required for activity. Most MMPs are involved in degradation of the extracellular matrix. For example, many of these enzymes can cleave components of the basement membrane and extracellular matrix. They are involved in tissue remodeling, for example, in processes such as wound healing, pregnancy and angiogenesis. In addition, MMPs also can process a number of cell-surface cytokines, receptors and other soluble proteins. The proteolytic activity of MMPs act as an effector mechanism of tissue remodeling in physiologic and pathologic conditions, and as modulator of inflammation. The excess synthesis and production of MMPs leads to accelerated degradation of the ECM which is associated with a variety of diseases and conditions such as, for example, bone homeostasis, arthritis, cancer, multiple sclerosis and rheumatoid arthritis. In the context of neuroinflammatory diseases, MMPs have been implicated in processes such as (a) blood-brain barrier (BBB) and blood-nerve barrier opening, (b) invasion of neural tissue by blood-derived immune cells, (c) shedding of cytokines and cytokine receptors, and (d) direct cellular damage in diseases of the peripheral and central nervous system (Leppert et al. Brain Res. Rev. 36(2-3): 249-57 (2001); Borkakoti et al. Prog. Biophys. Mol. Biol. 70(1): 73-94 (1998)). The enzymes are specifically regulated by endogenous inhibitors called tissue inhibitors of matrix metalloproteases (TIMPs).

[0283] b. Structure and Activation

[0284] Generally, MMPs contain three common domains: the pro-peptide, the catalytic domain and the hemopexin-like C-terminal domain. MMPs are synthesized as zymogens. Zymogen activation prevents unwanted protein degradation that could occur if proteases were always present in active form. Generally, zymogens contain N-terminal portions (or prosegments or proregions or propeptide) that sterically block the active site of the protease and prevent access of substrates to the active site of the protease. The propeptide also acts to stabilize the polypeptide. The propeptide of zymogen forms of MMPs range in size from about 80-100 residues in length. The propeptide of MMPs contains a cysteine residue generally contained in the conserved sequence PRCxxPD (with the exception of MMP-23, which contains the critical cysteine and different surrounding amino acids). The cysteine residue interacts with the zinc in the active site and prevents binding and cleavage of the substrate, thereby keeping the enzyme in an inactive form. Thus, upon secretion from a preproenzyme form, the proenzyme (containing the propeptide) is inactive. For example, in MMP-1 the propeptide cysteine residue corresponds to amino acid residue 73 in the sequence of amino acids set forth in SEQ ID NO:2.

[0285] MMPs require processing for activation. Generally, processing involves removal of the propeptide and/or conformational changes of the enzyme to generate a processed mature form. Processing of the enzyme by removal of the propeptide is required for activity of MMPs. For normal MMPs (e.g. wildtype) that are not conditionally active as provided herein, the processed mature form is an active enzyme. Thus, it is understood that wildtype MMPs in their processed mature form are enzymatically active, and thus for these enzymes this is the active form. tsMMPs provided herein, however, also additionally require the permissive temperature condition to be fully active.

[0286] Processing (and thereby activation) can be induced by processing agents such as proteases, including other previously activated MMPs; by chemical activation, such as thiol-modifying agents (4-aminophenylmercuric acetate, HgCl₂ and N-ethylmaleimide), oxidized glutathione, SDS, chaotropic agents and reactive oxygens; and by low pH or heat treatment. For example, Table 4 below lists exemplary processing agents (see also Visse et al. (2003) Circ. Res., 92:827-839; Khan et al. (1998) Protein Science, 7:815-836; Okada et al. (1988) Biochem J., 254:731-741; Okada & Nakanashi (1989) FEBS Lett., 249:353-356; Nagase et al. (1990) Biochemistry, 29:5783-5789; Koklitis et al. (1991) Biochem J., 276:217-221; Springman et al. (1990) PNAS, 87:364-8; Murphy et al. (1997) Matrix Biol., 15:511-8).

TABLE 4
Zymogen Activators (i.e. processing agents)
Proteolytic Compounds

| | |
|---|---|
| Proteases | Plasmin |
| | Plasma kallikrein |
| | Trypsin-1 (Trypsin I) |
| | Trypsin-2 (Trypsin II) |
| | Neutrophil elastase |
| | Cathepsin G |
| | Tryptase |
| | Chymase |
| | Proteinase-3 |
| | Furin |
| | uPA |
| | MMPs, including MMP-1, MMP-2, |
| | MMP-3, MMP-7, MMP-10, MMP-26, |
| | and MT1-MMP |

Non-Proteolytic Compounds

| | |
|---|---|
| Thiol-modifying Agents | 4-aminophenylmercuric acetate |
| | (AMPA) |
| | HgCl₂ |
| | N-ethylmaleimide |
| Conformational Perturbants | Sodium dodecyl sulfate (SDS) |
| | Chaotropic agents |
| Other Chemical Agents | Oxidized glutathione (GSSG) |
| | Reactive oxygen |
| | Au(I) salts |

Other Activating Conditions

Acidic pH
Heat

[0287] MMP activation occurs in a stepwise manner. For example, activation by proteases involves a first proteolytic attack of a bait region (corresponding to amino acids 32-38 of proMMP-1 (SEQ ID NO:2)), an exposed loop region found between the first and second helices of the pro-peptide. The sequence of the bait region confers cleavage specificity. Following initial cleavage, the remaining propeptide is destabilized allowing for intermolecular processing by other partially active MMP intermediates or active MMPs. For example, the protease plasmin activates both proMMP-1 and proMMP-3. Once activated, MMP-3 effects the final activation of proMMP-1. Alternatively, activation by chemicals, for example APMA, initially causes the modification of the propeptide cysteine residue, which in turn causes partial activation and intramolecular cleavage of the propeptide. The remaining segment of propeptide is then processed by other proteases or MMPs.

[0288] Metalloproteinases contain a Zn²⁺ ion at the active center of the enzyme required for catalytic activity. Generally, these enzymes have a common zinc binding motif (HExxHxxGxxH) in their active site, and a conserved methionine turn following the active site. The zinc binding motif at the active site of a metalloproteinase includes two histidine residues whose imidazole side-chains are ligands to the Zn²⁺. During catalysis, the Zn²⁺ promotes nucleophilic attack on the carbonyl carbon by the oxygen atom of a water molecule at the active site. An active site base (a glutamate residue in carboxypeptidases) facilitates this reaction by extracting a proton from the attacking water molecule. Thus, the glutamate (E) residue activates a zinc-bound H₂O molecule, thereby providing the nucleophile that cleaves peptide bonds. Mutation of any one of the histidines ablates catalytic activity. The catalytic domain also contains two calcium binding sites on either side of the zinc binding motif. The Ca²⁺ binding sites are characterized as being a highly conserved Glu- and Asp-rich region.

[0289] Many MMPs also contain a flexible proline-rich hinge region, which is up to about 75 amino acids long, but has no known structure. MMPs also contain a hemopexin-like C-terminal domain that functions in substrate recognition and also interacts with inhibitors, in particular tissue inhibitor of metalloproteinases (TIMPs). MMP-7, MMP-23 and MMP-26 do not contain a hemopexin domain. MMP-2 and MMP-9 also contain an insert in the catalytic domain made up of three tandem repeats of fibronectin type II modules that confer gelatin-binding properties to these enzymes.

[0290] There are over 25 MMPs known and they are grouped into different families depending on function, substrate specificity and/or sequence similarity. The families of MMPs include collagenases, gelatinases, stromelysins and matrilysins. Among the various families, some MMPs contain additional domains. For example, membrane-type MMPs contain a transmembrane or a GPI-anchoring domain. Exemplary MMPs are set forth in Table 5. The sequence identifiers (SEQ ID NO) for the nucleotide sequence and encoded amino acid sequence of the precursor polypeptide for each of the exemplary proteases is depicted in the Table. The sequence identifiers (SEQ ID NO) for the amino acid sequence of the preproprotein and the zymogen-activated processed mature form of the protein (lacking the propeptide) also are depicted in the Table. The location of domains also is indicated. Those of skill in the art are familiar with such domains and can identify them by virtue of structural and/or functional homology with other such domains. It is understood that polypeptides and the description of domains thereof are theoretically derived based on homology analysis and alignments with similar polypeptides. Thus, the exact locus can vary, and is not necessarily the same for each polypeptide. Variations of MMPs also exist among allelic and species variants and other variants known in the art, and such variants also are contemplated for modification as activatable tsMMPs as described herein below. The Table also sets forth exemplary ECM target substrates for each enzyme. Reference to such substrates is for reference and exemplification, and are not intended to represent an exhaustive list of all target substrates. One of skill in the art knows or can empirically determine ECM target substrates for a desired enzyme using routine assays, such as any described herein.

TABLE 5
Metalloprotease

| | | Enzyme | | | | |
|---|---|---|---|---|---|---|
| | | databank | | SEQ ID NO | | |
| | | access | | | | Mature |
| | | code | | | | (processed |
| | | (EC) | Genbank | Precursor | | form) |
| Protease | Substrate | www.expasy.ch/sprot/enzyme.html | No. | nt | Aa | aa |

Collagenases:

| | | | | | | |
|---|---|---|---|---|---|---|
| MMP-1 | collagen I, II, | 3.4.24.7 | P03956, | 708 | 1 | 709 |
| (collagenase- | III, VII, VIII, | | NM_002421 | | (ss aa 1-19; | |
| 1) | X, XI, gelatin, | | | | pp aa 20-99) | |
| | proteoglycan, | | | | | |
| | fibronectin, | | | | | |
| | glycoprotein | | | | | |
| MMP-8 | collagen I, II, | 3.4.24.34 | P22894 | 710 | 711 | 712 |
| (collagenase- | III, aggrecan | | NM_002424 | | (ss aa 1-20; | |
| 2) | | | | | pp aa 21-100) | |
| MMP-13 | collagen I, II, | 3.4.24.— | P45452 | 713 | 714 | 715 |
| (collagenase- | III, IV, VI, | | NM_002427 | | (ss aa 1-19; | |
| 3) | IX, X, XIV, | | | | pp aa 20-103) | |
| | gelatin, | | | | | |
| | proteoglycan, | | | | | |
| | fibronectin, | | | | | |
| | glycoprotein | | | | | |
| MMP-18 | collagen I | 3.4.24.— | Xenopus | 716 | 717 | 718 |
| (collagenase- | | | laevis | | (ss aa 1-17; | |
| 4) | | | O13065 | | pp aa 18-99) | |

Gelatinases:

| | | | | | | |
|---|---|---|---|---|---|---|
| MMP-2 | gelatins, | 3.4.24.24 | P08253 | 719 | 720 | 721 |
| (gelatinase | collagen I, II, | | NM_004530 | | (ss aa 1-29; | |
| A) | III, IV, V, | | | | pp 30-109) | |
| | VII, X, XI, | | | | | |
| | elastin, | | | | | |
| | fibronectin, | | | | | |
| | laminin, | | | | | |
| | proteoglycan, | | | | | |
| | glycoprotein | | | | | |
| MMP-9 | gelatin, | 3.4.24.35 | P14780 | 722 | 723 | 724 |
| (gelatinase | collagen IV, | | NM_004994 | | (ss aa 1-19; | |
| B) | V, VI, XIV, | | | | pp aa 20-93) | |
| | elastin, | | | | | |
| | laminin, | | | | | |
| | proteoglycan, | | | | | |
| | glycoprotein | | | | | |

Stromelysins:

| | | | | | | |
|---|---|---|---|---|---|---|
| MMP-3 | fibronectin, | 3.4.24.17 | P08254 | 725 | 726 | 727 |
| (stromelysin- | elastin, | | NM_002422 | | (ss aa 1-17; | |
| 1) | laminin, | | | | pp aa 18-99) | |
| | gelatin, | | | | | |
| | proteoglycan, | | | | | |
| | glycoprotein, | | | | | |
| | collagen III, | | | | | |
| | IV, V, VII, | | | | | |
| | IX, X, XI | | | | | |
| MMP-10 | collagen III, | 3.4.24.22 | P09238 | 728 | 729 | 730 |
| (stromelysin- | IV, V, elastin, | | NM_002425 | | (ss aa 1-17; | |
| 2) | gelatin, | | | | pp aa 18-98) | |
| | fibronectin, | | | | | |
| | aggrecan | | | | | |
| MMP-11 | Gelatin, | 3.4.24.— | P24347 | 731 | 732 | 733 |
| (stromelysin- | fibronectin, | | X57766 | | (ss aa 1-31; | |
| 3) | laminin, | | | | pp aa 32-97) | |
| | collagen IV | | | | | |

Matrilysins:

| | | | | | | |
|---|---|---|---|---|---|---|
| MMP-7 | fibronectin, | 3.4.24.23 | P09237 | 734 | 735 | 736 |
| (matrilysin) | laminin, | | NM_002423 | | (ss aa 1-17; | |
| | elastin, | | | | pp aa 18-94) | |
| | gelatin, | | | | | |
| | collagen I, IV, | | | | | |
| | proteoglycan, | | | | | |
| | glycoprotein | | | | | |
| MMP-26 | collagen IV, | 3.4.24.— | Q9NRE1 | 737 | 738 | 739 |
| (matrilysin-2) | fibronectin, | | NM_021801 | | (ss aa 1-17; | |
| | gelatin, | | | | pp aa 18-89) | |
| | proteoglycan | | | | | |

Metalloelastase:

| | | | | | | |
|---|---|---|---|---|---|---|
| MMP-12 | elastin, | 3.4.24.65 | P39900 | 740 | 741 | 742 |
| (metalloelastase) | fibronectin, | | NM_002426 | | (ss aa 1-16; | |
| | laminin, | | | | pp aa 17-105) | |
| | collagen I, IV, | | | | | |
| | V, gelatin, | | | | | |
| | proteoglycan, | | | | | |
| | glycoprotein | | | | | |

Membrane-type MMPs:

| | | | | | | |
|---|---|---|---|---|---|---|
| MMP-14 | Collagen I, II, | 3.4.24.80 | P50281 | 743 | 744 | 745 |
| (MT1-MMP) | III, gelatin, | | NM_004995 | | (ss aa 1-20; | |
| Transmembrane | aggrecan, | | | | pp aa 21-111) | |
| | fibronectin, | | | | | |
| | laminin, | | | | | |
| | proteoglycan, | | | | | |
| | glycoprotein | | | | | |
| MMP-15 | aggrecan, | EC | P51511 | 746 | 747 | 748 |
| (MT2-MMP) | fibronectin, | 3.4.24.— | NM_002428 | | (ss aa 1-41; | |
| Transmembrane | laminin, | | | | pp aa 42-131) | |
| | glycoprotein | | | | | |
| MMP-16 | Collagen III, | EC | P51512 | 749 | 750 | 751 |
| (MT3-MMP) | fibronectin, | 3.4.24.— | NM_005941 | | (ss aa 1-31; | |
| Transmembrane | laminin, | | | | pp aa 32-119) | |
| | gelatin, | | | | | |
| | proteoglycan | | | | | |
| MMP-17 | gelatin | EC | Q9ULZ9 | 752 | 753 | 754 |
| (MT4-MMP) | | 3.4.24.— | AB021225 | | (ss aa 1-38; | |
| GPI anchor | | | | | pp aa 39-128) | |
| MMP-24 | fibronectin, | EC | Q9Y5R2 | 755 | 756 | 757 |
| (MT5-MMP) | gelatin, | 3.4.24.— | NM_006690 | | (ss aa 1-52; | |
| Transmembrane | proteoglycan | | | | pp aa 53-155) | |
| MMP-25 | collagen IV, | EC | Q9NPA2 | 758 | 759 | 760 |
| (MT6-MMP) | gelatin, | 3.4.24.— | NM_022468 | | (ss aa 1-21; | |
| GPI anchor | fibronectin, | | | | pp aa 22-107) | |
| | proteoglycan | | | | | |

Enamelysin:

| | | | | | | |
|---|---|---|---|---|---|---|
| MMP-20 | aggrecan | EC | O60882 | 761 | 762 | 763 |
| (enamelysin) | | 3.4.24.— | Y12779 | | (ss aa 1-22; | |
| | | | | | pp aa 23-107) | |

Other:

| | | | | | | |
|---|---|---|---|---|---|---|
| MMP-19 | collagen IV, | EC | Q99542 | 764 | 765 | 766 |
| | gelatin, | 3.4.24.— | NM_002429 | | (ss aa 1-18; | |
| | laminin, | | | | pp aa 19-97) | |
| | aggrecan, | | | | | |
| | fibronectin, | | | | | |
| | glycoprotein | | | | | |
| MMP-21 | gelatin | EC | Q8N119 | 767 | 768 | 769 |
| | | 3.4.24.— | NM_147191 | | (ss aa 1-24; | |
| | | | | | pp aa 25-144) | |
| MMP-23 | gelatin | EC | O75900 | 770 | 771 | 772 |
| CA-MMP | | 3.4.24.— | AJ005256 | | | |
| MMP-27 | gelatin | EC | Q9H306 | 773 | 774 | 775 |
| CMMP | | 3.4.24.— | NM_022122 | | (ss aa 1-17; | |
| | | | | | pp aa 18-98) | |
| MMP-28 | | EC | Q9H239 | 776 | 777 | 778 |
| (epilysin) | | 3.4.24.— | NM_024302 | | (ss aa 1-22; | |
| | | | | | pp aa 23-122) | |

[0291] 3. Matrix Metalloprotease-1 (MMP-1)

[0292] MMP-1 (also called collagenase) is encoded by a nucleic acid molecule set forth in SEQ ID NO:708 resulting in a pre-procollagenase (SEQ ID NO:1), which is co-translationally processed to generate a procollagenase zymogen form (SEQ ID NO:2). Procollagenase contains a propeptide of 80 amino acids (corresponding to amino acid residues 1-80 of the sequence of amino acids set forth in SEQ ID NO:2), a catalytic domain of 162 amino acids (corresponding to amino acid residues 81-242 of the sequence of amino acids set forth in SEQ ID NO:2), a 16-residue linker (corresponding to amino acid residues 243-258 of the sequence of amino acids set forth in SEQ ID NO:2) and a hemopexin (Hpx) domain of 189 amino acid residues (corresponding to amino acid residues 259-450 of the sequence of amino acids set forth in SEQ ID NO:2). Upon processing, the propeptide is removed, resulting in a processed mature form having a sequence of amino acids set forth in SEQ ID NO: 709.

[0293] As noted above, MMP-1 cleaves collagen type I and collagen type III, which are the most abundant protein of the skin. These collagen types are associated with many of the conditions of the ECM as described herein in Section I. In contrast, other collagens, for example collagen type IV, is a major component of the basal lamina of blood vessels. Hence, targeting of type IV collagen, for example, can lead to leaky blood vessels, which can be a side effect of treatments that are meant to target the extracellular matrix as described herein. For example, bacterial collagenase, a known treatment for cellulite, can induce haemorrhages (see e.g. Vargaftig et al. (2005) Inflammation Research, 6:627-635). Thus, an advantage of the use of MMP-1, and in particular tsMMP-1 that can be conditionally or temporally controlled, as a therapeutic agent to treat conditions of the ECM is that it does not cleave type IV collagen.

### D. MODIFIED MATRIX METALLOPROTEASE-1 POLYPEPTIDES

[0294] Provided herein are modified MMP-1 polypeptides. In one example, modified MMP-1 polypeptides provided herein exhibit temperature sensitivity, whereby the modified polypeptide exhibits higher activity at a permissive temperature than a non-permissive temperature. Also provided herein are modified MMP-1 polypeptides that exhibit increased activity compared to the unmodified MMP-1 not containing the modification (e.g. wildtype) at both permissive and non-permissive temperatures. In an additional example, provided herein are modified MMP-1 polypeptides that exhibit modifications that both increase temperature sensitivity and activity.

[0295] Modifications provided herein of a starting, unmodified reference polypeptide include amino acid replacements or substitutions, additions or deletions of amino acids, or any combination thereof. For example, modified MMP-1 polypeptides include those with 1, 2, 3, 4, 5, 6, 7, 8, 9, 10, 11, 12, 13, 14, 15, 16, 17, 18, 19, 20 or more modified positions. Also provided herein are modified MMP-1 polypeptides with two or more modifications compared to a starting reference MMP-1 polypeptide. Modified MMP-1 polypeptides include those with 2, 3, 4, 5, 6, 7, 8, 9, 10, 11, 12, 13, 14, 15, 16, 17, 18, 19, 20 or more modified positions. In some examples, modified MMP-1 polypeptide provided herein contain only a single modification. In other examples, modified MMP-1 polypeptides provided herein contain two, three, four, five or six modifications. In additional examples, any modification(s) provided herein can be combined with any other modification known to one of skill in the art so long as the resulting modified MMP-1 polypeptide retains enzymatic activity when it is in its processed mature form. Where the modified MMP-1 contains a mutation conferring temperature sensitivity, the enzymatic activity of such combination mutant is greater at the permissive temperature compared to the non-permissive temperature. Modified MMP-1 polypeptides provided herein can be assayed for enzymatic activity under various conditions (e.g. permissive and non-permissive temperatures) to identify those that retain enzymatic activity.

[0296] Modifications in an MMP-1 polypeptide can be made to any form of an MMP-1 polypeptide, including inactive (e.g. zymogen) or processed mature forms (activated form), allelic and species variants, splice variants, variants known in the art, or hybrid or chimeric MMP-1 polypeptides. For example, modifications provided herein can be made in a precursor MMP-1 polypeptide set forth in SEQ ID NO:1, an inactive pro-enzyme MMP-1 containing the propeptide set forth in SEQ ID NO:2, a mature MMP-1 polypeptide lacking the propeptide set forth in SEQ ID NO:709, or any species, allelic or modified variant and active fragments thereof that has 40%, 50%, 60%, 70%, 80%, 90%, 91%, 92%, 93%, 94%, 95%, 96%, 97%, 98%, or 99% sequence identity to any of the MMP-1 polypeptides set forth in SEQ ID NOS:1, 2 or 709. Modifications also can be in an MMP-1 polypeptide lacking one or more domains, so long as the MMP-1 polypeptide retains enzymatic activity. For example, modifications can be in an MMP-1 polypeptide that includes only the catalytic domain (corresponding to amino acids 81-242) of the proenzyme MMP-1 polypeptide set forth in SEQ ID NO:2). Modifications also can be made in an MMP-1 polypeptide lacking all or a portion of the proline rich linker (corresponding to amino acids 243-258 of the proenzyme MMP-1 polypeptide set forth in SEQ ID NO:2) and/or lacking all or a portion of the hemopexin binding domain (corresponding to amino acids 259-450 of the proenzyme MMP-1 polypeptide set forth in SEQ ID NO:2). Allelic variants and other variants of MMP-1 polypeptides include, but are not limited to, any of MMP-1 polypeptide containing any one or more amino acid variant set forth in SEQ ID NO:3506 and 3549. Exemplary species variants for modification herein include, but are not limited to, pig, rabbit, bovine, horse, rat, and mouse, for example, set forth in any of SEQ ID NOS:3459-3464.

[0297] Modifications in an MMP-1 polypeptide provided herein, for example in an MMP-1 containing a modification to confer temperature sensitivity and/or increased activity, can be made to an MMP-1 polypeptide that also contains other modifications, such as those described in the art, including modification of the primary sequence and modifications not in the primary sequence of the polypeptide. It is understood that modifications in an allelic or species variant or other variant include modification in any form thereof such as an active or inactive form, a form including only the catalytic domain, or a form lacking all or a portion of the proline rich linker or the hemopexin binding domain. As discussed herein below, corresponding MMP-1 modifications can be made to similar forms of other MMP polypeptides.

[0298] Hence, the resulting modified MMP-1 polypeptides include those that are inactive zymogen proenzymes and those that are processed mature polypeptides. For example, any modified polypeptide provided herein that is a zymogen proenzyme can be activated by a processing agent to generate a processed mature MMP-1 polypeptide. Activity of MMP-1 polypeptides are typically exhibited in its processed mature form following cleavage of the propeptide and/or intermolecular and intramolecular processing of the enzyme to remove the propeptide (see e.g. Visse et al. (2003) Cir. Res., 92:827-839). As noted elsewhere herein, tsMMP's require permissive temperature to be fully active.

[0299] The modifications provided herein can be made by standard recombinant DNA techniques such as are routine to one of skill in the art. Any method known in the art to effect mutation of any one or more amino acids in a target protein can be employed. Methods include standard site-directed mutagenesis (using e.g. a kit, such as QuikChange available from Stratagene) of encoding nucleic acid molecules, or by solid phase polypeptide synthesis methods.

[0300] Other modifications that are or are not in the primary sequence of the polypeptide also can be included in a modified MMP-1 polypeptide, or conjugate thereof, including, but not limited to, the addition of a carbohydrate moiety, the addition of a polyethylene glycol (PEG) moiety, the addition of an Fc domain, etc. For example, such additional modifications can be made to increase the stability or half-life of the protein.

[0301] Exemplary of such modified MMP-1 polypeptides are set forth in any of SEQ ID NOS:3-705, 779-3458 and 3532 and processed mature forms and other forms thereof, and allelic and species variants thereof.

[0302] 1. Temperature-Sensitive Matrix Metalloprotease-1 (tsMMP-1) Mutants

[0303] Provided herein are tsMMP-1 polypeptides that are temperature sensitive by virtue of modifications in the primary sequence of the polypeptide compared to an unmodified MMP-1 polypeptide. The tsMMP-1 polypeptides exhibit increased enzymatic activity at a permissive temperature compared with activity of the tsMMP-1 polypeptide at a non-permissive temperature. For example, tsMMP-1 polypeptides provided herein exhibit increased enzymatic activity at a low temperature that is less then 37° C., for example, that is at or about 18° C., 19° C., 20° C., 21° C., 22° C., 23° C., 24° C., 25° C., 26° C., 27° C., 28° C., 29° C. or 30° C., in particular at or about 18° C. to 25° C., for example at or about 25° C. compared to a non-permissive high temperature that is at or about 34° C., 35° C., 36° C., 37° C., 38° C. or 39° C., in particular at or about 34° C. or 37° C. Due to the temperature-dependent activity of tsMMP-1 polypeptides, the activity of MMP-1 can be conditionally controlled, thereby temporally regulating activation to prevent prolonged and unwanted degradation of the ECM. In particular, such tsMMP-1 polypeptides can be used in uses, processes or methods to treat diseases or conditions of the ECM, for example, to treat collagen-mediated diseases or conditions such as cellulite.

[0304] The tsMMP-1 polypeptides provided herein have a ratio of activity at a permissive temperature compared to a non-permissive temperature that is or is about 1.1, 1.2, 1.3, 1.4, 1.5, 1.6, 1.7, 1.8, 1.9, 2.0, 2.5, 3.0, 3.5, 4.0, 4.5, 5, 5.5, 6, 6.5, 7, 7.5, 8, 8.5, 9, 9.5, 10, 15, 20, 30, 40, 50, 60, 70, 80, 90, 100 or more. Thus, the activity of tsMMP-1 polypeptides provided herein at the non-permissive temperature is or is about 70%, 65%, 60%, 55%, 50%, 45%, 40%, 35%, 30%, 25%, 20%, 15%, 10%, 5%, 4%, 3%, 2%, 1%, 0.5% or less of the activity at a permissive temperature. tsMMPs-1 polypeptides provided herein retain one or more activities of wildtype MMP-1 polypeptide at the permissive temperature, for example, enzymatic activity for cleavage of an ECM component such as collagen. Typically, such activity is substantially unchanged (less than 1%, 5%, 10%, 20% or 30% changed) compared to a wildtype or starting protein. In other examples, the activity of a modified MMP-1 polypeptide is increased or is decreased as compared to a wildtype or starting MMP-1 polypeptide. Activity is assessed at the permissive temperature and is compared to the activity of a starting, unmodified MMP-1 polypeptide (i.e. polypeptide not containing the modification) at the permissive temperature or a non-permissive temperature. For example, a tsMMP-1 polypeptide provided herein retains an activity at the permissive temperature that is or is about 10%, 20%, 30%, 40%, 50%, 60%, 70%, 80%, 90%, 100%, 110%, 120%, 140%, 150% or more the activity of wildtype MMP-1 at the permissive temperature or non-permissive temperature. Activity can be assessed in vitro, ex vivo or in vivo and can be compared to that of the unmodified MMP-1 polypeptide, such as for example, an inactive MMP-1 polypeptide set forth in SEQ ID NO:2 activated by a processing agent, or any other MMP-1 polypeptide known to one of skill in the art that is used as the starting material. As discussed elsewhere herein, it is understood that the zymogen inactive form of an MMP-1 or a modified MMP-1 must be processed to a processed mature form required for activity before use or measurement of an activity.

[0305] Exemplary Temperature Sensitive Modifications

[0306] Provided herein are modified tsMMP-1 polypeptides containing one or more amino acid modifications in a starting, unmodified MMP-1 polypeptide. Typically, the modification is an amino acid replacement. The amino acid replacement or replacements can be at any one or more positions corresponding to any of the following positions: 84, 85, 95, 98, 99, 100, 103, 104, 105, 106, 109, 110, 111, 112, 118, 123, 124, 126, 147, 150, 151, 152, 153, 155, 156, 158, 159, 170, 171, 176, 178, 179, 180, 181, 182, 183, 185, 187, 188, 189, 190, 191, 192, 194, 195, 197, 198, 206, 207, 208, 210, 211, 212, 218, 223, 227, 228, 229, 230, 233, 234, 237, 240, 251, 254, 255, 256, 257, 258, 259 of an unmodified MMP-1 polypeptide having a sequence of amino acids set forth in SEQ ID NO:2, or at a corresponding position in an allelic or species variant or other variant of an MMP-1 polypeptide that has at least or at least about 60%, 70%, 75%, 80%, 85%, 90%, 91%, 92%, 93%, 94%, 95%, 96%, 97%, 98%, 99% or more sequence identity to an MMP-1 polypeptide set forth in SEQ ID NO:2. Amino acid replacements include replacement of amino acids to an acidic (D or E); basic (H, K or R); neutral (C, N, Q, T, Y, S, G) or hydrophobic (F, M, W, I V, L A, P) amino acid residue. For example, amino acid replacements at the noted positions include replacement by amino acid residues E, H, R, C, Q, T, S, G, M, W, I, V, L, A, P, N, F, D, Y or K.

[0307] Such modified MMP-1 polypeptides include MMP-1 polypeptides that are temperature sensitive by virtue of increased activity at the permissive temperature of 25° C. compared to the non-permissive temperatures of 34° C. or 37° C. For example, modified MMP-1 polypeptides provided herein can include polypeptides having an amino acid modification corresponding to any one or more modifications of T84F (i.e. replacement of T by F at a position corresponding to position 84 of an MMP-1 polypeptide set forth in SEQ ID NO:2), E85F, L95K, L95I, R98D, 199Q, E100V, E100R, E100S, E100T, E100F, E100I, E100N, T103Y, P104A, P104M, D105A, D105F, D105G, D105I, D105L, D105N, D105R, D105S, D105T, D105W, D105E, L106C, L106S, A109H, D110A, V111R, D112S, A118T, S123V, N124D, T126S, G147P, R150P, R150V, R150D, R150I, R150H, D151G, N152A, N152S, S153T, F155L, F155A, D156H, D156L, D156A, D156W, D156V, D156K, D156T, D156R, D156M, P158T, P158G, P158K, P158N, G159V, G159T, G159M, G159I, G159W, G159L, G159C, P170D, P170A, G171P, G171E, G171D, A176F, A176W, F178T, F178L, D179N, D179V, D179C, E180Y, E180R, E180T, E180F, E180G, E180S, E180N, E180D, D181T, D181L, D181K, D181C, D181G, E182T, E182Q, E182M, E182G, R183G, R183S, T185R, T185Y, T185H, T185G, T185V, T185Q, T185A, T185E, T185D, N187R, N187M, N187W, N187F, N187K, N187I, N187A, N187G, N187C, N187H, F188V, R189N, R189T, R189Q, E190G, E190Y, E190D, Y191V, N192H, N192S, N192D, N192C, H194P, R195C, R195W, R195L, R195G, R195Q, R195A, R195D, R195V, A197C, A197V, A198G, A198L, A198M, G206A, G206S, L207R, L207V, L207I, L207G, S208R, S208L, S210V, S210A, T211L, D212G, D212H, Y218S, F223C, F223E, F223G, F223A, F223S, F223K, F223M, V227C, V227D, V227E, V227L, V227S, V227W, V227G, V227H, V227Q, V227R, Q228P, L229A, L229T, L229I, A230V, D233E, I234A, I234T, I234E, I234Q, I237L, I237W, I237N, I240S, I240A, I240C, I251S, I251W, Q254S, T255H, P256C, K257P, K257T, A258P and C259Q. Exemplary modified MMP-1 polypeptides have a sequence of amino acids set forth in any of SEQ ID NOS:6, 18, 22, 25, 27, 29, 31-33, 35-36, 38-39, 41, 43, 55-56, 59, 70, 95-96, 99-101, 105, 110-111, 113-115, 122, 125, 129-133, 148, 150, 159-160, 170, 174, 177, 179, 181-185, 195, 197, 200, 203, 209, 218-219, 222, 224, 231-233, 235, 238-239, 241, 246, 248, 252-255, 260-264, 267, 269, 273, 275, 279, 282, 284-286, 299, 301, 305, 317, 324, 341, 343, 354, 365, 367, 369, 374-376, 381, 383-385, 387-388, 390, 393-394, 397, 399, 420, 429, 436, 438, 440, 460, 466-467, 476, 483, 488, 495, 500, 502, 504, 506, 508, 511-512, 524, 543, 554-555, 572-573, 581, 583, 607, 611, 613, 616, 620, 648, 653, 660, 664-665, 669, 678, 703, 847, 866, 1083, 1109, 1172, 1177, 1183, 1188, 1237, 1271, 1277, 1301, 1414, 1516, 1520, 1567, 1975, 2023, 2031, 2075, 2078, 2080, 2083, 2281, 2299, 2403, 2411, 2423-2424, 2486, 2495-2497, 2552, 2563, 2703, 2715, 2753, 3066, 3074, 3076, 3317, 3321, 3373, 3385, 3407, 3439, 3428, 3458, 3532 and processed mature forms and other forms thereof, and allelic and species variants thereof.

[0308] In some examples, such modified MMP-1 polypeptides include polypeptides having an amino acid replacement or replacements at any one or more positions corresponding to any of the following positions: 95, 100, 103, 105, 150, 151, 153, 155, 156, 159, 171, 176, 179, 180, 181, 182, 185, 187, 190, 191, 192, 194, 195, 198, 206, 207, 210, 212, 218, 223, 227, 228, 229, 230, 233, 234, 237, 240 and 259 of an unmodified MMP-1 polypeptide having a sequence of amino acids set forth in SEQ ID NO:2, or at a corresponding position in an allelic or species variant or other variant of an MMP-1 polypeptide that has at least or at least about 60%, 70%, 75%, 80%, 85%, 90%, 91%, 92%, 93%, 94%, 95%, 96%, 97%, 98%, 99% or more sequence identity to an MMP-1 polypeptide set forth in SEQ ID NO:2. For example, modified MMP-1 polypeptides provided herein include polypeptides having an amino acid modification corresponding to any one or more modifications of L95K, E100V, T103Y, D105A, D105F, D105G, D105I, D105L, D105N, D105R, D105S, D105T, D105W, R150P, D151G, S153T, F155L, F155A, D156H, D156L, D156A, D156W, D156V, D156K, D156T, D156R, G159V, G159T, G171P, A176F, D179N, E180Y, E180R, E180T, E180F, D181T, D181L, D181K, E182T, E182Q, T185R, T185Y, T185H, T185G, T185V, T185Q, T185A, T185E, N187R, N187M, N187W, N187F, N187K, N187I, N187A, E190G, Y191V, N192H, N192S, N192D, N192C, H194P, R195C, R195W, R195L, R195G, R195Q, R195A, R195D, R195V, A198G, A198L, A198M, G206A, G206S, L207R, L207V, S210V, D212G, Y218S, F223C, F223E, F223G, F223A, F223S, V227C, V227D, V227E, V227L, V227S, V227W, Q228P, L229A, L229T, L229I, A230V, D233E, I234A, I234T, I234E, I234Q, I237L, I240S, I240A, I240C, and C259Q. Such modified MMP-1 polypeptides exhibit at least 1.2 times or more activity at the permissive temperature of 25° C. compared to the non-permissive temperatures of 34° C. or 37° C., for example, 1.2, 1.3, 1.4, 1.5, 1.6, 1.7, 1.8, 1.9, 2.0, 2.5, 3.0, 3.5, 4.0, 4.5, 5, 5.5, 6, 6.5, 7, 7.5, 8, 8.5, 9, 9.5, 10, 15, 20, 30, 40, 50, 60, 70, 80, 90, 100 or more times the activity. Exemplary of such modified MMP-1 polypeptides have a sequence of amino acids set forth in any of SEQ ID NOS:6, 25, 27, 29, 31-33, 35-36, 38-39, 59, 70, 95-96, 99-101, 105, 111, 113-115, 125, 132, 148, 160, 177, 181-182, 185, 195, 200, 209, 218-219, 232-233, 235, 238-239, 241, 246, 248, 253-254, 261-264, 267, 269, 273, 275, 279, 282, 284-286, 299, 301, 305, 317, 324, 341, 354, 365, 369, 374-375, 381, 383-384, 388, 393, 397, 399, 420, 429, 436, 438, 440, 460, 466-467, 476, 483, 488, 495, 512, 524, 543, 572, 583, 607, 611, 613, 616, 620, 648, 653, 665, 678, 703, 3076 and 3532 and processed mature forms and other forms thereof, and allelic and species variants thereof.

[0309] In other examples, such modified MMP-1 polypeptides include polypeptides having an amino acid replacement or replacements at any one or more positions corresponding to any of the following positions: 95, 105, 150, 151, 155, 156, 159, 176, 179, 180, 181, 182, 185, 187, 195, 198, 206, 210, 212, 218, 223, 227, 228, 229, 230, 233, 234, 240, 259 of an unmodified MMP-1 polypeptide having a sequence of amino acids set forth in SEQ ID NO:2, or at a corresponding position in an allelic or species variant or other variant of an MMP-1 polypeptide that has at least or at least about 60%, 70%, 75%, 80%, 85%, 90%, 91%, 92%, 93%, 94%, 95%, 96%, 97%, 98%, 99% or more sequence identity to an MMP-1 polypeptide set forth in SEQ ID NO:2. For example, modified MMP-1 polypeptides provided herein include polypeptides having an amino acid modification corresponding to any one or more modifications of L95K, D105A, D105F, D105G, D105I, D105L, D105N, D105R, D105S, D105T, D105W, R150P, D151G, F155A, D156K, D156T, D156L, D156A, D156W, D156V, D156H, D156R, G159V, G159T, A176F, D179N, E180Y, E180T, E180F, D181L, D181K, E182T, E182Q, T185R, T185H, T185Q, T185A, T185E, N187R, N187M, N187F, N187K, N187I, R195V, A198L, A198M, G206A, G206S, S210V, Y218S, F223E, V227C, V227E, V227W, Q228P, L229T, L229I, D233E, I234A, I234T, I234E, I240S, I240C and C259Q. Such modified MMP-1 polypeptides exhibit at least 1.5 times or more activity at the permissive temperature of 25° C. compared to the non-permissive temperatures of 34° C. or 37° C., for example, 1.5, 1.6, 1.7, 1.8, 1.9, 2.0, 2.5, 3.0, 3.5, 4.0, 4.5, 5, 5.5, 6, 6.5, 7, 7.5, 8, 8.5, 9, 9.5, 10, 15, 20, 30, 40, 50, 60, 70, 80, 90, 100 or more times the activity. Exemplary of such modified MMP-1 polypeptides have a sequence of amino acids set forth in any of SEQ ID NOS:6, 25, 27, 29, 31-33, 35-36, 38-39, 59, 70, 96, 99-101, 105, 111, 113-115, 125, 132, 148, 160, 181-182, 185, 195, 209, 218-219, 232-233, 235, 238, 248, 253-254, 261-262, 264, 284, 301, 305, 317, 324, 341, 354, 365, 384, 388, 397, 420, 429, 436, 440, 460, 467, 476, 483, 488, 3532 and processed mature forms and other forms thereof, and allelic and species variants thereof.

[0310] In additional examples, modified MMP-1 polypeptides provided herein include modified MMP-1 polypeptides that are temperature sensitive at the permissive temperature of 25° C. and exhibit at least 30%, for example, 30%, 40%, 50%, 60%, 70%, 80%, 90%, 100%, 110%, 120%, 140%, 150% or more activity at 25° C. compared to wildtype MMP-1 at 25° C. For example, tsMMP-1 polypeptides that exhibit increased activity compared to wildtype MMP-1 include polypeptides having an amino acid replacement or replacements at any one or more positions corresponding to any of the following positions: 95, 105, 150, 156, 159, 179, 180, 182, 185, 187, 195, 198, 212, 223, 227, 234, and 240 of an unmodified MMP-1 polypeptide having a sequence of amino acids set forth in SEQ ID NO:2, or at a corresponding position in an allelic or species variant or other variant of an MMP-1 polypeptide that has at least or at least about 60%, 70%, 75%, 80%, 85%, 90%, 91%, 92%, 93%, 94%, 95%, 96%, 97%, 98%, 99% or more sequence identity to an MMP-1 polypeptide set forth in SEQ ID NO:2. For example, modified tsMMP-1 polypeptides provided herein that have increased activity at the permissive temperature of 25° C. compared to wildtype MMP-1 include polypeptides having an amino acid modification corresponding to any one or more modifications L95K, D105A, D105G, D105I, D105L, D105N, D105S, D105W, D105T, R150P, D156K, D156T, D156V, D156H, D156R, G159V, G159T, D179N, E180Y, E180T, E180F, E182T, T185H, T185Q, T185E, N187M, N187K, N187I, R195V, A198L, F223E, V227E, I234E and I240S. Exemplary of such modified MMP-1 polypeptides have a sequence of amino acids set forth in any of SEQ ID NOS:6, 27, 29, 31-32, 35-36, 38-39, 59, 99-101, 105, 113, 125, 132, 160, 181-182, 185, 219, 232-233, 238, 253, 262, 264, 284, 305, 365, 384, 460, 488 or processed mature forms and other forms thereof, and allelic and species variants thereof.

[0311] In particular, modified MMP-1 polypeptides provided herein that are temperature sensitive have an amino acid replacement or replacements at any one or more positions corresponding to any of the following positions: 95, 105, 150, 156, 159, 179, 180, 182, 185, 187, 198, 227, 234 and 240 of an unmodified MMP-1 polypeptide having a sequence of amino acids set forth in SEQ ID NO:2, or at a corresponding position in an allelic or species variant or other variant of an MMP-1 polypeptide that has at least or at least about 60%, 70%, 75%, 80%, 85%, 90%, 91%, 92%, 93%, 94%, 95%, 96%, 97%, 98%, 99% or more sequence identity to an MMP-1 polypeptide set forth in SEQ ID NO:2. Such modified MMP-1 polypeptides provided herein include polypeptides having an amino acid modification corresponding to any one or more modifications L95K, D105I, D105N, D105L, D105A, D105G, R150P, D156R, D156H, D156K, D156T, G159V, G159T, D179N, E180T, E180F, E182T, T185Q, N187I, A198L, V227E, I234E and I240S. More particularly, modified MMP-1 polypeptides provided herein include polypeptides having an amino acid modification corresponding to any one or more modifications L95K, D105N, R150P, D156K, D156T, G159V, D179N, E180T, A198L, V227E, and I240S.

[0312] Modified MMP-1 polypeptides provided herein include those that exhibit reversible or irreversible (also called non-reversible) temperature-dependent activity. In all cases, modified MMP-1 polypeptides provided herein above exhibit increased activity at a permissive temperature (e.g. 25° C.) compared to a non-permissive temperatures (e.g. 34° C. or 37° C.) For non-reversible polypeptides, exposure to the non-permissive temperature prior to, subsequently or intermittently from exposure to the permissive temperature renders the polypeptide irreversibly inactive. Thus, a modified MMP-1 polypeptide that is returned to temperature permissive conditions, for example 25° C., exhibits the same or similar activity of the MMP-1 polypeptide at non-permissive temperatures, for example, 34° C. or 37° C. For example, upon return to permissive conditions, irreversible modified MMP-1 polypeptides provided herein exhibit at or about 50%, 60%, 70%, 80%, 90%, 100%, 105%, 110%, 115%, or 120% the activity at non-permissive temperatures. Exemplary non-reversible modified MMP-1 polypeptides provided herein include polypeptides having an amino acid modification corresponding to any one or more modifications L95K, D105I, D105L, D105N, D105R, D105W, D151G, F155A, D156K, D156T, D156L, D156A, D156W, D156V, D156H, D156R, G159V, A176F, D179N, D181L, D181K, E182T, E182Q, T185R, N187F, N187I, G206A, G206S, V227C, V227E, Q228E, L229T, D233E, I234A, I234T, I234E, I240S, for example, any set forth in any of SEQ ID NOS:6, 25, 27, 35-36, 38, 70, 96, 99-101, 105, 111, 113-115, 132, 148, 160, 195, 209, 218-219, 235, 261, 264, 317, 324, 384, 388, 403, 429, 440, 460, 467, 476, 488, or processed mature forms and other forms thereof, and allelic and species variants thereof.

[0313] For reversible polypeptides, exposure to the non-permissive temperature prior to, subsequently or intermittently from exposure to the permissive temperature renders the polypeptide reversibly active. Thus, a modified MMP-1 polypeptide that is returned to temperature permissive conditions recovers activity, and thereby exhibits increased activity at the permissive temperature compared to the non-permissive temperature. In such examples, the recovered activity can be complete or partial. Thus, a modified MMP-1 polypeptide that is returned to temperature permissive conditions, for example 25° C., exhibits an increased activity compared to activity at non-permissive temperatures, for example, 34° C. or 37° C. For example, upon return to permissive conditions, reversible modified MMP-1 polypeptides provided herein exhibit at or about 120%, 125%, 130%, 140%, 150%, 160%, 170%, 180%, 200% or more of the activity at non-permissive temperatures. Exemplary reversible modified MMP-1 polypeptides provided herein include polypeptides having an amino acid modification corresponding to any one or more modifications D105A, D105F, D105G, D105S, D105T, R150P, G159T, E180Y, E180T, E180F, T185H, T185Q, T185A, T185E, N187R, N187M, N187K, R195V, A198L, A198M, S210V, Y218S, F223E, V227W, L229I and I240C, for example, any set forth in any of SEQ ID NOS: 29, 31-33, 39, 59, 125, 181-182, 185, 232-233, 238, 248, 253-254, 262, 284, 301, 305, 341, 354, 365, 397, 436, 483, or processed mature forms and other forms thereof, and allelic and species variants thereof.

[0314] 2. Matrix Metalloprotease-1 Activity Mutants

[0315] Also provided herein are modified MMP-1 polypeptides that exhibit increased activity compared to wild-type MMP-1 at the permissive and non-permissive temperature. Unlike tsMMP-1 polypeptides provided herein, such activity mutants exhibit increased activity at both the permissive and non-permissive temperature compared to the MMP-1 not containing the modification (e.g. wildtype). For example, modified MMP-1's that are provided herein have increased activity compared to wildtype at a low temperature that is less then 37° C., for example, that is at or about 18° C., 19° C., 20° C., 21° C., 22° C., 23° C., 24° C., 25° C., 26° C., 27° C., 28° C., 29° C. or 30° C., in particular at or about 18° C. to 25° C., for example at or about 25° C. Modified MMP-1's that are provided herein that have increased activity also exhibit increased activity compared to wild-type at higher temperature that is at or about 34° C., 35° C., 36° C., 37° C., 38° C. or 39° C., in particular at or about 34° C. or 37° C. The modified MMP-1's provided herein exhibit 1.1-fold, 1.2, 1.3, 1.4, 1.5, 1.6, 1.7, 1.8, 1.9, 2.0. 3.0. 4.0. 5.0, 6.0, 7.0, 8.0. 9.0, 10.0, 20.0 or more increased activity than an MMP-1 not containing the modification (e.g. wildtype) at the same temperature (permissive or non-permissive). For example, the modified MMP-1's provided herein exhibit 110%, 120%, 130%, 140%, 150%, 160%, 170%, 180%, 190%, 200%, 250%, 300%, 400%, 500%, 600%, 700%, 800%, 900%, 1000% or more increased activity than an MMP-1 not containing the modification (e.g. wildtype) at the same temperature (permissive or non-permissive).

[0316] Typically, the modification is an amino acid replacement. The amino acid replacement or replacements can be at any one or more positions corresponding to any of the following positions: 81, 84, 85, 86, 87, 89, 104, 105, 106, 107, 108, 109, 124, 131, 133, 134, 135, 143, 146, 147, 150, 152, 153, 154, 157, 158, 160, 161, 164, 166, 167, 180, 183, 189, 190, 207, 208, 211, 213, 214, 216, 218, 220, 222, 223, 224, 225, 226, 227, 228, 229, 230, 231, 232, 235, 236, 238, 239, 244, 249, 254, 256, 257, 258 of an unmodified MMP-1 polypeptide having a sequence of amino acids set forth in SEQ ID NO:2, or at a corresponding position in an allelic or species variant or other variant of an MMP-1 polypeptide that has at least or at least about 60%, 70%, 75%, 80%, 85%, 90%, 91%, 92%, 93%, 94%, 95%, 96%, 97%, 98%, 99% or more sequence identity to an MMP-1 polypeptide set forth in SEQ ID NO:2. Amino acid replacements include replacement of amino acids to an acidic (D or E); basic (H, K or R); neutral (C, N, Q, T, Y, S, G) or hydrophobic (F, M, W, I V, L A, P) amino acid residue. For example, amino acid replacements at the noted positions include replacement by amino acid residues E, H, R, C, Q, T, S, G, M, W, I, V, L, A, P, N, F, D, Y or K.

[0317] For example, modified MMP-1 polypeptides provided herein can include polypeptides having an amino acid modification corresponding to any one or more modifications of F81L (i.e. replacement of F by L at a position corresponding to position 81 of an MMP-1 polypeptide set forth in SEQ ID NO:2), F81A, F81G, F81Q, F81R, F81H, T84H, T84L, T84D, T84R, T84G, T84A, E85S, E85V, G86S, N87P, N87R, N87G, N87Q, R89A, R89T, R89G, R89K, P104E, P104D, P104Q, D105V, L106V, P107T, P107S, P107A, R108E, R108A, R108K, R108S, A109S, A109R, A109G, A109M, A109V, N124G, T131D, K132R, V133T, V133L, S134E, S134D, E135M, S143I, R146S, G147R, G147F, R150E, R150G, R150M, T150T, R150A, R150N, R150K, R150L, R150V, R150D, N152G, N152F, N152L, N152I, S153T, S153P, S153F, S153D, S153Y, P154S, P154I, G157F, P158V, P158I, G160Q, N161L, N161R, N161Y, N161E, N161T, N161I, N161V, N161F, N161Q, H164S, F166W, Q167R, Q167A, Q167S, Q167F, Q167P, Q167T, Q167V, Q167M, E180D, R183S, R189N, R189T, R189Q, E190D, L207M, S208K, S208R, S208L, T211N, I213G, G214L, G214E, L216I, Y218W, S220R, S220A, S220Q, S220T, S220G, S220M, S220V, S220N, T222R, T222P, T222S, T222F, T222N, F223Y, F223H, S224Q, S224K, S224D, G225Q, G225E, G225H, D226S, D226E, D226P, D226I, V227T, Q228A, Q228D, Q228E, Q228G, Q228H, Q228K, Q228L, Q228M, Q228N, Q228R, Q228S, Q228T, Q228W, Q228Y, L229Q, L229P, L229V, A230G, A230W, A230D, A230I, A230S, A230C, A230V, A230T, A230M, A230N, A230H, Q231I, Q231A, Q231F, Q231D, Q231G, Q231V, Q231W, Q231S, Q231H, Q231M, D232H, D232G, D232R, D232P, D232Y, D232S, D232F, D232V, D232K, D232W, D232Q, D232E, D232T, D232L, D235G, D235A, D235L, D235E, D235R, D235Q, D235T, D235N, G236M, G236R, G236S, G236T, G236C, G236K, G236E, G236L, G236N, Q238T, A239S, A239V, A239L, A2391, A239G, A239K, A239H, A239R, S244W, S244Q, Q249W, Q254S, P256S, K257E, K257R, or A258P.

[0318] In particular, modified MMP-1 polypeptides provided herein having increased activity have an amino acid modification corresponding to any one or more modifications of N161I, S208K, I213G, G214E, Q228A, Q228D, Q228E, Q228G, Q228H, Q228K, Q228L, Q228M, Q228N, Q228R, Q228S, Q228W, Q228Y, L229V, A230G, A230D, A230S, A230C, A230T, A230M, A230N, A230H, Q231A, Q231D, Q231G, Q231V, Q231S, D232H, D232G, D232P, D232V, D232K, D232W, D232Q, D232E, or D232T. In one example, activity mutants of MMP-1 provided herein including modified MMP-1 polypeptides having one of more modifications of S208K, I213G, or G214E.

[0319] Exemplary modified MMP-1 polypeptides have a sequence of amino acids set forth in any of SEQ ID NOS: 37, 41, 42, 44, 46, 48, 51, 53, 56, 57, 58, 174, 358, 366, 373, 391, 402, 403, 404, 405, 406, 408, 409, 410, 411, 412, 414, 415, 418, 419, 428, 437, 439, 535, 543, 544, 546, 553, 573, 662, 687, 689, 692, 693, 695, 697, 698, 700, 701, 702, 703, 781, 783, 786, 795, 796, 790, 838, 836, 840, 852, 846, 853, 864, 870, 884, 911, 897, 903, 899, 938, 941, 948, 934, 1160, 1159, 1166, 1194, 1205, 1207, 1215, 1217, 1219, 1225, 1233, 1239, 1245, 1246, 1248, 1251, 1530, 1653, 1675, 1699, 1707, 1710, 1711, 1741, 1895, 1947, 1961, 1968, 2024, 2025, 2028, 2030, 2043, 2048, 2087, 2088, 2098, 2111, 2114, 2116, 2117, 2118, 2124, 2125, 2121, 2126, 2176, 2218, 2228, 2241, 2231, 2233, 2235, 2236, 2239, 2242, 2423, 2495, 2496, 2497, 2702, 2703, 2715, 2743 2767, 2776, 2791, 2828, 2874, 2887, 2876, 2877, 2878, 2880, 2882, 2885, 2912, 2914, 2917, 2919, 2926, 2927, 2930, 2934, 2947, 2948, 2953, 2965, 2974, 2979, 2983, 2984, 2986, 2993, 2994, 2995, 2996, 2997, 2998, 2999, 3001, 3003, 3004, 3005, 3006, 3009, 3010, 3011, 3012, 3013, 3014, 3016, 3018, 3019, 3021, 3022, 3025, 3027, 3028, 3029, 3032, 3038, 3039, 3042, 3044, 3046, 3047, 3049, 3051, 3057, 3086, 3100, 3101, 3102, 3108, 3109, 3113, 3114, 3115, 3181, 3187, 3282, 3373, 3412, 3422, 3424, or 3458 and processed mature forms and other forms thereof, and allelic and species variants thereof.

[0320] 3. Combinations

[0321] Provided herein are modified MMP-1 polypeptides that contain 2, 3, 4, 5, 6, 7, 8, 9, 10, 11, 12, 13, 14, 15, 16, 17, 18, 19, 20 or more modifications compared to a starting or reference MMP-1 polypeptide. Modified MMP-1 polypeptides provided herein can contain any two or more modifications provided above. The two or more modifications can include two or more temperature-sensitive modifications, two or more activity modifications, or at least one temperature sensitive modification and at least one activity modification.

[0322] For example, modified MMP-1 polypeptides provided herein contain amino acid replacements at any two or more positions corresponding to any of the following positions: 84, 85, 95, 98, 99, 100, 103, 104, 105, 106, 109, 110, 111, 112, 118, 123, 124, 126, 147, 150, 151, 152, 153, 155, 156, 158, 159, 170, 171, 176, 178, 179, 180, 181, 182, 183, 185, 187, 188, 189, 190, 191, 192, 194, 195, 197, 198, 206, 207, 208, 210, 211, 212, 218, 223, 227, 228, 229, 230, 233, 234, 237, 240, 251, 254, 255, 256, 257, 258 or 259 of an unmodified MMP-1 polypeptide having a sequence of amino acids set forth in SEQ ID NO:2, or at a corresponding position in an allelic or species variant or other variant of an MMP-1 polypeptide that has at least or at least about 60%, 70%, 75%, 80%, 85%, 90%, 91%, 92%, 93%, 94%, 95%, 96%, 97%, 98%, 99% or more sequence identity to an MMP-1 polypeptide set forth in SEQ ID NO:2 Generally, such combination mutants are temperature sensitive and exhibit increased enzymatic activity at a permissive temperature compared with activity of the tsMMP-1 polypeptide at a non-permissive temperature. Typically, combination mutants also retain activity at the permissive temperature compared to the single mutant MMP-1 polypeptides alone or compared to an unmodified MMP-1 polypeptide not containing the amino acid, changes (e.g. a wildtype MMP-1 polypeptide set forth in SEQ ID NO:2 or active forms or other forms thereof) at the permissive or non-permissive temperature.

[0323] Exemplary MMP-1 combination mutants provided herein contain amino acid replacements at any two or more positions corresponding any of the following positions: 95, 105, 150, 156, 159, 179, 180, 182, 185, 187, 198, 227, 234 and 240 of an unmodified MMP-1 polypeptide having a sequence of amino acids set forth in SEQ ID NO:2, or at a corresponding position in an allelic or species variant or other variant of an MMP-1 polypeptide that has at least or at least about 60%, 70%, 75%, 80%, 85%, 90%, 91%, 92%, 93%, 94%, 95%, 96%, 97%, 98%, 99% or more sequence identity to an MMP-1 polypeptide set forth in SEQ ID NO:2. For example, modified MMP-1 polypeptides provided herein include polypeptides having amino acid modification corresponding to any two or more modifications L95K, D105I, D105N, D105L, D105A, D105G, R150P, D156R, D156H, D156K, D156T, G159V, G159T, D179N, E180T, E180F, E182T, T185Q, N187I, A198L, V227E, I234E and I240S. More particularly, modified MMP-1 polypeptides provided herein include polypeptides having amino acid modification corresponding to any two or more modifications L95K, D105N, R150P, D156K, D156T, G159V, D179N, E180T, A198L, V227E, and I240S. It is understood that at least two different positions are modified in the combination mutants provided herein. Exemplary MMP-1 combination mutant polypeptides provided herein are set forth in Table 15 in Example 3. For example, combination mutants provided herein that exhibit temperature sensitivity include D156K/G159V/D179N; R150P/V227E; D156T/V227E; G159V/A198L; D105N/A198L; D179N/V227E; A198L/V227E; E180T/V227E; D179N/A198L; D156K/D179N; D105N/R150P/D156K/G159V/D179N/E180T; D105N/R150P/E180T; G159V/I240S; D156T/D179N/I240S; D156T/G159V; R150P/E180T; D156T/D179N; D179N/I240S; L95K/D156T/D179N; G159V/D179N; L95K/D105N/E180T; R150P/D156T/A198L; L95K/D105N/R150P/D156T/G159V/A198L/V227E/I240S; L95K/R150P; or D105N/E180T. Exemplary modified MMP-1 polypeptides have a sequence of amino acids set forth in any of SEQ ID NOS: 3507-3531 and processed mature forms and other forms thereof, and allelic and species variants thereof.

[0324] Combination mutants provided herein also can include amino acid modification C259Q and at least one other modification. The other modification can be another temperature sensitive modification, for example, any of modifications L95K, D105I, D105N, D105L, D105A, D105G, R150P, D156R, D156H, D156K, D156T, G159V, G159T, D179N, E180T, E180F, E182T, T185Q, N187I, A198L, V227E, I234E and I2405. Exemplary of such combination mutants include C259Q/D105N; C259Q/R150P; C259Q/G159V; C259Q/D179N/ or C259Q/E180T, for example, as set forth in SEQ ID NOS: 3533-3537.

[0325] Also included among the combination mutants provided herein are MMP-1 polypeptides that contain at least one temperature sensitive modification and at least one activity modification, and retain temperature sensitivity. For example, such combination mutants exhibit increased activity at a permissive temperature compared to a non-permissive temperature as described herein above. Any one or more of the temperature sensitive mutants provided in Section D.1 above can be combined with any one or more of the activity mutants provided in Section D.2 above. For example, a combination mutant provided herein contains at least one modification of L95K, D105I, D105N, D105L, D105A, D105G, R150P, D156R, D156H, D156K, D156T, G159V, G159T, D179N, E180T, E180F, E182T, T185Q, N187I, A198L, V227E, I234E and I240S and at least one modification of N161I, S208K, I213G, G214E, Q228A, Q228D, Q228E, Q228G, Q228H, Q228K, Q228L, Q228M, Q228N, Q228R, Q228S, Q228W, Q228Y, L229V, A230G, A230D, A230S, A230C, A230T, A230M, A230N, A230H, Q231A, Q231D, Q231G, Q231V, Q231S, D232H, D232G, D232P, D232V, D232K, D232W, D232Q, D232E, or D232T. For example, a combination mutant provided herein contains at least one modification of L95K, D105N, R150P, D156K, D156T, G159V, D179N, E180T, A198L, V227E, or I240S and at least one modification of S208K, I213G, or G214E. Exemplary combination mutants provided herein include S208K/G159V; S208K/D179N; S208K/V227E; G214E/G159V; G214E/D179N; or I213G/D179N, for example, as set forth in any of SEQ ID NOS: 3541-3546.

[0326] 4. Additional Modifications

[0327] Any modified MMP-1 polypeptide provided herein also can contain one or more other modifications described in the art. The additional modifications can include, for example, any amino acid substitution, deletion or insertion known in the art. In addition to containing one or more modification(s) described above in Sections D.1 and D.2, any modified MMP-1 polypeptide provided herein can contain 1, 2, 3, 4, 5, 6, 7, 8, 9, 10, 11, 12, 13, 14, 15, 16, 17, 18, 19, 20 or more additional modifications. Typically, MMP-1 polypeptides retain enzymatic activity of wildtype MMP-1 at the permissive or non-permissive temperature, or exhibit increased enzymatic activity of wildtype MMP-1. Generally, where at least one modification is a temperature sensitive mutation, the MMP-1 polypeptide also exhibits increased activity at the permissive temperature (e.g. 25° C.) compared to the non-permissive temperature (e.g. 34° C. or 37° C.). The additional modifications can confer additional properties to the enzyme, for example, increased stability, increased half-life and/or increased resistance to inhibitors, for example, TIMP. The additional modifications include modifications to the primary sequence of the polypeptide, as well as other modification such as PEGylation and glycosylation of the polypeptide. Generally, such polypeptides include one or more modifications provided herein and exhibit increased activity at the lower temperature then at the higher temperature. For example, any of the amino acid replacements, including allelic variants and other variants known in the art, as set forth in SEQ ID NO:3506 or 3549, can be including herein. Exemplary modifications that can be included in a polypeptide provided herein include, but are not limited to, modifications T4P, Q10P, R30M, R30S, T96R, A114V, F166C, I172V, D181H, R189T, H199A; E200A, G214E, D232N, D233G, R243S, Q254P, I271A, R272A, T286A, I298T, E314G, F315S, V374M, R386Q, S387T, G391S, and T432A of a polypeptide set forth in SEQ ID NO:2.

[0328] 5. Other MMPs

[0329] Matrix metalloproteases are highly homologous polypeptides and exhibit similar specificities for extracellular matrix components. Exemplary sequences of MMPs are set forth in Table 5, for example, any set forth in SEQ ID NOS:1, 711, 714, 717, 720, 723, 726, 729, 732, 735, 738, 741, 744, 747, 750, 753, 756, 759, 762, 765, 768, 771, 774 or 777 or zymogen forms, processed mature forms or other forms thereof, or allelic or species variants thereof. FIG. 1 provides an alignment of the zymogen form of exemplary MMP polypeptides. Thus, any of the modifications provided herein in an MMP-1 can be made in any other MMP polypeptide. Hence, based on the description herein, any MMP, species, allelic variant or other variant, can be made temporally active (reversible or irreversible) by virtue of activity at a permissive temperature (generally a lower temperature) compared to a nonpermissive temperature (generally a higher temperature). Such tsMMP mutants can be used by one of skill in the art and used in compositions, processes or methods for the treatment of ECM-mediated diseases or conditions.

[0330] It is within the level of one of skill in the art to align various MMPs to MMP-1 (for example set forth in SEQ ID NO:2) and identify corresponding residues. Any of the modifications provided herein can be made in any other MMP at the corresponding residue. One of skill in the art can test the activity of the resulting modified polypeptide for enzymatic activity and/or temperature sensitivity at a permissive temperature compared to a non-permissive temperature. In particular, it is understood that conservative amino acid differences at a corresponding position in an MMP are functionally invariant. Thus, where a residue in MMP-1 aligns with a conservative residue thereto in another MMP, it is understood that such a residue is contemplated for modification herein. For example, position 95 in an MMP-1 set forth in SEQ ID NO:2 is a leucine (L). Alignment of SEQ ID NO:2 with other MMPs shows that position 95 in other MMPs is a leucine, isoleucine (I) or valine (V) residue (see FIG. 1). Each of L, I and V are conservative residues.

[0331] In particular, provided herein are modified MMP polypeptides that are modified by one or more amino acid replacement to confer temperature sensitivity and/or increased activity by effecting a corresponding MMP-1 modification at a corresponding residue Exemplary modifications provided herein include modification of any MMP, for example, an MMP-8, MMP-13, MMP-18, MMP-2, MMP-9, MMP-3, MMP-10, MMP-11, MMP-7, MMP-26 and MMP-12, at any one or more positions corresponding to any of the following positions: 95, 105, 151, 156, 159, 176, 179, 180, 181, 182, 185, 195, 198, 206, 210, 212, 218, 223, 228, 229, 233, 234, and 240 of an unmodified MMP-1 polypeptide having a sequence of amino acids set forth in SEQ ID NO:2. In other example, exemplary modifications provided herein include modification of any MMP, for example, an MMP-8, MMP-13, MMP-18, MMP-2, MMP-9, MMP-3, MMP-10, MMP-11, MMP-7, MMP-26 and MMP-12, at any one or more positions corresponding to any of the following positions: 81, 89, 109, 131, 133, 154, 157, 158, 160, 164, 166, 180, 207, 216, 218, 223, 228, 229, 231, 232, 236, 238, 256. The modification includes any one or more of the modifications provided herein in sections D.1 and D.2 at the corresponding position to the recited position in MMP-1. For example, residue 95 in an MMP-1 polypeptide set forth in SEQ ID NO:2 corresponds to residue 113 in an MMP-8 polypeptide set forth in SEQ ID NO:711. Thus, provided herein are modified MMP-8 polypeptides having an amino acid modification L113K of an unmodified MMP-8 polypeptide having a sequence of amino acids set forth in SEQ ID NO:711. Similar modifications are provided herein based on this description.

[0332] Any modified MMP polypeptide provided herein also can contain one or more other modifications described in the art. The additional modifications can include, for example, any amino acid substitution, deletion or insertion known in the art. In addition to containing one or modification described above in Sections D.1 and D.2, any modified MMP polypeptide provided herein can contain 1, 2, 3, 4, 5, 6, 7, 8, 9, 10, 11, 12, 13, 14, 15, 16, 17, 18, 19, 20 or more additional modifications, so long as the resulting MMP polypeptides exhibits increased activity at the permissive temperature (e.g. 25° C.) compared to the non-permissive temperature (e.g. 34° C. or 37° C.) and retains activity of wildtype MMP at the permissive or non-permissive temperature. The additional modifications can confer additional properties to the enzyme, for example, increased stability, increased half-life and/or increased resistance to inhibitors, for example, TIMP. The additional modifications include modifications to the primary sequence of the polypeptide, as well as other modification such as PEGylation and glycosylation of the polypeptide. Generally, such polypeptides include one or more modifications provided herein and exhibit increased activity at the lower temperature then a higher temperature. Exemplary modifications that can be included in a polypeptide provided herein include, but are not limited to, any modifications set forth in Table 6, below.

TABLE 6
Exemplary modifications in MMPs

| | SEQ | |
|---|---|---|
| MMP | ID NO | Amino Acid Modifications |
| MMP-8 | 711 | S3C; T32I; K87E; E153G; D193V; S229T; |
| | | N246Y; L249V; Q251A; Q251D; Q251G; |
| | | Q251V; Q251S; D252H; D252G; D252P; |
| | | D252V; D252K; D252W; D252Q; D252E; |
| | | D252T; K460T |
| MMP-13 | 714 | H2L; A8V; F75S; D89H; L254V; D257H; |
| | | D257G; D257P; D257V; D257K; D257W; |
| | | D257Q; D257E; D257T; D390G; I427T |
| MMP-2 | 720 | A27S; R101H; D210Y; A228T; F239L; E404K; |
| | | L433V; Q435A; Q435D; Q435G; Q435V; |
| | | Q435S; D436H; D436G; D436P; D436V; |
| | | D436K; D436W; D436Q; D436E; |
| | | D436T; A447V; T498M; V620I; V621L; S644I |
| MMP-9 | 723 | A20V; N38S; E82K; N127K; L187F; R239H; |
| | | T258I; Q279R; L431V; D434H; D434G; D434P; |
| | | D434V; D434K; D434W; D434Q; D434E; |
| | | D434T; F571V; P574R; R668Q |
| MMP-3 | 726 | K45E; H113P; R248W; L251V; Q253A; Q253D; |
| | | Q253G; Q253V; Q253S; D254H; D254G; |
| | | D254P; D254V; D254K; D254W; D254Q; |
| | | D254E; D254T |
| MMP-10 | 729 | L4V; V8G; R53K; G65R; E142Q; L250V; |
| | | Q252A; Q252D; Q252G; Q252V; Q252S; |
| | | D253H; D253G; D253P; D253V; D253K; |
| | | D253W; D253Q; D253E; D253T; F226L; |
| | | G282E; L440F; H475L |
| MMP-11 | 732 | V38A; E44K; P61L; S86P; D166N; F182S; |
| | | L245V; D248H; D248G; D248P; D248V; |
| | | D248K; D248W; D248Q; D248E; D248T; |
| | | Q323H |
| MMP-7 | 735 | C7W; R77R; S115T; G137D; P241L; L246V; |
| | | Q248A; Q248D; Q248G; Q248V; Q248S; |
| | | D249H; D249G; D249P; D249V; D249K; |
| | | D249W; D249Q; D249E; D249T |
| MMP-26 | 738 | K43E; S46L; Q239A; Q239D; Q239E; Q239G; |
| | | Q239H; Q239K; Q239L; Q239M; Q239N; |
| | | Q239R; Q239S; Q239W; Q239Y; Q239V; |
| | | L240V; D243H; D243G; D243P; D243V; |
| | | D243K; D243W; D243Q; D243E; D243T; |
| | | I260M |
| MMP-12 | 741 | L250V; D253H; D253G; D253P; D253V; |
| | | D253K; D253W; D253Q; D253E; D253T; |
| | | N357S; F468L; G469R |
| MMP-19 | 765 | R103C; L243V; D246H; D246G; D246P; |
| | | D246V; D246K; D246W; D246Q; D246E; |
| | | D246T; P245S; P488T; T491M |

### E. METHODS OF PRODUCING NUCLEIC ACIDS ENCODING tsMMPS AND POLYPEPTIDES THEREOF

[0333] Modified MMP polypeptides, for example tsMMPs set forth herein, can be obtained by methods well known in the art for protein purification and recombinant protein expression. Any method known to those of skill in the art for identification of nucleic acids that encode desired genes can be used. Any method available in the art can be used to obtain a full length (i.e., encompassing the entire coding region) cDNA or genomic DNA clone encoding a desired MMP, such as from a cell or tissue source. Modified or variant tsMMPs, can be engineered from a wildtype polypeptide, such as by site-directed mutagenesis.

[0334] Polypeptides can be cloned or isolated using any available methods known in the art for cloning and isolating nucleic acid molecules. Such methods include PCR amplification of nucleic acids and screening of libraries, including nucleic acid hybridization screening, antibody-based screening and activity-based screening.

[0335] Methods for amplification of nucleic acids can be used to isolate nucleic acid molecules encoding a desired polypeptide, including for example, polymerase chain reaction (PCR) methods. A nucleic acid containing material can be used as a starting material from which a desired polypeptide-encoding nucleic acid molecule can be isolated. For example, DNA and mRNA preparations, cell extracts, tissue extracts, fluid samples (e.g. blood, serum, saliva), samples from healthy and/or diseased subjects can be used in amplification methods. Nucleic acid libraries also can be used as a source of starting material. Primers can be designed to amplify a desired polypeptide. For example, primers can be designed based on expressed sequences from which a desired polypeptide is generated. Primers can be designed based on back-translation of a polypeptide amino acid sequence. Nucleic acid molecules generated by amplification can be sequenced and confirmed to encode a desired polypeptide.

[0336] Additional nucleotide sequences can be joined to a polypeptide-encoding nucleic acid molecule, including linker sequences containing restriction endonuclease sites for the purpose of cloning the synthetic gene into a vector, for example, a protein expression vector or a vector designed for the amplification of the core protein coding DNA sequences. Furthermore, additional nucleotide sequences specifying functional DNA elements can be operatively linked to a polypeptide-encoding nucleic acid molecule. Examples of such sequences include, but are not limited to, promoter sequences designed to facilitate intracellular protein expression, and secretion sequences, for example heterologous signal sequences, designed to facilitate protein secretion. Such sequences are known to those of skill in the art. For example, exemplary heterologous signal sequences include, but are not limited to, human kappa IgG heterologous signal sequence set forth in SEQ ID NO:3468. For bacterial expression, and exemplary heterologous signal sequence is the pelB leader sequence, for example, as set forth in SEQ ID NO: 3547. Additional nucleotide residues sequences such as sequences of bases specifying protein binding regions also can be linked to enzyme-encoding nucleic acid molecules. Such regions include, but are not limited to, sequences of residues that facilitate or encode proteins that facilitate uptake of an enzyme into specific target cells, or otherwise alter pharmacokinetics of a product of a synthetic gene. For example, enzymes can be linked to PEG moieties.

[0337] In addition, tags or other moieties can be added, for example, to aid in detection or affinity purification of the polypeptide. For example, additional nucleotide residues sequences such as sequences of bases specifying an epitope tag or other detectable marker also can be linked to enzyme-encoding nucleic acid molecules. Exemplary of such sequences include nucleic acid sequences encoding a His tag (e.g., 6×His, HHHHHH; SEQ ID NO:3465) or Flag Tag (DYKDDDDK; SEQ ID NO:3467).

[0338] The identified and isolated nucleic acids can then be inserted into an appropriate cloning vector. A large number of vector-host systems known in the art can be used. Possible vectors include, but are not limited to, plasmids or modified viruses, but the vector system must be compatible with the host cell used. Such vectors include, but are not limited to, bacteriophages such as lambda derivatives, or plasmids such as pCMV4, pBR322 or pUC plasmid derivatives or the Bluescript vector (Stratagene, La Jolla, Calif.). Other expression vectors include the pET303CTHis (SEQ ID NO:3466; Invitrogen, CA) or pET-26B vector (SEQ ID NO:3548) expression vector exemplified herein. The insertion into a cloning vector can, for example, be accomplished by ligating the DNA fragment into a cloning vector which has complementary cohesive termini. Insertion can be effected using TOPO cloning vectors (INVITROGEN, Carlsbad, Calif.). If the complementary restriction sites used to fragment the DNA are not present in the cloning vector, the ends of the DNA molecules can be enzymatically modified. Alternatively, any site desired can be produced by ligating nucleotide sequences (linkers) onto the DNA termini; these ligated linkers can contain specific chemically synthesized oligonucleotides encoding restriction endonuclease recognition sequences. In an alternative method, the cleaved vector and protein gene can be modified by homopolymeric tailing. Recombinant molecules can be introduced into host cells via, for example, transformation, transfection, infection, electroporation and sonoporation, so that many copies of the gene sequence are generated.

[0339] In specific embodiments, transformation of host cells with recombinant DNA molecules that incorporate the isolated protein gene, cDNA, or synthesized DNA sequence enables generation of multiple copies of the gene. Thus, the gene can be obtained in large quantities by growing transformants, isolating the recombinant DNA molecules from the transformants and, when necessary, retrieving the inserted gene from the isolated recombinant DNA.

[0340] 1. Vectors and cells For recombinant expression of one or more of the desired proteins, such as any described herein, the nucleic acid containing all or a portion of the nucleotide sequence encoding the protein can be inserted into an appropriate expression vector, i.e., a vector that contains the necessary elements for the transcription and translation of the inserted protein coding sequence. The necessary transcriptional and translational signals also can be supplied by the native promoter for enzyme genes, and/or their flanking regions.

[0341] Also provided are vectors that contain a nucleic acid encoding the enzyme. Cells containing the vectors also are provided. The cells include eukaryotic and prokaryotic cells, and the vectors are any suitable for use therein.

[0342] Prokaryotic and eukaryotic cells, including endothelial cells, containing the vectors are provided. Such cells include bacterial cells, yeast cells, fungal cells, Archea, plant cells, insect cells and animal cells. The cells are used to produce a protein thereof by growing the above-described cells under conditions whereby the encoded protein is expressed by the cell, and recovering the expressed protein. For purposes herein, for example, the enzyme can be secreted into the medium.

[0343] Provided are vectors that contain a sequence of nucleotides that encodes the proenzyme polypeptide coupled to the native or heterologous signal sequence, as well as multiple copies thereof. The vectors can be selected for expression of the enzyme protein in the cell or such that the enzyme protein is expressed as a secreted protein. The proenzyme (i.e. zymogen) form of the enzyme can be purified for use as an activatable, i.e. conditional active, enzyme herein. Alternatively, upon secretion the prosegment can be cleaved by chemical agents or catalytically or autocatalytically to generate a mature enzyme by the use of a processing agent. This processing step can be performed during the purification step and/or immediately before use of the enzyme. If desired, the processing agent can be dialyzed away or otherwise purified away from the purified protein before use. Alternative or additionally, if necessary, the enzyme can be purified such that the prosegment is removed from the preparation.

[0344] A variety of host-vector systems can be used to express the protein coding sequence. These include but are not limited to mammalian cell systems transfected with plasmid DNA or infected with virus (e.g. vaccinia virus, adenovirus and other viruses); insect cell systems infected with virus (e.g. baculovirus); microorganisms such as yeast containing yeast vectors; or bacteria transformed with bacteriophage, DNA, plasmid DNA, or cosmid DNA. The expression elements of vectors vary in their strengths and specificities. Depending on the host-vector system used, any one of a number of suitable transcription and translation elements can be used.

[0345] Any methods known to those of skill in the art for the insertion of DNA fragments into a vector can be used to construct expression vectors containing a chimeric gene containing appropriate transcriptional/translational control signals and protein coding sequences. These methods can include in vitro recombinant DNA and synthetic techniques and in vivo recombinants (genetic recombination). Expression of nucleic acid sequences encoding protein, or domains, derivatives, fragments or homologs thereof, can be regulated by a second nucleic acid sequence so that the genes or fragments thereof are expressed in a host transformed with the recombinant DNA molecule(s). For example, expression of the proteins can be controlled by any promoter/enhancer known in the art. In a specific embodiment, the promoter is not native to the genes for a desired protein. Promoters which can be used include but are not limited to the SV40 early promoter (Bernoist and Chambon, Nature 290:304-310 (1981)), the promoter contained in the 3′ long terminal repeat of Rous sarcoma virus (Yamamoto et al. Cell 22:787-797 (1980)), the herpes thymidine kinase promoter (Wagner et al., Proc. Natl. Acad. Sci. USA 78:1441-1445 (1981)), the regulatory sequences of the metallothionein gene (Brinster et al., Nature 296:39-42 (1982)); prokaryotic expression vectors such as the (3-lactamase promoter (Jay et al., (1981) Proc. Natl. Acad. Sci. USA 78:5543) or the tac promoter (DeBoer et al., Proc. Natl. Acad. Sci. USA 80:21-25 (1983)); see also “Useful Proteins from Recombinant Bacteria”: in Scientific American 242:79-94 (1980)); plant expression vectors containing the nopaline synthase promoter (Herrara-Estrella et al., Nature 303:209-213 (1984)) or the cauliflower mosaic virus 35S RNA promoter (Gardner et al., Nucleic Acids Res. 9:2871 (1981)), and the promoter of the photosynthetic enzyme ribulose bisphosphate carboxylase (Herrera-Estrella et al., Nature 310:115-120 (1984)); promoter elements from yeast and other fungi such as the Ga14 promoter, the alcohol dehydrogenase promoter, the phosphoglycerol kinase promoter, the alkaline phosphatase promoter, and the following animal transcriptional control regions that exhibit tissue specificity and have been used in transgenic animals: elastase I gene control region which is active in pancreatic acinar cells (Swift et al., Cell 38:639-646 (1984); Ornitz et al., Cold Spring Harbor Symp. Quant. Biol. 50:399-409 (1986); MacDonald, Hepatology 7:425-515 (1987)); insulin gene control region which is active in pancreatic beta cells (Hanahan et al., Nature 315:115-122 (1985)), immunoglobulin gene control region which is active in lymphoid cells (Grosschedl et al., Cell 38:647-658 (1984); Adams et al., Nature 318:533-538 (1985); Alexander et al., Mol. Cell. Biol. 7:1436-1444 (1987)), mouse mammary tumor virus control region which is active in testicular, breast, lymphoid and mast cells (Leder et al., Cell 45:485-495 (1986)), albumin gene control region which is active in liver (Pinckert et al., Genes and Devel. 1:268-276 (1987)), alpha-fetoprotein gene control region which is active in liver (Krumlauf et al., Mol. Cell. Biol. 5:1639-1648 (1985); Hammer et al., Science 235:53-58 1987)), alpha-1 antitrypsin gene control region which is active in liver (Kelsey et al., Genes and Devel. 1:161-171 (1987)), beta globin gene control region which is active in myeloid cells (Magram et al., Nature 315:338-340 (1985); Kollias et al., Cell 46:89-94 (1986)), myelin basic protein gene control region which is active in oligodendrocyte cells of the brain (Readhead et al., Cell 48:703-712 (1987)), myosin light chain-2 gene control region which is active in skeletal muscle (Shani, Nature 314:283-286 (1985)), and gonadotrophic releasing hormone gene control region which is active in gonadotrophs of the hypothalamus (Mason et al., Science 234:1372-1378 (1986)).

[0346] In a specific embodiment, a vector is used that contains a promoter operably linked to nucleic acids encoding a desired protein, or a domain, fragment, derivative or homolog, thereof, one or more origins of replication, and optionally, one or more selectable markers (e.g., an antibiotic resistance gene). Exemplary plasmid vectors for transformation of E. coli cells, include, for example, the pQE expression vectors (available from Qiagen, Valencia, Calif.; see also literature published by Qiagen describing the system). pQE vectors have a phage T5 promoter (recognized by E. coli RNA polymerase) and a double lac operator repression module to provide tightly regulated, high-level expression of recombinant proteins in E. coli, a synthetic ribosomal binding site (RBS II) for efficient translation, a 6×His tag coding sequence, t₀ and T1 transcriptional terminators, ColE1 origin of replication, and a beta-lactamase gene for conferring ampicillin resistance. The pQE vectors enable placement of a 6×His tag at either the N- or C-terminus of the recombinant protein. Such plasmids include pQE 32, pQE 30, and pQE 31 which provide multiple cloning sites for all three reading frames and provide for the expression of N-terminally 6×His-tagged proteins. Other exemplary plasmid vectors for transformation of E. coli cells, include, for example, the pET expression vectors (see, U.S. Pat. No. 4,952,496; available from NOVAGEN, Madison, Wis.; see, also literature published by Novagen describing the system). Such plasmids include pET 11a, which contains the T71ac promoter, T7 terminator, the inducible E. coli lac operator, and the lac repressor gene; pET 12a-c, which contains the T7 promoter, T7 terminator, and the E. coli ompT secretion signal; and pET 15b and pET19b (NOVAGEN, Madison, Wis.), which contain a His-Tag™ leader sequence for use in purification with a His column and a thrombin cleavage site that permits cleavage following purification over the column, the T7-lac promoter region and the T7 terminator, and pET-26B (SEQ ID NO:3548). An additional pET vector is pET303CTHis (set forth in SEQ ID NO: 3466; Invitrogen, CA), which contains a T71ac promoter, T7 terminator, the inducible E. coli lac operator, a beta-lactamase gene for conferring ampicillin resistance, and also a His-Tag sequence for use in purification.

[0347] Exemplary of a vector for mammalian cell expression is the HZ24 expression vector. The HZ24 expression vector was derived from the pCI vector backbone (Promega). It contains DNA encoding the Beta-lactamase resistance gene (AmpR), an F1 origin of replication, a Cytomegalovirus immediate-early enhancer/promoter region (CMV), and an SV40 late polyadenylation signal (SV40). The expression vector also has an internal ribosome entry site (IRES) from the ECMV virus (Clontech) and the mouse dihydrofolate reductase (DHFR) gene.

[0348] 2. Expression

[0349] Modified MMP polypeptides, for example tsMMPs, can be produced by any method known to those of skill in the art including in vivo and in vitro methods. Desired proteins can be expressed in any organism suitable to produce the required amounts and forms of the proteins, such as for example, needed for administration and treatment. Expression hosts include prokaryotic and eukaryotic organisms such as E. coli, yeast, plants, insect cells, mammalian cells, including human cell lines and transgenic animals. Expression hosts can differ in their protein production levels as well as the types of post-translational modifications that are present on the expressed proteins. The choice of expression host can be made based on these and other factors, such as regulatory and safety considerations, production costs and the need and methods for purification.

[0350] Many expression vectors are available and known to those of skill in the art and can be used for expression of proteins. The choice of expression vector will be influenced by the choice of host expression system. In general, expression vectors can include transcriptional promoters and optionally enhancers, translational signals, and transcriptional and translational termination signals. Expression vectors that are used for stable transformation typically have a selectable marker which allows selection and maintenance of the transformed cells. In some cases, an origin of replication can be used to amplify the copy number of the vector.

[0351] Modified MMP polypeptides, for example tsMMPs, also can be utilized or expressed as protein fusions. For example, an enzyme fusion can be generated to add additional functionality to an enzyme. Examples of enzyme fusion proteins include, but are not limited to, fusions of a signal sequence, a tag such as for localization, e.g. a his₆ tag or a myc tag, or a tag for purification, for example, a GST fusion, and a sequence for directing protein secretion and/or membrane association.

[0352] Generally, modified MMP polypeptides, for example tsMMPs, are expressed in an inactive zymogen form. Zymogen conversion can be achieved by exposure to chemical agents, to other proteases or to autocatalysis to generate a mature enzyme as described elsewhere herein. Any form of an enzyme is contemplated herein. It is understood that, if provided and expressed in a zymogen form, that it is activated prior to use by a processing agent.

[0353] a. Prokaryotic Cells

[0354] Prokaryotes, especially E. coli, provide a system for producing large amounts of proteins. Transformation of E. coli is simple and rapid technique well known to those of skill in the art. Expression vectors for E. coli can contain inducible promoters, such promoters are useful for inducing high levels of protein expression and for expressing proteins that exhibit some toxicity to the host cells. Examples of inducible promoters include the lac promoter, the trp promoter, the hybrid tac promoter, the T7 and SP6 RNA promoters and the temperature regulated λPL promoter.

[0355] Proteins, such as any provided herein, can be expressed in the cytoplasmic environment of E. coli. The cytoplasm is a reducing environment and for some molecules, this can result in the formation of insoluble inclusion bodies. Reducing agents such as dithiothreotol and β-mercaptoethanol and denaturants, such as guanidine-HCl and urea can be used to resolubilize the proteins. An alternative approach is the expression of proteins in the periplasmic space of bacteria which provides an oxidizing environment and chaperonin-like and disulfide isomerases and can lead to the production of soluble protein. Typically, a leader sequence is fused to the protein to be expressed which directs the protein to the periplasm. The leader is then removed by signal peptidases inside the periplasm. Examples of periplasmic-targeting leader sequences include the pelB leader (SEQ ID NO: 3547) from the pectate lyase gene and the leader derived from the alkaline phosphatase gene. In some cases, periplasmic expression allows leakage of the expressed protein into the culture medium. The secretion of proteins allows quick and simple purification from the culture supernatant. Proteins that are not secreted can be obtained from the periplasm by osmotic lysis. Similar to cytoplasmic expression, in some cases proteins can become insoluble and denaturants and reducing agents can be used to facilitate solubilization and refolding. Temperature of induction and growth also can influence expression levels and solubility, typically temperatures between 25° C. and 37° C. are used. Typically, bacteria produce aglycosylated proteins. Thus, if proteins require glycosylation for function, glycosylation can be added in vitro after purification from host cells.

[0356] b. Yeast Cells

[0357] Yeasts such as Saccharomyces cerevisae, Schizosaccharomyces pombe, Yarrowia lipolytica, Kluyveromyces lactis and Pichia pastoris are well known yeast expression hosts that can be used for production of proteins, such as any described herein. Yeast can be transformed with episomal replicating vectors or by stable chromosomal integration by homologous recombination. Typically, inducible promoters are used to regulate gene expression. Examples of such promoters include GAL1, GAL7 and GAL5 and metallothionein promoters, such as CUP1, AOX1 or other Pichia or other yeast promoter. Expression vectors often include a selectable marker such as LEU2, TRP1, HIS3 and URA3 for selection and maintenance of the transformed DNA. Proteins expressed in yeast are often soluble. Co-expression with chaperonins such as Bip and protein disulfide isomerase can improve expression levels and solubility. Additionally, proteins expressed in yeast can be directed for secretion using secretion signal peptide fusions such as the yeast mating type alpha-factor secretion signal from Saccharomyces cerevisae and fusions with yeast cell surface proteins such as the Aga2p mating adhesion receptor or the Arxula adeninivorans glucoamylase. A protease cleavage site such as for the Kex-2 protease, can be engineered to remove the fused sequences from the expressed polypeptides as they exit the secretion pathway. Yeast also is capable of glycosylation at Asn-X-Ser/Thr motifs.

[0358] c. Insect Cells

[0359] Insect cells, particularly using baculovirus expression, are useful for expressing polypeptides such as matrix-degrading enzymes. Insect cells express high levels of protein and are capable of most of the post-translational modifications used by higher eukaryotes. Baculovirus have a restrictive host range which improves the safety and reduces regulatory concerns of eukaryotic expression. Typical expression vectors use a promoter for high level expression such as the polyhedrin promoter of baculovirus. Commonly used baculovirus systems include the baculoviruses such as Autographa californica nuclear polyhedrosis virus (AcNPV), and the bombyx mori nuclear polyhedrosis virus (BmNPV) and an insect cell line such as Sf9 derived from Spodoptera frugiperda, Pseudaletia unipuncta (A7S) and Danaus plexippus (DpN1). For high-level expression, the nucleotide sequence of the molecule to be expressed is fused immediately downstream of the polyhedrin initiation codon of the virus. Mammalian secretion signals are accurately processed in insect cells and can be used to secrete the expressed protein into the culture medium. In addition, the cell lines Pseudaletia unipuncta (A7S) and Danaus plexippus (DpN1) produce proteins with glycosylation patterns similar to mammalian cell systems.

[0360] An alternative expression system in insect cells is the use of stably transformed cells. Cell lines such as the Schnieder 2 (S2) and Kc cells (Drosophila melanogaster) and C7 cells (Aedes albopictus) can be used for expression. The Drosophila metallothionein promoter can be used to induce high levels of expression in the presence of heavy metal induction with cadmium or copper. Expression vectors are typically maintained by the use of selectable markers such as neomycin and hygromycin.

[0361] d. Mammalian Cells

[0362] Mammalian expression systems can be used to express proteins including tsMMPs. Expression constructs can be transferred to mammalian cells by viral infection such as adenovirus or by direct DNA transfer such as liposomes, calcium phosphate, DEAE-dextran and by physical means such as electroporation and microinjection. Expression vectors for mammalian cells typically include an mRNA cap site, a TATA box, a translational initiation sequence (Kozak consensus sequence) and polyadenylation elements. IRES elements also can be added to permit bicistronic expression with another gene, such as a selectable marker. Such vectors often include transcriptional promoter-enhancers for high-level expression, for example the SV40 promoter-enhancer, the human cytomegalovirus (CMV) promoter and the long terminal repeat of Rous sarcoma virus (RSV). These promoter-enhancers are active in many cell types. Tissue and cell-type promoters and enhancer regions also can be used for expression. Exemplary promoter/enhancer regions include, but are not limited to, those from genes such as elastase I, insulin, immunoglobulin, mouse mammary tumor virus, albumin, alpha fetoprotein, alpha 1 antitrypsin, beta globin, myelin basic protein, myosin light chain 2, and gonadotropic releasing hormone gene control. Selectable markers can be used to select for and maintain cells with the expression construct. Examples of selectable marker genes include, but are not limited to, hygromycin B phosphotransferase, adenosine deaminase, xanthine-guanine phosphoribosyl transferase, aminoglycoside phosphotransferase, dihydrofolate reductase (DHFR) and thymidine kinase. For example, expression can be performed in the presence of methotrexate to select for only those cells expressing the DHFR gene. Fusion with cell surface signaling molecules such as TCR-ζ and Fc_{ε}RI-γ can direct expression of the proteins in an active state on the cell surface.

[0363] Many cell lines are available for mammalian expression including mouse, rat human, monkey, chicken and hamster cells. Exemplary cell lines include but are not limited to CHO, Balb/3T3, HeLa, MT2, mouse NS0 (nonsecreting) and other myeloma cell lines, hybridoma and heterohybridoma cell lines, lymphocytes, fibroblasts, Sp2/0, COS, NIH3T3, HEK293, 293S, 2B8, and HKB cells. Cell lines also are available adapted to serum-free media which facilitates purification of secreted proteins from the cell culture media. Examples include CHO-S cells (Invitrogen, Carlsbad, Calif., cat #11619-012) and the serum free EBNA-1 cell line (Pham et al., (2003) Biotechnol. Bioeng. 84:332-42.). Cell lines also are available that are adapted to grow in special mediums optimized for maximal expression. For example, DG44 CHO cells are adapted to grow in suspension culture in a chemically defined, animal product-free medium.

[0364] e. Plants

[0365] Transgenic plant cells and plants can be used to express proteins such as any described herein. Expression constructs are typically transferred to plants using direct DNA transfer such as microprojectile bombardment and PEG-mediated transfer into protoplasts, and with agrobacterium-mediated transformation. Expression vectors can include promoter and enhancer sequences, transcriptional termination elements and translational control elements. Expression vectors and transformation techniques are usually divided between dicot hosts, such as Arabidopsis and tobacco, and monocot hosts, such as corn and rice. Examples of plant promoters used for expression include the cauliflower mosaic virus promoter, the nopaline synthase promoter, the ribose bisphosphate carboxylase promoter and the ubiquitin and UBQ3 promoters.

[0366] Selectable markers such as hygromycin, phosphomannose isomerase and neomycin phosphotransferase are often used to facilitate selection and maintenance of transformed cells. Transformed plant cells can be maintained in culture as cells, aggregates (callus tissue) or regenerated into whole plants. Transgenic plant cells also can include algae engineered to produce matrix-degrading enzymes. Because plants have different glycosylation patterns than mammalian cells, this can influence the choice of protein produced in these hosts.

[0367] 3. Purification Techniques

[0368] Method for purification of polypeptides, including modified MMP polypeptides such as tsMMPs or other proteins, from host cells will depend on the chosen host cells and expression systems. For secreted molecules, proteins are generally purified from the culture media after removing the cells. For intracellular expression, cells can be lysed and the proteins purified from the extract. When transgenic organisms such as transgenic plants and animals are used for expression, tissues or organs can be used as starting material to make a lysed cell extract. Additionally, transgenic animal production can include the production of polypeptides in milk or eggs, which can be collected, and if necessary, the proteins can be extracted and further purified using standard methods in the art. If there are free cysteines, these can be replaced with other amino acids, such as serine. Replacement of free cysteines can prevent unwanted aggregation.

[0369] Generally, modified MMP polypeptides, such as tsMMPs, are expressed and purified to be in an inactive form (zymogen form) for subsequent activation as described in the systems and methods provided herein. Hence, following expression, mature forms can be generated by the use of a processing agent and chemical modification, catalysis and/or autocatalysis to remove the prosegment. Generally, a processing agent is chosen that is acceptable for administration to a subject. If necessary, additional purification steps can be performed to remove the processing agent from the purified preparation. In addition, if necessary, additional purification steps can be performed to remove the prosegment from the purified preparation. Activation can be monitored by SDS-PAGE (e.g., a 3 kilodalton shift) and by enzyme activity (cleavage of a fluorogenic substrate). Where an active enzyme is desired, typically, an enzyme is allowed to achieve >75% activation before purification. Typically, MMPs are rendered active by activation cleavage removing the propeptide or prosegment to generate a mature enzyme from a zymogen form. In some applications under nonpermissive temperatures, however, tsMMPs are inactive in their mature form until exposure to the requisite permissive temperature as described herein. For example, many MMPs provided herein are not active or substantially inactive at the non-permissive temperature.

[0370] Proteins, such as modified MMP polypeptides, for example, tsMMPs, can be purified using standard protein purification techniques known in the art including but not limited to, SDS-PAGE, size fraction and size exclusion chromatography, ammonium sulfate precipitation and ionic exchange chromatography, such as anion exchange. Affinity purification techniques also can be utilized to improve the efficiency and purity of the preparations. For example, antibodies, receptors and other molecules that bind MMPs can be used in affinity purification. Expression constructs also can be engineered to add an affinity tag to a protein such as a myc epitope, GST fusion or His₆ and affinity purified with myc antibody, glutathione resin and Ni-resin, respectively. Purity can be assessed by any method known in the art including gel electrophoresis and staining and spectrophotometric techniques.

### F. PREPARATION, FORMULATION AND ADMINISTRATION OF tsMMPS

[0371] The pharmaceutical compositions provided herein contain modified MMP polypeptides as described herein, for example tsMMPs and/or activity mutants. The compounds can be formulated into suitable pharmaceutical preparations such as solutions, suspensions, tablets, dispersible tablets, pills, capsules, powders, sustained release formulations or elixirs, for oral administrate, as well as transdermal patch preparation and dry powder inhalers. Typically, the compounds are formulated into pharmaceutical compositions using techniques and procedures well known in the art (see e.g., Ansel Introduction to Pharmaceutical Dosage Forms, Fourth Edition, 1985, 126). The pharmaceutical compositions are administered prior to, simultaneously, subsequently or intermittently with an activator that provides the requisite temperature for activation.

[0372] A selected modified MMP polypeptide, for example tsMMP, is included in an amount sufficient that, when activated to a mature form and, if necessary, exposed to the permissive temperature, exerts a therapeutically useful effect in the absence of undesirable side effects on the patient treated. The composition containing the modified MMP polypeptide, for example tsMMP, can include a pharmaceutically acceptable carrier. Therapeutically effective concentration can be determined empirically by testing the compounds in known in vitro and in vivo systems, such as the assays provided herein. The concentration of a selected modified MMP polypeptide, for example tsMMP, in the composition depends on absorption, inactivation and excretion rates of the complex, the physicochemical characteristics of the complex, the dosage schedule, and amount administered as well as other factors known to those of skill in the art. For example, it is understood that the precise dosage and duration of treatment is a function of the tissue being treated and may be determined empirically using known testing protocols or by extrapolation from in vivo or in vitro test data. It is to be noted that concentrations and dosage values may also vary with the age of the individual treated. It is to be further understood that for any particular subject, specific dosage regimens should be adjusted over time according to the individual need and the professional judgment of the person administering or supervising the administration of the formulations, and that the concentration ranges set forth herein are exemplary only and are not intended to limit the scope thereof.

[0373] The amount of a selected modified MMP polypeptide, for example tsMMP, to be administered for the treatment of a disease or condition, for example an ECM-mediated disease or condition such as cellulite or lymphedema, can be determined by standard clinical techniques. In addition, in vitro assays and animal models can be employed to help identify optimal dosage ranges. The precise dosage, which can be determined empirically, can depend on the particular enzyme, the route of administration, the type of disease to be treated and the seriousness of the disease. Exemplary dosages range from or about 10 μg to 100 mg, particularly 50 μg to 75 mg, 100 μg to 50 mg, 250 μg to 25 mg, 500 μg to 10 mg, 1 mg to 5 mg, or 2 mg to 4 mg. The particular dosage and formulation thereof depends upon the indication and individual. If necessary dosage can be empirically determined. Typically the dosage is administered for indications described herein in a volume of 1-100 ml, particularly, 1-50 ml, 10-50 ml, 10-30 ml, 1-20 ml, or 1-10 ml volumes following reconstitution, such as by addition of an activator (e.g. a cold buffer). Typically, such dosages are from at or about 100 μg to 50 mg, generally 1 mg to 5 mg, in a 10-50 ml final volume.

[0374] A modified MMP polypeptide, for example tsMMP, can be administered at once, or can be divided into a number of smaller doses to be administered at intervals of time. Selected modified MMP polypeptides, for example tsMMPs, can be administered in one or more doses over the course of a treatment time for example over several hours, days, weeks, or months. In some cases, continuous administration is useful. It is understood that the precise dosage and course of administration depends on the methods and system of activation contemplated.

[0375] Also, it is understood that the precise dosage and duration of treatment is a function of the disease being treated and can be determined empirically using known testing protocols or by extrapolation from in vivo or in vitro test data. It is to be noted that concentrations and dosage values also can vary with the severity of the condition to be alleviated. It is to be further understood that for any particular subject, specific dosage regimens should be adjusted over time according to the individual need and the professional judgment of the person administering or supervising the administration of the compositions, and that the concentration ranges set forth herein are exemplary only and are not intended to limit the scope or use of compositions and combinations containing them. The compositions can be administered hourly, daily, weekly, monthly, yearly or once. Generally, dosage regimens are chosen to limit toxicity. It should be noted that the attending physician would know how to and when to terminate, interrupt or adjust therapy to lower dosage due to toxicity, or bone marrow, liver or kidney or other tissue dysfunctions. Conversely, the attending physician would also know how to and when to adjust treatment to higher levels if the clinical response is not adequate (precluding toxic side effects).

[0376] Pharmaceutically acceptable compositions are prepared in view of approvals for a regulatory agency or other agency prepared in accordance with generally recognized pharmacopeia for use in animals and in humans. Compositions can take the form of solutions, suspensions, emulsion, tablets, pills, capsules, powders, and sustained release formulations. A composition can be formulated as a suppository, with traditional binders and carriers such as triglycerides. Oral formulation can include standard carriers such as pharmaceutical grades of mannitol, lactose, starch, magnesium stearate, sodium saccharine, cellulose, magnesium carbonate, and other such agents. The formulation should suit the mode of administration.

[0377] Pharmaceutical compositions can include carriers such as a diluent, adjuvant, excipient, or vehicle with which an enzyme is administered. Examples of suitable pharmaceutical carriers are described in “Remington's Pharmaceutical Sciences” by E. W. Martin. Such compositions will contain a therapeutically effective amount of the compound, generally in purified form, together with a suitable amount of carrier so as to provide the form for proper administration to the patient. Such pharmaceutical carriers can be sterile liquids, such as water and oils, including those of petroleum, animal, vegetable or synthetic origin, such as peanut oil, soybean oil, mineral oil, and sesame oil. Water is a typical carrier when the pharmaceutical composition is administered intravenously. Saline solutions and aqueous dextrose and glycerol solutions also can be employed as liquid carriers, particularly for injectable solutions. Compositions can contain along with an active ingredient: a diluent such as lactose, sucrose, dicalcium phosphate, or carboxymethylcellulose; a lubricant, such as magnesium stearate, calcium stearate and talc; and a binder such as starch, natural gums, such as gum acaciagelatin, glucose, molasses, polyvinylpyrrolidine, celluloses and derivatives thereof, povidone, crospovidones and other such binders known to those of skill in the art. Suitable pharmaceutical excipients include starch, glucose, lactose, sucrose, gelatin, malt, rice, flour, chalk, silica gel, sodium stearate, glycerol monostearate, talc, sodium chloride, dried skim milk, glycerol, propylene, glycol, water, and ethanol. A composition, if desired, also can contain minor amounts of wetting or emulsifying agents, or pH buffering agents, for example, acetate, sodium citrate, cyclodextrine derivatives, sorbitan monolaurate, triethanolamine sodium acetate, triethanolamine oleate, and other such agents.

[0378] Formulations are provided for administration to humans and animals in unit dosage forms, such as tablets, capsules, pills, powders, granules, sterile parenteral solutions or suspensions, and oral solutions or suspensions, and oil water emulsions containing suitable quantities of the compounds or pharmaceutically acceptable derivatives thereof. Pharmaceutically therapeutically active compounds and derivatives thereof are typically formulated and administered in unit dosage forms or multiple dosage forms. Each unit dose contains a predetermined quantity of therapeutically active compound sufficient to produce the desired therapeutic effect, in association with the required pharmaceutical carrier, vehicle or diluent. Examples of unit dose forms include ampoules and syringes and individually packaged tablets or capsules. Unit dose forms can be administered in fractions or multiples thereof. A multiple dose form is a plurality of identical unit dosage forms packaged in a single container to be administered in segregated unit dose form. Examples of multiple dose forms include vials, bottles of tablets or capsules or bottles of pints or gallons. Hence, multiple dose form is a multiple of unit doses that are not segregated in packaging. Generally, dosage forms or compositions containing active ingredient in the range of 0.005% to 100% with the balance made up from non-toxic carrier can be prepared.

[0379] Compositions can be formulated for administration by any route known to those of skill in the art including intramuscular, intravenous, intradermal, intralesional, intraperitoneal injection, subcutaneous, epidural, nasal, oral, vaginal, rectal, topical, local, otic, inhalational, buccal (e.g., sublingual), and transdermal administration or any route. Administration can be local, topical or systemic depending upon the locus of treatment. Local administration to an area in need of treatment can be achieved by, for example, but not limited to, local infusion during surgery, topical application, e.g., in conjunction with a wound dressing after surgery, by injection, by means of a catheter, by means of a suppository, or by means of an implant. Compositions also can be administered with other biologically active agents, either sequentially, intermittently or in the same composition. Administration also can include controlled release systems including controlled release formulations and device controlled release, such as by means of a pump.

[0380] The most suitable route in any given case depends on a variety of factors, such as the nature of the disease, the progress of the disease, the severity of the disease the particular composition which is used. For purposes herein, it is desired that modified MMP polypeptides, for example tsMMPs, are administered so that they reach the interstitium of skin or tissues. Thus, direct administration under the skin, such as by sub-epidermal administration methods, is contemplated. These include, for example, subcutaneous, intradermal and intramuscular routes of administration. Thus, in one example, local administration can be achieved by injection, such as from a syringe or other article of manufacture containing a injection device such as a needle. Other modes of administration also are contemplated. Pharmaceutical compositions can be formulated in dosage forms appropriate for each route of administration.

[0381] In one example, pharmaceutical preparation can be in liquid form, for example, solutions, syrups or suspensions. If provided in liquid form, the pharmaceutical preparation of tsMMP, for example, can be provided as a concentrated preparation to be diluted to a therapeutically effective concentration upon exposure to the permissive temperature, for example, addition of the activator (e.g. a cold buffer). The activator can be added to the preparation prior to administration, or the activator can be added simultaneously, intermittently or sequentially with the tsMMP preparation. Further, if provided in liquid form, the temperature of the preparation can be regulated prior to use in order to achieve a desired temperature for activation. For example, the liquid preparation can be chilled in an ice bucket or in a cold fridge or cold room prior to use and administration. Such liquid preparations can be prepared by conventional means with pharmaceutically acceptable additives such as suspending agents (e.g., sorbitol syrup, cellulose derivatives or hydrogenated edible fats); emulsifying agents (e.g., lecithin or acacia); non-aqueous vehicles (e.g., almond oil, oily esters, or fractionated vegetable oils); and preservatives (e.g., methyl or propyl-p-hydroxybenzoates or sorbic acid).

[0382] In another example, pharmaceutical preparations can be presented in lyophilized form for reconstitution with water or other suitable vehicle before use. For example, the pharmaceutical preparations of tsMMP can be reconstituted with a solution containing an activator at the requisite temperature, generally a cold buffer or liquid solution or a room temperature buffer or liquid solution. Alternatively, once reconstituted, the preparation can be regulated prior to use in order to achieve a desired temperature for activation. For example, the reconstituted liquid preparation can be stored at temperatures that are below the physiological temperature of the body, e.g. at 4° C. to 25° C.

[0383] Typically, modified MMP polypeptides provided herein are prepared in compositions containing requisite metals required for activity. For example, MMPs are Zn-dependent and Ca-dependent polypeptides. It is within the level of one of skill in the art to empirically determine the optimal concentration of zinc and calcium required for activity. Where the modified MMP polypeptide is a tsMMP, the optimal concentration of zinc and calcium is a concentration that maintains the temperature-sensitive phenotype. For example, as described herein (e.g. Examples 13 and 14) the presence of zinc can affect the temperature sensitive phenotype of MMP polypeptides. For example, the optimal concentration of ZnCl₂ in MMP compositions provided herein is typically less than 0.01 mM, for example, 0.0005 mM to 0.009 mM, and in particular 0.0005 mM to 0.005 mM, for example 0.001 mM. The optimal concentration of CaCl₂ is typically greater than about 1 mM, for example, 2 mM to 50 mM, in particular 5 mM to 20 mM, for example 10 mM to 15 mM, such as 10 mM. Other metals also can be included in the compositions as required for activity.

[0384] Administration methods can be employed to decrease the exposure of modified MMP polypeptides to degradative processes, such as proteolytic degradation and immunological intervention via antigenic and immunogenic responses. Examples of such methods include local administration at the site of treatment. PEGylation of therapeutics has been reported to increase resistance to proteolysis, increase plasma half-life, and decrease antigenicity and immunogenicity. Examples of PEGylation methodologies are known in the art (see for example, Lu and Felix, Int. J. Peptide Protein Res., 43: 127-138, 1994; Lu and Felix, Peptide Res., 6-142-6, 1993; Felix et al., Int. J. Peptide Res., 46: 253-64, 1995; Benhar et al., J. Biol. Chem., 269: 13398-404, 1994; Brumeanu et al., J Immunol., 154: 3088-95, 1995; see also, Caliceti et al. (2003) Adv. Drug Deliv. Rev. 55(10):1261-77 and Molineux (2003) Pharmacotherapy 23 (8 Pt 2):3S-8S). PEGylation also can be used in the delivery of nucleic acid molecules in vivo. For example, PEGylation of adenovirus can increase stability and gene transfer (see, e.g., Cheng et al. (2003) Pharm. Res. 20(9): 1444-51).

[0385] 1. Injectables, Solutions and Emulsions

[0386] Parenteral administration, generally characterized by injection, either subcutaneously, intramuscularly or intradermally is contemplated herein. Injectables can be prepared in conventional forms, either as liquid solutions or suspensions, solid forms suitable for solution or suspension in liquid prior to injection, or as emulsions. Suitable excipients are, for example, water, saline, dextrose, glycerol or ethanol. The pharmaceutical compositions also may contain other minor amounts of non-toxic auxiliary substances such as wetting or emulsifying agents, pH buffering agents, stabilizers, solubility enhancers, and other such agents, such as for example, sodium acetate, sorbitan monolaurate, triethanolamine oleate and cyclodextrins. Implantation of a slow-release or sustained-release system, such that a constant level of dosage is maintained (see, e.g., U.S. Pat. No. 3,710,795) is also contemplated herein. The percentage of active compound contained in such parenteral compositions is highly dependent on the specific nature thereof, as well as the activity of the compound and the needs of the subject.

[0387] Parenteral administration of the compositions generally includes sub-epidermal routes of administration such as intradermal, subcutaneous and intramuscular administrations. If desired, intravenous administration also is contemplated. Injectables are designed for local and systemic administration. For purposes herein, local administration is desired for direct administration to the affected interstitium. Preparations for parenteral administration include sterile solutions ready for injection, sterile dry soluble products, such as lyophilized powders, ready to be combined with a solvent just prior to use, including hypodermic tablets, sterile suspensions ready for injection, sterile dry insoluble products ready to be combined with a vehicle just prior to use and sterile emulsions. The solutions may be either aqueous or nonaqueous. If administered intravenously, suitable carriers include physiological saline or phosphate buffered saline (PBS), and solutions containing thickening and solubilizing agents, such as glucose, polyethylene glycol, and polypropylene glycol and mixtures thereof.

[0388] Pharmaceutically acceptable carriers used in parenteral preparations include aqueous vehicles, nonaqueous vehicles, antimicrobial agents, isotonic agents, buffers, antioxidants, local anesthetics, suspending and dispersing agents, emulsifying agents, sequestering or chelating agents and other pharmaceutically acceptable substances. Examples of aqueous vehicles include Sodium Chloride Injection, Ringers Injection, Isotonic Dextrose Injection, Sterile Water Injection, Dextrose and Lactated Ringers Injection. Nonaqueous parenteral vehicles include fixed oils of vegetable origin, cottonseed oil, corn oil, sesame oil and peanut oil. Antimicrobial agents in bacteriostatic or fungistatic concentrations can be added to parenteral preparations packaged in multiple-dose containers, which include phenols or cresols, mercurials, benzyl alcohol, chlorobutanol, methyl and propyl p-hydroxybenzoic acid esters, thimerosal, benzalkonium chloride and benzethonium chloride. Isotonic agents include sodium chloride and dextrose. Buffers include phosphate and citrate. Antioxidants include sodium bisulfate. Local anesthetics include procaine hydrochloride. Suspending and dispersing agents include sodium carboxymethylcelluose, hydroxypropyl methylcellulose and polyvinylpyrrolidone. Emulsifying agents include Polysorbate 80 (TWEENs 80). A sequestering or chelating agent of metal ions include EDTA. Pharmaceutical carriers also include ethyl alcohol, polyethylene glycol and propylene glycol for water miscible vehicles and sodium hydroxide, hydrochloric acid, citric acid or lactic acid for pH adjustment.

[0389] The concentration of the pharmaceutically active compound is adjusted so that an injection provides an effective amount to produce the desired pharmacological effect. The exact dose depends on the age, weight and condition of the patient or animal as is known in the art. The unit-dose parenteral preparations are packaged in an ampoule, a vial or a syringe with a needle. The volume of liquid solution or reconstituted powder preparation, containing the pharmaceutically active compound, is a function of the disease to be treated and the particular article of manufacture chosen for package. For example, for the treatment of cellulite, it is contemplated that for parenteral injection the injected volume is or is about 10 to 50 milliliters. All preparations for parenteral administration must be sterile, as is known and practiced in the art.

[0390] Lyophilized Powders

[0391] Of interest herein are lyophilized powders, which can be reconstituted for administration as solutions, emulsions and other mixtures. They may also be reconstituted and formulated as solids or gels.

[0392] The sterile, lyophilized powder is prepared by dissolving a compound of inactive enzyme in a buffer solution. The buffer solution may contain an excipient which improves the stability or other pharmacological component of the powder or reconstituted solution, prepared from the powder. Subsequent sterile filtration of the solution followed by lyophilization under standard conditions known to those of skill in the art provides the desired formulation. Briefly, the lyophilized powder is prepared by dissolving an excipient, such as dextrose, sorbital, fructose, corn syrup, xylitol, glycerin, glucose, sucrose or other suitable agent, in a suitable buffer, such as citrate, sodium or potassium phosphate or other such buffer known to those of skill in the art. Then, a selected enzyme is added to the resulting mixture, and stirred until it dissolves. The resulting mixture is sterile filtered or treated to remove particulates and to insure sterility, and apportioned into vials for lyophilization. Each vial will contain a single dosage (1 mg-1 g, generally 1-100 mg, such as 1-5 mg) or multiple dosages of the compound. The lyophilized powder can be stored under appropriate conditions, such as at about 4° C. to room temperature.

[0393] Reconstitution of this lyophilized powder with a buffer solution provides a formulation for use in parenteral administration. The solution chosen for reconstitution can be any buffer. For reconstitution about 1 μg-20 mg, preferably 10 μg-1 mg, more preferably about 100 μg is added per mL of buffer or other suitable carrier. The precise amount depends upon the indication treated and selected compound. Such amount can be empirically determined.

[0394] 2. Topical Administration

[0395] Topical mixtures are prepared as described for the local and systemic administration. The resulting mixture may be a solution, suspension, emulsions or the like and are formulated as creams, gels, ointments, emulsions, solutions, elixirs, lotions, suspensions, tinctures, pastes, foams, aerosols, irrigations, sprays, suppositories, bandages, dermal patches or any other formulations suitable for topical administration.

[0396] The compounds or pharmaceutically acceptable derivatives thereof may be formulated as aerosols for topical application, such as by inhalation (see, e. q., U.S. Pat. Nos. 4,044,126, 4,414,209, and 4,364,923, which describe aerosols for delivery of a steroid useful for treatment inflammatory diseases, particularly asthma). These formulations for administration to the respiratory tract can be in the form of an aerosol or solution for a nebulizer, or as a microfine powder for insufflation, alone or in combination with an inert carrier such as lactose. In such a case, the particles of the formulation will typically diameters of less than 50 microns, preferably less than 10 microns.

[0397] The compounds may be formulated for local or topical application, such as for topical application to the skin and mucous membranes, such as in the eye, in the form of gels, creams, and lotions and for application to the eye or for intracisternal or intraspinal application. Topical administration is contemplated for transdermal delivery and also for administration to the eyes or mucosa, or for inhalation therapies. Nasal solutions of the active compound alone or in combination with other pharmaceutically acceptable excipients also can be administered.

[0398] Formulations suitable for transdermal administration are provided. They can be provided in any suitable format, such as discrete patches adapted to remain in intimate contact with the epidermis of the recipient for a prolonged period of time. Such patches contain the active compound in optionally buffered aqueous solution of, for example, 0.1 to 0.2M concentration with respect to the active compound. Formulations suitable for transdermal administration also can be delivered by iontophoresis (see, e.g., Pharmaceutical Research 3(6), 318 (1986)) and typically take the form of an optionally buffered aqueous solution of the active compound.

[0399] 3. Compositions for Other Routes of Administration

[0400] Depending upon the condition treated other routes of administration, such as topical application, transdermal patches, oral and rectal administration are also contemplated herein. For example, pharmaceutical dosage forms for rectal administration are rectal suppositories, capsules and tablets for systemic effect. Rectal suppositories include solid bodies for insertion into the rectum which melt or soften at body temperature releasing one or more pharmacologically or therapeutically active ingredients. Pharmaceutically acceptable substances utilized in rectal suppositories are bases or vehicles and agents to raise the melting point. Examples of bases include cocoa butter (theobroma oil), glycerin-gelatin, carbowax (polyoxyethylene glycol) and appropriate mixtures of mono-, di- and triglycerides of fatty acids. Combinations of the various bases may be used. Agents to raise the melting point of suppositories include spermaceti and wax. Rectal suppositories may be prepared either by the compressed method or by molding. The typical weight of a rectal suppository is about 2 to 3 gm. Tablets and capsules for rectal administration are manufactured using the same pharmaceutically acceptable substance and by the same methods as for formulations for oral administration.

[0401] Formulations suitable for rectal administration can be provided as unit dose suppositories. These can be prepared by admixing the active compound with one or more conventional solid carriers, for example, cocoa butter, and then shaping the resulting mixture.

[0402] For oral administration, pharmaceutical compositions can take the form of, for example, tablets or capsules prepared by conventional means with pharmaceutically acceptable excipients such as binding agents (e.g., pregelatinized maize starch, polyvinyl pyrrolidone or hydroxypropyl methylcellulose); fillers (e.g., lactose, microcrystalline cellulose or calcium hydrogen phosphate); lubricants (e.g., magnesium stearate, talc or silica); disintegrants (e.g., potato starch or sodium starch glycolate); or wetting agents (e.g., sodium lauryl sulphate). The tablets can be coated by methods well-known in the art.

[0403] Formulations suitable for buccal (sublingual) administration include, for example, lozenges containing the active compound in a flavored base, usually sucrose and acacia or tragacanth; and pastilles containing the compound in an inert base such as gelatin and glycerin or sucrose and acacia.

[0404] Pharmaceutical compositions also can be administered by controlled release formulations and/or delivery devices (see, e.g., in U.S. Pat. Nos. 3,536,809; 3,598,123; 3,630,200; 3,845,770; 3,847,770; 3,916,899; 4,008,719; 4,687,610; 4,769,027; 5,059,595; 5,073,543; 5,120,548; 5,354,566; 5,591,767; 5,639,476; 5,674,533 and 5,733,566).

[0405] Various delivery systems are known and can be used to administer selected tsMMPs, such as but not limited to, encapsulation in liposomes, microparticles, microcapsules, recombinant cells capable of expressing the compound, receptor mediated endocytosis, and delivery of nucleic acid molecules encoding selected matrix-degrading enzymes such as retrovirus delivery systems.

[0406] Hence, in certain embodiments, liposomes and/or nanoparticles also can be employed with administration of matrix-degrading enzymes. Liposomes are formed from phospholipids that are dispersed in an aqueous medium and spontaneously form multilamellar concentric bilayer vesicles (also termed multilamellar vesicles (MLVs)). MLVs generally have diameters of from 25 nm to 4 μm. Sonication of MLVs results in the formation of small unilamellar vesicles (SUVs) with diameters in the range of 200 to 500 angstroms containing an aqueous solution in the core.

[0407] Phospholipids can form a variety of structures other than liposomes when dispersed in water, depending on the molar ratio of lipid to water. At low ratios, the liposomes form. Physical characteristics of liposomes depend on pH, ionic strength and the presence of divalent cations. Liposomes can show low permeability to ionic and polar substances, but at elevated temperatures undergo a phase transition which markedly alters their permeability. The phase transition involves a change from a closely packed, ordered structure, known as the gel state, to a loosely packed, less-ordered structure, known as the fluid state. This occurs at a characteristic phase-transition temperature and results in an increase in permeability to ions, sugars and drugs.

[0408] Liposomes interact with cells via different mechanisms: endocytosis by phagocytic cells of the reticuloendothelial system such as macrophages and neutrophils; adsorption to the cell surface, either by nonspecific weak hydrophobic or electrostatic forces, or by specific interactions with cell-surface components; fusion with the plasma cell membrane by insertion of the lipid bilayer of the liposome into the plasma membrane, with simultaneous release of liposomal contents into the cytoplasm; and by transfer of liposomal lipids to cellular or subcellular membranes, or vice versa, without any association of the liposome contents. Varying the liposome formulation can alter which mechanism is operative, although more than one can operate at the same time. Nanocapsules can generally entrap compounds in a stable and reproducible way. To avoid side effects due to intracellular polymeric overloading, such ultrafine particles (sized around 0.1 μm) should be designed using polymers able to be degraded in vivo. Biodegradable polyalkyl-cyanoacrylate nanoparticles that meet these requirements are contemplated for use herein, and such particles can be easily made.

[0409] 4. Activator

[0410] Generally, a tsMMP is administered in the presence of an activator that provides the requisite permissive temperature for activation of the enzyme. In other words, tsMMP provided herein are provided for administration at the requisite permissive temperature. Thus, activators provided herein include any that are capable of providing a temperature condition, hot or cold, and that do not exist at the site of administration unless provided exogenously. Thus, tsMMPs can be regulated by controlling the timing and duration of exposure to the temperature condition. An activator is chosen such that it provides a warm or cold temperature depending on the particular enzyme and the permissive temperature requirements provided for activation.

[0411] For example where the permissive temperature is 25° C. an activator includes a buffer or other liquid diluent that is at or about 25° C., 24° C., 23° C., 22° C., 21° C., 20° C., 19° C., 18° C., 17° C., 16° C., 15° C., 14° C., 13° C., 12° C., 11° C., 10° C., 9° C., 8° C., 7° C., 6° C., 5° C. or less. In other words, the tsMMP is provided and/or exposed to a buffer or other liquid diluent that is at or about 25° C., 24° C., 23° C., 22° C., 21° C., 20° C., 19° C., 18° C., 17° C., 16° C., 15° C., 14° C., 13° C., 12° C., 11° C., 10° C., 9° C., 8° C., 7° C., 6° C., 5° C. or less. The buffer or liquid can be provided in the same composition as the tsMMP or in a separate composition. When provided separately, it can be administered prior to, simultaneously, subsequently or intermittently from the tsMMP. Upon administration in vivo where the physiologic temperature is at or about 37° C., the temperature of the buffer will warm up to a temperature providing the permissive temperature for activation of the tsMMP (which could occur immediately or almost immediately depending on the temperature of the liquid). Due to the physiologic temperature conditions in vivo, the temperature will warm to non-permissive conditions, thereby resulting in inactivation of the enzyme and temporal control thereof.

[0412] In another example, the activator can be a cold pack or a hot pack, depending on the particular enzyme and the permissive temperature provided. Such activators include, but are not limited to ice wraps, gel ice packs, cold therapy, ice packs, cold compress, ice blankets, or other similar items. In other words, the site of locus of administration of the tsMMP can be exposed to the cold pack or hot pack in order to cool or warm the site of administration below or above the physiological temperature of the body, respectively, prior to, concurrently or subsequently with administration of the tsMMP to the same locus. For example, the cold pack can be frozen (e.g. ice pack), or can be a liquid cold pack maintained at a temperature that is 4° C., 5° C., 6° C., 7° C., 8° C., 9° C., 10° C., 11° C., 12° C., 13° C., 14° C., 15° C. or more. A cold or hot pack can be applied directly to the locus of treatment, and generally is applied locally to the skin at the site of administration of the tsMMP. One of skill in the art can empirically determine the length of time required for application depending of the particular target depth of the tissue that is being treated, the particular enzyme that is being used, and other factors based on known testing protocols or extrapolation from in vivo or in vitro test data. The hot pack or cold pack can be applied prior to, subsequently, simultaneously or intermittently from the tsMMP. For example, if the particular enzyme is reversibly active, the cold pack can be applied intermittently over a course of hours or days. It is understood that it is customary for a subject to feel cold, aching and burning and numbness upon administration of a cold pack, and such symptoms can be monitored by the subject or a treating physician.

[0413] In particular embodiments, the tsMMP is exposed to a temperature that is at or below the permissive temperature of the body immediately before administration. For example, the tsMMP is stored at a cold temperature and/or is reconstituted in a cold buffer. In some examples, the locus of administration of the tsMMP also is exposed cold by exposure to a cold pack to cool the site of administration below the physiologic temperature of the body. Upon administration of the tsMMP, the tsMMP is exposed to the permissive temperature, which will steadily warm to the nonpermissive physiologic temperature of the body (e.g. about 37° C.). Where the temperature reaches the nonpermissive temperature, the tsMMP is rendered inactive or substantially inactive. Hence, activation of the tsMMP is conditionally controlled. The duration of time of exposure to a permissive temperature below the physiological temperature of the body can be controlled by continued exposure to a cold pack at the site of administration for a predetermined length of time.

[0414] In another embodiment, the tsMMP is exposed to a temperature that is at or above the permissive temperature of the body immediately before administration. For example, the tsMMP is stored at a warm temperature and/or is reconstituted in a warm buffer that is above the physiological temperature of the body. In some examples, the locus of administration of the tsMMP also is warmed by exposure to a hot pack to warm the site of administration above the physiologic temperature of the body. Upon administration of the tsMMP, the tsMMP is exposed to the permissive temperature, which will steadily cool to the nonpermissive physiologic temperature of the body (e.g. about 37° C.). Where the temperature reaches the nonpermissive temperature, the tsMMP is rendered inactive or substantially inactive. Hence, activation of the tsMMP is conditionally controlled. The duration of time of exposure to a permissive temperature above the physiological temperature of the body can be controlled by continued exposure to a hot pack at the site of administration for a predetermined length of time.

[0415] 5. Combination Therapies

[0416] Any of the modified MMP polypeptides, for example tsMMPs, described herein can be further co-formulated or co-administered together with, prior to, intermittently with, or subsequent to, other therapeutic or pharmacologic agents or procedures. Such agents include, but are not limited to, other biologics, small molecule compounds, dispersing agents, anesthetics, vasoconstrictors and surgery, and combinations thereof. For example, for any disease or condition, including all those exemplified above, for which other agents and treatments are available, selected modified MMPs, for example tsMMPs, for such diseases and conditions can be used in combination therewith. In another example, a local anesthetic, for example, lidocaine can be administered to provide pain relief. In some examples, the anesthetic can be provided in combination with a vasoconstrictor to increase the duration of the anesthetic effects. Any of the pharmacological agents provided herein can be combined with a dispersion agent that facilitates access into the tissue of pharmacologic agents, for example, following subcutaneous administration. Such substances are known in the art and include, for example, soluble glycosaminoglycanase enzymes such as members of the hyaluronidase glycoprotein family (US20050260186, US20060104968).

[0417] Compositions of modified MMPs, for example tsMMPs, provided herein can be co-formulated or co-administered with a local anesthesia. Anesthesias include short-acting and long-lasting local anesthetic drug formulations. Short-acting local anesthetic drug formulations contain lidocaine or a related local anesthetic drug dissolved in saline or other suitable injection vehicle. Typically, local anesthesia with short-acting local anesthetics last approximately 20-30 minutes. Exemplary anesthetics include, for example, non-inhalation local anesthetics such as ambucaines; amoxecaines; amylocalnes; aptocaines; articaines; benoxinates; benzyl alcohols; benzocaines; betoxycaines; biphenamines; bucricaines; bumecaines; bupivacaines; butacaines; butambens; butanilicaines; carbizocaines; chloroprocaine; clibucaines; clodacaines; cocaines; dexivacaines; diamocaines; dibucaines; dyclonines; elucaines; etidocaines; euprocins; fexicaines; fomocaines; heptacaines; hexylcaines; hydroxyprocaines; hydroxytetracaines; isobutambens; ketocaines; leucinocaines; lidocaines; mepivacaines; meprylcaines; octocaines; orthocaines; oxethacaines; oxybuprocaines; phenacaines; pinolcaines; piperocaines; piridocaines; polidocanols; pramocaines; prilocalnes; procaines; propanocaines; propipocaines; propoxycaines; proxymetacaines; pyrrocaines; quatacaines; quinisocaines; risocaines; rodocaines; ropivacaines; salicyl alcohols; suicaines; tetracaines; trapencaines; and trimecaines; as well as various other non-inhalation anesthetics such as alfaxalones; amolanones; etoxadrols; fentanyls; ketamines; levoxadrols; methiturals; methohexitals; midazolams; minaxolones; propanidids; propoxates; pramoxines; propofols; remifentanyls; sufentanyls; tiletamines; and zolamine. The effective amount in the formulation will vary depending on the particular patient, disease to be treated, route of administration and other considerations. Such dosages can be determined empirically.

[0418] Due to the short half-life of local anesthetics, it is often desirable to co-administer or co-formulate such anesthetics with a vasoconstrictor. Examples of vasoconstrictors include alpha adrenergic receptor agonists including catecholamines and catecholamine derivatives. Particular examples include, but are not limited to, levonordefrin, epinephrine and norepinephrine. For example, a local anesthetic formulation, such as lidocaine, can be formulated to contain low concentrations of epinephrine or another adrenergic receptor agonist such as levonordefrin. Combining local anesthetics with adrenergic receptor agonists is common in pharmaceutical preparations (see e.g., U.S. Pat. Nos. 7,261,889 and 5,976,556). The vasoconstrictor is necessary to increase the half-life of anesthetics. The vasoconstrictor, such as epinephrine, stimulates alpha-adrenergic receptors on the blood vessels in the injected tissue. This has the effect of constriction the blood vessels in the tissue. The blood vessel constriction causes the local anesthetic to stay in the tissue much longer, resulting in a large increase in the duration of the anesthetic effect.

[0419] Generally, a vasoconstrictor is used herein in combination with an anesthetic. The anesthetic agent and vasoconstrictor can be administered together as part of a single pharmaceutical composition or as part of separate pharmaceutical compositions acting together to prolong the effect of the anesthesia, so long as the vasoconstrictor acts to constrict the blood vessels in the vicinity of the administered anesthetic agent. In one example, the anesthetic agent and vasoconstrictor are administered together in solution. In addition, the anesthetic agent and vasoconstrictor can be formulated together or separate from the activatable matrix-degrading enzyme and activator. Single formulations are preferred. The anesthetic agent and vasoconstrictor can be administered by injection, by infiltration or by topical administration, e.g., as part of a gel or paste. Typically, the anesthetic agent and vasoconstrictor are administered by injection directly into the site to be anesthetized, for example, by subcutaneous administration. The effective amount in the formulation will vary depending on the particular patient, disease to be treated, route of administration and other considerations. Such dosages can be determined empirically. For example, exemplary amounts of lidocaine are or are about 10 mg to 1000 mg, 100 mg to 500 mg, 200 mg to 400 mg, 20 mg to 60 mg, or 30 mg to 50 mg. The dosage of lidocaine administered will vary depending on the individual and the route of administration.

[0420] Epinephrine can be administered in amounts such as, for example, 10 μg to 5 mg, 50 μg to 1 mg, 50 μg to 500 μg, 50 μg to 250 μg, 100 mg to 500 μg, 200 μg to 400 μg, 1 mg to 5 mg or 2 mg to 4 mg. Typically, epinephrine can be combined with lidocaine in a 1:100,000 to 1:200,000 dilution, which means that 100 ml of anesthetic contains 0.5 to 1 mg of epinephrine. Volumes administered can be adjusted depending on the disease to be treated and the route of administration. It is contemplated herein that 1-100 ml, 1-50 ml, 10-50 ml, 10-30 ml, 1-20 ml, or 1-10 ml, typically 10-50 ml of an anesthetic/vasoconstrictor formulation can be administered subcutanously for the treatment of an ECM-mediated disease or condition, such as cellulite. The administration can be subsequent, simultaneous or intermittent with administration of an activatable matrix-degrading enzyme and activator.

[0421] Compositions of modified MMP polypeptides, for example tsMMPs, provided herein also can be co-formulated or co-administered with a dispersion agent. The dispersion agent also can be co-formulated or co-administered with other pharmacological agents, such as anesthetics, vasoconstrictors, or other biologic agents. Exemplary of dispersion agents are glycosaminoglycanases that open channels in the interstitial space through degradation of glycosaminoglycans. These channels can remain relatively open for a period of 24-48 hours depending on dose and formulation. Such channels can be used to facilitate the diffusion of exogenously added molecules such as fluids, small molecules, proteins (such as matrix degrading enzymes), nucleic acids and gene therapy vectors and other molecules less than about 500 nm in size. In addition, it is thought that the formation of such channels can facilitate bulk fluid flow within an interstitial space, which can in turn promote the dispersion or movement of a solute (such as a detectable molecule or other diagnostic agent, an anesthetic or other tissue-modifying agent, a pharmacologic or pharmaceutically effective agent, or a cosmetic or other esthetic agent) that is effectively carried by the fluid in a process sometimes referred to as “convective transport” or simply convection. Such convective transport can substantially exceed the rate and cumulative effects of molecular diffusion and can thus cause the therapeutic or other administered molecule to more rapidly and effectively perfuse a tissue. Furthermore, when an agent, such as a modified MMP, for example a tsMMP, anesthetic or other agent, is co-formulated or co-administered with a glycosaminoglycanase and both are injected into a relatively confined local site, such as a site of non-intravenous parenteral administration (e.g., intradermal, subcutaneous, intramuscular, or into or around other internal tissues, organs or other relatively confined spaces within the body), then the fluid associated with the administered dose can both provide a local driving force (i.e. hydrostatic pressure) as well as lower impedance to flow (by opening channels within the interstitial matrix), both of which could increase fluid flow, and with it convective transport of the therapeutic agent or other molecule contained within the fluid. As a result, the use of glycosaminoglycanases can have substantial utility for improving the bioavailability as well as manipulating other pharmacokinetic and/or pharmacodynamic characteristics of co-formulated or co-administered agents, such as matrix degrading enzymes.

[0422] Hyaluronidases

[0423] Exemplary of glycosaminoglycanases are hyaluronidases. Hyaluronidases are a family of enzymes that degrade hyaluronic acid. By catalyzing the hydrolysis of hyaluronic acid, a major constituent of the interstitial barrier, hyaluronidase lowers the viscosity of hyaluronic acid, thereby increasing tissue permeability. There are three general classes of hyaluronidases: Mammalian-type hyaluronidases, (EC 3.2.1.35) which are endo-beta-N-acetylhexosaminidases with tetrasaccharides and hexasaccharides as the major end products. They have both hydrolytic and transglycosidase activities, and can degrade hyaluronan and chondroitin sulfates (CS), generally C4-S and C6-S; Bacterial hyaluronidases (EC 4.2.99.1), which degrade hyaluronan and to various extents, CS and DS. They are endo-beta-N-acetylhexosaminidases that operate by a beta elimination reaction that yields primarily disaccharide end products; and Hyaluronidases (EC 3.2.1.36) from leeches, other parasites, and crustaceans that are endo-beta-glucuronidases that generate tetrasaccharide and hexasaccharide end products through hydrolysis of the beta 1-3 linkage.

[0424] There are six hyaluronidase-like genes in the human genome, HYAL1 (SEQ ID NO:3469), HYAL2 (SEQ ID NO: 3470), HYAL3 (SEQ ID NO:3471), HYAL4 (SEQ ID NO:3472), PH20/SPAM1 (SEQ ID NO:3473) and one expressed pseudogene, HYALP1. Among hyaluronidases, PH20 is the prototypical neutral active enzyme, while the others exhibit no catalytic activity towards hyaluronan or any known substrates, or are active only under acidic pH conditions. The hyaluronidase-like enzymes can also be characterized by those which are generally locked to the plasma membrane via a glycosylphosphatidyl inositol anchor such as human HYAL2 and human PH20 (Danilkovitch-Miagkova, et al. (2003) Proc Natl Acad Sci USA. 100(8):4580-5), and those which are generally soluble such as human HYAL1 (Frost et al., (1997) Biochem Biophys Res Commun. 236(1):10-5). N-linked glycosylation of some hyaluronidases can be very important for their catalytic activity and stability. While altering the type of glycan modifying a glycoprotein can have dramatic affects on a protein's antigenicity, structural folding, solubility, and stability, many enzymes are not thought to require glycosylation for optimal enzyme activity. Hyaluronidases are, therefore, unique in this regard, in that removal of N-linked glycosylation can result in near complete inactivation of the hyaluronidase activity. For such hyaluronidases, the presence of N-linked glycans is critical for generating an active enzyme.

[0425] Human PH20 (also known as sperm surface protein PH20) is naturally involved in sperm-egg adhesion and aids penetration by sperm of the layer of cumulus cells by digesting hyaluronic acid. The PH20 mRNA transcript (corresponding to nucleotides 1058-2503 of the sequence set forth in SEQ ID NO:3474) is normally translated to generate a 509 amino acid precursor protein containing a 35 amino acid signal sequence at the N-terminus (amino acid residue positions 1-35) and a 19 amino acid GPI anchor at the C-terminus (corresponding to amino acid residues 491-509). The precursor sequence is set forth in SEQ ID NO:3473. An mRNA transcript containing a mutation of C to T at nucleotide position 2188 of the sequence of nucleic acids set forth in SEQ ID NO:3474 also exists and is a silent mutation resulting in the translated product set forth in SEQ ID NO: 3473. The mature PH20 is, therefore, a 474 amino acid polypeptide corresponding to amino acids 36-509 of the sequence of amino acids set forth in SEQ ID NO:3473. There are potential N-linked glycosylation sites required for hyaluronidases activity at N82, N166, N235, N254, N368, N393, N490 of human PH20 exemplified in SEQ ID NO: 3473. Disulfide bonds form between the cysteine residues C60 and C351 and between C224 and C238 (corresponding to amino acids set forth in SEQ ID NO:3473) to form the core hyaluronidase domain. Additional cysteines are required in the carboxy terminus for neutral enzyme catalytic activity such that amino acids 36 to 464 of SEQ ID NO:3473 contain the minimally active human PH20 hyaluronidase domain.

[0426] Soluble forms of recombinant human PH20 have been produced and can be used in the methods described herein for co-administration or co-formulation with tsMMPs, activators, anesthetics, vasoconstrictors, other pharmacologic or therapeutic agents, or combinations thereof, to permit the diffusion into tissues. The production of such soluble forms of PH20 is described in related application Ser. Nos. 11/065,716 and 11/238,171. Soluble forms include, but are not limited to, any having C-terminal truncations to generate polypeptides containing amino acid 1 to amino acid 442, 443, 444, 445, 446 and 447 of the sequence of amino acids set forth in SEQ ID NOS:3476-3481. Exemplary of such a polypeptides are those generated from a nucleic acid molecule encoding amino acids 1-482 set forth in SEQ ID NO:3475. Resulting purified rHuPH20 can be heterogenous due to peptidases present in the culture medium upon production and purification. Generally soluble forms of PH20 are produced using protein expression systems that facilitate correct N-glycosylation to ensure the polypeptide retains activity, since glycosylation is important for the catalytic activity and stability of hyaluronidases. Such cells include, for example Chinese Hamster Ovary (CHO) cells (e.g. DG44 CHO cells).

[0427] The soluble PH20 can be administered by any suitable route as described elsewhere herein. Typically, administration is by parenteral administration, such as by intradermal, intramuscular, subcutaneous or intravascular administration. The compounds provided herein can be formulated for parenteral administration by injection, e.g., by bolus injection or continuous infusion. Formulations for injection can be presented in unit dosage form, e.g., in ampoules or in multi-dose containers, with an added preservative. The compositions can be suspensions, solutions or emulsions in oily or aqueous vehicles, and can contain formulatory agents such as suspending, stabilizing and/or dispersing agents. Alternatively, the active ingredient can be in powder form for reconstitution with a suitable vehicle, e.g., sterile pyrogen-free water or other solvents, before use. For example, provided herein are parenteral formulations containing an effective amount of soluble PH20, such as 10 Units to 500,000 Units, 100 Units to 100,000 Units, 500 Units to 50,000 Units, 1000 Units to 10,000 Units, 5000 Units to 7500 Units, 5000 Units to 50,000 Units, or 1,000 Units to 10,000 Units, generally 10,000 to 50,000 Units, in a stabilized solution or suspension or a lyophilized from. The formulations can be provided in unit-dose forms such as, but not limited to, ampoules, syringes and individually packaged tablets or capsules. The dispersing agent can be administered alone, or with other pharmacologically effective agents in a total volume of 1-100 ml, 1-50 ml, 10-50 ml, 10-30 ml, 1-20 ml, or 1-10 ml, typically 10-50 ml.

[0428] In one example of a combination therapy, it is contemplated herein that an anesthetic, vasoconstrictor and dispersion agent are co-administered or co-formulated with a tsMMP to be administered subsequently, simultaneously or intermittently therewith. An exemplary formulation is one containing lidocaine, epinephrine and a soluble PH20, for example, a soluble PH20 set forth in SEQ ID NO:3476. Soluble PH20 can be mixed directly with lidocaine (Xylocalne), and optionally with epinephrine. The formulation can be prepared in a unit dosage form, such as in a syringe. For example, the lidocaine/epinephrine/soluble PH20 formulation can be provided in a volume, such as 1-100 ml, 1-50 ml, 10-50 ml, 10-30 ml, 1-20 ml, or 1-10 ml, typically 10-50 ml, prepackaged in a syringe for use.

[0429] In the combination therapies, the other pharmacologic agents, such as a lidocaine/epinephrine/soluble PH20 formulation, can be co-administered together with or in close temporal proximity to the administration of an activatable matrix-degrading enzyme (and activator). Typically it is preferred that an anesthetic and/or dispersion agent be administered shortly before (e.g. 5 to 60 minutes before) or, for maximal convenience, together with the pharmacologic agent. As will be appreciated by those of skill in the art, the desired proximity of co-administration depends in significant part on the effective half lives of the agents in the particular tissue setting, and the particular disease being treated, and can be readily optimized by testing the effects of administering the agents at varying times in suitable models, such as in suitable animal models.

### G. PACKAGING AND ARTICLES OF MANUFACTURE OF tsMMPS

[0430] Pharmaceutical compounds of modified MMPs, for example tsMMPs, or nucleic acids encoding modified MMPs, or a derivative or variant thereof can be packaged as articles of manufacture containing packaging material, a pharmaceutical composition which is effective for treating the disease or disorder, and a label that indicates that selected modified MMP or nucleic acid molecule is to be used for treating the disease or disorder. Instructions for use can be provided. For example, instructions can be provided that specify that the tsMMP is to be reconstituted with the accompanying liquid buffer or solution, kept cold, immediately before administration. Instructions also can be provided for administration of a cold pack at the site of administration of the tsMMP. Combinations of a modified MMP, for example tsMMP, or derivative or variant thereof and an activator (e.g. cold pack or liquid buffer) also can be packaged in an article of manufacture. In some examples, combinations also can include a processing agent.

[0431] The articles of manufacture provided herein contain packaging materials. Packaging materials for use in packaging pharmaceutical products are well known to those of skill in the art. See, for example, U.S. Pat. Nos. 5,323,907, 5,052,558 and 5,033,252, each of which is incorporated herein in its entirety. Examples of pharmaceutical packaging materials include, but are not limited to, blister packs, bottles, tubes, inhalers, pumps, bags, vials, containers, syringes, bottles, and any packaging material suitable for a selected formulation and intended mode of administration and treatment. The articles of manufacture can include a needle or other injection device so as to facilitate administration (e.g. sub-epidermal administration) for local injection purposes. A wide array of formulations of the compounds and compositions provided herein are contemplated as are a variety of treatments for any ECM-mediated disease or disorder.

[0432] The choice of package depends on the tsMMP and activator (if included therewith), and whether such compositions will be packaged together or separately. In general, the packaging is non-reactive with the compositions contained therein such that activation of the tsMMP does not occur prior to addition of the activator. In one example, the modified MMP can be packaged in lyophilized form with a buffer or diluent for reconstitution. The buffer or diluent can be stored separately at a temperature providing the activated condition, or can be provided in a form capable of providing the activating condition when desired. For example, instructions can be provided to chill or cool and or warm the buffer or diluent before use. Alternatively, instructions can be provided to activate the enzyme by use of a cold pack or heat pack at the locus of administration, for example, following reconstitution of the enzyme and administration thereof.

[0433] Exposure to the activator can occur at any time preceding administration of the tsMMP by exposure of the tsMMP to the requisite permissive temperature. For example, the container can have a single compartment containing the tsMMP and being amenable to addition of the activator (e.g. cold or room temperature liquid buffer or solution) by the user, for example through an opening in the compartment. Any container or other article of manufacture that is amenable to having a defining space for containment of the tsMMP and that is amenable to simple manipulation to permit addition of the final components necessary for activation is contemplated. The activator is added prior to use. Exposure to the activator also can occur following administration to the interstitium. For example, if heat is the activator, a tsMMP can be administered and the local injection site subjected to heat. If colder temperatures are the activator, a tsMMP can be administered and the local injection site subjected to cold, e.g. by a cold pack.

[0434] In other examples, the tsMMP is packaged in a container with the activator such that activation of the matrix-degrading enzyme is amenable to activation by the user at will in the container. Generally, examples of such containers include those that have an enclosed, defined space that contains the matrix-degrading enzyme, and a separate enclosed, defined space containing the activator such that the two spaces are separated by a readily removable membrane which, upon removal, permits the components to mix and thereby react, resulting in activation of the protease. The container can be stored under conditions such that the activator is at or near the requisite permissive temperature for activation of the MMP. Alternatively, only the side of the container containing the activator can be cooled or warmed to the desired temperature (e.g. by exposing it to an ice wrap or other temperature condition) just prior to use and reconstitution of the enzyme. Any container or other article of manufacture is contemplated, so long as the tsMMP is separated from the activator. Exposure of the activator to the tsMMP is prior to use. For example, the physical separation means are those that are readily removed by the user, to permit mixing, resulting in activation of the enzyme. For example, an article of manufacture can contain a tsMMP in one compartment and an activator (e.g. cold or room temperature liquid buffer or solution) in an adjacent compartment. The compartments are separated by a dividing member, such as a membrane, that, upon compression of the article or manufacture ruptures permitting separated components to mix. For suitable embodiments see e.g., containers described in U.S. Pat. Nos. 3,539,794 and 5,171,081.

[0435] Following are some examples of the packaging requirements of various end uses of activatable matrix-degrading enzymes. These are offered as examples only and in no way are intended as limiting.

[0436] 1. Single Chamber Apparatus

[0437] Among the simplest embodiments herein, are those in which the apparatus contains a single chamber or container and, if needed, ejection means. Single chamber housings or containers include any item in which a tsMMP is included in the container. The tsMMP is housed in the vessel in liquid phase or as a powder or other paste or other convenient composition. The vessel or liquid can be stored at a temperature that is at or below the permissive temperature and/or cooled to at or below the permissive temperature prior to administration. Alternatively, a tsMMP is reconstituted with an appropriate liquid diluent or buffer and the activator is applied locally to the site of administration (e.g. cold pack) or is administered separately at the site of administration. Kits containing the item and the activator also are provided.

[0438] 2. Dual Chamber Apparatus

[0439] An example of an apparatus contemplated for use herein is a dual chamber container. In general, this apparatus has two chambers or compartments thereby maintaining the tsMMP from an activator capable of providing the activating condition until activation is desired. The apparatus can include a mixing chamber to permit mixing of the components prior to dispensing from the apparatus. Alternatively, mixing can occur by ejection of the activator from one chamber into a second chamber containing the tsMMP. For example, the activatable tsMMP can be provided in lyophilized form, and reconstitution can be achieved by ejection of the activator (e.g. e.g. cold or room temperature buffer or liquid solution) from a first chamber into the second chamber containing the lyophilized enzyme. It is understood that the temperature of the entire apparatus can be controlled together and/or the chamber containing the activator can be brought to the desired temperature prior to use and reconstitution of the enzyme.

[0440] In one embodiment, a dual chamber apparatus employs a mechanical pump mechanism in its operation. In such an example, the dispensing apparatus maintains the components in separate chambers. A pump mechanism is operated to withdraw the contents from each chamber and into a mixing chamber, or from one chamber into the second chamber. Upon mixing, the mixed composition is activated by reaction of the components in the chambers. The pump mechanism can be manually operated, for example, by a plunger. Exemplary of such dual chamber apparatus include dual chamber syringes (see e.g., U.S. Pat. Nos. 6,972,005, 6,692,468, 5,971,953, 4,529,403, 4,202,314, 421-4584, 4983164, 5788670, 5395326; and Intl. Patent Appl. Nos. WO2007006030, WO2001047584).

[0441] Another embodiment of a dual chamber fluid dispensing apparatus contemplated for use herein takes the form of a compressible bottle or tube or other similar device. The device has two compartments within it that keep the components separated. The cap of the device can serve as a mixing chamber, a mixing chamber can be positioned between the two chambers and the cap, or mixing can be achieved within one of the chambers. The components are forced by compression from the separate compartments into the mixing chamber. They are then dispensed from the mixing chamber. For example, the mixed contents can be removed from the device by attaching a plunger/syringe apparatus to the dispensing end and withdrawing the contents therethrough. Such devices are known in the art (see e.g., Intl. Patent Appln. No. WO1994015848).

[0442] 3. Kits

[0443] Selected modified MMP polypeptides, for example tsMMPs, and/or articles of manufacture thereof also can be provided as kits. The kits optionally can include an activator and/or processing agent. Kits can include a pharmaceutical composition described herein and an item for administration provided as an article of manufacture. For example a selected tsMMP can be supplied with a device for administration, such as a syringe, an inhaler, a dosage cup, a dropper, or an applicator. The compositions can be contained in the item for administration or can be provided separately to be added later. Generally, kits contain an item with a tsMMP, and optionally a processing agent and/or an activator capable of providing the activating condition. The kit can, optionally, include instructions for application including dosages, dosing regimens, instructions for using the activator (e.g. warming or cooling the buffer or applying a cold or hot pack), and instructions for modes of administration. Kits also can include a pharmaceutical composition described herein and an item for diagnosis. For example, such kits can include an item for measuring the concentration, amount or activity of the selected protease in a subject.

### H. METHODS OF ASSESSING ACTIVITY OF tsMMPS

[0444] 1. Methods of Assessing Enzymatic Activity

[0445] Modified MMPs, including tsMMPs, can be tested for their enzymatic activity against known substrates. Activity assessment can be performed in the presence or absence of an activator and at varying temperatures. Activity assessments can be performed on conditioned medium or other supernatants or on purified protein.

[0446] Enzymatic activity can be assessed by assaying for substrate cleavage using known substrates of the enzyme. The substrates can be in the form of a purified protein or provided as peptide substrates. For example, enzymatic activity of MMP can be assessed by cleavage of collagen. Cleavage of a purified protein by an enzyme can be assessed using any method of protein detection, including, but not limited to, HPLC, SDS-PAGE analysis, ELISA, Western blotting, immunohistochemistry, immunoprecipitation, NH2-terminal sequencing, protein labeling and fluorometric methods. For example, Example 5 describes an assay to assess enzymatic activity for cleavage of a collagen that is FITC-labeled. Fluorescence of the supernatant is an indication of the enzymatic activity of the protein and can be normalized to protein concentration and a standard curve for specific activity assessment.

[0447] In addition, enzymatic activity can be assessed on tetrapeptide substrates. The use of fluorogenic groups on the substrates facilitates detection of cleavage. For example, substrates can be provided as fluorogenically tagged tetrapeptides of the peptide substrate, such as an ACC- or 7-amino-4-methyl courmarin (AMC)-tetrapeptide. Other fluorogenic groups are known and can be used and coupled to protein or peptide substrates. These include, for example, 7-amino-4-methyl-2-quinolinone (AMeq), 2-naphthylamine (NHNap) and 7 amino-4-methylcoumarin (NHMec) (Sarath et al. “Protease Assay Methods,” in Proteolytic Enzymes: A

[0448] Practical Approach. Ed. Robert J. Beynon and Judith S. Bond. Oxford University Press, 2001. pp. 45-76). Peptide substrates are known to one of skill in the art, as are exemplary fluorogenic peptide substrates. For example, exemplary substrates for MMP include, peptide IX, designated as Mca-K-P-L-G-L-Dpa-A-R-NH₂ (SEQ ID NO:707; Mca=(7-Methoxycoumarin-4-yl)acetyl; Dpa=N-3-(2,4,-Dinitrophenyl)-L-2,3-diaminopropionyl; R&D Systems, Minneapolis, Minn., Cat# ES010) and variations thereof such as with different fluorogenic groups. Enzyme assays to measure enzymatic activity by fluorescence intensity are standard and are typically performed as a function of incubation time of the enzyme and substrate (see e.g., Dehrmann et al. (1995) Arch. Biochem. Biophys., 324:93-98; Barrett et al. (1981) Methods Enzymol., 80:536-561). Exemplary assays using fluorescence substrates are described in Example 2 herein.

[0449] While detection of fluorogenic compounds can be accomplished using a fluorometer, detection can be accomplished by a variety of other methods well known to those of skill in the art. Thus, for example, when the fluorophores emit in the visible wavelengths, detection can be simply by visual inspection of fluorescence in response to excitation by a light source. Detection also can be by means of an image analysis system utilizing a video camera interfaced to a digitizer or other image acquisition system. Detection also can be by visualization through a filter, as under a fluorescence microscope. The microscope can provide a signal that is simply visualized by the operator. Alternatively, the signal can be recorded on photographic film or using a video analysis system. The signal also can simply be quantified in real time using either an image analysis system or a photometer.

[0450] Thus, for example, a basic assay for enzyme activity of a sample involves suspending or dissolving the sample in a buffer (at the pH optima of the particular protease being assayed) adding to the buffer a fluorogenic enzyme peptide indicator, and monitoring the resulting change in fluorescence using a spectrofluorometer as shown in e.g., Harris et al., (1998) J Biol Chem 273:27364. The spectrofluorometer is set to excite the fluorophore at the excitation wavelength of the fluorophore. The fluorogenic enzyme indicator is a substrate sequence of an enzyme (e.g. of a protease) that changes in fluorescence due to a protease cleaving the indicator.

[0451] 2. Methods of Assessing ECM Degradation

[0452] The degradation of extracellular matrix proteins by modified MMPs, for example tsMMPs, including, but not limited to, those described above, such as tsMMP-1, can be assessed in vitro or in vivo. Assays for such assessment are known to those of skill in the art, and can be used to test the activities of a variety of modified MMPs, for example tsMMPs, on a variety of extracellular matrix proteins, including, but not limited to collagen (I, II, III and IV), fibronectin, vitronectin and proteoglycans. Assays can be performed at permissive and non-permissive temperatures. Experiments also can be performed in the presence of an MMP that is not modified to be temperature sensitive. It is understood that assays for enzymatic activity are performed subsequent to activation of the enzyme by a processing agent. As a further control, activity of the zymogen enzyme also can be assessed.

[0453] a. In Vitro Assays

[0454] Exemplary in vitro assays include assays to assess the degradation products of extracellular matrix proteins following incubation with a modified MMP, for example tsMMP. In some examples, the assays detect a single, specific degradation product. In other examples, the assays detect multiple degradation products, the identity of which may or may not be known. Assessment of degradation products can be performed using methods well known in the art including, but not limited to, HPLC, CE, Mass spectrometry, SDS-PAGE analysis, ELISA, Western blotting, immunohistochemistry, immunoprecipitation, NH2-terminal sequencing, and protein labeling. Extracellular matrix degradation products can be visualized, for example, by SDS-PAGE analysis following incubation with MMPs, such as tsMMPs, for an appropriate amount of time at an appropriate temperature. For example, collagen can be incubated with mature modified MMP, for example tsMMP, and subjected to SDS-PAGE using, for example, a 4-20% Tris/glycine gel to separate the products. Coomassie staining of the gel facilitates visualization of smaller degradation products, or disappearance of collagen bands, compared to intact collagen. Immunoblotting using, for example, a polyclonal Ig specific to the extracellular matrix protein also can be used to visualize the degradation products following separation with SDS-PAGE.

[0455] Assays that specifically detect a single product following degradation of an extracellular matrix protein also are known in the art and can be used to assess the ability of a tsMMP to degrade an extracellular matrix protein. For example, the hydroxyproline (HP) assay can be used to measure degradation of collagen. 4-hydroxyproline is a modified imino acid that makes up approximately 12% of the weight of collagen. HP assays measure the amount of solubilized collagen by determining the amount of HP in the supernatant following incubation with a matrix-degrading enzyme (see e.g., Reddy and Enwemeka (1996) Clinical Biochemistry 29:225-229). Measurement of HP can be effected by, for example, colorimetric methods, high performance liquid chromatography, mass spectrometry and enzymatic methods (see e.g., Edwards et al., (1980) Clin. Chim. Acta 104:161-167; Green (1992) Anal. Biochem. 201:265-269; Tredget et al., (1990) Anal. Biochem. 190:259-265; Ito et al., (1985) Anal. Biochem. 151:510-514; Garnero et al. (1998) J. Biol. Chem. 273:32347-32352).

[0456] The collagen source used in such in vitro assays can include, but is not limited to, commercially available purified collagen, bone particles, skin, cartilage and rat tail tendon. Collagenolytic activity of a modified MMP, such as tsMMP such as tsMMP-1, can be assessed by incubating the activated enzyme with an insoluble collagen suspension, followed by hydrolysis, such as with HCl. The amount of hydroxyproline derived from the solubilized (degraded) collagen can be determined by spectrophotometric methods, such as measuring the absorbance at 550 nm following incubation with Ehrlich's reagent. In some examples, the collagen source is rat or pig skin explant that is surgically removed from anesthetized animals and then perfused with the tsMMP, for example, tsMMP-1, prior to, subsequently, simultaneously or intermittently with a temperature activator. HP levels in the perfusates can then be assessed. In a modification of this method, the effect on the fibrous septae in the explants can also be assessed. Briefly, following perfusion with the enzyme, the explants are cut into small pieces and embedded in paraffin and analyzed by microscopy following Masson's Trichrome staining for visualization of collagen. The number of collagen fibrous septae can be visualized and compared to tissue that has not been treated with a enzyme.

[0457] Assays to detect degradation of specific collagens also are known in the art. Such assays can employ immunological methods to detect a degradation product unique to the specific collagen. For example, the degradation of collagen I by some MMPs releases telopeptides with different epitopes that can be detected using immunoassays. Such assays detect the cross-linked N-telopeptides (NTx) and the cross-linked C-telopeptides (CTx and ICTP), each of which contain unique epitopes. Typically, CTx assays utilize the CrossLaps (Nordic Biosciences) antibodies that recognize the 8 amino acid sequence EKAHD-β-GGR octapeptide, where the aspartic acid is in β-isomerized configuration, in the C-terminal telopeptide region of the al chain (Eastell (2001) Bone Markers: Biochemical and Clinical Perspectives, pg 40). Immunoassays to detect ICTP also are known in the art and can be used to detect degradation of collagen I (U.S. Pat. No. 5,538,853). In other examples, immunoassays, such as, for example, ELISAs, can be used to detect NTx following incubation of collagen type I with proteases such as an MMP (Atley et al., (2000) Bone, 26:241-247). Other antibodies and assays specific for degraded collagens are known in the art and can be used to detect degradation by matrix-degrading enzymes. These include antibodies and assays specific for degraded collagen I (Hartmann et al (1990) Clin. Chem. 36:421-426), collagen II (Hollander et al (1994)J. Clin. Invest. 93:1722-1732), collagen III (U.S. Pat. No. 5,34,2756), and collagen IV (Wilkinson et al (1990) Anal. Biochem. 185:294-6).

[0458] b. In Vivo Assays

[0459] Assays to detect the in vivo degradation of ECM also are known in the art. Such assays can utilize the methods described above to detect, for example, hydroxyproline and N- and C-telopeptides and degraded collagens or other ECM in biological samples such as urine, blood, serum and tissue. Detection of degraded ECM can be performed following administration to the patient of one or more enzymes. Detection of pyridinoline (PYD) and deoxypyridinoline (DPYD), also can be used to assess degradation of collagen. Also known as hydroxylysylpyridinoline and lysylpyridinoline, respectively, PYD and DPYD are the two nonreducible trivalent cross-links that stabilize type I collagen chains and are released during the degradation of mature collagen fibrils. Pyridinoline is abundant in bone and cartilage, whereas deoxypyridinoline is largely confined to bone. Type III collagen also contains pyridinoline cross-links at the amino terminus. Total PYD and DPYD can be measured, for example, in hydrolyzed urine samples or serum by fluorometric detection after reversed-phase HPLC (Hata et al (1995) Clin. Chimica. Acta. 235:221-227).

[0460] c. Non-Human Animal Models

[0461] Non-human animal models can be used to assess the activity of matrix-degrading enzymes. For example, non-human animals can be used as models for a disease or condition. Non-human animals can be injected with disease and/or phenotype-inducing substances prior to administration of enzymes. Genetic models also are useful. Animals, such as mice, can be generated which mimic a disease or condition by the overexpression, underexpression or knock-out of one or more genes. For example, animal models are known in the art for conditions including, but not limited to, Peyronie's Disease (Davila et al. (2004) Biol. Reprod., 71:1568-1577), tendinosis (Warden et al., (2006) Br. J. Sports Med. 41:232-240) and scleroderma (Yamamoto (2005) Cur. Rheum. Rev. 1:105-109).

[0462] Non-human animals also can be used to test the activity of enzymes in vivo in a non-diseased animal. For example, enzymes can be administered to, non-human animals, such as, a mouse, rat or pig, and the level of ECM degradation can be determined. In some examples, the animals are used to obtain explants for ex vivo assessment of ECM degradation. In other examples, ECM degradation is assessed in vivo. For example, collagen degradation of the skin of anesthetized animals can be assessed. Briefly, an MMP, such as a tsMMP-1, is perfused prior to, simultaneously, subsequently or intermittently with a temperature activator via insertion of a needle into the dermal layer of the skin of the tail. Perfusate fractions are collected from the tail skin and analyzed for collagen degradation by hydroxyproline analysis. Other methods can be used to detect degradation including, but not limited to, any of the assays described above, such as immunoassays to detect specific degradation products.

### I. EXEMPLARY METHODS OF TREATING DISEASES OR DEFECTS OF ECM

[0463] The modified MMPs, for example tsMMPs, provided herein can be used for treatment of any condition mediated by any one or more ECM components. This section provides exemplary uses of, and administration methods for, modified MMPs, such as tsMMPs. These described therapies are exemplary and do not limit the applications of enzymes. Such methods include, but are not limited to, methods of treatment of any ECM condition or disease that is caused by excess, aberrant or accumulated expression of any one or more ECM component. Exemplary of diseases or conditions to be treated are any mediated by collagen, elastin, fibronectin, or a glycosaminoglycan such as a proteoglycan. For example, exemplary of collagen-mediated diseases or disorders include, but are not limited to, cellulite, Dupuytren's disease (also called Dupuytren's contracture), Peyronie's disease, frozen shoulder, chronic tendinosis or scar tissue of the tendons, localized scleroderma and lymphedema. It is within the skill of a treating physician to identify such diseases or conditions.

[0464] The particular disease or condition to be treated dictates the enzyme that is selected. For example, treatment of a collagen-mediated disease or disorder can be effected by administration of a modified MMP, for example tsMMP, that cleaves collagen. For example, a modified MMP-1, for example tsMMP-1, can be selected for cleaving collagen. Such MMPs include modified forms on any MMP listed above in Table 5, and/or known to one of skill in the art. tsMMPs, and systems and methods for activation can be chosen accordingly to treat a particular disease or condition.

[0465] Treatment of diseases and conditions with modified MMPs, for example tsMMPs, can be effected by any suitable route of administration using suitable formulations as described herein including, but not limited to, subcutaneous injection, intramuscular, intradermal, oral, and topical and transdermal administration. As described above, a route of administration of modified MMPs, for example tsMMPs, typically is chosen that results in administration under the skin directly to the affected site. Exemplary of such routes of administration include, but are not limited to, subcutaneous, intramuscular, or intradermal.

[0466] If necessary, a particular dosage and duration and treatment protocol can be empirically determined or extrapolated. For example, exemplary doses of recombinant and native active MMPs or modified MMPs, for example tsMMPs, can be used as a starting point to determine appropriate dosages. Dosage levels can be determined based on a variety of factors, such as body weight of the individual, general health, age, the activity of the specific compound employed, sex, diet, time of administration, rate of excretion, drug combination, the severity and course of the disease, and the patient's disposition to the disease and the judgment of the treating physician. The amount of active ingredient that can be combined with the carrier materials to produce a single dosage form will vary depending upon the particular matrix-degrading enzyme, the host treated, the particular mode of administration, and the activating condition required for activation, and/or the predetermined or length of time in which activation is desired. The pharmaceutical compositions typically should provide a dosage of from about 1 μg/ml to about 20 mg/ml. Generally, dosages are from or about 10 μg/ml to 1 mg/ml, typically about 100 μg/ml, per single dosage administration. It is understood that the amount to administer will be a function of the tsMMP and the activating condition chosen, the indication treated, and possibly side effects that will be tolerated. Dosages can be empirically determined using recognized models for each disorder. Also, as described elsewhere herein, modified MMPs, for example tsMMPs, can be administered in combination with other agents sequentially, simultaneously or intermittently. Exemplary of such agents include, but are not limited to, lidocaine, epinephrine, a dispersing agent such as hyaluronidase and combinations thereof.

[0467] Upon improvement of a patient's condition, a maintenance dose of a compound or compositions can be administered, if necessary; and the dosage, the dosage form, or frequency of administration, or a combination thereof can be modified. In some cases, a subject can require intermittent treatment on a long-term basis upon any recurrence of disease symptoms.

[0468] Descriptions of the involvement of collagen to collagen-mediated diseases or conditions is provided below as an example of the role of ECM components in diverse disease and conditions. Such descriptions are meant to be exemplary only and are not limited to a particular modified MMP or tsMMP or to a particular ECM-mediated diseases or conditions. One of skill in the art can select a modified MMP, for example, tsMMP and activating condition for activation thereof, to be used in the treatment of any desired ECM-mediated disease, based on the ability of a particular enzyme to cleave or degrade an ECM component involved in the particular disease or condition. For example, as described herein, MMP-1 cleaves type I and type III collagens, such as those abundant in the skin. Hence, a modified MMP-1 can be used for treatments, uses and processes for treating a collagen-mediated disease or condition. The particular treatment and dosage can be determined by one of skill in the art. Considerations in assessing treatment include, for example, the disease to be treated, the ECM component involved in the disease, the severity and course of the disease, whether the modified MMP, for example tsMMP, is administered for preventive or therapeutic purposes, previous therapy, the patient's clinical history and response to therapy, and the discretion of the attending physician.

[0469] Collagen-Mediated Diseases or Conditions

[0470] Collagen is a major structural constituent of mammalian organisms and makes up a large portion of the total protein content of the skin and other parts of the animal body. Numerous diseases and conditions are associated with excess collagen deposition, for example, due to erratic accumulation of fibrous tissue rich in collagen or other causes. Collagen-mediated diseases or conditions (also referred to as fibrotic tissue disorders) are known to one of skill in the art (see e.g., published U.S. Application No. 20070224183; U.S. Pat. Nos. 6,353,028; 6,060,474; 6,566,331; 6,294,350). Excess collagen has been associated with diseases and conditions, such as, but not limited to, fibrotic diseases or conditions resulting in scar formation, cellulite, Dupuytren's syndrome, Peyronie's disease, frozen shoulder, localized scleroderma, lymphedema, Interstitial cystitis (IC), Telangrectase, Barrett's metaplasia, Pneumatosis cytoides intestinalis, collagenous colitis. For example, disfiguring conditions of the skin, such as wrinkling, cellulite formation and neoplastic fibrosis result from excessive collagen deposition, which produces unwanted binding and distortion of normal tissue architecture.

[0471] Modified MMP polypeptides, for example tsMMPs described herein, including but not limited to modified MMP-1 and tsMMP-1, can be used to treat collagen-mediated diseases or conditions. Exemplary of tsMMPs for treatment of diseases and conditions described herein is a tsMMP-1 that is more active at a non-permissive temperature that is below the physiological temperature of the body such as at or about 25° C. compared to the nonpermissive physiologic temperature at the site of administration. For example, temporary cooling of the extracellular matrix, such as the skin interstitium, can be achieved by infusing a cold buffered solution or other liquid directly at the affected site and/or applying a cold pack directly to the locus of administration. In one example, a cold buffer can be administered via sub-epidermal administration, i.e. under the skin, such that administration is effected directly at the site where ECM components are present and accumulated. Other methods of activation can be employed, and are known to one of skill in the art in view of the descriptions herein.

[0472] a. Cellulite

[0473] Modified MMP polypeptides, for example, tsMMPs, such as those described herein, including a modified MMP-1 polypeptide or tsMMP-1, can be used to treat cellulite. In normal adipose tissues, a fine mesh of blood vessels and lymph vessels supplies the tissue with necessary nutrients and oxygen, and takes care of the removal of metabolized products. For example, triglycerides are stored in individual adipocytes that are grouped into capillary rich lobules. Each fat lobule is composed of adipocytes. Vertical strands of collagen fibers named fibrous septae separate the fat lobules and tether the overlying superficial fascia to the underlying muscle.

[0474] Cellulite is typically characterized by dermal deterioration due to a breakdown in blood vessel integrity and a loss of capillary networks in the dermal and subdermal levels of the skin. The vascular deterioration tends to decrease the dermal metabolism. This decreased metabolism hinders protein synthesis and repair processes, which results in dermal thinning. The condition is further characterized by fat cells becoming engorged with lipids, swelling and clumping together, as well as excess fluid retention in the dermal and subdermal regions of the skin. The accumulation of fat globules or adipose cells creates a need for a bigger blood supply to provide extra nourishment. To provide the blood to tissues, new capillaries are formed, which release more filtrate resulting in a saturation of tissues with interstitial fluid causing edema in the adipose tissues. Abundant reticular fibers in the interstitial tissues accumulate and thicken around the aggregated adipose cells; they form capsules or septa, which gradually transform into collagen fibers and are felt as nodules. The formation of these septa further occludes fat cells. Collagen fibers are also laid down in the interstitial tissue spaces, rendering the connective tissue sclerotic (hard).

[0475] Hence, as the condition further progresses, hard nodules of fat cells and clumps of fats surrounded by septa form in the dermal region. This leads to the surface of the skin displaying considerable heterogeneity and being characterized as having a “cottage cheese” or “orange peel” appearance. The dimpling occurs when the fibrous septae that connect the skin to the dermis and deeper tissue layers tighten and pull in the skin. Thus, the “orange peel” appearance of cellulite is due to the deformation of the fat lobules as a result of outward forces on the adipose tissue. The fat lobules can be large, for example up to 1 cm wide, and easily protrude into the overlying dermis, causing a visible deformation on the surface of the skin. The net result is the undulating appearance of the outer skin as the fat pushes upwards. As the connective septae run in the same direction as these outward forces, they can offer no counter force to keep the adipose from protruding into the dermis.

[0476] Cellulite is more prevalent among females than males. The prevalence of cellulite is estimated between 60% and 80% of the female population and its severity tends to worsen with obesity. Recently, a published study showed by in vivo magnetic resonance imaging that women with cellulite have a higher percentage of perpendicular fibrous septae than women without cellulite or men (Querleux et al., (2002) Skin Research and Technology, 8:118-124). Cellulite occurs most often on the hips, thighs and upper arms. For example, premenopausal females tend to accumulate fat subcutaneously, primarily in the gluteal/thigh areas where cellulite is most common. Clinically, cellulite is accompanied by symptoms that include thinning of the epidermis, reduction and breakdown of the microvasculature leading to subdermal accumulations of fluids, and subdermal agglomerations of fatty tissues.

[0477] b. Dupuytren's Disease

[0478] Modified MMP polypeptides, for example tsMMPs, such as a modified MMP-1 or a tsMMP-1 such as those described herein, can be used to treat Dupuytren's syndrome (also called Dupuytren's contracture). Dupuytren's contracture (also known as Morbus Dupuytren) is a fixed flexion contracture of the hand where the fingers bend towards the palm and cannot be fully extended. A similar lesion sometimes occurs in the foot. The connective tissue within the hand becomes abnormally thick and is accompanied by the presence of nodules containing fibroblasts and collagen, particularly type III collagen. The fibrous cord of collagen is often interspersed with a septa-like arrangement of adipose tissue. These present clinically as mattress-type “lumps” of varying sized and in Dupuytren's disease are termed nodules. This can cause the fingers to curl, and can result in impaired function of the fingers, especially the small and ring fingers. Dupuytren's disease occurs predominantly in men. It is generally found in middle aged and elderly persons, those of Northern European ancestry, and in those with certain chronic illnesses such as diabetes, alcoholism and smoking.

[0479] Dupuytren's disease is a slowly progressive disease that occurs over many years causing fixed flexion deformities in the metacarpophalangeal (MP) and proximal interphalangeal (PIP) joints of the fingers. The small and ring fingers are the most often affected. The disease progresses through three stages (Luck et al. (1959) J. Bone Joint Surg., 41A:635-664). The initial proliferative stage is characterized by nodule formation in the palmar fascia in which a cell known as the myofibroblast appears and begins to proliferate. The involutional or mid-disease stage involves myofibroblast proliferation and active type III collagen formation. In the last or residual phase, the nodule disappears leaving acellular tissue and thick bands of collagen. The ratio of type III collagen to type I collagen increases. Treatment of Dupuytren's disease with an activatable-matrix degrading enzyme is typically in the mid-disease and residual disease stages.

[0480] c. Peyronie's Disease

[0481] Modified MMP-1, for example tsMMPs, such as a modified MMP-1 or a tsMMP-1 such as those described herein, can be used to treat Peyronie's disease. Peyronie's disease is a connective tissue disorder involving the growth of fibrous plaques in the soft tissue of the penis affecting as many as 1-4% of men. Collagen is the major component of the plaque in Peyronie's disease. Specifically, the fibrosing process occurs in the tunica albuginea, a fibrous envelope surrounding the penile corpora cavernosa. The pain and disfigurement associated with Peyronie's disease relate to the physical structure of the penis in which is found two erectile rods, called the corpora cavernosa, a conduit (the urethra) through which urine flows from the bladder, and the tunica which separates the cavernosa from the outer layers of skin of the penis. A person exhibiting Peyronie's disease will have formation(s) of plaque or scar tissue between the tunica and these outer layers of the skin (referred to as “sub-dermal” in this application). The scarring or plaque accumulation of the tunica reduces its elasticity causes such that, in the affected area, it will not stretch to the same degree (if at all) as the surrounding, unaffected tissues. Thus, the erect penis bends in the direction of the scar or plaque accumulation, often with associated pain of some degree. In all but minor manifestations of Peyronie's disease, the patient has some degree of sexual dysfunction. In more severe cases, sexual intercourse is either impossible, or is so painful as to be effectively prohibitive.

[0482] Empirical evidence indicates an incidence of Peyronie's disease in approximately one percent of the male population. Although the disease occurs mostly in middle-aged men, younger and older men can acquire it. About 30 percent of men with Peyronie's disease also develop fibrosis (hardened cells) in other elastic tissues of the body, such as on the hand or foot. Common examples of such other conditions include Dupuytren's contracture of the hand and Ledderhose Fibrosis of the foot.

[0483] d. Ledderhose Fibrosis

[0484] Modified MMP polypeptides, for example tsMMPs, for example, a modified MMP-1 or tsMMP-1 such as those described herein, can be used to treat Ledderhose fibrosis. Ledderhose fibrosis is similar to Dupuytren's disease and Peyronie's disease, except that the fibrosis due to fibroblast proliferation and collagen deposition occurs in the foot. Ledderhose disease is characterized by plantar fibrosis over the medial sole of the foot, and is sometimes referred to as plantar fibrosis.

[0485] e. Stiff Joints

[0486] Modified MMP polypeptides, for example tsMMPs, such as a modified MMP-1 or a tsMMP-1 such as those described herein, can be used to treat stiff joints, for example, frozen shoulder. Frozen shoulder (adhesive capsulitis) is a chronic fibrozing condition of the capsule of the joint characterized by pain and loss of motion or stiffness in the shoulder. It affects about 2% of the general population. Frozen shoulder results from increased fibroblast matrix synthesis. The synthesis is caused by an excessive inflammatory response resulting in the overproduction of cytokines and growth factors. Fibroblasts and myofibroblasts lay down a dense matrix of collagen in particular, type-I and type-III collagen within the capsule of the shoulder. This results in a scarred contracted shoulder capsule and causes joint stiffness.

[0487] Other examples of stiff joints include, but are not limited to, those caused by capsular contractures, adhesive capsulitis and arthrofibrosis, which result from musculoskeletal surgery. Such stiff joints can occur in joints, including, for example, joints of the knees, shoulders, elbows, ankles and hips. Like frozen shoulder, such joint diseases are caused by increased matrix synthesis and scar formation. The stiff joints inevitably can cause abnormally high forces to be transmitted to the articular cartilage of the affected area. Over time, these forces result in the development of degenerative joint disease and arthritis. For example, in arthrofibrosis and capsular contracture, fibroblasts form excessive amounts of matrix in response to local trauma, such as joint dislocation.

[0488] f. Existing Scars

[0489] Modified MMP-1, for example tsMMPs, such as a modified MMP-1 or tsMMP-1 such as those described herein, can be used to treat existing scars. Collagen is particularly important in the wound healing process and in the process of natural aging, where it is produced by fibroblast cells. In some cases, however, an exaggerated healing response can result in the production of copious amounts of healing tissue (ground substance), also termed scar tissue. For example, various skin traumas such as burns, surgery, infection, wounds and accident are often characterized by the erratic accumulation of fibrous tissue rich in collagen. There also is often an increased proteoglycan content. In addition to the replacement of the normal tissue that has been damaged or destroyed, excessive and disfiguring deposits of new tissue sometimes form during the healing process. The excess collagen deposition has been attributed to a disturbance in the balance between collagen synthesis and collagen degradation. Including among scars are, for example, chronic tendinosis or scar tissue of the tendons, surgical adhesions, keloids, hypertrophic scars, and depressed scars.

[0490] i. Surgical Adhesions

[0491] Surgical adhesions are attachments of organs or tissues to each other through scar formation, which can cause severe clinical problems. The formation of some scar tissue after surgery or tissue injury is normal. In some cases, however, the scar tissue overgrows the region of injury and creates surgical adhesions, which tend to restrict the normal mobility and function of affected body parts. In particular, fibroblast proliferation and matrix synthesis is increased locally following such soft tissue injury. Adhesions then form when the body attempts to repair tissue by inducing a healing response. For example, this healing process can occur between two or more otherwise healthy separate structures (such as between loops of bowel following abdominal surgery). Alternately, following local trauma to a peripheral nerve, fibrous adhesions can form, resulting in severe pain during normal movement.

[0492] ii. Keloids

[0493] Keloids are scars of connective tissue containing hyperplastic masses that occur in the dermis and adjacent subcutaneous tissue, most commonly following trauma. Keloids generally are fibrous nodules that can vary in color from pink or red to dark brown. Keloids form in scar tissue as a result of overgrowth of collagen, which participates in wound repair. Keloid lesions are formed when local skin fibroblasts undergo vigorous hyperplasia and proliferation in response to local stimuli. The resulting lesion can result in a lump many times larger than the original scar. In addition to occur as a result of wound or other trauma, keloids also can form from piercing, pimples, a scratch, severe acne, chickenpox scarring, infection at a wound site, repeated trauma to an area, or excessive skin tension during wound closure.

[0494] iii. Hypertrophic Scars

[0495] Hypertrophic scars are raised scars that form at the site of wounds. They generally do not grow beyond the boundaries of the original wound. Like keloid scars, hypertrophic scars are a result of the body overproducing collagen.

[0496] iv. Depressed Scars

[0497] Depressed scars generally result from an inflammatory episode and are characterized by contractions of the skin, and leave a cosmetically displeasing and permanent scar. The most common example is scarring that occurs following inflammatory acne. The depression occurs as a normal consequence of wound healing, and the scar tissue causing the depression is predominantly made up of collagen resulting from fibroblast proliferation and metabolism.

[0498] g. Scleroderma

[0499] Modified MMP polypeptides, for example tsMMPs, for example, a modified MMP-1 or a tsMMP-1 such as those described herein, can be used to treat scleroderma. Scleroderma is characterized by a thickening of the collagen. The more common form of the disease, localized scleroderma, affects only the skin, usually in just a few places, and sometimes the face. It is sometimes referred to as CREST syndrome. Symptoms include hardening of the skin and associated scarring. The skin also appears reddish or scaly, and blood vessels can be more visible. In more serious cases, scleroderma can affect the blood vessels and internal organs. Diffuse scleroderma can be fatal as a result of heart, kidney lung or intestinal damage, due to musculoskeletal, pulmonary, gastrointestinal, renal and other complications.

[0500] The condition is characterized by collagen buildup leading to loss of elasticity. The overproduction of collagen has been attributed to autoimmune dysfunction, resulting in accumulation of T cells and production of cytokines and other proteins that stimulate collagen deposition from fibroblasts.

[0501] h. Lymphedema

[0502] Modified MMP polypeptides, for example tsMMPs, for example, a modified MMP-1 or tsMMP-1 such as those described herein, can be used to treat lymphedema. Lymphedema is an accumulation of lymphatic fluid that causes swelling in the arms and legs. Lymphedema can progress to include skin changes such as, for example, lymphostatic fibrosis, sclerosis and papillomas (benign skin tumors) and swelling. Tissue changes associated with lymphedema include proliferation of connective tissue cells, such as fibroblasts, production of collagen fibers, an increase in fatty deposits and fibrotic changes. These changes occur first at the lower extremities, i.e. the fingers and toes. Lymphedema can be identified based on the degree of enlargement of the extremities. For example, one method to assess lymphedema is based on identification of 2-cm or 3-cm difference between four comparative points of the involved and uninvolved extremities.

[0503] i. Collagenous Colitis

[0504] Modified MMP polypeptides, for example tsMMPs, such as a modified MMP-1 or a tsMMP-1 such as those described herein, can be used to treat collagenous colitis. Collagenous colitis was first described as chronic watery diarrhea (Lindstrom et al. (1976) Pathol. Eur., 11:87-89). Collagenous colitis is characterized by collagen deposition, likely resulting from an imbalance between collagen production by mucosal fibroblasts and collagen degradation. It results in secretory diarrhea. The incidence of collagenous colitis is similar to primary biliary cirrhosis. The disease has an annual incidence of 1.8 per 100,000 and a prevalence of 15.7 per 100,000, which is similar to primary biliary cirrhosis (12.8 per 100,000) and lower than ulcerative colitis (234 per 100,000), Crohn's disease (146 per 100,000) or celiac disease (5 per 100,000). In patients with chronic diarrhea, about 0.3 to 5% have collagenous colitis. Collagenous colitis is an inflammatory disease resulting in increased production of cytokines and other agents that stimulate the proliferation of fibroblasts, resulting in increased collagen accumulation.

[0505] 2. Spinal Pathologies

[0506] As described herein, the modified MMPs provided herein can be used to treat diseases and conditions of the ECM or involving the ECM. These include spinal pathologies, typically referred to as herniated disc or bulging discs, that can be treated by administering an MMP provided herein and activating as described herein. Herniated discs that can be treated include protruded and extruded discs. A protruded disc is one that is intact but bulging. In an extruded disk, the fibrous wrapper has torn and nucleus pulposus (NP) has oozed out, but is still connected to the disk. While the NP is not the cause of the herniation, the NP contributes to pressure on the nerves causing pain. The NP contains hyaluronic acid, chondrocytes, collagen fibrils, and proteoglycan aggrecans that have hyaluronic long chains which attract water. Attached to each hyaluronic chain are side chains of chondroitin sulfate and keratan sulfate.

[0507] Herniated discs have been treated with chemonucleolytic drugs, such as chymopapain and a collagenase, typically by local introduction of the drug into the disc. A chemonucleolytic drug degrades one or more components of the NP, thereby relieving pressure. Chemonucleolysis is effective on protruded and extruded disks. Chemonucleolysis has been used treat lumbar (lower) spine and cervical (upper spine) hernias. Hence, the MMPs provided herein can be used as chemonucleolytic drugs and administered, such as by injection, to the affected disc, under conditions that activate the MMP.

### J. EXAMPLES

[0508] The following examples are included for illustrative purposes only and are not intended to limit the scope of the invention.

### Example 1

### Cloning and Expression of hMMP-1

[0509] A. Cloning and High-Throughput Expression of hMMP-1 Library

[0510] In this example, a human matrix metalloprotease 1 (hMMP-1) library was created by cloning DNA encoding human MMP-1 into a plasmid followed by transformation and protein expression/isolation. The library was created by introducing mutations in a parent human MMP-1 DNA sequence having the sequence of nucleotides set forth in SEQ ID NO:706, which encodes the inactive zymogen proMMP-1 (set forth in SEQ ID NO:2), to generate single amino acid variants of MMP-1 across the catalytic domain and proline rich linker domain of the polypeptide. The hMMP-1 library was designed to contain at least 15 amino acid variants at each of 178 amino acids positions within the catalytic domain (amino acids 81-242 of SEQ ID NO:2) and the linker region (amino acids 243-258 of SEQ ID NO:2) of human MMP-1 (See Table 7, below).

TABLE 7
hMMP-1 Library

| Amino | | |
|---|---|---|
| Acid | Amino Acid Substitutions | SEQ ID NOS |
| F81 | E; H; R; C; Q; T; S; G; M; W; I; V; L; | 780-781, 783-784, 786, 787, |
| | A; P | 789-797 |
| V82 | R; C; N; Q; T; Y; S; G; F; M; W; I; L; | 802-816 |
| | A; P | |
| L83 | D; E; H; R; C; Q; T; Y; S; G; M; W; I; | 817-819, 821-822, 824-825, |
| | A; P | 826, 827-828, 830-832, 834-835 |
| T84 | D; E; H; R; C; Q; Y; S; G; F; I; V; L; A; P | 836-838, 840-841, 843-847, |
| | | 850-854 |
| E85 | K; R; C; N; Q; T; Y; S; G; F; M; V; L; | 857-867, 870-873 |
| | A; P | |
| G86 | D; H; K; C; N; T; Y; S; F; M; W; I; V; | 874, 876-877, 879-880, 882-890, |
| | L; P | 892 |
| N87 | E; H; R; C; Q; Y; S; G; F; M; I; V; L; | 894-895, 897-899, 901-905, |
| | A; P | 907-911 |
| P88 | D; E; H; K; R; C; Q; T; Y; G; W; I; V; | 912-917, 919-921, 923, 926-930 |
| | L; A | |
| R89 | E; H; K; N; T; Y; S; G; F; M; W; V; L; | 932-934, 936, 938-944, 946-949 |
| | A; P | |
| W90 | E; H; R; N; Q; T; S; G; F; M; I; V; L; A; P | 951-952, 954, 956-958, 960-968 |
| E91 | D; H; R; C; N; T; Y; S; G; F; W; I; V; | 969-970, 972-974, 976-980, |
| | L; A | 982-986 |
| Q92 | E; K; R; N; T; Y; S; G; F; W; I; V; L; | 989, 991-992, 994-999, 1001-1006 |
| | A; P | |
| T93 | D; E; K; R; N; S; G; F; M; W; I; V; L; | 1007-1008, 1010-1011, 1013, |
| | A; P | 1016-1025 |
| H94 | D; E; R; N; T; S; G; F; M; W; I; V; L; | 1026-1027, 1029, 1031, 1033, |
| | A; P | 1035-1044 |
| L95 | D; E; H; K; R; C; T; Y; S; G; W; I; V; | 3-8, 11-14, 17-21 |
| | A; P | |
| T96 | E; H; R; C; N; Q; S; G; F; W; I; V; L; | 1046-1047, 1049-1052, 1054-1056, |
| | A; P | 1058-1063 |
| Y97 | D; E; H; K; R; N; Q; T; S; G; W; V; L; | 1064-1068, 1070-1074, 1077, |
| | A; P | 1079-1082 |
| R98 | D; E; H; K; C; Y; S; G; F; M; W; V; L; | 1083-1087, 1091-1096, 1098-1101 |
| | A; P | |
| I99 | E; H; R; C; N; Q; T; Y; S; G; F; W; V; | 1103-1104, 1106-1114, 1116-1120 |
| | L; A; P | |
| E100 | D; H; R; N; T; Y; S; G; F; M; W; I; V; | 497-498, 500, 502, 504-513, |
| | L; P | 515 |
| N101 | D; H; K; R; C; T; Y; S; F; M; W; V; L; | 1121, 1123-1126, 1128-1130, |
| | A; P | 1132-1134, 1136-1139 |
| Y102 | D; E; K; R; C; N; Q; S; G; F; M; V; L; | 1140-1141, 1143-1147, 1149-1152, |
| | A; P | 1155-1158 |
| T103 | D; E; K; R; C; N; Q; Y; S; G; W; V; L; | 516-517, 519-526, 529, 531-534 |
| | A; P | |
| P104 | D; E; H; R; C; Q; T; Y; S; G; F; M; V; | 1159-1161, 1163-1164, 1166-1172, |
| | L; A | 1175-1177 |
| D105 | E; R; C; N; T; S; G; F; M; W; I; V; L; | 22, 25-27, 29, 31-40 |
| | A; P | |
| L106 | D; H; R; C; N; T; Y; S; G; F; M; I; V; | 1178, 1180, 1182-1184, 1186-1191, |
| | A; P | 1193-1196 |
| P107 | D; K; R; C; T; Y; S; G; F; M; W; I; V; | 1197, 1200-1202, 1205-1215 |
| | L; A | |
| R108 | E; K; C; N; T; Y; S; G; F; W; I; V; L; | 1217, 1219-1221, 1223-1227, |
| | A; P | 1229-1234 |
| A109 | D; E; H; R; N; Q; T; Y; S; G; M; W; I; | 1235-1237, 1239, 1241-1246, |
| | V; L; | 1248-1252 |
| D110 | H; R; C; Q; T; Y; S; G; F; M; I; V; L; | 1255, 1257-1258, 1260-1266, |
| | A; P | 1268-1272 |
| V111 | D; E; K; R; C; Q; T; Y; S; G; W; I; L; | 1273-1274, 1276-1278, 1280-1284, |
| | A; P | 1287-1291 |
| D112 | H; K; R; C; Q; T; Y; S; G; F; M; W; I; | 1293-1296, 1298-1310 |
| | V; L; A; P | |
| H113 | D; E; R; N; T; Y; S; G; F; M; W; V; L; | 1311-1312, 1314, 1316, 1318-1324, |
| | A; P | 1326-1329 |
| A114 | E; R; C; N; Q; T; S; G; F; M; W; I; V; | 1331, 1334-1338, 1340-1348 |
| | L; P | |
| I115 | D; E; H; K; R; C; Q; T; S; G; F; W; V; | 1349-1354, 1356-1357, 1359-1361, |
| | L; P | 1363-1365, 1367 |
| E116 | D; H; K; R; C; N; Q; S; G; F; M; I; L; | 1368-1374, 1377-1380, 1382, |
| | A; P | 1384-1386 |
| K117 | D; E; H; R; N; Q; T; Y; S; G; F; W; L; | 1387-1390, 1392-1398, 1400, |
| | A; P | 1403-1405 |
| A118 | D; E; H; K; R; Q; T; S; G; F; W; I; V; | 1406-1410, 1413-1414, 1416-1418, |
| | L; P | 1420-1424 |
| F119 | E; H; K; R; C; N; T; Y; S; G; W; V; L; | 1426-1431, 1433-1436, 1438, |
| | A; P | 1440-1443 |
| Q120 | D; E; H; K; R; C; N; T; Y; G; M; W; V; | 1444-1452, 1454, 1456-1457, |
| | A; P | 1459, 1461-1462 |
| L121 | E; H; K; R; C; N; Q; T; S; G; F; I; V; A; P | 1464-1471, 1473-1475, 1478-1481 |
| W122 | E; H; K; R; N; Q; T; Y; S; G; F; V; L; | 1483-1486, 1488-1494, 1497-1500 |
| | A; P | |
| S123 | D; H; K; R; C; N; Q; T; Y; G; F; M; W; | 1501, 1503-1519 |
| | I; V; L; A; P | |
| N124 | D; K; R; C; T; S; G; F; M; W; I; V; L; | 1520, 1523-1525, 1527, 1529-1538 |
| | A; P | |
| V125 | D; E; H; R; C; Q; T; Y; S; G; F; M; W; | 1539-1541, 1543-1544, 1546-1553, |
| | A; P | 1556-1557 |
| T126 | E; H; K; R; N; Q; S; G; F; M; W; V; L; | 1559-1562, 1564-1565, 1567-1571, |
| | A; P | 1573-1576 |
| P127 | E; H; K; R; C; Q; T; S; F; M; W; I; V; | 1578-1582, 1584-1585, 1587, |
| | L; A | 1589-1595 |
| L128 | D; K; R; C; Q; T; S; G; F; M; W; I; V; | 1596, 1599-1601, 1603-1604, |
| | A; P | 1606-1614 |
| T129 | E; H; K; R; C; Y; S; G; F; M; I; V; L; | 1616-1620, 1623-1627, 1629-1633 |
| | A; P | |
| F130 | E; H; K; R; C; N; T; Y; S; G; I; V; L; A; P | 1635-1640, 1642-1645, 1648-1652 |
| T131 | D; E; H; R; C; Q; Y; S; G; F; M; I; L; | 1653-1655, 1657-1658, 1660-1665, |
| | A; P | 1667, 1669-1671 |
| K132 | D; E; H; R; T; Y; S; G; F; M; I; V; L; A; P | 1672-1675, 1679-1684, 1686-1690 |
| V133 | D; E; H; K; R; C; N; T; S; G; M; W; L; | 1691-1697, 1699, 1701-1702, |
| | A; P | 1704-1705, 1707-1709 |
| S134 | D; E; H; K; R; C; N; Q; T; Y; G; V; L; | 1710-1720, 1725-1728 |
| | A; P | |
| E135 | D; H; R; N; Q; T; S; F; M; W; I; V; L; | 1729-1730, 1732, 1734-1736, |
| | A; P | 1738, 1740-1747 |
| G136 | D; E; H; R; C; N; T; S; M; W; I; V; L; | 1748-1750, 1752-1754, 1756, |
| | A; P | 1758, 1760-1766 |
| Q137 | E; H; K; R; C; N; T; Y; S; G; F; W; L; | 1768-1778, 1780, 1783-1785 |
| | A; P | |
| A138 | D; E; H; R; C; Q; T; S; G; M; W; I; V; | 1786-1788, 1790-1791, 1793-1794, |
| | L; P | 1796-1797, 1799-1804 |
| D139 | E; H; R; C; N; Y; S; G; F; M; W; I; V; | 1805-1806, 1808-1810, 1813-1823 |
| | L; A; P | |
| I140 | D; E; H; K; R; C; T; Y; G; F; M; W; V; | 1824-1829, 1832-1833, 1835-1841 |
| | L; A | |
| M141 | D; E; H; R; C; N; T; Y; S; G; W; I; L; | 1843-1845, 1847-1849, 1851-1854, |
| | A; P | 1856-1857, 1859-1861 |
| I142 | K; R; N; Q; T; Y; S; G; F; M; W; V; L; | 1865-1866, 1868-1880 |
| | A; P | |
| S143 | E; H; R; C; N; Q; T; Y; G; M; W; I; L; | 1882-1883, 1885-1891, 1893-1895, |
| | A; P | 1897-1899 |
| F144 | E; H; K; R; C; N; Q; T; S; G; M; W; V; | 1901-1908, 1910-1913, 1915-1916, |
| | L; P | 1918 |
| V145 | D; E; H; K; R; C; N; Q; T; S; G; W; L; | 1919-1927, 1929-1930, 1933, |
| | A; P | 1935-1937 |
| R146 | D; E; H; K; C; N; Q; T; Y; S; F; V; L; | 1938-1947, 1949, 1953-1956 |
| | A; P | |
| G147 | E; H; R; C; Q; T; S; F; M; W; I; V; L; | 1958-1959, 1961-1962, 1964-1965, |
| | A; P | 1967-1975 |
| D148 | E; K; R; C; N; T; S; G; M; W; I; V; L; | 1976, 1978-1981, 1983, 1985-1986, |
| | A; P | 1988-1994 |
| H149 | E; R; C; N; Q; T; Y; S; G; W; I; V; L; | 1996, 1998-2005, 2008-2013 |
| | A; P | |
| R150 | D; E; H; K; N; T; S; G; M; W; I; V; L; | 41-44, 46, 48, 50-51, 53-59 |
| | A; P | |
| D151 | K; R; N; Q; T; Y; S; G; F; M; W; V; L; | 62-63, 65-73, 75-78 |
| | A; P | |
| N152 | D; H; K; R; C; T; Y; S; G; F; W; I; L; | 2014, 2016-2019, 2021-2025, |
| | A; P | 2027-2028, 2030-2032 |
| S153 | D; H; K; R; C; Q; T; Y; G; F; I; V; L; | 535, 537-540, 542-546, 549-553 |
| | A; P | |
| P154 | H; K; R; C; N; Q; T; Y; S; F; W; I; V; | 2035-2043, 2045, 2047-2051 |
| | L; A | |
| F155 | E; H; R; N; Q; T; Y; S; G; M; W; V; L; | 80-81, 83, 85-92, 94-97 |
| | A; P | |
| D156 | E; H; K; R; C; T; Y; S; G; M; W; V; L; | 98-102, 105-108, 110-111, |
| | A; P | 113-116 |
| G157 | D; H; K; R; N; Q; T; Y; S; F; M; V; L; | 2052, 2054-2056, 2059-2065, |
| | A; P | 2068-2071 |
| P158 | D; K; R; C; N; Q; T; Y; S; G; F; W; I; | 2072, 2075-2084, 2086-2090 |
| | V; L; A | |
| G159 | E; K; R; C; Q; T; Y; S; M; W; I; V; L; | 118, 120-122, 124-127, 129-135 |
| | A; P | |
| G160 | E; H; R; C; N; Q; T; S; M; W; I; V; L; | 2092-2093, 2095-2099, 2101, |
| | A; P | 2103-2109 |
| N161 | E; H; R; C; Q; T; Y; S; G; F; W; I; V; L; P | 2111-2112, 2114-2121, 2123-2126, |
| | | 2128 |
| L162 | D; E; R; C; Q; T; Y; S; G; F; M; W; I; | 2129-2130, 2133-2134, 2136-2144, |
| | A; P | 2146-2147 |
| A163 | E; K; R; C; N; Q; T; Y; S; G; F; I; V; L; P | 2149, 2151-2160, 2163-2166 |
| H164 | E; K; R; C; N; Q; Y; S; G; F; M; V; L; | 2168-2173, 2175-2179, 2182-2185 |
| | A; P | |
| A165 | D; H; K; R; N; Q; T; S; G; F; M; W; V; | 2186, 2188-2190, 2192-2194, |
| | L; P | 2196-2200, 2202-2204 |
| F166 | E; H; K; R; C; N; S; G; M; W; I; V; L; | 2206-2211, 2215-2223 |
| | A; P | |
| Q167 | D; E; K; R; N; T; Y; S; G; F; M; V; L; | 2224-2225, 2227-2228, 2230-2236, |
| | A; P | 2239-2242 |
| P168 | D; H; R; C; N; T; S; G; F; M; W; I; V; | 2243, 2245, 2247-2249, 2251, |
| | L; A | 2253-2261 |
| G169 | D; E; H; R; C; Q; T; S; M; W; I; V; L; | 2262-2264, 2266-2267, 2269-2270, |
| | A; P | 2272, 2274-2280 |
| P170 | D; H; K; R; C; Q; T; S; G; F; M; W; I; | 2281, 2283-2286, 2288-2289, |
| | L; A | 2291-2296, 2298-2299 |
| G171 | D; E; H; K; R; C; N; Q; Y; S; M; W; L; | 554-561, 563-564, 566-567, |
| | A; P | 570-572 |
| I172 | D; E; R; C; N; Q; T; Y; G; M; W; V; L; | 2300-2301, 2304-2309, 2311, |
| | A; P | 2313-2318 |
| G173 | D; K; R; C; N; T; Y; S; F; M; W; V; L; | 2319, 2322-2325, 2327-2332, |
| | A; P | 2334-2337 |
| G174 | D; E; H; R; N; T; Y; S; F; M; W; V; L; | 2338-2340, 2342, 2344, 2346-2351, |
| | A; P | 2353-2356 |
| D175 | E; H; R; C; N; Q; T; Y; S; G; F; I; V; L; | 2357-2358, 2360-2368, 2371-2375 |
| | A; P | |
| A176 | D; E; K; R; C; N; Q; T; S; G; F; W; V; | 136-137, 139-144, 146-148, |
| | L; P | 150, 152-154 |
| H177 | D; R; C; N; Q; T; Y; S; G; W; I; V; L; | 2376, 2379-2386, 2389-2394 |
| | A; P | |
| F178 | E; H; K; R; C; Q; T; Y; S; G; W; I; V; | 2396-2400, 2402-2406, 2408-2413 |
| | L; A; P | |
| D179 | E; K; R; C; N; Q; T; S; G; W; I; V; L; | 155, 157-162, 164-165, 168-173 |
| | A; P | |
| E180 | D; K; R; C; N; Q; T; Y; S; G; F; M; I; | 174, 176-186, 188, 191-192 |
| | A; P | |
| D181 | E; K; R; C; Q; T; Y; S; G; F; M; V; L; | 193, 195-197, 199-205, 208-211 |
| | A; P | |
| E182 | D; R; C; Q; T; Y; S; G; F; M; W; I; L; | 212, 215-216, 218-226, 228-230 |
| | A; P | |
| R183 | E; H; K; C; N; T; S; G; M; W; I; V; L; | 2415-2419, 2421, 2423-2424, |
| | A; P | 2426-2432 |
| W184 | E; H; R; N; Q; T; S; G; F; M; I; V; L; A; P | 2434-2435, 2437, 2439-2441, |
| | | 2443-2451 |
| T185 | D; E; H; R; C; N; Q; Y; S; G; W; V; L; | 231-233, 235-241, 244, 246-249 |
| | A; P | |
| N186 | D; E; H; R; C; Q; T; Y; S; G; F; V; L; | 2452-2454, 2456-2463, 2467-2470 |
| | A; P | |
| N187 | D; H; K; R; C; T; S; G; F; M; W; I; L; | 250, 252-255, 257, 259-264, |
| | A; P | 266-268 |
| F188 | D; E; H; K; R; N; Q; S; G; W; I; V; L; | 2471-2475, 2477-2478, 2481-2482, |
| | A; P | 2484-2489 |
| R189 | D; E; H; K; C; N; Q; T; Y; G; W; V; L; | 2490-2498, 2500, 2503, 2505-2508 |
| | A; P | |
| E190 | D; H; K; R; C; T; Y; S; G; M; I; V; L; | 573-577, 580-583, 585, 587-591 |
| | A; P | |
| Y191 | D; E; H; K; R; C; Q; T; S; G; W; V; L; | 592-597, 599-602, 605, 607-610 |
| | A; P | |
| N192 | D; H; K; R; C; Q; T; S; G; M; W; V; L; | 611, 613-618, 620-621, 623-624, |
| | A; P | 626-629 |
| L193 | D; E; K; R; N; Q; T; Y; S; G; F; W; I; | 2509-2510, 2512-2513, 2515-2521, |
| | A; P | 2523-2524, 2526-2527 |
| H194 | E; K; Q; T; Y; S; G; F; M; W; I; V; L; | 631-632, 636-648 |
| | A; P | |
| R195 | D; E; K; C; Q; T; Y; S; G; F; W; V; L; | 269-270, 272-273, 275-280, |
| | A; P | 282, 284-287 |
| V196 | D; E; H; K; R; Q; T; Y; S; G; M; I; L; | 2528-2532, 2535-2539, 2541, |
| | A; P | 2543-2546 |
| A197 | E; H; R; C; N; Q; T; Y; S; G; W; I; V; | 2548-2549, 2551-2558, 2561-2565 |
| | L; P | |
| A198 | D; E; H; K; R; T; Y; S; G; F; M; W; V; | 288-292, 296-302, 304-306 |
| | L; P | |
| H199 | E; K; R; C; N; T; S; G; M; W; I; V; L; | 2567-2571, 2573, 2575-2576, |
| | A; P | 2578-2584 |
| E200 | D; R; C; N; T; Y; S; G; F; M; W; I; V; | 2585, 2588-2590, 2592-2600, |
| | A; P | 2602-2603 |
| L201 | D; E; K; R; N; Q; T; S; G; M; W; I; V; | 2604-2605, 2607-2608, 2610-2612, |
| | A; P | 2614-2615, 2617-2622 |
| G202 | D; E; H; K; R; C; T; Y; S; M; I; V; L; | 2623-2628, 2631-2633, 2635, |
| | A; P | 2637-2641 |
| H203 | D; E; R; C; N; Q; T; Y; S; G; I; V; L; A; P | 2642-2643, 2645-2652, 2656-2660 |
| S204 | D; H; K; R; N; Q; T; Y; G; W; I; V; L; | 2661, 2663-2665, 2667-2671, |
| | A; P | 2674-2679 |
| L205 | D; E; R; C; N; Q; T; S; G; M; W; I; V; | 2680-2681-2684-2688, 2690-2691, |
| | A; P | 2693-2698 |
| G206 | D; E; H; R; C; Q; T; S; M; W; I; V; L; | 307-309, 311-312, 314-315, |
| | A; P | 317, 319-325 |
| L207 | D; H; K; R; N; Q; Y; S; G; M; W; I; V; | 649, 651-653, 655-656, 658-660, |
| | A; P | 662-667 |
| S208 | D; E; K; R; C; N; Q; T; G; F; W; V; L; | 2669-2700, 2702-2707, 2709-2710, |
| | A; P | 2712, 2714-2717 |
| H209 | D; R; C; N; Q; T; Y; S; G; F; W; V; L; | 2718, 2721-2729, 2731, 2733-2736 |
| | A; P | |
| S210 | H; K; R; C; N; Q; T; G; F; W; I; V; L; | 328-334, 336-337, 339-344 |
| | A; P | |
| T211 | D; H; K; R; N; Q; S; G; F; M; W; V; L; | 2737, 2739-2741, 2743-2744, |
| | A; P | 2746-2750, 2752-2755 |
| D212 | E; H; K; R; N; Q; T; Y; S; G; F; V; L; | 668-671, 673-679, 683-686 |
| | A; P | |
| I213 | D; E; H; K; R; C; N; Q; T; S; G; F; M; | 2756-2764, 2766-2769, 2771-2774 |
| | V; L; A; P | |
| G214 | D; E; R; C; Q; T; Y; S; F; M; I; V; L; A; P | 2775-2776, 2779-2780, 2782-2787, |
| | | 2789-2793 |
| A215 | D; H; K; R; C; N; Q; T; S; G; M; W; I; | 2794, 2796-2802, 2804-2805, |
| | V; L; P | 2807-2812 |
| L216 | D; E; K; R; C; Q; T; S; G; M; W; I; V; | 2813-2814, 2816-2818, 2820-2821, |
| | A; P | 2823-2824, 2826-2831 |
| M217 | D; H; K; R; C; N; Q; T; Y; S; G; I; L; | 2832, 2834-2843, 2846, 2848-2850 |
| | A; P | |
| Y218 | D; E; R; C; N; Q; S; G; F; W; I; V; L; | 345-346, 349-352, 354-356, |
| | A; P | 358-363 |
| P219 | D; E; H; K; R; C; Q; T; S; G; F; W; V; | 2851-2856, 2858-2859, 2861-2863, |
| | L; A | 2865, 2867-2869 |
| S220 | E; H; K; R; N; Q; T; G; F; M; I; V; L; | 2871-2874, 2876-2878, 2880-2882, |
| | A; P | 2884-2888 |
| Y221 | E; K; R; C; N; Q; T; S; G; M; W; V; L; | 2890, 2892-2899, 2901-2902, |
| | A; P | 2904-2907 |
| T222 | D; H; R; C; N; Y; S; G; F; M; W; I; V; | 2908, 2910, 2912-2914, 2916-2926 |
| | L; A; P | |
| F223 | E; H; K; R; C; N; Q; T; Y; S; G; M; L; | 365-376, 380-382 |
| | A; P | |
| S224 | D; H; K; R; C; Q; T; G; M; W; I; V; L; | 2927, 2929-2932, 2934-2935, |
| | A; P | 2937, 2939-2945 |
| G225 | D; E; H; K; R; C; N; Q; T; S; M; W; V; | 2946-2954, 2956, 2958-2959, |
| | A; P | 2961, 2963-2964 |
| D226 | E; H; R; C; N; T; S; G; M; W; I; V; L; | 2965-2966, 2968-2970, 2972, |
| | A; P | 2974-2975, 2977-2983 |
| V227 | D; E; H; K; R; C; Q; T; Y; S; G; W; L; | 383-388, 390-394, 397, 399-401 |
| | A; P | |
| Q228 | D; E; H; K; R; N; T; Y; S; G; M; W; L; | 402-406, 408-412, 414-415, |
| | A; P | 418-420 |
| L229 | D; E; H; R; C; Q; T; Y; G; M; W; I; V; | 421-423, 425-426, 428-430, |
| | A; P | 432, 434-439 |
| A230 | D; H; R; C; N; T; Y; S; G; M; W; I; V; | 687, 689, 691-693, 695-698, |
| | L; P | 700-705 |
| Q231 | D; H; R; C; Y; S; G; F; M; W; I; V; L; | 2984, 2986, 2988-2989, 2992-3002 |
| | A; P | |
| D232 | E; H; K; R; N; Q; T; Y; S; G; F; W; V; | 3003-3006, 3008-3014, 3016, |
| | L; P | 3018-3019, 3021 |
| D233 | E; K; R; N; Q; T; S; G; M; W; I; V; L; | 440, 442-443, 445-447, 449-450, |
| | A; P | 452-458 |
| I234 | D; E; H; C; N; Q; T; Y; G; M; W; V; L; | 459-461, 464-468, 470, 472-477 |
| | A; P | |
| D235 | E; H; R; C; N; Q; T; Y; S; G; I; V; L; A; P | 3022-3023, 3025-3032, 3036-3040 |
| G236 | D; E; K; R; C; N; T; Y; S; F; M; I; V; L; P | 3041-3042, 3044-3047, 3049-3053, |
| | | 3055-3057, 3059 |
| 1237 | D; E; K; R; C; N; Q; T; Y; S; G; W; L; | 3060-3061, 3063-3071, 3074, |
| | A; P | 3076-3078 |
| Q238 | E; H; K; R; C; N; T; Y; S; G; F; W; I; L; P | 3080-3090, 3092-3093, 3095, |
| | | 3097 |
| A239 | D; H; K; R; C; Q; T; Y; S; G; F; W; I; | 3099, 3100-3103, 3105-3110, |
| | V; L; P | 3112-3116 |
| I240 | D; K; R; C; Q; T; Y; S; G; F; M; V; L; | 478, 481-483, 485-491, 493-496 |
| | A; P | |
| Y241 | D; H; R; N; Q; T; S; G; M; W; I; V; L; | 3117, 3119, 3121, 3123-3127, |
| | A; P | 3129-3135 |
| G242 | E; H; K; R; N; T; Y; S; F; W; I; V; L; | 3137-3140, 3142, 3144-3147, |
| | A; P | 3149-3154 |
| R243 | D; H; K; C; N; Q; T; Y; S; G; I; V; L; | 3155, 3157-3165, 3169-3173 |
| | A; P | |
| S244 | D; E; H; R; Q; T; Y; G; F; M; W; V; L; | 3174-3176, 3178, 3181-3187, |
| | A; P | 3189-3192 |
| Q245 | E; H; K; R; C; T; S; G; F; M; W; I; V; | 3194-3198, 3200, 3202-3209, |
| | L; P | 3211 |
| N246 | D; K; R; C; Q; T; Y; S; G; F; W; I; V; | 3212, 3215-3223, 3225-3230 |
| | L; A; P | |
| P247 | D; E; H; K; R; N; Q; T; S; G; F; I; V; L; A | 3231-3235, 3237-3239, 3241-3243, |
| | | 3246-3249 |
| V248 | E; H; K; R; C; Q; T; Y; S; G; F; M; W; | 3251-3255, 3257-3267 |
| | I; L; A | |
| Q249 | E; H; K; R; C; N; T; Y; G; W; I; V; L; | 3270-3277, 3279, 3282-3287 |
| | A; P | |
| P250 | D; K; R; N; Q; T; Y; S; G; F; M; W; V; | 3288, 3291-3292, 3294-3302, |
| | L; A | 3304-3306 |
| I251 | D; E; K; R; C; Q; T; Y; S; G; W; V; L; | 3307-3308, 3310-3312, 3314-3318, |
| | A; P | 3321-3325 |
| G252 | D; E; H; K; R; C; T; S; F; M; W; I; V; | 3326-3331, 3334, 3336-3344 |
| | L; A; P | |
| P253 | E; K; R; C; N; Q; T; Y; G; M; W; I; V; | 3346, 3348-3354, 3356, 3358-3363 |
| | L; A | |
| Q254 | D; E; R; C; T; Y; S; G; F; W; I; V; L; A; P | 3364-3365, 3368-3369, 3371-3375, |
| | | 3377-3382 |
| T255 | E; H; K; R; C; N; Q; S; G; F; I; V; L; A; P | 3384-3390, 3392-3394, 3397-3401 |
| P256 | E; K; R; C; N; Q; Y; S; G; F; M; I; V; | 3403, 3405-3409, 3411-3415, |
| | L; A | 3417-3420 |
| K257 | E; R; C; N; T; S; G; F; M; W; I; V; L; | 3422, 3424-3426, 3428, 3430-3439 |
| | A; P | |
| A258 | D; E; R; N; Q; T; Y; G; F; M; W; I; V; | 3440-3441, 3444, 3446-3449, |
| | L; P | 3451-3458 |

[0511] The cDNA encoding each individual hMMP-1 mutant was generated by changing the wildtype codon, encoding each of the 178 amino acids positions identified in Table 8 below, to a codon encoding the desired amino acid substitution. The wildtype codons are set forth in SEQ ID NO:706. SEQ ID NO:706 also depicts the encoded amino acids. The amino acids substitutions and corresponding mutated codons are listed in Table 8, below.

TABLE 8
Codons encoding each amino acid substitution

| Muta- | | | | | | | |
|---|---|---|---|---|---|---|---|
| tion | Codon | Mutation | Codon | Mutation | Codon | Mutation | Codon |
| F81C | TGT | T84L | TTG | N87S | AGT | W90H | CAT |
| F81E | GAG | T84D | GAT | N87I | ATT | W90M | ATG |
| F81I | ATT | T84R | CGG | N87C | TGT | W90R | CGG |
| F81L | CTG | T84I | ATT | N87A | GCG | W90E | GAG |
| F81P | CCT | T84S | TCT | N87G | GGT | W90N | AAT |
| F81S | TCT | T84G | GGT | N87Y | TAT | W90Q | CAG |
| F81A | GCG | T84Q | CAG | N87E | GAG | E91N | AAT |
| F81M | ATG | T84P | CCT | N87H | CAT | E91R | CGG |
| F81G | GGG | T84A | GCG | N87Q | CAG | E91W | TGG |
| F81T | ACG | T84C | TGT | P88C | TGT | E91G | GGG |
| F81Q | CAG | T84Y | TAT | P88K | AAG | E91V | GTG |
| F81R | CGT | T84F | TTT | P88W | TGG | E91Y | TAT |
| F81W | TGG | E85L | CTG | P88G | GGG | E91C | TGT |
| F81H | CAT | E85Q | CAG | P88L | CTG | E91H | CAT |
| F81V | GTG | E85P | CCT | P88Q | CAG | E91T | ACG |
| V82I | ATT | E85T | ACT | P88A | GCG | E91S | AGT |
| V82C | TGT | E85K | AAG | P88T | ACG | E91A | GCG |
| V82A | GCG | E85M | ATG | P88Y | TAT | E91I | ATT |
| V82P | CCG | E85G | GGT | P88R | CGG | E91D | GAT |
| V82Y | TAT | E85R | CGT | P88H | CAT | E91F | TTT |
| V82M | ATG | E85S | TCT | P88I | ATI | E91L | TTG |
| V82Q | CAG | E85C | TGT | P88V | GTG | Q92V | GTT |
| V82F | TTT | E85Y | TAT | P88E | GAG | Q92Y | TAT |
| V82W | TGG | E85A | GCG | P88D | GAT | Q92L | CTG |
| V82N | AAT | E85N | AAT | R89V | GTG | Q92N | AAT |
| V82R | CGT | E85V | GTG | R89W | TGG | Q92E | GAG |
| V82G | GGT | E85F | TTT | R89M | ATG | Q92I | ATT |
| V82S | TCG | G86L | CTT | R89A | GCG | Q92T | ACT |
| V82L | TTG | G86P | CCG | R89T | ACG | Q92G | GGT |
| V82T | ACT | G86I | ATT | R89G | GGG | Q92P | CCG |
| L83A | GCG | G86T | ACT | R89S | TCT | Q92W | TGG |
| L83C | TGT | G86H | CAT | R89K | AAG | Q92F | TTT |
| L83D | GAT | G86D | GAT | R89F | TTT | Q92S | TCG |
| L83E | GAG | G86N | AAT | R89Y | TAT | Q92R | CGG |
| L83G | GGT | G86S | AGT | R89N | AAT | Q92K | AAG |
| L83H | CAT | G86K | AAG | R89H | CAT | Q92A | GCT |
| L83I | ATT | G86W | TGG | R89L | TTG | T93A | GCG |
| L83M | ATG | G86Y | TAT | R89E | GAG | T93L | CTT |
| L83P | CCG | G86V | GTT | R89P | CCT | T93M | ATG |
| L83Q | CAG | G86C | TGT | W90L | TTG | T93N | AAT |
| L83R | CGG | G86M | ATG | W90G | GGG | T93V | GTG |
| L83S | AGT | G86F | TTT | W90P | CCG | T931 | ATT |
| L83T | ACG | N87M | ATG | W90T | ACT | T93D | GAT |
| L83W | TGG | N87L | CTG | W90S | TCG | T93S | TCG |
| L83Y | TAT | N87P | CCG | W90V | GTG | T93R | CGG |
| T84V | GTT | N87V | GTT | W90I | ATT | T93W | TGG |
| T84E | GAG | N87R | CGT | W90A | GCT | T93F | TTT |
| T84H | CAT | N87F | TIT | W90F | TTT | T93P | CCT |
| T93G | GGG | Y97R | CGT | E100L | CTG | T103R | CGG |
| T93K | AAG | Y97V | GTG | E100H | CAT | T103Y | TAT |
| T93E | GAG | Y97A | GCT | E100D | GAT | T103N | AAT |
| H94L | CTG | Y97P | CCT | E100M | ATG | T103C | TGT |
| H94S | TCG | Y97L | CTT | E100G | GGT | T103Q | CAG |
| H94M | ATG | Y97T | ACG | E100W | TGG | T103W | TGG |
| H94R | CGG | Y97K | AAG | E100Y | TAT | T103P | CCG |
| H94E | GAG | Y97W | TGG | E100R | CGT | T103A | GCG |
| H94I | ATT | Y97H | CAT | E100S | TCT | T103G | GGG |
| H94D | GAT | Y97S | TCG | E100T | ACG | T103K | AAG |
| H94P | CCG | Y97E | GAG | E100F | TTT | P104G | GGG |
| H94A | GCG | Y97D | GAT | E100I | ATT | P104E | GAG |
| H94N | AAT | Y97N | AAT | E100N | AAT | P104T | ACT |
| H94F | TTT | Y97G | GGT | N101M | ATG | P104F | TTT |
| H94G | GGG | Y97Q | CAG | N101F | TTT | P104R | CGT |
| H94T | ACT | R98H | CAT | N101L | TTG | P104D | GAT |
| H94V | GTG | R98K | AAG | N101V | GTG | P104C | TGT |
| H94W | TGG | R98C | TGT | N101H | CAT | P104Q | CAG |
| L95E | GAG | R98L | CTG | N101R | CGG | P104V | GTG |
| L95Y | TAT | R98M | ATG | N101C | TGT | P104Y | TAT |
| L95R | CGG | R98F | TTT | N101T | ACT | P104H | CAT |
| L95A | GCT | R98W | TGG | N101P | CCT | P104L | TTG |
| L95G | GGG | R98Y | TAT | N101W | TGG | P104S | TCG |
| L95K | AAG | R98P | CCT | N101K | AAG | P104A | GCG |
| L95S | AGT | R98E | GAG | N101S | TCG | P104M | ATG |
| L95T | ACG | R98A | GCG | N101D | GAT | D105A | GCT |
| L95H | CAT | R98G | GGG | N101A | GCG | D105C | TGT |
| L95W | TGG | R98V | GTT | N101Y | TAT | D105F | TTT |
| L95V | GTG | R98S | TCG | Y102R | CGT | D105G | GGT |
| L95C | TGT | R98D | GAT | Y102K | AAG | D105I | ATT |
| L95P | CCT | I99C | TGT | Y102V | GTG | D105L | CTG |
| L95D | GAT | I99E | GAG | Y102M | ATG | D105M | ATG |
| L95I | ATT | I99G | GGG | Y102P | CCG | D105N | AAT |
| T96E | GAG | I99H | CAT | Y102N | AAT | D105P | CCT |
| T96R | CGG | I99N | AAT | Y102G | GGG | D105R | CGG |
| T96P | CCG | I99P | CCT | Y102L | CTG | D105S | TCG |
| T96S | TCG | I99T | ACG | Y102D | GAT | D105T | ACG |
| T96A | GCG | I99V | GTT | Y102S | TCG | D105V | GTT |
| T96L | TTG | I99A | GCG | Y102F | TTT | D105W | TGG |
| T96W | TGG | I99F | TTT | Y102A | GCT | D105E | GAG |
| T96N | AAT | I99L | CTG | Y102E | GAG | L106P | CCG |
| T96G | GGT | 199R | CGT | Y102Q | CAG | L106D | GAT |
| T96F | TTT | I99S | TCG | Y102C | TGT | L106N | AAT |
| T96Q | CAG | I99Q | CAG | T103E | GAG | L106G | GGT |
| T96H | CAT | I99W | TGG | T103D | GAT | L106M | ATG |
| T96V | GTT | I99Y | TAT | T103S | AGT | L106A | GCT |
| T96I | ATT | E100V | GTT | T103L | CTG | L106R | CGG |
| T96C | TGT | E100P | CCG | T103V | GTT | L106Y | TAT |
| L106T | ACG | A109V | GTT | D112I | ATT | E116A | GCG |
| L106V | GTG | A109E | GAG | D112Y | TAT | E116C | TGT |
| L106H | CAT | A109L | CTT | D112L | TTG | E116D | GAT |
| L106F | TIT | A109H | CAT | H113T | ACT | E116F | TTT |
| L106I | ATT | D110P | CCT | H113L | CTG | E116G | GGT |
| L106C | TGT | D110F | TTT | H113M | ATG | E116H | CAT |
| L106S | TCT | D110Q | CAG | H113S | TCG | E116I | ATT |
| P107L | TTG | D11OR | CGG | H113N | AAT | E116K | AAG |
| P107W | TGG | D110M | ATG | H113R | AGG | E116L | CTG |
| P107T | ACT | D110H | CAT | H113A | GCT | E116M | ATG |
| P107S | TCG | D110I | ATT | H113E | GAG | E116N | AAT |
| P107R | CGG | D110L | CTT | H113V | GTG | E116P | CCG |
| P107Y | TAT | D110V | GTG | H113Y | TAT | E116Q | CAG |
| P107M | ATG | D110T | ACG | H113F | TTT | E116R | AGG |
| P107V | GTG | Dll0S | TCG | H113D | GAT | E116S | TCT |
| P107D | GAT | D110Y | TAT | H113W | TGG | K117H | CAT |
| P107A | GCG | D110G | GGT | H113G | GGG | K117T | ACG |
| P107C | TGT | D110C | TGT | H113P | CCG | K117Q | CAG |
| P107K | AAG | D110A | GCG | A114E | GAG | K117E | GAG |
| P107F | TTT | V111E | GAG | A114S | TCG | K117A | GCG |
| P107I | ATT | V111A | GCT | A114I | ATT | K117F | TTT |
| P107G | GGT | V111S | TCT | A114P | CCT | K117D | GAT |
| R108P | CCT | V111W | TGG | A114N | AAT | K117N | AAT |
| R108G | GGT | V111G | GGT | A114L | CTT | K117G | GGT |
| R108T | ACG | V111Y | TAT | A114T | ACT | K117W | TGG |
| R108E | GAG | V111P | CCG | A114F | TTT | K117Y | TAT |
| R108A | GCG | V111L | CTG | A114V | GTT | K117L | TTG |
| R108Y | TAT | V111D | GAT | A114G | GGT | K117S | AGT |
| R108K | AAG | V111K | AAG | A114C | TGT | K117P | CCG |
| R108C | TGT | V111T | ACT | A114M | ATG | K117R | AGG |
| R108S | TCT | V111Q | CAG | A114R | AGG | A118G | GGG |
| R108F | TTT | V111I | ATT | A114W | TGG | A118R | CGT |
| R108W | TGG | V111C | TGT | A114Q | CAG | A118W | TGG |
| R108I | ATT | V111R | CGT | I115F | TTT | A118K | AAG |
| R108L | CTT | D112A | GCG | I115T | ACT | A118P | CCT |
| R108N | AAT | D112M | ATG | I115H | CAT | A118V | GTG |
| R108V | GTT | D112V | AAT | I115G | GGT | A118L | TTG |
| A109S | TCG | D112R | CGG | I115K | AAG | A118D | GAT |
| A109R | CGG | D112K | AAG | I115E | GAG | A118S | AGT |
| A109T | ACG | D112P | CCT | I115S | AGT | A118F | TTT |
| A109W | TGG | D112Q | CAG | I115P | CCT | A118I | ATT |
| A1091 | ATT | D112F | TTT | I115C | TGT | A118H | CAT |
| A109Q | CAG | D112G | GGG | I115L | CPT | A118E | GAG |
| A109N | AAT | D112C | TGT | I115Q | CAG | A118Q | CAG |
| A109Y | TAT | D112W | TGG | I115R | CGG | A118T | ACT |
| A109G | GGG | D112T | ACT | I115W | TGG | F119G | GGG |
| A109M | ATG | D112H | CAT | I115V | GTT | F119T | ACT |
| A109D | GAT | D112S | TCT | I115D | GAT | F119R | CGG |
| F119L | TTG | W122G | GGG | V125T | ACG | L128A | GCG |
| F119N | AAT | W122S | TCG | V125A | GCT | L128D | GAT |
| F119S | AGT | W122V | OTT | V125C | TGT | L128V | GTG |
| F119C | TGT | W122H | CAT | V125D | GAT | L128W | TGG |
| F119P | CCG | W122F | TTT | V125W | TGG | L128C | TGT |
| F119W | TGG | W122Y | TAT | V125R | CGG | L128K | AAG |
| F119K | AAG | W122K | AAG | V125E | GAA | T129G | GGT |
| F119H | CAT | W122Q | CAG | V125F | TTT | T129A | GCT |
| F119A | GCG | W122E | GAG | V125H | CAT | T129C | TGT |
| F119V | GTT | S123D | GAT | T126K | AAG | T129K | AAG |
| F119Y | TAT | S123L | TTG | T126V | GTG | T129F | TTT |
| F119E | GAG | S123A | GCT | T126G | GGG | T129Y | TAT |
| Q120K | AAG | S123C | TGT | T126R | CGG | T129S | TCG |
| Q120N | AAT | S123I | ATT | T126L | TTG | T129R | CGG |
| Q120A | GCG | S123K | AAG | T126H | CAT | T129V | GTT |
| Q120V | GTG | S123N | AAT | T126M | ATG | T129L | MT |
| Q120D | GAT | S123F | TTT | T126P | CCG | T129H | CAT |
| Q12OR | CGG | S123Y | TAT | T126A | GCG | T129P | CCT |
| Q120P | CCT | S123M | ATG | T126N | AAT | T129E | GAG |
| Q120W | TGG | S123H | CAT | T126E | GAG | T129I | ATT |
| Q120Y | TAT | S123R | CGG | T126F | TTT | T129M | ATG |
| Q120C | TGT | S123W | TGG | T126W | TGG | F130L | CTG |
| Q120H | CAT | S123T | ACG | T126Q | CAG | F130P | CCT |
| Q120T | ACT | S123P | CCT | T126S | AGT | F130C | TGT |
| Q120M | ATG | S123G | GGG | P127C | TGT | F13OR | CGG |
| Q120E | GAG | S123Q | CAG | P127F | TTT | F130Y | TAT |
| Q120G | GGT | S123V | GTT | P127T | ACG | F130H | CAT |
| L121E | GAG | N124G | GGT | P127E | GAG | F130I | ATT |
| L121Q | CAG | N124C | TGT | P127W | TGG | F130V | GTT |
| L121P | CCT | N124V | GTG | P127A | GCT | F130K | AAG |
| L121R | CGG | N124L | CTT | P127S | AGT | F130T | ACT |
| L121C | TGT | N124T | ACG | P127H | CAT | F130E | GAG |
| L121G | GGG | N124R | CGT | P127Q | CAG | F130A | GCG |
| L121K | AAG | N124M | ATG | P127K | AAG | F130N | AAT |
| L121F | TTT | N124S | TCG | P127R | CGG | F130G | GGT |
| L1211 | ATT | N124P | CCT | P127I | ATT | F130S | AGT |
| L121S | TCG | N124A | GCG | P127V | GTG | T131F | TTT |
| L121V | GTT | N124K | AAG | P127L | CTG | T131P | CCG |
| L121H | CAT | N124F | AAA | P127M | ATG | T131A | GCG |
| L121T | ACT | N124W | TGG | L128F | TTT | T131S | TCT |
| L121A | GCT | N124I | ATT | L128M | ATG | T131G | GGT |
| L121N | AAT | N124D | GAT | L128T | ACT | T131I | ATT |
| W122R | CGT | V125G | GGG | L128R | CGT | T131L | CTT |
| W122A | GCG | V125Q | CAG | L128S | TCG | T131H | CAT |
| W122N | AAT | V1255 | TCG | L128G | GGT | T131Q | CAG |
| W122P | CCG | V125P | CCG | L128I | ATT | T131D | GAT |
| W122T | ACG | V125M | ATG | L128Q | CAG | T131E | GAG |
| W122L | CTT | V125Y | TAT | L128P | CCT | T131C | TGT |
| T131R | CGT | E135V | GTT | A138C | TGT | M141S | AGT |
| T131Y | TAT | E135M | ATG | A138T | ACG | M141C | TGT |
| T131M | ATG | E135S | TCG | A138S | TCT | M141L | CTG |
| K132G | GGT | E135D | GAT | A138R | CGT | M141A | GCG |
| K132V | GTG | E135T | ACG | A138G | GGG | M141D | GAT |
| K132L | TTG | E135L | CTG | A138E | GAG | M141W | TGG |
| K132A | GCT | E135A | GCG | A138H | CAT | M141G | GGT |
| K132P | CCG | E135W | TGG | A138M | ATG | M141H | CAT |
| K132F | TTT | E135F | TTT | A138Q | CAG | M141Y | TAT |
| K132R | CGG | E135P | CCG | A138I | ATT | M141N | AAT |
| K132I | ATT | E135R | CGG | A138D | GAT | I142L | CTG |
| K132H | CAT | E135N | AAT | A138W | TGG | I142M | ATG |
| K132S | TCT | E135H | CAT | D139R | CGT | I142G | GGT |
| K132M | ATG | E135Q | CAG | D139V | GTT | I142K | AAG |
| K132D | GAT | E135I | ATI | D139M | ATG | I142A | GCT |
| K132T | ACT | G136V | GTG | D139C | TGT | 1142N | AAT |
| K132Y | TAT | G136W | TGG | D139P | CCT | 1142W | TGG |
| K132E | GAG | G136D | GAT | D139S | TCT | I142P | CCG |
| V133G | GGG | G136M | ATG | D139L | CYT | I142Q | CAG |
| V133E | GAG | G136N | AAT | D139I | ATT | I142Y | TAT |
| V133T | ACT | G136A | GCG | D139H | CAT | I142V | GTG |
| V133N | AAT | G136L | TTG | D139A | GCG | I142T | ACT |
| V133A | GCG | G136C | TGT | D139G | GGG | I142R | CGG |
| V133H | CAT | G136P | CCG | D139F | TTT | I142S | AGT |
| V133P | CCG | G136T | ACG | D139N | AAT | I142F | TTT |
| V133K | AAG | G136R | CGT | D139W | TGG | S143P | CCG |
| V133R | CGG | G136S | TCG | D139Y | TAT | S143C | TGT |
| V133L | CTT | G1361 | ATT | D139E | GAG | S143E | GAG |
| V133W | TGG | G136H | CAT | I140D | GAT | S143G | GGT |
| V133C | TGT | G136E | GAG | I140K | AAG | S143H | CAT |
| V133D | GAT | Q137A | GCT | I140A | GCT | S143R | CGT |
| V133M | ATG | Q137R | CGG | I140G | GGG | S143L | TTG |
| V133S | AGT | Q137G | GGG | I140C | TGT | S143Q | CAG |
| S134V | GTT | Q137K | AAG | I140Y | TAT | S143N | AAT |
| S134H | CAT | Q137H | CAT | I140V | GTT | S143W | TGG |
| S134P | CCT | Q137P | CCT | I140W | TGG | S143A | GCT |
| S134G | GGG | Q137S | TCG | I140F | TTT | S143T | ACT |
| S134N | AAT | Q137L | CTG | I140H | CAT | S143Y | TAT |
| S134R | CGT | Q137W | TGG | I140L | CTG | S143M | ATG |
| S134L | CTG | Q137F | TTT | I140R | CGG | S143I | ATT |
| S134Q | CAG | Q137T | ACG | I140E | GAG | F144K | AAG |
| 5134E | GAG | Q137C | TGT | I140M | ATG | F144M | ATG |
| S134Y | TAT | Q137Y | TAT | I140T | ACT | F144E | GAG |
| S134A | GCG | Q137N | AAT | M141E | GAG | F144S | AGT |
| S134K | AAG | Q137E | GAG | M141I | ATI | F144L | CTG |
| S134D | GAT | A138V | GTT | M141R | CGG | F144W | TGG |
| S134T | ACG | A138L | CTT | M141T | ACG | F144P | CCG |
| S134C | TGT | A138P | CCG | M141P | CCG | F144R | CGG |
| F144N | AAT | G147V | GTT | R150H | CAT | P154L | C17 |
| F144C | TGT | G147Q | CAG | D151R | CGT | P154C | TGT |
| F144G | GGT | G147M | ATG | D151F | TTT | P154S | TCT |
| F144T | ACT | G147P | CCT | D151P | CCG | P154K | AAG |
| F144Q | CAG | D148R | CGG | D151W | TGG | P154I | ATT |
| F144H | CAT | D148I | ATT | D151Q | CAG | P154A | GCT |
| F144V | GTG | D148T | ACG | D151L | CTT | P154T | ACG |
| V145A | GCG | D148G | GGT | D151S | TCG | P154H | CAT |
| V145T | ACG | D148L | CTG | D151G | GGT | P154Y | TAT |
| V145L | CTG | D148V | GTT | D151A | GCT | P154N | AAT |
| V145P | CCG | D148A | GCG | D151N | AAT | P154F | TTT |
| V145K | AAG | D148W | TGG | D151K | AAG | P154R | CGT |
| V145N | AAT | D148P | CCG | D151Y | TAT | P154Q | CAG |
| V145D | GAT | D148S | TCG | D151V | GTT | F155S | TCT |
| V145H | CAT | D148K | AAG | D151T | ACT | F155T | ACT |
| V145R | CGG | D148E | GAG | D151M | ATG | F155G | GGT |
| V145Q | CAG | D148M | ATG | N152G | GGG | F155N | AAT |
| V145S | TCT | D148N | AAT | N152C | TGT | F155R | CGG |
| V145G | GGG | D148C | TGT | N152F | TTT | F155W | TGG |
| V145W | TGG | H149W | TGG | N152L | TTG | F155L | CTG |
| V145C | TGT | H149A | GCG | N152P | CCG | F155Q | CAG |
| V145E | GAG | H149L | TTG | N152R | CGG | F155M | ATG |
| R146T | ACG | H149C | TGT | N152H | CAT | F155E | GAG |
| R146L | CTG | H149Q | CAG | N152T | ACG | F155A | GCG |
| R146N | AAT | H149T | ACT | N152Y | TAT | F155P | CCT |
| R146H | CAT | H149Y | TAT | N152K | AAG | F155V | GTT |
| R146Q | CAG | H149P | CCG | N152D | GAT | F155H | CAT |
| R146K | AAG | H149V | GTT | N152W | TGG | F155Y | TAT |
| R146C | TGT | H149R | CGG | N1521 | ATT | D156H | CAT |
| R146S | AGT | H149G | GGT | N152A | GCG | D156L | CTT |
| R146D | GAT | H149E | GAG | N152S | TCT | D156E | GAG |
| R146A | GCT | H149S | AGT | S153I | ATT | D156A | GCT |
| R146Y | TAT | H1491 | ATI | S153R | CGG | D156W | TGG |
| R146P | CCT | H149N | AAT | S153K | AAG | D156C | TGT |
| R146V | GTT | R150S | TCG | S153C | TGT | D156P | CCT |
| R146E | GAG | R150E | GAG | S153G | GGG | D156V | GTT |
| R146F | TTT | R150G | GGG | S153H | CAT | D156K | AAG |
| G147R | CGT | R150M | ATG | S153L | CTT | D156S | TCT |
| G147F | TTT | R150P | CCG | S153V | GTT | D156G | GGG |
| G147I | ATT | R150T | ACG | S153T | ACG | D156T | ACT |
| G147L | CTG | R150W | TGG | S153P | CCT | D156Y | TAT |
| G147A | GCG | R150A | GCG | S153A | GCG | D156R | CGT |
| G147E | GAG | R150N | AAT | S153F | TTT | D156M | ATG |
| G147H | CAT | R150K | AAG | S153D | GAT | G157K | AAG |
| G147W | TGG | R150L | TTG | S153Q | CAG | G157D | GAT |
| G147T | ACG | R150V | GTT | S153Y | TAT | G157F | TTT |
| G147C | TGT | R150D | GAT | P154V | GTT | G157R | CGT |
| G147S | TCT | R150I | ATT | P154W | TGG | G157H | CAT |
| G157L | TTG | G160M | ATG | A163E | GAG | F166C | TGT |
| G157N | AAT | G160C | TGT | A163T | ACG | F166E | GAG |
| G157Y | TAT | G160Q | CAG | A163Q | CAG | Q167D | GAT |
| G157S | TCG | G160V | GTT | A163I | ATT | Q167R | CGG |
| G157T | ACG | G160S | AGT | A163N | AAT | Q167A | GCG |
| G157A | GCT | G160E | GAG | H164L | CTT | Q167S | AGT |
| G157Q | CAG | G160L | CTT | H164M | ATG | Q167F | TIT |
| G157P | CCG | G160T | ACG | H164K | AAG | Q167Y | TAT |
| G157V | GTG | N161S | AGT | H164P | CCG | Q167P | CCG |
| G157M | ATG | N161C | TGT | H164C | TGT | Q167T | ACT |
| P158S | TCT | N161L | TTG | H164R | CGT | Q167V | GTG |
| P158Y | TAT | N161R | CGT | H164A | GCG | Q167L | CTG |
| P158R | CGG | N161G | GGT | H164V | GTG | Q167M | ATG |
| P158L | CTT | N161W | TGG | H164S | TCG | Q167N | AAT |
| P158V | GTG | N161Y | TAT | H164N | AAT | Q167G | GGG |
| P158C | TGT | N161E | GAG | H164G | GGG | Q167K | AAG |
| P158A | GCG | N161P | CCT | H164F | TTT | Q167E | GAG |
| P158W | TGG | N161T | ACG | H164Y | TAT | P168N | AAT |
| P158I | ATT | N161H | CAT | H164Q | CAG | P168F | TTT |
| P158F | TTT | N161I | ATT | H164E | GAG | P168R | CGG |
| P158Q | CAG | N161V | GTG | A165W | TGG | P168W | TGG |
| P158T | ACT | N161F | TTT | A165V | GTT | P168A | GCT |
| P158G | GGT | N161Q | CAG | A165G | GGG | P168T | ACG |
| P158K | AAG | L162A | GCT | A165K | AAG | P168V | GTT |
| P158N | AAT | L162G | GGG | A165L | TTG | P168G | GGG |
| P158D | GAT | L162C | TGT | A165P | CCT | P168C | TGT |
| G159R | CGG | L162P | CCG | A165Q | CAG | P168M | ATG |
| G159S | AGT | L162R | CGG | A165D | GAT | P168H | CAT |
| G159Q | CAG | L162I | ATT | A165H | CAT | P168L | CTT |
| G159P | CCT | L162S | TCT | A165F | TTT | P168S | AGT |
| G159V | GTG | L162D | GAT | A165S | AGT | P168I | ATT |
| G159K | AAG | L162M | ATG | A165T | ACT | P168D | GAT |
| G159A | GCG | L162E | GAG | A165R | CGG | G169H | CAT |
| G159Y | TAT | L162T | ACT | A165N | AAT | G169A | GCG |
| G159E | GAG | L162Y | TAT | A165M | ATG | G169E | GAG |
| G159T | ACG | L162F | TTT | F166G | GGG | G169C | TGT |
| G159M | ATG | L162W | TGG | F166S | TCG | G169S | TCG |
| G159I | ATT | L162Q | CAG | F166L | CTT | G169L | CTG |
| G159W | TGG | A163R | CGT | F166V | GTG | G169V | GTT |
| G159L | CTG | A163G | GGG | F166P | CCT | G169T | ACG |
| G159C | TGT | A163Y | TAT | F166N | AAT | G169R | CGG |
| G160A | GCG | A163P | CCT | F166R | CGT | G169W | TGG |
| G160H | CAT | A163S | AGT | F166A | GCG | G169M | ATG |
| G160N | AAT | A163L | CTT | F166K | AAG | G169I | ATT |
| G160W | TGG | A163C | TGT | F166H | CAT | G169P | CCG |
| G16OR | CGG | A163K | AAG | F166W | TGG | G169D | GAT |
| G160P | CCG | A163V | GTG | F166I | ATT | G169Q | CAG |
| G160I | ATT | A163F | TTT | F166M | ATG | P170L | CTT |
| P17OR | CGG | G173S | AGT | A176L | CTG | D179I | ATT |
| P170I | ATT | G173A | GCG | A176P | CCT | D179R | CGT |
| P170T | ACG | G173R | AGG | A176N | AAT | D179N | AAT |
| P17OF | TTT | G173N | AAT | A176G | GGT | D179W | TGG |
| P170Q | CAG | G173T | ACG | A176S | TCT | D179Q | CAG |
| P170G | GGG | G173D | GAT | A176R | CGT | D179V | GTG |
| P170S | TCT | G173V | CTT | A176K | AAG | D179C | TGT |
| P170H | CAT | G173F | TTT | A176D | GAT | E180M | ATG |
| P170C | TGT | G173M | ATG | A176W | TGG | E18OP | CCT |
| P170M | ATG | G173Y | TAT | H177T | ACG | E180K | AAG |
| P170K | AAG | G173P | CCG | H177P | CCG | E180Y | TAT |
| P170W | TGG | G174R | CGT | H177Q | CAG | E180Q | CAG |
| P170D | GAT | G174A | GCG | H177A | GCG | E18OR | CGG |
| P170A | GCG | G174E | GAG | H177S | TCG | E180A | GCG |
| G171S | TCT | G174F | TTT | H177G | GGG | E180T | ACT |
| G171M | ATG | G174H | CAT | H177W | TGG | E180I | ATT |
| G171N | AAT | G174T | ACT | H177L | CTG | E18OF | TTT |
| G171P | CCT | G174D | GAT | H177V | GTT | E180C | TGT |
| G171R | CGG | G174S | AGT | H177I | ATT | E180G | GGG |
| G171Y | TAT | G174P | CCG | H177R | CGG | E180S | TCG |
| G171A | GCT | G174W | TGG | H177N | AAT | E18ON | AAT |
| G171Q | CAG | G174V | CTT | H177Y | TAT | E180D | GAT |
| G171H | CAT | G174N | AAT | H177C | TGT | D181S | TCG |
| G171L | CTT | G174Y | TAT | H177D | GAT | D181Q | CAG |
| G171W | TGG | G174M | ATG | F178G | GGT | D181P | CCT |
| G171C | TGT | G174L | CTT | F178C | TGT | D181Y | TAT |
| G171K | AAG | D1751 | ATT | F178W | TGG | D181R | CGT |
| G171E | GAG | D175T | ACG | F178R | CGG | D181V | GTT |
| G171D | GAT | D175N | AAT | F178K | AAG | D181F | TTT |
| I172Y | TAT | D175V | CTT | F178S | AGT | D181A | GCT |
| I172T | ACG | D175S | TCG | F178H | CAT | D181T | ACG |
| I172P | CCT | D175R | CGG | F178P | CCT | D181L | TTG |
| I172A | GCG | D175G | GGG | F178V | CTT | D181E | GAG |
| I172L | CTT | D175A | GCG | F178A | GCT | D181K | AAG |
| I172Q | CAG | D175F | TTT | F178Q | CAG | D181M | ATG |
| I172E | GAG | D175C | TGT | F178Y | TAT | D181C | TGT |
| I172C | TGT | D175Q | CAG | F178I | ATT | D181G | GGT |
| I172M | ATG | D175Y | TAT | F178T | ACT | E182C | TGT |
| I172D | GAT | D175L | CTG | F178L | CTG | E182P | CCT |
| I172V | GTT | D175H | CAT | F178E | GAG | E182S | AGT |
| I172R | CGT | D175P | CCG | D179P | CCT | E182T | ACG |
| I172G | GGG | D175E | GAG | D179L | TTG | E182R | CGG |
| I172W | TGG | A176F | TTT | D179E | GAG | E182D | GAT |
| I172N | AAT | A176Q | CAG | D179G | GGG | E182A | GCT |
| G173C | TGT | A176V | GTG | D179S | AGT | E182F | TTT |
| G173L | CTG | A176E | GAG | D179A | GCT | E182L | CTT |
| G173K | AAG | A176T | ACT | D179K | AAG | E182I | ATT |
| G173W | TGG | A176C | TGT | D179T | ACT | E182Y | TAT |
| E182Q | CAG | T185D | GAT | R189K | AAG | N192S | TCG |
| E182W | TGG | N186G | GGG | R189P | CCG | N192W | TGG |
| E182M | ATG | N186A | GCT | R189E | GAG | N192G | GGG |
| E182G | GGT | N186T | ACT | R189V | GTT | N192D | GAT |
| R183P | CCT | N186R | CGT | R189D | GAT | N192V | GTG |
| R183K | AAG | N186L | TAA | R189Y | TAT | N192A | GCT |
| R183W | TGG | N186P | CCG | R189C | TGT | N192T | ACT |
| R183E | GAG | N186S | AGT | R189A | GCT | N192K | AAG |
| R183A | GCT | N186V | GTG | R189H | CAT | N192C | TGT |
| R183T | ACG | N186Q | CAG | R189W | TGG | N192M | ATG |
| R183L | CTT | N186H | CAT | R189N | AAT | L193P | CCG |
| R183N | AAT | N186C | TGT | R189T | ACT | L193G | GGG |
| R183H | CAT | N186E | GAG | R189Q | CAG | L193F | TTT |
| R183V | GTG | N186F | TTT | E190A | GCG | L193S | TCG |
| R183C | TGT | N186Y | TAT | E190H | CAT | L193W | TGG |
| R183M | ATG | N186D | GAT | E190V | GTG | L193A | GCT |
| R183I | ATT | N187R | CGG | E190P | CCG | L193R | CGT |
| R183G | GGT | N187M | ATG | E190C | TGT | L193Q | CAG |
| R183S | TCT | N187S | TCT | E190G | GGT | L193E | GAG |
| W184G | GGG | N187T | ACG | E190R | CGG | L193K | AAG |
| W184H | CAT | N187L | CTG | E190I | ATT | L193N | AAT |
| W184L | CTG | N187W | TGG | E190S | TCG | L193I | ATT |
| W184E | GAG | N187F | TTT | E190T | ACT | L193T | ACT |
| W184P | CCT | N187K | AAG | E190M | ATG | L193D | GAT |
| W184N | AAT | N1871 | ATT | E190L | TTG | L193Y | TAT |
| W184A | GCG | N187A | GCT | E190K | AAG | H194S | AGT |
| W184T | ACT | N187P | CCG | E190Y | TAT | H194E | GAG |
| W184R | CGG | N187D | GAT | E190D | GAT | H194K | AAG |
| W184Q | CAG | N187G | GGG | Y191T | ACT | H194Q | CAG |
| W184V | GTG | N187C | TGT | Y191H | CAT | H194V | GTT |
| W184S | TCT | N187H | CAT | Y191G | GGG | H194T | ACT |
| W184M | ATG | F188P | CCG | Y191L | TTG | H194L | CTG |
| W184I | ATT | F188I | ATT | Y191P | CCT | H194Y | TAT |
| W184F | TTT | F188N | AAT | Y191Q | CAG | H194F | TIT |
| T185R | CGT | F188S | AGT | Y191K | AAG | H194G | GGT |
| T185Y | TAT | F188Q | CAG | Y191D | GAT | H194I | ATT |
| T185W | TGG | F188K | AAG | Y191A | GCG | H194W | TGG |
| T185H | CAT | F188G | GGG | Y191W | TGG | H194M | ATG |
| T185G | GGG | F188W | TGG | Y191S | TCT | H194A | GCT |
| T185P | CCT | F188E | GAG | Y191V | GTT | H194P | CCT |
| T185S | TCG | F188H | CAT | Y191E | GAG | R195C | TGT |
| T185V | GTT | F188D | GAT | Y191R | CGT | R195F | TTT |
| T185Q | CAG | F188A | GCG | Y191C | TGT | R195W | TGG |
| T185N | AAT | F188L | CTT | N192R | CGG | R195T | ACT |
| T185C | TGT | F188R | CGT | N192L | CTG | R195L | CTG |
| T185L | CTT | F188V | GTT | N192Q | CAG | R195G | GGT |
| T185A | GCG | R189L | TTG | N192P | CCT | R195Q | CAG |
| T185E | GAG | R189G | GGG | N192H | CAT | R195K | AAG |
| R195S | TCT | A198F | TTT | L201N | AAT | L205S | TCT |
| R195A | GCT | A198W | TGG | G202T | ACG | L205G | GGT |
| R195D | GAT | A198Y | TAT | G202Y | TAT | L205P | CCT |
| R195P | CCT | A198D | GAT | G202E | GAG | L205E | GAG |
| R195Y | TAT | H199I | ATT | G202V | GTG | L205V | GTG |
| R195E | GAG | H199P | CCG | G202S | TCT | L205M | ATG |
| R195V | GTG | H199G | GGT | G202L | CTG | L205N | AAT |
| V196T | ACG | H199N | AAT | G202I | ATT | L205C | TGT |
| V196D | GAT | H199S | TCG | G202M | ATG | L205I | ATT |
| V196G | GGG | H199L | TTG | G202H | CAT | L205A | GCG |
| V196E | GAG | H199M | ATG | G202C | TGT | L205R | CGG |
| V196A | GCG | H199A | GCG | G202R | CGT | L205W | TGG |
| V196S | AGT | H199C | TGT | G202P | CCT | L205Q | CAG |
| V196Q | CAG | H199K | AAG | G202A | GCT | G206I | ATT |
| V196P | CCG | H199R | CGT | G202K | AAG | G206V | GTG |
| V196R | CGT | H199V | GTG | G202D | GAT | G206A | GCG |
| V196H | CAT | H199W | TGG | H203Y | TAT | G206C | TGT |
| V196Y | TAT | H199T | ACT | H203E | GAG | G206S | TCG |
| V196I | ATT | H199E | GAG | H203R | CGG | G206P | CCG |
| V196L | CTG | E200P | CCG | H203Q | CAG | G206L | TTG |
| V196K | AAG | E200G | GGG | H203P | CCG | G206D | GAT |
| V196M | ATG | E200A | GCT | H203G | GGG | G206M | ATG |
| A197G | GGT | E200T | ACG | H203T | ACT | G206R | CGG |
| A197S | AGT | E200I | ATT | H203D | GAT | G206Q | CAG |
| A197L | CTT | E200W | TGG | H203L | TTG | G206E | GAG |
| A197P | CCG | E200R | CGG | H203N | AAT | G206H | CAT |
| A197V | GTG | E200F | TTT | H203A | GCT | G206T | ACG |
| A197Y | TAT | E200M | ATG | H203S | TCT | G206W | TGG |
| A197Q | CAG | E200D | GAT | H203V | GTT | L207S | TCT |
| A197R | CGG | E200V | GTG | H203I | ATT | L207Y | TAT |
| A197T | ACT | E200C | TGT | H203C | TGT | L207A | GCG |
| A197I | ATT | E200S | TCT | S204R | CGG | L207R | CGT |
| A197H | CAT | E200Y | TAT | S204N | AAT | L207P | CCG |
| A197E | GAG | E200N | AAT | S204A | GCG | L207Q | CAG |
| A197W | TGG | L201A | GCG | S204T | ACT | L207N | AAT |
| A197N | AAT | L201R | CGG | S204Y | TAT | L207K | AAG |
| A197C | TGT | L201E | GAG | S204V | GTG | L207M | ATG |
| A198T | ACG | L201P | CCT | S204L | AAT | L207W | TGG |
| A198K | AAG | L201G | GGT | S204H | CAT | L207H | CAT |
| A198S | TCG | L201V | GTT | S204D | GAT | L207D | GAT |
| A198H | CAT | L201T | ACG | S204Q | CAG | L207V | GTT |
| A198G | GGT | L201I | ATT | S204G | GGG | L207I | ATT |
| A198E | GAG | L201S | TCT | S204W | TGG | L207G | GGT |
| A198P | CCG | L201W | TGG | S2041 | ATT | S208D | GAT |
| A198L | TTG | L201Q | CAG | S204K | AAG | S208V | GTT |
| A198R | CGT | L201D | GAT | S204P | CCT | S208P | CCT |
| A198V | GTT | L201M | ATG | L205T | ACG | S208G | GGT |
| A198M | ATG | L201K | AAG | L205D | GAT | S208A | GCG |
| S208K | AAG | T211Q | CAG | G214A | GCT | M217A | GCG |
| S208N | AAT | T211S | TCG | G214D | GAT | M217H | CAT |
| S208F | TTT | T211A | GCG | G214F | TTT | M217I | ATT |
| S208Q | CAG | T211F | TTT | G214Y | TAT | M217D | GAT |
| S208W | TGG | T211D | GAT | G214M | ATG | Y218C | TGT |
| S208T | ACG | T211W | TGG | G214C | TGT | Y218F | TTT |
| S208E | GAG | T211L | CTG | A215L | CTG | Y218W | TGG |
| S208C | TGT | D212E | GAG | A215Q | CAG | Y218L | CTG |
| S208R | CGT | D212A | GCG | A215M | ATG | Y218A | GCG |
| S208L | CTT | D212K | AAG | A215G | GGT | Y218P | CCG |
| H209T | ACG | D212R | CGG | A215W | TGG | Y218R | CGG |
| H209Y | TAT | D212T | ACG | A215S | AGT | Y218N | AAT |
| H209R | CGG | D212N | AAT | A215T | ACG | Y218V | GTG |
| H209Q | CAG | D212G | GGG | A215V | GTT | Y218Q | CAG |
| H209A | GCT | D212S | TCT | A215N | AAT | Y218I | ATT |
| H209G | GGG | D212P | CCG | A215P | CCG | Y218D | GAT |
| H209N | AAT | D212Q | CAG | A215H | CAT | Y218S | TCG |
| H209P | CCT | D212V | GTT | A215K | AAG | Y218G | GGG |
| H209W | TGG | D212L | TTG | A215I | ATT | Y218E | GAG |
| H209V | GTT | D212F | TTT | A215R | CGT | P219L | TTG |
| H209D | GAT | D212H | CAT | A215C | TGT | P219C | TGT |
| H209S | AGT | D212Y | TAT | A215D | GAT | P219V | GTG |
| H209F | TTT | I213Q | CAG | L216A | GCT | P219D | GAT |
| H209L | CTG | I213T | ACT | L216C | TGT | P219F | TTT |
| H209C | TGT | I213C | TGT | L216D | GAT | P219A | GCG |
| S210C | TGT | I213P | CCT | L216E | GAG | P219T | ACT |
| S210G | GGT | I213H | CAT | L216G | GGG | P219E | GAG |
| S210I | ATT | I213A | GCG | L216I | ATT | P219Q | CAG |
| S21OR | CGT | I213V | GTT | L216K | AAG | P219R | CGG |
| S210L | CTG | I213G | GGG | L216M | ATG | P219H | CAT |
| S210V | GTG | I213N | AAT | L216P | CCT | P219G | GGG |
| S210H | CAT | I213L | CYT | L216Q | CAG | P219K | AAG |
| S210N | AAT | I213S | AGT | L216R | CGG | P219S | TCG |
| S210F | TTT | I213M | ATG | L216S | TCT | P219W | TGG |
| S210P | CCG | I213R | CGG | L216T | ACT | S220R | CGT |
| S210W | TGG | I213K | AAG | L216V | GTG | S220A | GCG |
| S210Q | CAG | I213F | TTT | L216W | TGG | S220Q | CAG |
| S210T | ACG | I213D | GAT | M217P | CCT | S220T | ACT |
| S210K | AAG | I213E | GAG | M217Y | TAT | S220L | CTT |
| S210A | GCG | G214L | TTG | M217T | ACG | S220K | AAG |
| T211P | CCG | G214Q | CAG | M217C | TGT | S220G | GGG |
| T211R | CGT | G214S | TCT | M217S | AGT | S220H | CAT |
| T211K | AAG | G214T | ACT | M217L | CTG | S220E | GAG |
| T211G | GGG | G214V | GTG | M217N | AAT | S220M | ATG |
| T211M | ATG | G214I | ATT | M217R | CGG | S220V | GTT |
| T211N | AAT | G214R | CGT | M217Q | CAG | S220P | CCG |
| T211V | GTG | G214P | CCG | M217K | AAG | S220I | ATT |
| T211H | CAT | G214E | GAG | M217G | GGG | S220F | TTT |
| S220N | AAT | S224T | ACG | V227K | AAG | A230S | TCG |
| Y221W | TGG | S224Q | CAG | V227L | CTG | A230C | TGT |
| Y221K | AAG | S224R | CGG | V227P | CCT | A230V | GTT |
| Y221Q | CAG | S224P | CCG | V227S | TCT | A230T | ACT |
| Y221C | TGT | S224I | ATT | V227T | ACT | A230Y | TAT |
| Y221N | AAT | S224V | GTT | V227W | TGG | A230M | ATG |
| Y221P | CCT | S224L | TTG | V227Y | TAT | A230N | AAT |
| Y221V | GTT | S224C | TGT | V227G | GGG | A230H | CAT |
| Y221A | GCG | S224K | AAG | V227H | CAT | Q231I | ATT |
| Y221G | GGG | S224D | GAT | V227Q | CAG | Q231A | GCT |
| Y221R | CGG | S224H | CAT | V227R | CGT | Q231F | TTT |
| Y221S | TCG | S224M | ATG | Q228A | GCT | Q231P | CCT |
| Y221M | ATG | S224A | GCT | Q228D | GAT | Q231Y | TAT |
| Y221T | ACG | S224W | TGG | Q228E | GAG | Q231R | CGT |
| Y221L | CTT | G225D | GAT | Q228G | GGT | Q231L | CTG |
| Y221E | GAG | G225R | CGT | Q228H | CAT | Q231D | GAT |
| T222L | TTG | G225Q | CAG | Q228K | AAG | Q231G | GGT |
| T222Y | TAT | G225M | ATG | Q228L | CTG | Q231V | GTT |
| T222R | CGT | G225P | CCT | Q228M | ATG | Q231W | TGG |
| T222V | OTT | G225W | TGG | Q228N | AAT | Q231S | AGT |
| T222P | CCT | G225S | TCT | Q228P | CCG | Q231H | CAT |
| T222S | AGT | G225E | GAG | Q228R | CGG | Q231C | TGT |
| T222A | GCT | G225V | GTT | Q228S | TCT | Q231M | ATG |
| T222H | CAT | G225T | ACG | Q228T | ACG | D232H | CAT |
| T222G | GGG | G225K | AAG | Q228W | TGG | D232G | GGG |
| T222M | ATG | G225N | AAT | Q228Y | TAT | D232R | CGT |
| T222F | TTT | G225C | TGT | L229R | CGG | D232P | CCT |
| T222C | TGT | G225H | CAT | L229A | GCG | D232Y | TAT |
| T222I | ATT | G225A | GCG | L229T | ACG | D232N | AAT |
| T222N | AAT | D226S | TCT | L229Q | CAG | D232S | TCG |
| T222W | TGG | D226W | TGG | L229P | CCT | D232F | TTT |
| T222D | GAT | D226R | CGG | L229E | GAG | D232V | GTG |
| F223L | TTG | D226A | GCT | L229W | TGG | D232K | AAG |
| F223T | ACG | D226N | AAT | L229M | ATG | D232W | TGG |
| F223C | TGT | D226T | ACT | L229I | ATT | D232Q | CAG |
| F223R | CGT | D226E | GAG | L229G | GGT | D232E | GAG |
| F223N | AAT | D226L | CTT | L229C | TGT | D232T | ACT |
| F223P | CCT | D226P | CCT | L229Y | TAT | D232L | CTG |
| F223E | GAG | D226H | CAT | L229D | GAT | D233Q | CAG |
| F223G | GGG | D226G | GGT | L229H | CAT | D233P | CCG |
| F223Q | CAG | D226I | ATT | L229V | GTG | D233S | TCT |
| F223A | GCG | D226M | ATG | A230L | TTG | D233T | ACG |
| F223S | TCT | D226V | GTG | A230G | GGT | D233A | GCG |
| F223Y | TAT | D226C | TGT | A230W | TGG | D233W | TGG |
| F223H | CAT | V227A | GCT | A230P | CCG | D233G | GGT |
| F223K | AAG | V227C | TGT | A230D | GAT | D233R | CGT |
| F223M | ATG | V227D | GAT | A230R | CGT | D233E | GAG |
| S224G | GGG | V227E | GAG | A230I | ATT | D233N | AAT |
| D233V | GTG | G236N | AAT | 1240G | GGG | R243L | CTT |
| D233M | ATG | G236F | TTT | 1240Q | CAG | R243A | GCG |
| D233L | CTG | I237S | TCG | 1240P | CCG | R243H | CAT |
| D233K | AAG | I237L | CTG | 1240R | CGG | R243Q | CAG |
| D233I | ATT | I237R | CGT | 1240S | TCG | R243S | AGT |
| I234A | GCT | I237Q | CAG | 1240K | AAG | R243I | ATT |
| I234T | ACG | I237K | AAG | 1240V | GTG | R243C | TGT |
| I234V | GTT | I237D | GAT | 1240D | GAT | R243N | AAT |
| I234W | TGG | I237A | GCG | 1240A | GCG | R243Y | TAT |
| I234E | GAG | I237T | ACG | 1240C | TGT | R243G | GGG |
| I234G | GGT | I237E | GAG | 1240L | CTT | R243D | GAT |
| I234L | CTT | I237C | TGT | 1240F | TTT | R243V | GTG |
| I234H | CAT | I237G | GGG | 1240Y | TAT | S244P | CCG |
| I234M | ATG | 1237P | CCT | 1240M | ATG | S244L | CTT |
| I234N | AAT | I237Y | TAT | 1240T | ACG | S244W | TGG |
| I234Y | TAT | I237W | TGG | Y241V | GTT | S244M | ATG |
| I234P | CCT | I237N | AAT | Y241A | GCT | S244V | GTT |
| I234D | GAT | Q238G | GGG | Y241G | GGG | S244Q | CAG |
| I234Q | CAG | Q238H | CAT | Y241H | CAT | S244D | GAT |
| I234C | TGT | Q238S | TCG | Y241R | CGG | S244E | GAG |
| D235H | CAT | Q238Y | TAT | Y241P | CCG | S244T | ACG |
| D235G | GGG | Q238F | TTT | Y241Q | CAG | S244H | CAT |
| D235H | GCG | Q238E | GAG | Y241L | TTG | S244G | GGT |
| D235P | CCG | Q238L | TTG | Y241T | ACG | S244A | GCT |
| D235L | CTT | Q238W | TGG | Y241S | AGT | S244F | TTT |
| D235V | GTG | Q238P | CCG | Y241W | TGG | S244Y | TAT |
| D235E | GAG | Q238R | AGG | Y241N | AAT | S244R | CGT |
| D235R | CGT | Q238C | TGT | Y241M | ATG | Q245P | CCT |
| D235Q | CAG | Q238N | AAT | Y241I | AAA | Q245I | NTT |
| D235T | ACG | Q238I | ATT | Y241D | GAT | Q245F | TTT |
| D235C | TGT | Q238T | ACG | G242A | GCG | Q245V | GTT |
| D235S | TCG | Q238K | AAG | G242F | TTT | Q245M | ATG |
| D235N | AAT | A239S | TCT | G242L | AAT | Q245T | ACT |
| D235Y | TAT | A239Q | CAG | G242N | AAT | Q245E | GAG |
| D235I | ATT | A239T | ACG | G242P | CCT | Q245S | TCG |
| G236M | ATG | A239P | CCT | G242W | TGG | Q245R | CGG |
| G236R | CGG | A239V | GTG | G242T | ACG | Q245G | GGT |
| G236D | GAT | A239L | CTG | G242R | CGT | Q245H | CAT |
| G236S | TCT | A239Y | TAT | G242V | AAT | Q245L | CTT |
| G236T | ACT | A239I | ATT | G242S | TCG | Q245K | AAG |
| G236C | TGT | A239C | TGT | G242I | ATT | Q245W | TGG |
| G236K | AAG | A239G | GGG | G242Y | TAT | Q245C | TGT |
| G236E | GAG | A239W | TGG | G242H | CAT | N246W | TGG |
| G236P | CCG | A239F | TTT | G242E | GAG | N246R | CGG |
| G236I | ATT | A239K | AAG | G242K | AAG | N246A | GCG |
| G236Y | TAT | A239H | CAT | R243P | CCG | N246F | TTT |
| G236L | CTG | A239R | CGT | R243K | AAG | N246G | GGT |
| G236V | GTT | A239D | GAT | R243T | ACG | N246P | CCT |
| N246V | GTT | Q249G | GGT | G252P | CCT | T255L | TTG |
| N246Q | CAG | Q249N | AAT | G252H | CAT | T255H | CAT |
| N246P | TAT | Q249K | AAG | G252C | TGT | P256S | AGT |
| N246C | TGT | Q249I | ATT | G252V | GTT | P256V | GTG |
| N246I | ATT | Q249Y | TAT | G252I | ATT | P256F | TTT |
| N246L | TTG | Q249V | GTG | P253C | TGT | P256Y | TAT |
| N246S | TCT | Q249L | TTG | P253G | GGT | P256I | ATT |
| N246T | ACT | Q249H | CAT | P253Q | CAG | P256A | GCT |
| N246K | AAG | P250L | CTG | P253I | ATT | P256L | CTT |
| N246D | GAT | P250S | TCG | P253L | CTG | P256G | GGT |
| P247A | GCG | P25OR | CGG | P253R | CGG | P256N | AAT |
| P247D | GAT | P250Y | TAT | P253A | GCT | P256R | CGG |
| P247E | GAG | P250M | ATG | P253E | GAG | P256Q | CAG |
| P247F | TTT | P250F | TTT | P253Y | TAT | P256E | GAG |
| P247G | GGG | P250A | GCT | P253W | TGG | P256K | AAG |
| P247H | CAT | P250K | AAG | P253M | ATG | P256M | ATG |
| P247I | ATT | P250G | GGT | P253V | GTG | P256C | TGT |
| P247K | AAG | P250N | AAT | P253T | ACT | K257C | TGT |
| P247L | CTG | P250T | ACT | P253K | AAG | K257M | ATG |
| P247N | AAT | P250W | TGG | P253N | AAT | K257V | GIT |
| P247Q | CAG | P250D | GAT | Q254R | CGT | K257A | GCT |
| P247R | CGT | P250V | GTG | Q254G | GGG | K257E | GAG |
| P247S | TCG | P250Q | CAG | Q254W | TGG | K257S | TCT |
| P247T | ACG | I251A | GCG | Q254T | ACT | K257L | CTT |
| P247V | GTT | I251Q | CAG | Q254A | GCT | K257I | ATT |
| V248W | TGG | I251G | GGG | Q254F | TTY | K257G | GGG |
| V248L | CTG | I251L | CTG | Q254D | GAT | I057N | AAT |
| V248Q | CAG | I251K | AAG | Q254P | CCG | K257F | TTT |
| V248M | ATG | I251R | CGT | Q254L | CTG | K257W | TGG |
| V248Y | TAT | I251E | GAG | Q254C | TGT | K257R | CGG |
| V248G | GGG | I251D | GAT | Q254Y | TAT | K257P | CCG |
| V248C | TGT | I251T | ACG | Q254I | ATT | K257T | ACT |
| V248R | CGG | I251C | TGT | Q254E | GAG | A258Q | CAG |
| V248A | GCG | 1251Y | TAT | Q254V | GTG | A258Y | TAT |
| V248H | CAT | 1251P | CCT | Q254S | TCT | A258W | TGG |
| V248I | ATT | I251S | TCT | T255I | ATT | A258G | GGG |
| V248T | ACT | I251W | TGG | T255Q | CAG | A258L | TTG |
| V248K | AAG | I251V | GTT | T255P | CCG | A258F | TTT |
| V2485 | TCG | G252F | TTT | T255R | CGT | A258M | ATG |
| V248F | TTT | G252W | TGG | T255C | TGT | A258N | AAT |
| V248E | GAG | G252A | GCG | T255N | AAT | A258V | GTG |
| Q249T | ACT | G252R | CGG | T255S | AGT | A258T | ACG |
| Q249W | TGG | G252L | CTT | T255V | GTG | A258I | ATT |
| Q249R | CGG | G252E | GAG | T255E | GAG | A258D | GAT |
| Q249E | GAG | G252D | GAT | T255G | GGG | A258R | CGT |
| Q249A | GCT | G252K | AAG | T255K | AAG | A258E | GAG |
| Q249P | CCG | G252S | TCG | T255A | GCT | A258P | CCG |
| Q249C | TGT | G252T | ACG | T255F | TTT | T255L | TTG |

[0512] 1. Expression

[0513] The DNA encoding each individual library member was generated according to standard DNA synthesis protocols and protein was expressed using routine molecular biology techniques. Briefly, the DNA was ligated into vector pET303CTHis (Invitrogen, SEQ ID NO:3466) using routine molecular biology techniques. Plasmid containing one individual hMMP-1 mutant was transformed into BL21 (DE3) E. coli cells (Tigen, Beiging, China) using manufacturers recommendations. The process was repeated for all library members. The transformation culture was used to inoculate 1 mL LB medium containing ampicillin additives. The culture was grown at 37° C. with shaking for 16 hours. Protein expression was induced by the addition of 1 mM isopropyl-β-D-thiogalactoside (IPTG) and the culture was incubated at 25° C. with shaking. After 6 hours, the cells were pelleted by centrifugation at 6,000 g for 10 minutes and the supernatant was removed. The periplasmic protein was enriched by incubating the cells in 50 μl OS buffer (200 mM Tris-HCl, pH 7.5, 20% sucrose, 1 mM EDTA) with 4 μl DNAse (10 μg/ml), 4 μl RNAse (10 μg/ml), and 4 μl lysozyme (10 μg/ml) for 10 minutes at 25° C. 50 μl of water was added to each well followed by centrifugation at 6000 g for 10 minutes to remove cell debris. The supernatant, containing the hMMP-1 protein, was stored at −20° C. Activity of supernatants were screened as described in the following examples. B. Cloning and Expression of Wildtype hMMP-1

[0514] In this example, wildtype hMMP-1 was individually expressed in both E. coli and CHO-S cells.

[0515] 1. Expression in E. coli

[0516] Wildtype hMMP-1 (clone BAP006_{—}10, having a sequence of nucleotides set forth as nucleotides in SEQ ID NO:706 and containing a pel B signal sequence set forth in SEQ ID NO:3547) was cloned into vector pET303CTHis (Invitrogen, SEQ ID NO:3466) and grown in BL21(DE3) E. coli. The pET303CTHis vector contained a C-terminal His tag (SEQ ID NO:3465). Protein expression was induced upon the addition of 1 mM isopropyl-β-D-thiogalactoside (IPTG) as described above. Following expression, the protein was enriched as described in Example 1A, and subsequently purified using a HiTrap Ni²⁺ column (GE Healthcare) according to standard molecular biology protocols. Expression and purification were monitored by SDS/PAGE and Western blot analysis.

[0517] 2. Expression in CHO-S Cells

[0518] Wildtype hMMP-1 (clone BAP006_{—}2, having a sequence of nucleotides set forth as nucleotides 72-1478 in SEQ ID NO:708 and a sequence encoding a C-terminal His tag) was expressed in CHO-S cells and secreted into the medium. Transfected cells were cultured at 37° C. in CD-CHO serum free media (Invitrogen). The wildtype hMMP-1 protein was purified using a HiTrap Ni²⁺ column (GE Healthcare) according to standard molecular biology protocols

### Example 2

### Determination of Enzymatic Activity of the hMMP-1 Mutants Using a Fluorogenic Peptide Substrate

[0519] In this example, the hMMP-1 mutant library, generated in Example 1, was screened using a high throughput fluorescence activity assay to identify temperature sensitive hMMP-1 mutants. To screen for temporally sensitive hMMP-1 mutants, the enzymatic activity of each individual mutant was determined at 25° C. and 37° C. and/or 34° C., using a commercially available fluorogenic substrate, peptide IX, designated as Mca-K-P-L-G-L-Dpa-A-R-NH₂ (SEQ ID NO:707; Mca=(7-Methoxycoumarin-4-yl)acetyl; Dpa=N-3-(2,4,-Dinitrophenyl)-L-2,3-diaminopropionyl; R&D Systems, Minneapolis, Minn., Cat#ES010). The peptide substrate contains a highly fluorescent 7-methoxycoumarin group that is quenched by resonance energy transfer to the 2,4-dinitrophenyl group. Activated hMMP-1 cleaves the amide bond between glycine and leucine resulting in an increase in released fluorescence. Reactions were initially performed in a 96-well assay and confirmed using a 14 ml tube format.

### A. 96-Well Assay

[0520] Prior to assessing activity of the supernatants, supernatants were treated with a processing agent to activate the inactive zymogen form into an active enzyme. Briefly, 4 μl of each hMMP-1 mutant supernatant generated in Example 1 was added to 100 μl of TCNB (50 nM Tris, 10 mM CaCl₂, 150 mM NaCl, 0.05% Brij 35, pH 7.5) with 1 mM of the processing agent p-aminophenylmercuric acetate (APMA) in a 96-well plate. The solution was incubated at the reaction temperature (either 25° C. or 37° C.) for 2 hours. This activation step cleaves the pro-peptide and generates mature hMMP-1.

[0521] Following activation, 1.6 μl of TCNB containing 620 μM Mca-K-P-L-G-L-Dpa-A-R-NH₂ fluorescent substrate was added to each well to a final concentration of 10 μM, at the indicated reaction temperature (either 25° C. or 37° C.) for 1 hour. Fluorescence was detected by measuring fluorescence in a fluorescent plate reader at 320 nm exitation/405 nm emission. Relative fluorescence units (RFU) were determined. Supernatant from wildtype hMMP-1 and plasmid/vector transformed cells were used as positive and negative controls. Duplicate reactions were performed for each sample, reaction temperature, and positive and negative control.

[0522] The results of the initial screen of 2687 hMMP-1 mutants are shown in Table 9. The initial screen resulted in the identification of 199 putative primary hits (see Table 10) with reduced activity at 37° C. as compared to the activity at 25° C.

TABLE 9
Results of Initial Screen for Temperature Sensitive Mutants

| | | | | | | Res. | Res. |
|---|---|---|---|---|---|---|---|
| | | | Avg. | Avg. | | Act. | Act. |
| Temp. | hMMP-1 | SEQ ID | RFU | RFU | Ratio | Mut/wt | Mut/wt |
| Phenotype | mutation | NO | 25° C. | 37° C. | 25° C./37° C. | 25° C. | 37° C. |
| Down | F81C | 784 | 1740.62 | 3123.63 | 0.56 | 0.35 | 0.46 |
| Down | F81E | 780 | 871.51 | 1243.66 | 0.70 | 0.18 | 0.18 |
| Down | F81I | 793 | 4100.22 | 5376.62 | 0.76 | 0.83 | 0.79 |
| Neutral | F81L | 795 | 8890.68 | 7913.44 | 1.12 | 1.57 | 1.51 |
| Neutral | F81P | 797 | 1102.23 | 1043.87 | 1.06 | 0.19 | 0.20 |
| Neutral | F81S | 789 | 2527.30 | 2312.47 | 1.09 | 0.45 | 0.44 |
| Neutral | F81A | 796 | 8780.53 | 7784.51 | 1.13 | 1.55 | 1.48 |
| Neutral | F81M | 791 | 2545.25 | 3095.21 | 0.82 | 0.45 | 0.59 |
| Neutral | F81G | 790 | 8979.05 | 7773.71 | 1.16 | 1.59 | 1.48 |
| Neutral | F81T | 787 | 1564.49 | 1373.60 | 1.14 | 0.28 | 0.26 |
| Neutral | F81Q | 786 | 9225.28 | 7923.69 | 1.16 | 1.63 | 1.51 |
| Neutral | F81R | 783 | 8514.40 | 7454.74 | 1.14 | 1.50 | 1.42 |
| Neutral | F81W | 792 | 6078.70 | 5909.04 | 1.03 | 1.07 | 1.12 |
| Neutral | F81H | 781 | 8126.15 | 7360.21 | 1.10 | 1.44 | 1.40 |
| Neutral | F81V | 794 | 7263.15 | 6614.17 | 1.10 | 1.28 | 1.26 |
| Neutral | V82I | 813 | 535.78 | 548.02 | 0.98 | 0.06 | 0.06 |
| Down | V82C | 803 | 4177.57 | 6476.29 | 0.65 | 0.50 | 0.72 |
| Neutral | V82A | 815 | 9540.61 | 9240.92 | 1.03 | 1.14 | 1.03 |
| Neutral | V82P | 816 | 599.23 | 634.69 | 0.94 | 0.07 | 0.07 |
| Down | V82Y | 807 | 3295.59 | 6173.45 | 0.53 | 0.39 | 0.69 |
| Down | V82M | 811 | 6824.39 | 8606.64 | 0.79 | 0.82 | 0.96 |
| Neutral | V82Q | 805 | 581.51 | 652.74 | 0.89 | 0.07 | 0.07 |
| Neutral | V82F | 810 | 7233.54 | 8739.45 | 0.83 | 0.87 | 0.98 |
| Down | V82W | 812 | 6194.12 | 8397.19 | 0.74 | 0.74 | 0.94 |
| Neutral | V82N | 804 | 9421.72 | 8759.51 | 1.08 | 1.13 | 0.98 |
| Down | V82R | 802 | 603.22 | 781.77 | 0.77 | 0.07 | 0.09 |
| Neutral | V82G | 809 | 8298.42 | 8911.04 | 0.93 | 0.99 | 0.99 |
| Neutral | V82S | 808 | 8293.03 | 9022.13 | 0.92 | 0.99 | 1.01 |
| Down | V82L | 814 | 6951.75 | 8694.05 | 0.80 | 0.83 | 0.97 |
| Neutral | V82T | 806 | 7993.81 | 8975.05 | 0.89 | 0.96 | 1.00 |
| Neutral | L83A | 834 | 8629.03 | 9023.51 | 0.96 | 1.03 | 1.01 |
| Neutral | L83C | 822 | 554.26 | 567.87 | 0.98 | 0.07 | 0.06 |
| Neutral | L83D | 817 | 8705.34 | 8957.38 | 0.97 | 1.04 | 1.00 |
| Neutral | L83E | 818 | 9212.48 | 9265.02 | 0.99 | 1.10 | 1.03 |
| Neutral | L83G | 828 | 7713.92 | 9073.74 | 0.85 | 0.92 | 1.01 |
| Neutral | L83H | 819 | 6449.24 | 7800.76 | 0.83 | 0.77 | 0.87 |
| Down | L83I | 832 | 4575.76 | 6963.24 | 0.66 | 0.55 | 0.78 |
| Down | L83M | 830 | 5921.65 | 8064.61 | 0.73 | 0.71 | 0.90 |
| Neutral | L83P | 835 | 7794.15 | 8608.36 | 0.91 | 0.93 | 0.96 |
| Neutral | L83Q | 824 | 7291.24 | 8673.39 | 0.84 | 0.87 | 0.97 |
| Neutral | L83R | 821 | 8509.58 | 8988.62 | 0.95 | 1.02 | 1.00 |
| Neutral | L83S | 827 | 9261.79 | 9205.93 | 1.01 | 1.11 | 1.03 |
| Neutral | L83T | 825 | 7549.73 | 8580.54 | 0.88 | 0.90 | 0.96 |
| Down | L83W | 831 | 4193.18 | 6044.52 | 0.69 | 0.50 | 0.67 |
| Neutral | L83Y | 826 | 7968.79 | 9051.39 | 0.88 | 0.95 | 1.01 |
| Down | T84V | 851 | 3169.35 | 4931.29 | 0.64 | 0.64 | 0.72 |
| Down | T84E | 837 | 498.18 | 627.84 | 0.79 | 0.10 | 0.09 |
| Neutral | T84H | 838 | 7046.83 | 6974.20 | 1.01 | 1.24 | 1.33 |
| Neutral | T84L | 852 | 7687.84 | 6946.59 | 1.11 | 1.36 | 1.32 |
| Neutral | T84D | 836 | 7972.32 | 7331.43 | 1.09 | 1.41 | 1.39 |
| Neutral | T84R | 840 | 7298.49 | 6880.17 | 1.06 | 1.29 | 1.31 |
| Neutral | T84I | 850 | 6508.69 | 5860.75 | 1.11 | 1.15 | 1.11 |
| Neutral | T84S | 845 | 6073.28 | 5981.85 | 1.02 | 1.07 | 1.14 |
| Neutral | T84G | 846 | 8087.79 | 7200.99 | 1.12 | 1.43 | 1.37 |
| Neutral | T84Q | 843 | 6275.12 | 6690.38 | 0.94 | 1.11 | 1.27 |
| Neutral | T84P | 854 | 3528.37 | 3832.34 | 0.92 | 0.62 | 0.73 |
| Neutral | T84A | 853 | 8718.27 | 7840.72 | 1.11 | 1.54 | 1.49 |
| Neutral | T84C | 841 | 5177.89 | 5107.57 | 1.01 | 0.91 | 0.97 |
| Neutral | T84Y | 844 | 4768.51 | 4818.30 | 0.99 | 0.84 | 0.92 |
| Neutral | T84F | 847 | 6312.72 | 6453.46 | 0.98 | 1.10 | 1.27 |
| Down | E85L | 871 | 1633.29 | 2148.43 | 0.76 | 0.33 | 0.31 |
| Down | E85Q | 861 | 2834.50 | 4068.60 | 0.70 | 0.57 | 0.59 |
| Neutral | E85P | 873 | 2855.52 | 3389.51 | 0.84 | 0.58 | 0.50 |
| Neutral | E85T | 862 | 401.26 | 382.58 | 1.05 | 0.08 | 0.06 |
| Down | E85K | 857 | 2293.84 | 3049.87 | 0.75 | 0.46 | 0.45 |
| Down | E85M | 867 | 2158.30 | 2821.39 | 0.76 | 0.44 | 0.41 |
| Neutral | E85G | 865 | 1767.69 | 1734.31 | 1.02 | 0.31 | 0.33 |
| Down | E85R | 858 | 912.46 | 7286.41 | 0.13 | 0.16 | 1.39 |
| Neutral | E85S | 864 | 7811.54 | 7488.09 | 1.04 | 1.38 | 1.42 |
| Neutral | E85C | 859 | 6027.10 | 5938.05 | 1.01 | 1.06 | 1.13 |
| Neutral | E85Y | 863 | 4449.33 | 3909.71 | 1.14 | 0.79 | 0.74 |
| Neutral | E85A | 872 | 5552.19 | 5461.08 | 1.02 | 0.98 | 1.04 |
| Down | E85N | 860 | 522.81 | 7634.45 | 0.07 | 0.09 | 1.45 |
| Neutral | E85V | 870 | 7152.74 | 7011.60 | 1.02 | 1.26 | 1.33 |
| Neutral | E85F | 866 | 6092.47 | 6362.37 | 0.96 | 1.06 | 1.26 |
| Down | G86L | 890 | 2452.10 | 3232.22 | 0.76 | 0.50 | 0.47 |
| Down | G86P | 892 | 2117.46 | 5219.90 | 0.41 | 0.43 | 0.76 |
| Neutral | G86I | 888 | 1888.26 | 2293.71 | 0.82 | 0.38 | 0.34 |
| Neutral | G86T | 882 | 363.85 | 380.61 | 0.96 | 0.07 | 0.06 |
| Neutral | G86H | 876 | 389.15 | 372.78 | 1.04 | 0.08 | 0.05 |
| Neutral | G86D | 874 | 415.45 | 406.81 | 1.02 | 0.08 | 0.06 |
| Down | G86N | 880 | 2612.85 | 3755.02 | 0.70 | 0.53 | 0.55 |
| Neutral | G86S | 884 | 8500.13 | 7717.19 | 1.10 | 1.50 | 1.47 |
| Neutral | G86K | 877 | 1660.95 | 2002.39 | 0.83 | 0.29 | 0.38 |
| Neutral | G86W | 887 | 1570.85 | 1690.05 | 0.93 | 0.28 | 0.32 |
| Neutral | G86Y | 883 | 1829.24 | 2126.68 | 0.86 | 0.32 | 0.40 |
| Neutral | G86V | 889 | 1830.80 | 2092.69 | 0.87 | 0.32 | 0.40 |
| Neutral | G86C | 879 | 1784.05 | 2091.03 | 0.85 | 0.32 | 0.40 |
| Neutral | G86M | 886 | 1687.28 | 2025.99 | 0.83 | 0.30 | 0.39 |
| Up | G86F | 885 | 1897.87 | 1483.82 | 1.28 | 0.34 | 0.28 |
| Neutral | N87M | 905 | 418.35 | 412.23 | 1.01 | 0.08 | 0.06 |
| Down | N87L | 909 | 3385.42 | 4941.20 | 0.69 | 0.69 | 0.72 |
| Neutral | N87P | 911 | 8762.48 | 8941.20 | 0.98 | 1.55 | 1.70 |
| Neutral | N87V | 908 | 6199.21 | 7269.38 | 0.85 | 1.09 | 1.38 |
| Neutral | N87R | 897 | 7761.00 | 8810.25 | 0.88 | 1.37 | 1.68 |
| Up | N87F | 904 | 6882.19 | 4428.08 | 1.55 | 1.22 | 0.84 |
| Down | N87S | 902 | 2083.05 | 3304.46 | 0.63 | 0.37 | 0.63 |
| Neutral | N87I | 907 | 7572.66 | 8090.13 | 0.94 | 1.34 | 1.54 |
| Neutral | N87C | 898 | 3291.22 | 3945.40 | 0.83 | 0.58 | 0.75 |
| Down | N87A | 910 | 5482.33 | 6869.11 | 0.80 | 0.97 | 1.31 |
| Neutral | N87G | 903 | 8060.01 | 8916.11 | 0.90 | 1.42 | 1.70 |
| Down | N87Y | 901 | 4397.56 | 5611.87 | 0.78 | 0.78 | 1.07 |
| Up | N87E | 894 | 5876.33 | 4763.86 | 1.23 | 1.04 | 0.91 |
| Down | N87H | 895 | 5013.05 | 7306.33 | 0.69 | 0.89 | 1.39 |
| Neutral | N87Q | 899 | 8559.37 | 9021.72 | 0.95 | 1.51 | 1.72 |
| Down | P88C | 917 | 1255.12 | 2197.65 | 0.57 | 0.15 | 0.25 |
| Neutral | P88K | 915 | 6857.61 | 8492.90 | 0.81 | 0.82 | 0.95 |
| Down | P88W | 926 | 664.95 | 845.70 | 0.79 | 0.08 | 0.09 |
| Down | P88G | 923 | 1694.96 | 3159.20 | 0.54 | 0.20 | 0.35 |
| Down | P88L | 929 | 2562.59 | 3576.95 | 0.72 | 0.31 | 0.40 |
| Down | P88Q | 919 | 4499.52 | 7270.91 | 0.62 | 0.54 | 0.81 |
| Neutral | P88A | 930 | 6549.92 | 8130.83 | 0.81 | 0.78 | 0.91 |
| Neutral | P88T | 920 | 6576.99 | 8126.45 | 0.81 | 0.79 | 0.91 |
| Down | P88Y | 921 | 5515.19 | 7868.29 | 0.70 | 0.66 | 0.88 |
| Down | P88R | 916 | 4209.25 | 6681.38 | 0.63 | 0.50 | 0.75 |
| Down | P88H | 914 | 2580.97 | 4465.31 | 0.58 | 0.31 | 0.50 |
| Down | P88I | 927 | 841.81 | 1249.17 | 0.67 | 0.10 | 0.14 |
| Neutral | P88V | 928 | 1666.69 | 1915.49 | 0.87 | 0.20 | 0.21 |
| Down | P88E | 913 | 971.61 | 1460.63 | 0.67 | 0.12 | 0.16 |
| Down | P88D | 912 | 1300.22 | 1911.83 | 0.68 | 0.16 | 0.21 |
| Down | R89V | 946 | 1163.86 | 2620.05 | 0.44 | 0.24 | 0.38 |
| Down | R89W | 944 | 1252.89 | 1744.18 | 0.72 | 0.25 | 0.25 |
| Neutral | R89M | 943 | 402.00 | 386.98 | 1.04 | 0.08 | 0.06 |
| Neutral | R89A | 948 | 7883.15 | 8954.83 | 0.88 | 1.39 | 1.70 |
| Neutral | R89T | 938 | 6791.27 | 6752.46 | 1.01 | 1.20 | 1.28 |
| Neutral | R89G | 941 | 8957.06 | 8693.72 | 1.03 | 1.58 | 1.65 |
| Up | R89S | 940 | 7342.24 | 4138.54 | 1.77 | 1.30 | 0.79 |
| Neutral | R89K | 934 | 7679.02 | 8254.00 | 0.93 | 1.36 | 1.57 |
| Neutral | R89F | 942 | 4764.35 | 5589.97 | 0.85 | 0.84 | 1.06 |
| Neutral | R89Y | 939 | 5614.23 | 5949.31 | 0.94 | 0.99 | 1.13 |
| Up | R89N | 936 | 3502.08 | 1995.86 | 1.75 | 0.62 | 0.38 |
| Neutral | R89H | 933 | 3611.69 | 4222.47 | 0.86 | 0.64 | 0.80 |
| Neutral | R89L | 947 | 3123.66 | 3332.30 | 0.94 | 0.55 | 0.63 |
| Neutral | R89E | 932 | 1490.93 | 1265.89 | 1.18 | 0.26 | 0.24 |
| Down | R89P | 949 | 2659.02 | 3342.56 | 0.80 | 0.47 | 0.64 |
| Neutral | W90L | 966 | 394.24 | 411.82 | 0.96 | 0.08 | 0.06 |
| Neutral | W90G | 961 | 448.08 | 427.28 | 1.05 | 0.09 | 0.06 |
| Neutral | W90P | 968 | 444.72 | 442.65 | 1.00 | 0.09 | 0.06 |
| Neutral | W90T | 958 | 397.42 | 365.04 | 1.09 | 0.08 | 0.05 |
| Neutral | W90S | 960 | 443.43 | 442.72 | 1.00 | 0.09 | 0.06 |
| Neutral | W90V | 965 | 384.57 | 385.18 | 1.00 | 0.08 | 0.06 |
| Neutral | W90I | 964 | 443.81 | 432.28 | 1.03 | 0.09 | 0.06 |
| Neutral | W90A | 967 | 497.94 | 554.07 | 0.90 | 0.10 | 0.08 |
| Neutral | W90F | 962 | 730.98 | 656.84 | 1.11 | 0.15 | 0.10 |
| Neutral | W90H | 952 | 498.51 | 493.15 | 1.01 | 0.10 | 0.07 |
| Neutral | W90M | 963 | 512.18 | 508.03 | 1.01 | 0.10 | 0.07 |
| Neutral | W90R | 954 | 1974.98 | 1695.11 | 1.17 | 0.23 | 0.19 |
| Up | W90E | 951 | 1537.84 | 1076.32 | 1.43 | 0.18 | 0.12 |
| Up | W90N | 956 | 1308.11 | 1001.91 | 1.31 | 0.15 | 0.11 |
| Up | W90Q | 957 | 1392.58 | 1015.03 | 1.37 | 0.16 | 0.12 |
| Down | E91N | 974 | 4746.43 | 6166.37 | 0.77 | 0.96 | 0.90 |
| Down | E91R | 972 | 2760.48 | 3810.12 | 0.72 | 0.56 | 0.56 |
| Down | E91W | 982 | 2595.35 | 5651.48 | 0.46 | 0.53 | 0.83 |
| Down | E91G | 979 | 4826.02 | 6684.79 | 0.72 | 0.98 | 0.98 |
| Neutral | E91V | 984 | 454.87 | 459.17 | 0.99 | 0.09 | 0.07 |
| Neutral | E91Y | 977 | 4885.18 | 5469.16 | 0.89 | 0.99 | 0.80 |
| Down | E91C | 973 | 3525.68 | 5567.75 | 0.63 | 0.71 | 0.81 |
| Down | E91H | 970 | 5114.86 | 6610.88 | 0.77 | 1.04 | 0.97 |
| Neutral | E91T | 976 | 442.21 | 427.42 | 1.03 | 0.09 | 0.06 |
| Neutral | E91S | 978 | 8147.93 | 7696.77 | 1.06 | 0.94 | 0.87 |
| Neutral | E91A | 986 | 1140.60 | 1252.34 | 0.91 | 0.13 | 0.14 |
| Neutral | E91I | 983 | 8414.79 | 8744.30 | 0.96 | 0.97 | 0.99 |
| Neutral | E91D | 969 | 8482.61 | 8681.73 | 0.98 | 0.98 | 0.98 |
| Neutral | E91F | 980 | 1159.80 | 1117.15 | 1.04 | 0.13 | 0.13 |
| Neutral | E91L | 985 | 2012.22 | 1956.07 | 1.03 | 0.23 | 0.22 |
| Down | Q92V | 1003 | 3748.94 | 5787.25 | 0.65 | 0.76 | 0.85 |
| Down | Q92Y | 996 | 2141.40 | 5383.55 | 0.40 | 0.43 | 0.79 |
| Down | Q92L | 1004 | 2422.01 | 3765.30 | 0.64 | 0.49 | 0.55 |
| Neutral | Q92N | 994 | 8685.91 | 8183.03 | 1.06 | 1.00 | 0.93 |
| Neutral | Q92E | 989 | 8489.89 | 8972.33 | 0.95 | 0.98 | 1.02 |
| Neutral | Q92I | 1002 | 7791.35 | 8518.64 | 0.91 | 0.90 | 0.97 |
| Neutral | Q92T | 995 | 8289.96 | 8916.74 | 0.93 | 0.96 | 1.01 |
| Neutral | Q92G | 998 | 7218.56 | 8372.74 | 0.86 | 0.83 | 0.95 |
| Neutral | Q92P | 1006 | 3678.59 | 4021.57 | 0.91 | 0.43 | 0.46 |
| Neutral | Q92W | 1001 | 7277.76 | 8042.96 | 0.90 | 0.84 | 0.91 |
| Neutral | Q92F | 999 | 8216.00 | 8989.59 | 0.91 | 0.95 | 1.02 |
| Neutral | Q92S | 997 | 8760.81 | 9254.16 | 0.95 | 1.01 | 1.05 |
| Neutral | Q92R | 992 | 8566.65 | 8894.65 | 0.96 | 0.99 | 1.01 |
| Neutral | Q92K | 991 | 8790.93 | 9239.36 | 0.95 | 1.02 | 1.05 |
| Neutral | Q92A | 1005 | 8138.84 | 9037.58 | 0.90 | 0.94 | 1.02 |
| Down | T93A | 1024 | 2321.71 | 5447.47 | 0.43 | 0.47 | 0.80 |
| Neutral | T93L | 1023 | 541.85 | 545.89 | 0.99 | 0.11 | 0.08 |
| Down | T93M | 1019 | 5256.54 | 7088.24 | 0.74 | 1.07 | 1.04 |
| Neutral | T93N | 1013 | 5852.91 | 7141.52 | 0.82 | 1.19 | 1.04 |
| Neutral | T93V | 1022 | 7976.61 | 8668.81 | 0.92 | 0.92 | 0.98 |
| Neutral | T93I | 1021 | 9015.76 | 9426.26 | 0.96 | 1.04 | 1.07 |
| Neutral | T93D | 1007 | 8742.88 | 9032.61 | 0.97 | 1.01 | 1.02 |
| Neutral | T93S | 1016 | 8832.30 | 8978.09 | 0.98 | 1.02 | 1.02 |
| Neutral | T93R | 1011 | 8802.98 | 8782.70 | 1.00 | 1.02 | 1.00 |
| Neutral | T93W | 1020 | 7872.73 | 8474.20 | 0.93 | 0.91 | 0.96 |
| Down | T93F | 1018 | 4307.35 | 5656.46 | 0.76 | 0.50 | 0.64 |
| Neutral | T93P | 1025 | 8315.28 | 8629.67 | 0.96 | 0.96 | 0.98 |
| Down | T93G | 1017 | 4926.38 | 6453.11 | 0.76 | 0.57 | 0.73 |
| Neutral | T93K | 1010 | 8581.02 | 8663.14 | 0.99 | 0.99 | 0.98 |
| Neutral | T93E | 1008 | 8081.66 | 8373.46 | 0.97 | 0.93 | 0.95 |
| Neutral | H94L | 1042 | 509.44 | 507.83 | 1.00 | 0.10 | 0.07 |
| Down | H94S | 1035 | 3442.98 | 5184.16 | 0.66 | 0.70 | 0.76 |
| Neutral | H94M | 1038 | 7388.19 | 8302.74 | 0.89 | 0.85 | 0.94 |
| Neutral | H94R | 1029 | 7237.77 | 7718.22 | 0.94 | 0.84 | 0.87 |
| Neutral | H94E | 1027 | 8375.45 | 8466.04 | 0.99 | 0.97 | 0.96 |
| Neutral | H94I | 1040 | 6326.35 | 7655.54 | 0.83 | 0.73 | 0.87 |
| Neutral | H94D | 1026 | 7358.29 | 8057.05 | 0.91 | 0.85 | 0.91 |
| Neutral | H94P | 1044 | 2892.06 | 3183.37 | 0.91 | 0.33 | 0.36 |
| Neutral | H94A | 1043 | 8285.72 | 8772.41 | 0.94 | 0.96 | 0.99 |
| Neutral | H94N | 1031 | 8497.48 | 8732.16 | 0.97 | 0.98 | 0.99 |
| Down | H94F | 1037 | 6046.02 | 7839.76 | 0.77 | 0.70 | 0.89 |
| Neutral | H94G | 1036 | 7671.85 | 7912.46 | 0.97 | 0.89 | 0.90 |
| Neutral | H94T | 1033 | 7121.14 | 8100.48 | 0.88 | 0.82 | 0.92 |
| Neutral | H94V | 1041 | 7941.67 | 8381.81 | 0.95 | 0.92 | 0.95 |
| Neutral | H94W | 1039 | 6520.52 | 7583.08 | 0.86 | 0.75 | 0.86 |
| Down | L95E | 4 | 4165.44 | 5381.52 | 0.77 | 0.48 | 0.61 |
| Neutral | L95Y | 12 | 1044.63 | 1118.92 | 0.93 | 0.12 | 0.13 |
| Neutral | L95R | 7 | 1328.79 | 1312.13 | 1.01 | 0.15 | 0.15 |
| Neutral | L95A | 20 | 1262.99 | 1297.06 | 0.97 | 0.15 | 0.15 |
| Neutral | L95G | 14 | 1090.24 | 1183.93 | 0.92 | 0.13 | 0.13 |
| Up | L95K | 6 | 1333.28 | 1191.46 | 1.12 | 0.15 | 0.14 |
| Neutral | L95S | 13 | 1077.02 | 1117.02 | 0.96 | 0.12 | 0.13 |
| Neutral | L95T | 11 | 1407.58 | 1310.18 | 1.07 | 0.16 | 0.15 |
| Neutral | L95H | 5 | 1270.21 | 1086.69 | 1.17 | 0.15 | 0.12 |
| Neutral | L95W | 17 | 1133.63 | 1041.65 | 1.09 | 0.13 | 0.12 |
| Neutral | L95V | 19 | 8390.57 | 8371.68 | 1.00 | 0.97 | 0.95 |
| Neutral | L95C | 8 | 2189.50 | 2519.34 | 0.87 | 0.25 | 0.29 |
| Neutral | L95P | 21 | 1084.88 | 1147.69 | 0.95 | 0.13 | 0.13 |
| Neutral | L95D | 3 | 909.41 | 933.49 | 0.97 | 0.11 | 0.11 |
| Down | L95I | 18 | 1707.98 | 2294.02 | 0.74 | 0.30 | 0.45 |
| Neutral | T96E | 1046 | 415.05 | 397.38 | 1.04 | 0.07 | 0.06 |
| Neutral | T96R | 1049 | 478.81 | 441.86 | 1.08 | 0.08 | 0.07 |
| Neutral | T96P | 1063 | 589.64 | 692.90 | 0.85 | 0.09 | 0.11 |
| Down | T96S | 1054 | 3055.53 | 4011.47 | 0.76 | 0.49 | 0.64 |
| Neutral | T96A | 1062 | 1873.45 | 2254.28 | 0.83 | 0.30 | 0.36 |
| Down | T96L | 1061 | 2337.67 | 3156.45 | 0.74 | 0.37 | 0.51 |
| Down | T96W | 1058 | 1194.79 | 1631.19 | 0.73 | 0.19 | 0.26 |
| Down | T96N | 1051 | 2674.35 | 3874.07 | 0.69 | 0.43 | 0.62 |
| Neutral | T96G | 1055 | 415.04 | 387.45 | 1.07 | 0.07 | 0.06 |
| Down | T96F | 1056 | 2640.74 | 3897.10 | 0.68 | 0.42 | 0.62 |
| Down | T96Q | 1052 | 1865.64 | 2509.48 | 0.74 | 0.30 | 0.40 |
| Down | T96H | 1047 | 1294.29 | 1620.22 | 0.80 | 0.21 | 0.26 |
| Down | T96V | 1060 | 1904.14 | 2730.27 | 0.70 | 0.30 | 0.44 |
| Down | T96I | 1059 | 1814.91 | 2921.26 | 0.62 | 0.29 | 0.47 |
| Neutral | T96C | 1050 | 701.03 | 774.48 | 0.91 | 0.11 | 0.12 |
| Neutral | Y97R | 1068 | 447.48 | 449.81 | 0.99 | 0.14 | 0.09 |
| Neutral | Y97V | 1079 | 637.70 | 789.90 | 0.81 | 0.20 | 0.16 |
| Neutral | Y97A | 1081 | 507.18 | 504.63 | 1.01 | 0.16 | 0.10 |
| Neutral | Y97P | 1082 | 488.40 | 452.67 | 1.08 | 0.15 | 0.09 |
| Neutral | Y97L | 1080 | 510.25 | 549.53 | 0.93 | 0.16 | 0.11 |
| Neutral | Y97T | 1072 | 538.83 | 600.97 | 0.90 | 0.17 | 0.12 |
| Up | Y97K | 1067 | 469.55 | 390.08 | 1.20 | 0.15 | 0.08 |
| Down | Y97W | 1077 | 3115.45 | 4974.99 | 0.63 | 0.98 | 1.01 |
| Down | Y97H | 1066 | 685.71 | 879.64 | 0.78 | 0.22 | 0.18 |
| Neutral | Y97S | 1073 | 482.94 | 471.85 | 1.02 | 0.15 | 0.10 |
| Neutral | Y97E | 1065 | 435.12 | 432.07 | 1.01 | 0.14 | 0.09 |
| Neutral | Y97D | 1064 | 466.89 | 455.39 | 1.03 | 0.15 | 0.09 |
| Neutral | Y97N | 1070 | 486.98 | 490.84 | 0.99 | 0.15 | 0.10 |
| Neutral | Y97G | 1074 | 521.34 | 516.64 | 1.01 | 0.11 | 0.08 |
| Neutral | Y97Q | 1071 | 567.66 | 575.73 | 0.99 | 0.12 | 0.08 |
| Down | R98H | 1085 | 1456.51 | 3257.97 | 0.45 | 0.46 | 0.66 |
| Down | R98K | 1086 | 2994.82 | 4670.17 | 0.64 | 0.95 | 0.95 |
| Neutral | R98C | 1087 | 761.34 | 938.43 | 0.81 | 0.24 | 0.19 |
| Down | R98L | 1099 | 3592.72 | 5087.24 | 0.71 | 1.14 | 1.03 |
| Down | R98M | 1095 | 3551.60 | 5834.31 | 0.61 | 1.12 | 1.18 |
| Down | R98F | 1094 | 2925.55 | 4988.31 | 0.59 | 0.92 | 1.01 |
| Down | R98W | 1096 | 833.68 | 1098.48 | 0.76 | 0.26 | 0.22 |
| Neutral | R98Y | 1091 | 505.91 | 479.02 | 1.06 | 0.16 | 0.10 |
| Down | R98P | 1101 | 2306.44 | 3388.72 | 0.68 | 0.73 | 0.69 |
| Down | R98E | 1084 | 1812.72 | 2769.07 | 0.65 | 0.57 | 0.56 |
| Down | R98A | 1100 | 3006.35 | 4371.72 | 0.69 | 0.95 | 0.89 |
| Down | R98G | 1093 | 1525.20 | 2367.66 | 0.64 | 0.48 | 0.48 |
| Down | R98V | 1098 | 1298.78 | 3330.10 | 0.39 | 0.26 | 0.49 |
| Down | R98S | 1092 | 4646.88 | 6142.58 | 0.76 | 0.94 | 0.90 |
| Down | R98D | 1083 | 2905.96 | 3867.31 | 0.75 | 0.33 | 0.47 |
| Neutral | I99C | 1107 | 514.61 | 514.66 | 1.00 | 0.16 | 0.10 |
| Neutral | I99E | 1103 | 550.80 | 548.33 | 1.00 | 0.17 | 0.11 |
| Neutral | I99G | 1113 | 588.17 | 598.60 | 0.98 | 0.19 | 0.12 |
| Neutral | I99H | 1104 | 749.01 | 834.15 | 0.90 | 0.24 | 0.17 |
| Neutral | I99N | 1108 | 691.55 | 805.73 | 0.86 | 0.22 | 0.16 |
| Neutral | I99P | 1120 | 567.03 | 526.02 | 1.08 | 0.18 | 0.11 |
| Down | I99T | 1110 | 1087.94 | 1583.58 | 0.69 | 0.34 | 0.32 |
| Down | I99V | 1117 | 2373.86 | 3390.37 | 0.70 | 0.75 | 0.69 |
| Neutral | I99A | 1119 | 654.22 | 809.57 | 0.81 | 0.13 | 0.12 |
| Down | I99F | 1114 | 2098.09 | 2958.45 | 0.71 | 0.43 | 0.43 |
| Down | I99L | 1118 | 2592.09 | 4336.89 | 0.60 | 0.53 | 0.63 |
| Neutral | I99R | 1106 | 561.16 | 555.21 | 1.01 | 0.11 | 0.08 |
| Neutral | I99S | 1112 | 616.13 | 673.46 | 0.91 | 0.12 | 0.10 |
| Down | I99Q | 1109 | 3318.21 | 4623.91 | 0.72 | 0.37 | 0.56 |
| Neutral | I99W | 1116 | 509.03 | 492.00 | 1.04 | 0.06 | 0.06 |
| Neutral | I99Y | 1111 | 690.55 | 700.48 | 0.99 | 0.08 | 0.09 |
| Down | E100V | 512 | 3980.72 | 5009.20 | 0.79 | 1.26 | 1.01 |
| Neutral | E100P | 515 | 727.82 | 785.14 | 0.93 | 0.23 | 0.16 |
| Down | E100L | 513 | 3370.21 | 4726.28 | 0.71 | 1.06 | 0.96 |
| Down | E100H | 498 | 1484.00 | 2354.50 | 0.63 | 0.47 | 0.48 |
| Down | E100D | 497 | 1886.86 | 3049.67 | 0.62 | 0.60 | 0.62 |
| Down | E100M | 509 | 3046.42 | 4566.62 | 0.67 | 0.96 | 0.92 |
| Neutral | E100G | 507 | 541.78 | 567.31 | 0.95 | 0.11 | 0.08 |
| Down | E100W | 510 | 1544.77 | 3766.06 | 0.41 | 0.31 | 0.55 |
| Down | E100Y | 505 | 2885.60 | 4167.75 | 0.69 | 0.58 | 0.61 |
| Neutral | E100R | 500 | 7410.11 | 7964.52 | 0.93 | 0.83 | 0.96 |
| Neutral | E100S | 506 | 3768.09 | 4664.58 | 0.81 | 0.42 | 0.56 |
| Neutral | E100T | 504 | 6985.28 | 7478.12 | 0.93 | 0.79 | 0.90 |
| Neutral | E100F | 508 | 6709.27 | 7436.60 | 0.90 | 0.75 | 0.90 |
| Neutral | E100I | 511 | 8824.19 | 8458.79 | 1.04 | 0.99 | 1.02 |
| Neutral | E100N | 502 | 8809.68 | 8215.63 | 1.07 | 0.99 | 0.99 |
| Neutral | N101M | 1133 | 7907.75 | 7930.91 | 1.00 | 0.89 | 0.96 |
| Neutral | N101F | 1132 | 5045.54 | 5244.47 | 0.96 | 0.57 | 0.63 |
| Neutral | N101L | 1137 | 6427.09 | 6656.60 | 0.97 | 0.72 | 0.80 |
| Neutral | N101V | 1136 | 8153.10 | 7605.57 | 1.07 | 0.92 | 0.92 |
| Neutral | N101H | 1123 | 8863.48 | 8197.03 | 1.08 | 1.00 | 0.99 |
| Neutral | N101R | 1125 | 8050.92 | 7576.48 | 1.06 | 0.91 | 0.91 |
| Down | N101C | 1126 | 2651.70 | 3359.06 | 0.79 | 0.30 | 0.41 |
| Neutral | N101T | 1128 | 9660.15 | 8437.52 | 1.14 | 1.09 | 1.02 |
| Neutral | N101P | 1139 | 8232.08 | 7996.53 | 1.03 | 0.93 | 0.96 |
| Neutral | N101W | 1134 | 3302.54 | 3773.04 | 0.88 | 0.37 | 0.46 |
| Neutral | N101K | 1124 | 7396.60 | 7283.35 | 1.02 | 0.83 | 0.88 |
| Neutral | N101S | 1130 | 8913.81 | 8187.44 | 1.09 | 1.00 | 0.99 |
| Neutral | N101D | 1121 | 5424.50 | 5676.43 | 0.96 | 0.61 | 0.68 |
| Neutral | N101A | 1138 | 6371.04 | 6423.71 | 0.99 | 0.72 | 0.78 |
| Neutral | N101Y | 1129 | 3878.66 | 3898.52 | 0.99 | 0.44 | 0.47 |
| Neutral | Y102R | 1144 | 9027.37 | 8170.55 | 1.10 | 1.02 | 0.99 |
| Neutral | Y102K | 1143 | 5806.60 | 5157.24 | 1.13 | 0.65 | 0.62 |
| Neutral | Y102V | 1155 | 6412.64 | 6500.28 | 0.99 | 0.72 | 0.78 |
| Neutral | Y102M | 1152 | 6668.55 | 6964.91 | 0.96 | 0.75 | 0.84 |
| Neutral | Y102P | 1158 | 4670.45 | 4431.46 | 1.05 | 0.53 | 0.53 |
| Neutral | Y102N | 1146 | 4618.85 | 4579.81 | 1.01 | 0.52 | 0.55 |
| Neutral | Y102G | 1150 | 7272.09 | 6976.34 | 1.04 | 0.82 | 0.84 |
| Neutral | Y102L | 1156 | 3323.14 | 3802.15 | 0.87 | 0.37 | 0.46 |
| Neutral | Y102D | 1140 | 5174.42 | 4862.10 | 1.06 | 0.58 | 0.59 |
| Neutral | Y102S | 1149 | 8744.32 | 8244.11 | 1.06 | 0.98 | 0.99 |
| Neutral | Y102F | 1151 | 7629.25 | 8362.12 | 0.91 | 0.86 | 1.01 |
| Neutral | Y102A | 1157 | 7177.10 | 7304.92 | 0.98 | 0.81 | 0.88 |
| Neutral | Y102E | 1141 | 3375.30 | 3325.21 | 1.02 | 0.38 | 0.40 |
| Neutral | Y102Q | 1147 | 5644.96 | 5711.44 | 0.99 | 0.64 | 0.69 |
| Neutral | Y102C | 1145 | 1544.43 | 1842.83 | 0.84 | 0.17 | 0.22 |
| Neutral | T103E | 517 | 619.06 | 617.97 | 1.00 | 0.20 | 0.13 |
| Neutral | T103D | 516 | 848.44 | 877.46 | 0.97 | 0.27 | 0.18 |
| Neutral | T103S | 525 | 761.49 | 855.80 | 0.89 | 0.24 | 0.17 |
| Up | T103L | 532 | 855.65 | 650.61 | 1.32 | 0.27 | 0.13 |
| Neutral | T103V | 531 | 822.60 | 1017.88 | 0.81 | 0.26 | 0.21 |
| Neutral | T103R | 520 | 674.37 | 652.99 | 1.03 | 0.21 | 0.13 |
| Neutral | T103Y | 524 | 1181.09 | 1423.76 | 0.83 | 0.37 | 0.29 |
| Down | T103N | 522 | 3131.62 | 4822.91 | 0.65 | 0.99 | 0.98 |
| Neutral | T103C | 521 | 628.62 | 604.98 | 1.04 | 0.20 | 0.12 |
| Up | T103Q | 523 | 791.61 | 624.86 | 1.27 | 0.25 | 0.13 |
| Neutral | T103W | 529 | 513.42 | 548.41 | 0.94 | 0.10 | 0.08 |
| Neutral | T103P | 534 | 513.57 | 526.91 | 0.97 | 0.10 | 0.08 |
| Neutral | T103A | 533 | 1058.92 | 950.05 | 1.11 | 0.21 | 0.14 |
| Neutral | T103G | 526 | 749.67 | 656.69 | 1.14 | 0.15 | 0.10 |
| Neutral | T103K | 519 | 884.09 | 777.94 | 1.14 | 0.18 | 0.11 |
| Neutral | P104G | 1170 | 602.57 | 620.78 | 0.97 | 0.19 | 0.13 |
| Down | P104E | 1160 | 4330.78 | 6029.01 | 0.72 | 1.37 | 1.22 |
| Down | P104T | 1167 | 3213.10 | 4681.67 | 0.69 | 1.02 | 0.95 |
| Neutral | P104F | 1171 | 2191.45 | 1923.19 | 1.14 | 0.69 | 0.39 |
| Down | P104R | 1163 | 591.46 | 5625.37 | 0.11 | 0.19 | 1.14 |
| Down | P104D | 1159 | 4022.87 | 5896.28 | 0.68 | 1.27 | 1.19 |
| Neutral | P104C | 1164 | 779.25 | 879.87 | 0.89 | 0.25 | 0.18 |
| Down | P104Q | 1166 | 4140.44 | 5971.62 | 0.69 | 1.31 | 1.21 |
| Down | P104V | 1175 | 2675.96 | 4161.77 | 0.64 | 0.85 | 0.84 |
| Down | P104Y | 1168 | 1907.52 | 2912.52 | 0.65 | 0.60 | 0.59 |
| Down | P104H | 1161 | 3404.74 | 5009.27 | 0.68 | 1.08 | 1.01 |
| Down | P104L | 1176 | 2981.52 | 4000.85 | 0.75 | 0.60 | 0.58 |
| Down | P104S | 1169 | 1205.11 | 2392.05 | 0.50 | 0.24 | 0.35 |
| Neutral | P104A | 1177 | 8861.30 | 8360.82 | 1.06 | 1.00 | 1.01 |
| Up | P104M | 1172 | 6709.44 | 7118.65 | 0.94 | 0.88 | 0.75 |
| Up | D105A | 39 | 2674.16 | 1227.06 | 2.18 | 0.65 | 0.24 |
| Neutral | D105C | 26 | 871.16 | 737.92 | 1.18 | 0.21 | 0.15 |
| Up | D105F | 33 | 2009.56 | 1221.58 | 1.65 | 0.49 | 0.24 |
| Up | D105G | 32 | 2407.89 | 1686.68 | 1.43 | 0.58 | 0.34 |
| Up | D105I | 36 | 1732.38 | 1105.99 | 1.57 | 0.42 | 0.22 |
| Up | D105L | 38 | 1563.61 | 859.56 | 1.82 | 0.38 | 0.17 |
| Neutral | D105M | 34 | 2703.51 | 2920.93 | 0.93 | 0.65 | 0.58 |
| Up | D105N | 27 | 3766.72 | 1475.08 | 2.55 | 0.91 | 0.29 |
| Up | D105P | 40 | 856.02 | 604.56 | 1.42 | 0.21 | 0.12 |
| Up | D105R | 25 | 3892.02 | 2016.90 | 1.93 | 0.94 | 0.40 |
| Up | D105S | 31 | 3646.49 | 2727.22 | 1.34 | 0.88 | 0.54 |
| Up | D105T | 29 | 2513.64 | 1729.46 | 1.45 | 0.61 | 0.34 |
| Neutral | D105V | 37 | 5824.43 | 6784.65 | 0.86 | 1.41 | 1.35 |
| Up | D105W | 35 | 2565.93 | 1855.05 | 1.38 | 0.62 | 0.37 |
| Neutral | D105E | 22 | 4000.92 | 3366.64 | 1.19 | 0.59 | 0.45 |
| Up | L106P | 1196 | 793.18 | 480.45 | 1.65 | 0.16 | 0.10 |
| Neutral | L106D | 1178 | 455.97 | 436.46 | 1.04 | 0.09 | 0.09 |
| Neutral | L106N | 1184 | 579.84 | 499.77 | 1.16 | 0.12 | 0.10 |
| Up | L106G | 1189 | 778.24 | 578.12 | 1.35 | 0.16 | 0.12 |
| Down | L106M | 1191 | 2299.74 | 3704.96 | 0.62 | 0.48 | 0.74 |
| Down | L106A | 1195 | 3604.47 | 5633.39 | 0.64 | 0.75 | 1.12 |
| Neutral | L106R | 1182 | 658.60 | 552.82 | 1.19 | 0.14 | 0.11 |
| Neutral | L106Y | 1187 | 4761.33 | 5769.09 | 0.83 | 0.99 | 1.15 |
| Neutral | L106T | 1186 | 1604.22 | 1508.31 | 1.06 | 0.33 | 0.30 |
| Neutral | L106V | 1194 | 8561.50 | 8230.68 | 1.04 | 1.77 | 1.64 |
| Neutral | L106H | 1180 | 644.13 | 641.84 | 1.00 | 0.13 | 0.13 |
| Down | L106F | 1190 | 1776.88 | 2525.65 | 0.70 | 0.36 | 0.37 |
| Down | L106I | 1193 | 2787.16 | 4408.75 | 0.63 | 0.56 | 0.64 |
| Neutral | L106C | 1183 | 2995.56 | 3678.33 | 0.81 | 0.34 | 0.44 |
| Neutral | L106S | 1188 | 2730.64 | 2899.36 | 0.94 | 0.31 | 0.35 |
| Neutral | P107L | 1214 | 3183.54 | 3874.49 | 0.82 | 0.77 | 0.75 |
| Neutral | P107W | 1211 | 1255.79 | 1303.70 | 0.96 | 0.30 | 0.25 |
| Neutral | P107T | 1205 | 5673.07 | 6084.28 | 0.93 | 1.37 | 1.18 |
| Neutral | P107S | 1207 | 5865.31 | 6191.65 | 0.95 | 1.42 | 1.20 |
| Neutral | P107R | 1201 | 2981.87 | 3300.34 | 0.90 | 0.72 | 0.64 |
| Neutral | P107Y | 1206 | 2005.11 | 2383.15 | 0.84 | 0.48 | 0.46 |
| Neutral | P107M | 1210 | 3551.42 | 4031.55 | 0.88 | 0.86 | 0.78 |
| Neutral | P107V | 1213 | 3499.60 | 4142.87 | 0.84 | 0.85 | 0.80 |
| Neutral | P107D | 1197 | 3531.02 | 4095.17 | 0.86 | 0.85 | 0.80 |
| Neutral | P107A | 1215 | 5661.84 | 6316.88 | 0.90 | 1.37 | 1.23 |
| Neutral | P107C | 1202 | 786.68 | 776.20 | 1.01 | 0.19 | 0.15 |
| Neutral | P107K | 1200 | 3176.89 | 3653.27 | 0.87 | 0.77 | 0.71 |
| Neutral | P107F | 1209 | 1603.40 | 1832.50 | 0.87 | 0.39 | 0.36 |
| Neutral | P107I | 1212 | 2003.91 | 2369.36 | 0.85 | 0.48 | 0.46 |
| Neutral | P107G | 1208 | 2694.02 | 3272.63 | 0.82 | 0.65 | 0.64 |
| Up | R108P | 1234 | 4652.14 | 3388.90 | 1.37 | 0.96 | 0.67 |
| Down | R108G | 1226 | 4168.56 | 6204.10 | 0.67 | 0.86 | 1.24 |
| Neutral | R108T | 1223 | 1360.40 | 1652.92 | 0.82 | 0.28 | 0.33 |
| Down | R108E | 1217 | 5311.31 | 6829.34 | 0.78 | 1.10 | 1.36 |
| Down | R108A | 1233 | 5676.42 | 7183.19 | 0.79 | 1.18 | 1.43 |
| Down | R108Y | 1224 | 1527.69 | 2690.78 | 0.57 | 0.32 | 0.54 |
| Down | R108K | 1219 | 7212.78 | 9049.80 | 0.80 | 1.49 | 1.80 |
| Down | R108C | 1220 | 2092.15 | 2852.47 | 0.73 | 0.43 | 0.57 |
| Neutral | R108S | 1225 | 8515.31 | 8202.68 | 1.04 | 1.76 | 1.63 |
| Neutral | R108F | 1227 | 4264.07 | 5199.96 | 0.82 | 0.88 | 1.04 |
| Down | R108W | 1229 | 1522.39 | 2152.20 | 0.71 | 0.31 | 0.31 |
| Down | R108I | 1230 | 2968.84 | 4628.28 | 0.64 | 0.60 | 0.68 |
| Down | R108L | 1232 | 2200.90 | 3462.10 | 0.64 | 0.45 | 0.51 |
| Down | R108N | 1221 | 2820.25 | 4415.19 | 0.64 | 0.57 | 0.65 |
| Neutral | R108V | 1231 | 571.77 | 618.30 | 0.92 | 0.12 | 0.09 |
| Neutral | A109S | 1245 | 6193.70 | 7627.42 | 0.81 | 1.28 | 1.52 |
| Down | A109R | 1239 | 4933.84 | 9751.06 | 0.51 | 1.02 | 1.94 |
| Down | A109T | 1243 | 4678.95 | 6089.37 | 0.77 | 0.97 | 1.21 |
| Down | A109W | 1249 | 5152.58 | 6447.41 | 0.80 | 1.07 | 1.28 |
| Down | A109I | 1250 | 2587.03 | 4255.55 | 0.61 | 0.54 | 0.85 |
| Down | A109Q | 1242 | 3475.21 | 4698.87 | 0.74 | 0.72 | 0.94 |
| Up | A109N | 1241 | 6266.66 | 4399.73 | 1.42 | 1.30 | 0.88 |
| Up | A109Y | 1244 | 1880.37 | 1444.85 | 1.30 | 0.39 | 0.29 |
| Down | A109G | 1246 | 5864.62 | 12111.28 | 0.48 | 1.21 | 2.41 |
| Neutral | A109M | 1248 | 7784.21 | 8628.31 | 0.90 | 1.61 | 1.72 |
| Down | A109D | 1235 | 4410.30 | 6431.60 | 0.69 | 0.91 | 1.28 |
| Neutral | A109V | 1251 | 8073.90 | 8388.34 | 0.96 | 1.67 | 1.67 |
| Down | A109E | 1236 | 2859.74 | 7453.25 | 0.38 | 0.58 | 1.09 |
| Down | A109L | 1252 | 3649.92 | 5241.27 | 0.70 | 0.74 | 0.77 |
| Neutral | A109H | 1237 | 7206.01 | 7536.96 | 0.96 | 0.81 | 0.91 |
| Down | D110P | 1272 | 691.78 | 937.18 | 0.74 | 0.14 | 0.19 |
| Down | D110F | 1265 | 2469.89 | 3158.71 | 0.78 | 0.51 | 0.63 |
| Down | D110Q | 1260 | 3028.40 | 4201.99 | 0.72 | 0.63 | 0.84 |
| Down | D110R | 1257 | 756.25 | 1109.97 | 0.68 | 0.16 | 0.22 |
| Neutral | D110M | 1266 | 1094.79 | 917.81 | 1.19 | 0.23 | 0.18 |
| Down | D110H | 1255 | 3327.99 | 6569.83 | 0.51 | 0.69 | 1.31 |
| Down | D110I | 1268 | 1457.92 | 2219.69 | 0.66 | 0.30 | 0.44 |
| Down | D110L | 1270 | 1494.01 | 1991.44 | 0.75 | 0.31 | 0.40 |
| Down | D110V | 1269 | 2494.40 | 3413.88 | 0.73 | 0.52 | 0.68 |
| Down | D110T | 1261 | 2731.23 | 4170.98 | 0.65 | 0.57 | 0.83 |
| Down | D110S | 1263 | 1262.77 | 1714.94 | 0.74 | 0.26 | 0.34 |
| Down | D110Y | 1262 | 2764.78 | 5378.21 | 0.51 | 0.57 | 1.07 |
| Neutral | D110G | 1264 | 510.14 | 537.48 | 0.95 | 0.10 | 0.08 |
| Neutral | D110C | 1258 | 827.23 | 996.83 | 0.83 | 0.17 | 0.15 |
| Neutral | D110A | 1271 | 4179.59 | 5112.44 | 0.82 | 0.47 | 0.62 |
| Down | V111E | 1274 | 779.81 | 1134.36 | 0.69 | 0.16 | 0.23 |
| Down | V111A | 1290 | 1964.87 | 2890.23 | 0.68 | 0.41 | 0.58 |
| Down | V111S | 1283 | 2947.29 | 4188.33 | 0.70 | 0.61 | 0.83 |
| Neutral | V111W | 1287 | 601.19 | 580.46 | 1.04 | 0.12 | 0.12 |
| Neutral | V111G | 1284 | 833.15 | 974.76 | 0.85 | 0.17 | 0.19 |
| Neutral | V111Y | 1282 | 813.12 | 942.64 | 0.86 | 0.17 | 0.19 |
| Up | V111P | 1291 | 923.36 | 696.55 | 1.33 | 0.19 | 0.14 |
| Down | V111L | 1289 | 1070.50 | 1565.39 | 0.68 | 0.22 | 0.31 |
| Neutral | V111D | 1273 | 591.79 | 576.36 | 1.03 | 0.12 | 0.11 |
| Down | V111K | 1276 | 1017.96 | 1328.59 | 0.77 | 0.21 | 0.26 |
| Down | V111T | 1281 | 3551.97 | 4859.95 | 0.73 | 0.74 | 0.97 |
| Down | V111Q | 1280 | 1546.82 | 2061.98 | 0.75 | 0.32 | 0.41 |
| Down | V111I | 1288 | 4959.51 | 6699.66 | 0.74 | 1.03 | 1.33 |
| Neutral | V111C | 1278 | 843.17 | 943.89 | 0.89 | 0.17 | 0.14 |
| Neutral | V111R | 1277 | 2401.69 | 2925.16 | 0.82 | 0.27 | 0.35 |
| Down | D112A | 1309 | 1419.86 | 2167.48 | 0.66 | 0.29 | 0.43 |
| Down | D112M | 1304 | 1668.58 | 2249.91 | 0.74 | 0.35 | 0.45 |
| Down | D112V | 1307 | 2683.45 | 3699.41 | 0.73 | 0.56 | 0.74 |
| Down | D112R | 1295 | 1072.27 | 1395.54 | 0.77 | 0.22 | 0.28 |
| Down | D112K | 1294 | 967.53 | 1261.79 | 0.77 | 0.20 | 0.25 |
| Neutral | D112P | 1310 | 565.23 | 589.06 | 0.96 | 0.12 | 0.12 |
| Down | D112Q | 1298 | 4681.31 | 8975.21 | 0.52 | 0.97 | 1.79 |
| Down | D112F | 1303 | 1148.89 | 1477.74 | 0.78 | 0.24 | 0.29 |
| Down | D112G | 1302 | 1824.01 | 2601.95 | 0.70 | 0.38 | 0.52 |
| Neutral | D112C | 1296 | 866.83 | 1034.64 | 0.84 | 0.18 | 0.21 |
| Down | D112W | 1305 | 937.80 | 1277.50 | 0.73 | 0.19 | 0.25 |
| Neutral | D112T | 1299 | 2538.82 | 2941.38 | 0.86 | 0.53 | 0.59 |
| Neutral | D112H | 1293 | 480.11 | 467.40 | 1.03 | 0.10 | 0.07 |
| Neutral | D112S | 1301 | 7203.69 | 7600.93 | 0.95 | 0.81 | 0.92 |
| Down | D112I | 1306 | 4020.53 | 5498.90 | 0.73 | 0.44 | 0.72 |
| Down | D112Y | 1300 | 2132.97 | 2869.86 | 0.74 | 0.23 | 0.38 |
| Down | D112L | 1308 | 2626.71 | 4159.92 | 0.63 | 0.29 | 0.55 |
| Neutral | H113T | 1318 | 9107.72 | 8278.01 | 1.10 | 1.03 | 1.00 |
| Neutral | H113L | 1327 | 9479.59 | 8454.16 | 1.12 | 1.07 | 1.02 |
| Neutral | H113M | 1323 | 9463.40 | 8759.43 | 1.08 | 1.07 | 1.06 |
| Neutral | H113S | 1320 | 9278.22 | 9159.47 | 1.01 | 1.04 | 1.11 |
| Neutral | H113N | 1316 | 8609.35 | 8502.46 | 1.01 | 0.97 | 1.03 |
| Neutral | H113R | 1314 | 7702.30 | 7852.46 | 0.98 | 0.87 | 0.95 |
| Neutral | H113A | 1328 | 8505.43 | 8090.18 | 1.05 | 0.96 | 0.98 |
| Neutral | H113E | 1312 | 9118.02 | 8443.69 | 1.08 | 1.03 | 1.02 |
| Neutral | H113V | 1326 | 9183.53 | 8450.30 | 1.09 | 1.03 | 1.02 |
| Neutral | H113Y | 1319 | 9688.60 | 8548.83 | 1.13 | 1.09 | 1.03 |
| Neutral | H113F | 1322 | 9472.51 | 8729.41 | 1.09 | 1.07 | 1.05 |
| Up | H113D | 1311 | 9304.42 | 4925.78 | 1.89 | 1.05 | 0.59 |
| Up | H113W | 1324 | 8683.10 | 5775.24 | 1.50 | 0.98 | 0.70 |
| Neutral | H113G | 1321 | 8953.60 | 8320.09 | 1.08 | 1.01 | 1.00 |
| Neutral | H113P | 1329 | 2987.12 | 3102.32 | 0.96 | 0.34 | 0.37 |
| Neutral | A114E | 1331 | 7136.25 | 7924.97 | 0.90 | 0.80 | 0.96 |
| Neutral | A114S | 1340 | 9211.05 | 8794.50 | 1.05 | 1.04 | 1.06 |
| Neutral | A114I | 1345 | 7073.18 | 7475.79 | 0.95 | 0.80 | 0.90 |
| Up | A114P | 1348 | 1691.05 | 1357.51 | 1.25 | 0.19 | 0.16 |
| Neutral | A114N | 1336 | 9250.51 | 8746.70 | 1.06 | 1.04 | 1.06 |
| Neutral | A114L | 1347 | 7749.61 | 8007.88 | 0.97 | 0.87 | 0.97 |
| Neutral | A114T | 1338 | 6242.22 | 6974.59 | 0.89 | 0.70 | 0.84 |
| Neutral | A114F | 1342 | 605.35 | 675.10 | 0.90 | 0.07 | 0.08 |
| Neutral | A114V | 1346 | 5527.85 | 6054.48 | 0.91 | 0.62 | 0.73 |
| Neutral | A114G | 1341 | 7663.26 | 7892.13 | 0.97 | 0.86 | 0.95 |
| Neutral | A114C | 1335 | 2412.52 | 3005.83 | 0.80 | 0.27 | 0.36 |
| Neutral | A114M | 1343 | 5287.05 | 5931.99 | 0.89 | 0.60 | 0.72 |
| Neutral | A114R | 1334 | 4454.65 | 3915.86 | 1.14 | 0.50 | 0.47 |
| Neutral | A114W | 1344 | 4654.58 | 5477.95 | 0.85 | 0.52 | 0.66 |
| Neutral | A114Q | 1337 | 8094.57 | 8337.94 | 0.97 | 0.91 | 1.01 |
| Neutral | I115F | 1361 | 9634.62 | 9011.34 | 1.07 | 1.08 | 1.09 |
| Neutral | I115T | 1357 | 1935.83 | 2379.92 | 0.81 | 0.22 | 0.29 |
| Neutral | I115H | 1351 | 805.66 | 825.35 | 0.98 | 0.09 | 0.10 |
| Neutral | I115G | 1360 | 725.85 | 626.12 | 1.16 | 0.08 | 0.08 |
| Down | I115K | 1352 | 642.87 | 920.32 | 0.70 | 0.07 | 0.11 |
| Neutral | I115E | 1350 | 1276.09 | 1211.16 | 1.05 | 0.14 | 0.15 |
| Neutral | I115S | 1359 | 796.93 | 780.25 | 1.02 | 0.09 | 0.09 |
| Neutral | I115P | 1367 | 626.77 | 597.01 | 1.05 | 0.07 | 0.07 |
| Neutral | I115C | 1354 | 1021.21 | 982.43 | 1.04 | 0.11 | 0.12 |
| Neutral | I115L | 1365 | 8869.57 | 8467.55 | 1.05 | 1.00 | 1.02 |
| Neutral | I115Q | 1356 | 732.25 | 652.35 | 1.12 | 0.08 | 0.08 |
| Up | I115R | 1353 | 750.11 | 575.36 | 1.30 | 0.08 | 0.07 |
| Neutral | I115W | 1363 | 2203.68 | 2304.27 | 0.96 | 0.25 | 0.28 |
| Neutral | I115V | 1364 | 9365.90 | 8785.30 | 1.07 | 1.05 | 1.06 |
| Neutral | I115D | 1349 | 694.17 | 641.97 | 1.08 | 0.08 | 0.08 |
| Neutral | E116A | 1385 | 9273.62 | 9051.39 | 1.02 | 1.04 | 1.09 |
| Neutral | E116C | 1372 | 5022.73 | 5732.42 | 0.88 | 0.57 | 0.69 |
| Neutral | E116D | 1368 | 9114.14 | 8594.45 | 1.06 | 1.03 | 1.04 |
| Neutral | E116F | 1379 | 8569.56 | 8473.84 | 1.01 | 0.96 | 1.02 |
| Neutral | E116G | 1378 | 8305.07 | 8358.04 | 0.99 | 0.94 | 1.01 |
| Neutral | E116H | 1369 | 8630.15 | 8386.63 | 1.03 | 0.97 | 1.01 |
| Neutral | E116I | 1382 | 9386.17 | 8740.84 | 1.07 | 1.06 | 1.05 |
| Neutral | E116K | 1370 | 9320.21 | 8760.44 | 1.06 | 1.05 | 1.06 |
| Neutral | E116L | 1384 | 8997.58 | 8736.18 | 1.03 | 1.01 | 1.05 |
| Neutral | E116M | 1380 | 9046.33 | 8478.98 | 1.07 | 1.02 | 1.02 |
| Neutral | E116N | 1373 | 8629.15 | 8503.39 | 1.01 | 0.97 | 1.03 |
| Neutral | E116P | 1386 | 852.91 | 806.00 | 1.06 | 0.10 | 0.10 |
| Neutral | E116Q | 1374 | 9480.67 | 8716.72 | 1.09 | 1.07 | 1.05 |
| Neutral | E116R | 1371 | 8871.32 | 8479.40 | 1.05 | 1.00 | 1.02 |
| Neutral | E116S | 1377 | 9714.89 | 8843.17 | 1.10 | 1.09 | 1.07 |
| Neutral | K117H | 1389 | 4516.51 | 4612.42 | 0.98 | 0.52 | 0.55 |
| Neutral | K117T | 1394 | 6149.94 | 6317.74 | 0.97 | 0.71 | 0.75 |
| Neutral | K117Q | 1393 | 6602.62 | 6024.00 | 1.10 | 0.77 | 0.72 |
| Neutral | K117E | 1388 | 668.03 | 667.32 | 1.00 | 0.08 | 0.08 |
| Neutral | K117A | 1404 | 7727.36 | 7375.30 | 1.05 | 0.90 | 0.88 |
| Neutral | K117F | 1398 | 4020.90 | 4038.83 | 1.00 | 0.47 | 0.48 |
| Neutral | K117D | 1387 | 5330.37 | 5924.02 | 0.90 | 0.62 | 0.70 |
| Down | K117N | 1392 | 4666.40 | 7745.69 | 0.60 | 0.54 | 0.92 |
| Neutral | K117G | 1397 | 7619.16 | 7218.94 | 1.06 | 0.88 | 0.86 |
| Neutral | K117W | 1400 | 5440.86 | 4780.56 | 1.14 | 0.63 | 0.57 |
| Neutral | K117Y | 1395 | 5047.23 | 4760.05 | 1.06 | 0.59 | 0.57 |
| Neutral | K117L | 1403 | 5277.39 | 5328.70 | 0.99 | 0.61 | 0.63 |
| Neutral | K117S | 1396 | 7278.89 | 6995.65 | 1.04 | 0.85 | 0.83 |
| Down | K117P | 1405 | 737.96 | 1153.03 | 0.64 | 0.09 | 0.14 |
| Neutral | K117R | 1390 | 8236.16 | 7677.40 | 1.07 | 0.96 | 0.91 |
| Down | A118G | 1417 | 2782.31 | 6427.69 | 0.43 | 0.32 | 0.76 |
| Neutral | A118R | 1410 | 4889.61 | 5639.79 | 0.87 | 0.57 | 0.67 |
| Up | A118W | 1420 | 652.55 | 465.07 | 1.40 | 0.08 | 0.06 |
| Neutral | A118K | 1409 | 584.59 | 543.84 | 1.07 | 0.07 | 0.06 |
| Neutral | A118P | 1424 | 883.04 | 810.72 | 1.09 | 0.10 | 0.10 |
| Neutral | A118V | 1422 | 869.06 | 754.10 | 1.15 | 0.10 | 0.09 |
| Neutral | A118L | 1423 | 543.99 | 523.84 | 1.04 | 0.06 | 0.06 |
| Up | A118D | 1406 | 617.40 | 468.39 | 1.32 | 0.07 | 0.06 |
| Down | A118S | 1416 | 5502.11 | 8251.39 | 0.67 | 0.64 | 0.98 |
| Neutral | A118F | 1418 | 7092.17 | 7315.30 | 0.97 | 0.82 | 0.87 |
| Up | A118I | 1421 | 556.24 | 456.62 | 1.22 | 0.06 | 0.05 |
| Neutral | A118H | 1408 | 482.33 | 466.40 | 1.03 | 0.06 | 0.06 |
| Up | A118E | 1407 | 560.55 | 406.52 | 1.38 | 0.07 | 0.05 |
| Neutral | A118Q | 1413 | 517.05 | 477.18 | 1.08 | 0.06 | 0.06 |
| Neutral | A118T | 1414 | 745.83 | 665.63 | 1.12 | 0.13 | 0.13 |
| Down | F119G | 1436 | 2058.01 | 3284.43 | 0.63 | 0.24 | 0.39 |
| Down | F119T | 1433 | 4492.83 | 8234.56 | 0.55 | 0.52 | 0.98 |
| Neutral | F119R | 1429 | 648.01 | 665.21 | 0.97 | 0.08 | 0.08 |
| Neutral | F119L | 1441 | 8529.66 | 7666.52 | 1.11 | 0.99 | 0.91 |
| Neutral | F119N | 1431 | 1298.98 | 1614.30 | 0.80 | 0.15 | 0.19 |
| Down | F119S | 1435 | 3021.31 | 4383.36 | 0.69 | 0.35 | 0.52 |
| Neutral | F119C | 1430 | 2921.13 | 3375.91 | 0.87 | 0.34 | 0.40 |
| Neutral | F119P | 1443 | 567.10 | 665.80 | 0.85 | 0.07 | 0.08 |
| Neutral | F119W | 1438 | 4474.41 | 4610.60 | 0.97 | 0.52 | 0.55 |
| Neutral | F119K | 1428 | 679.32 | 762.81 | 0.89 | 0.08 | 0.09 |
| Down | F119H | 1427 | 2479.46 | 3939.67 | 0.63 | 0.29 | 0.47 |
| Neutral | F119A | 1442 | 7345.58 | 7881.39 | 0.93 | 0.85 | 0.94 |
| Neutral | F119V | 1440 | 7388.01 | 7712.75 | 0.96 | 0.86 | 0.92 |
| Neutral | F119Y | 1434 | 5832.62 | 6222.88 | 0.94 | 0.68 | 0.74 |
| Down | F119E | 1426 | 1044.34 | 1357.80 | 0.77 | 0.12 | 0.16 |
| Neutral | Q120K | 1447 | 8732.08 | 8385.78 | 1.04 | 1.01 | 1.00 |
| Neutral | Q120N | 1450 | 9186.34 | 8785.94 | 1.05 | 1.07 | 1.05 |
| Down | Q120A | 1461 | 613.72 | 979.68 | 0.63 | 0.07 | 0.12 |
| Neutral | Q120V | 1459 | 8711.16 | 8484.49 | 1.03 | 1.01 | 1.01 |
| Down | Q120D | 1444 | 5912.84 | 8887.98 | 0.67 | 0.69 | 1.06 |
| Neutral | Q120R | 1448 | 8845.48 | 8351.59 | 1.06 | 1.03 | 0.99 |
| Neutral | Q120P | 1462 | 1083.78 | 1186.17 | 0.91 | 0.13 | 0.14 |
| Neutral | Q120W | 1457 | 9339.94 | 7899.14 | 1.18 | 1.08 | 0.94 |
| Down | Q120Y | 1452 | 4891.24 | 8236.87 | 0.59 | 0.57 | 0.98 |
| Neutral | Q120C | 1449 | 5241.83 | 5502.66 | 0.95 | 0.61 | 0.65 |
| Neutral | Q120H | 1446 | 9155.83 | 8431.63 | 1.09 | 1.06 | 1.00 |
| Neutral | Q120T | 1451 | 9413.75 | 8645.01 | 1.09 | 1.09 | 1.03 |
| Down | Q120M | 1456 | 5740.33 | 8861.16 | 0.65 | 0.67 | 1.05 |
| Neutral | Q120E | 1445 | 8896.83 | 8424.76 | 1.06 | 1.03 | 1.00 |
| Neutral | Q120G | 1454 | 9176.97 | 8435.97 | 1.09 | 1.07 | 1.00 |
| Up | L121E | 1464 | 3183.74 | 2155.16 | 1.48 | 0.37 | 0.26 |
| Down | L121Q | 1470 | 2122.18 | 3128.11 | 0.68 | 0.25 | 0.37 |
| Neutral | L121P | 1481 | 1446.80 | 1342.92 | 1.08 | 0.17 | 0.16 |
| Up | L121R | 1467 | 1129.37 | 875.68 | 1.29 | 0.13 | 0.10 |
| Up | L121C | 1468 | 1592.13 | 1145.83 | 1.39 | 0.18 | 0.14 |
| Down | L121G | 1474 | 2613.21 | 4720.78 | 0.55 | 0.30 | 0.56 |
| Neutral | L121K | 1466 | 4678.64 | 4882.50 | 0.96 | 0.54 | 0.58 |
| Up | L121F | 1475 | 1227.52 | 957.08 | 1.28 | 0.14 | 0.11 |
| Neutral | L121I | 1478 | 7406.57 | 6937.72 | 1.07 | 0.86 | 0.83 |
| Down | L121S | 1473 | 2463.24 | 3614.68 | 0.68 | 0.29 | 0.43 |
| Neutral | L121V | 1479 | 7973.31 | 7244.01 | 1.10 | 0.93 | 0.86 |
| Up | L121H | 1465 | 3156.18 | 2605.48 | 1.21 | 0.37 | 0.31 |
| Neutral | L121T | 1471 | 7283.06 | 7372.13 | 0.99 | 0.85 | 0.88 |
| Down | L121A | 1480 | 3311.41 | 4989.77 | 0.66 | 0.38 | 0.59 |
| Neutral | L121N | 1469 | 6619.84 | 6504.79 | 1.02 | 0.77 | 0.77 |
| Neutral | W122R | 1486 | 651.20 | 598.41 | 1.09 | 0.08 | 0.07 |
| Neutral | W122A | 1499 | 699.90 | 617.84 | 1.13 | 0.08 | 0.07 |
| Neutral | W122N | 1488 | 484.17 | 598.30 | 0.81 | 0.06 | 0.07 |
| Neutral | W122P | 1500 | 619.39 | 605.42 | 1.02 | 0.07 | 0.07 |
| Neutral | W122T | 1490 | 621.86 | 570.65 | 1.09 | 0.07 | 0.07 |
| Neutral | W122L | 1498 | 580.35 | 563.09 | 1.03 | 0.07 | 0.07 |
| Neutral | W122G | 1493 | 602.75 | 646.94 | 0.93 | 0.07 | 0.08 |
| Neutral | W122S | 1492 | 602.28 | 564.94 | 1.07 | 0.07 | 0.07 |
| Neutral | W122V | 1497 | 607.75 | 532.36 | 1.14 | 0.07 | 0.06 |
| Neutral | W122H | 1484 | 596.81 | 545.92 | 1.09 | 0.07 | 0.06 |
| Down | W122F | 1494 | 2018.83 | 3056.56 | 0.66 | 0.23 | 0.36 |
| Neutral | W122Y | 1491 | 667.50 | 661.98 | 1.01 | 0.08 | 0.08 |
| Neutral | W122K | 1485 | 2724.60 | 2334.11 | 1.17 | 0.32 | 0.28 |
| Neutral | W122Q | 1489 | 576.75 | 528.48 | 1.09 | 0.07 | 0.06 |
| Neutral | W122E | 1483 | 564.38 | 580.16 | 0.97 | 0.07 | 0.07 |
| Neutral | S123D | 1501 | 9453.37 | 8830.71 | 1.07 | 0.92 | 0.94 |
| Neutral | S123L | 1517 | 9912.51 | 9431.98 | 1.05 | 0.97 | 1.01 |
| Neutral | S123A | 1518 | 9881.07 | 9237.14 | 1.07 | 0.97 | 0.99 |
| Neutral | S123C | 1506 | 10654.40 | 8973.60 | 1.19 | 1.04 | 0.96 |
| Neutral | S123I | 1515 | 9679.91 | 8521.19 | 1.14 | 0.95 | 0.91 |
| Neutral | S123K | 1504 | 10567.78 | 9024.26 | 1.17 | 1.03 | 0.96 |
| Neutral | S123N | 1507 | 6481.00 | 5911.32 | 1.10 | 0.63 | 0.63 |
| Neutral | S123F | 1512 | 7485.79 | 8458.67 | 0.88 | 0.73 | 0.90 |
| Neutral | S123Y | 1510 | 7667.20 | 8806.19 | 0.87 | 0.75 | 0.94 |
| Neutral | S123M | 1513 | 9800.43 | 9159.15 | 1.07 | 0.96 | 0.98 |
| Neutral | S123H | 1503 | 10038.71 | 9099.05 | 1.10 | 0.98 | 0.97 |
| Down | S123R | 1505 | 5290.53 | 9248.50 | 0.57 | 0.52 | 0.99 |
| Down | S123W | 1514 | 2039.75 | 5970.03 | 0.34 | 0.20 | 0.64 |
| Down | S123T | 1509 | 5042.33 | 9146.80 | 0.55 | 0.49 | 0.98 |
| Neutral | S123P | 1519 | 884.66 | 799.56 | 1.11 | 0.09 | 0.09 |
| Neutral | S123G | 1511 | 10847.89 | 9512.32 | 1.14 | 1.06 | 1.02 |
| Neutral | S123Q | 1508 | 10841.56 | 9551.30 | 1.14 | 1.06 | 1.02 |
| Down | S123V | 1516 | 3220.29 | 4504.25 | 0.71 | 0.41 | 0.60 |
| Neutral | N124G | 1530 | 5601.70 | 6396.41 | 0.88 | 1.35 | 1.27 |
| Neutral | N124C | 1525 | 2241.39 | 2691.13 | 0.83 | 0.54 | 0.53 |
| Neutral | N124V | 1535 | 2966.25 | 3399.34 | 0.87 | 0.72 | 0.68 |
| Neutral | N124L | 1536 | 2342.72 | 2849.98 | 0.82 | 0.57 | 0.57 |
| Neutral | N124T | 1527 | 3872.37 | 4747.39 | 0.82 | 0.94 | 0.94 |
| Neutral | N124R | 1524 | 3795.95 | 4479.74 | 0.85 | 0.92 | 0.89 |
| Neutral | N124M | 1532 | 2818.81 | 3511.81 | 0.80 | 0.68 | 0.70 |
| Neutral | N124S | 1529 | 4245.94 | 5151.63 | 0.82 | 1.03 | 1.02 |
| Down | N124P | 1538 | 3825.40 | 5084.71 | 0.75 | 0.92 | 1.01 |
| Neutral | N124A | 1537 | 4174.53 | 4857.21 | 0.86 | 1.01 | 0.96 |
| Neutral | N124K | 1523 | 5006.93 | 5514.55 | 0.91 | 1.21 | 1.10 |
| Neutral | N124F | 1531 | 3681.53 | 4406.27 | 0.84 | 0.89 | 0.88 |
| Neutral | N124W | 1533 | 1506.21 | 1714.90 | 0.88 | 0.36 | 0.34 |
| Neutral | N124I | 1534 | 1663.57 | 1830.11 | 0.91 | 0.40 | 0.36 |
| Neutral | N124D | 1520 | 6218.73 | 6620.92 | 0.94 | 0.92 | 0.88 |
| Neutral | V125G | 1550 | 532.18 | 540.26 | 0.99 | 0.09 | 0.07 |
| Down | V125Q | 1546 | 1480.08 | 1883.56 | 0.79 | 0.26 | 0.25 |
| Down | V125S | 1549 | 2153.87 | 2966.73 | 0.73 | 0.38 | 0.39 |
| Down | V125P | 1557 | 1410.46 | 1873.09 | 0.75 | 0.25 | 0.24 |
| Neutral | V125M | 1552 | 1056.84 | 1118.42 | 0.94 | 0.19 | 0.15 |
| Down | V125Y | 1548 | 1484.83 | 2214.89 | 0.67 | 0.26 | 0.29 |
| Down | V125T | 1547 | 1444.16 | 1850.94 | 0.78 | 0.25 | 0.24 |
| Down | V125A | 1556 | 3246.01 | 5558.20 | 0.58 | 0.57 | 0.73 |
| Up | V125C | 1544 | 892.38 | 690.11 | 1.29 | 0.16 | 0.09 |
| Neutral | V125D | 1539 | 727.50 | 723.91 | 1.00 | 0.13 | 0.09 |
| Neutral | V125W | 1553 | 1537.82 | 1638.09 | 0.94 | 0.27 | 0.21 |
| Neutral | V125R | 1543 | 1087.69 | 1057.82 | 1.03 | 0.19 | 0.14 |
| Neutral | V125E | 1540 | 1324.10 | 1545.82 | 0.86 | 0.23 | 0.20 |
| Down | V125F | 1551 | 1360.07 | 2068.15 | 0.66 | 0.24 | 0.27 |
| Neutral | V125H | 1541 | 2227.75 | 2720.50 | 0.82 | 0.39 | 0.36 |
| Neutral | T126K | 1561 | 646.69 | 546.31 | 1.18 | 0.16 | 0.11 |
| Down | T126V | 1573 | 3034.58 | 4559.28 | 0.67 | 0.73 | 0.91 |
| Neutral | T126G | 1568 | 970.67 | 820.16 | 1.18 | 0.23 | 0.16 |
| Neutral | T126R | 1562 | 692.68 | 612.62 | 1.13 | 0.17 | 0.12 |
| Neutral | T126L | 1574 | 1084.98 | 970.83 | 1.12 | 0.26 | 0.19 |
| Neutral | T126H | 1560 | 648.90 | 592.08 | 1.10 | 0.16 | 0.12 |
| Neutral | T126M | 1570 | 1168.66 | 1078.26 | 1.08 | 0.28 | 0.21 |
| Neutral | T126P | 1576 | 684.23 | 614.07 | 1.11 | 0.17 | 0.12 |
| Neutral | T126A | 1575 | 2433.37 | 2923.43 | 0.83 | 0.59 | 0.58 |
| Neutral | T126N | 1564 | 1449.19 | 1384.47 | 1.05 | 0.35 | 0.28 |
| Up | T126E | 1559 | 697.86 | 580.78 | 1.20 | 0.17 | 0.12 |
| Neutral | T126F | 1569 | 642.61 | 550.97 | 1.17 | 0.16 | 0.11 |
| Neutral | T126W | 1571 | 632.89 | 564.16 | 1.12 | 0.15 | 0.11 |
| Neutral | T126Q | 1565 | 664.00 | 591.91 | 1.12 | 0.16 | 0.12 |
| Neutral | T126S | 1567 | 7114.42 | 6856.69 | 1.04 | 1.06 | 0.91 |
| Neutral | P127C | 1582 | 1713.51 | 1846.56 | 0.93 | 0.41 | 0.37 |
| Neutral | P127F | 1589 | 1444.31 | 1603.37 | 0.90 | 0.35 | 0.32 |
| Neutral | P127T | 1585 | 2193.26 | 2519.16 | 0.87 | 0.53 | 0.50 |
| Down | P127E | 1578 | 2480.57 | 3177.56 | 0.78 | 0.60 | 0.63 |
| Neutral | P127W | 1591 | 1399.71 | 1476.35 | 0.95 | 0.34 | 0.29 |
| Neutral | P127A | 1595 | 1751.82 | 1662.47 | 1.05 | 0.42 | 0.33 |
| Neutral | P127S | 1587 | 2842.19 | 3070.41 | 0.93 | 0.69 | 0.61 |
| Up | P127H | 1579 | 2151.26 | 1693.77 | 1.27 | 0.52 | 0.34 |
| Neutral | P127Q | 1584 | 1729.40 | 1882.54 | 0.92 | 0.42 | 0.37 |
| Neutral | P127K | 1580 | 729.23 | 657.19 | 1.11 | 0.18 | 0.13 |
| Neutral | P127R | 1581 | 1590.44 | 1491.10 | 1.07 | 0.38 | 0.30 |
| Neutral | P127I | 1592 | 1432.03 | 1464.78 | 0.98 | 0.35 | 0.29 |
| Neutral | P127V | 1593 | 1214.79 | 1401.27 | 0.87 | 0.29 | 0.28 |
| Neutral | P127L | 1594 | 1536.18 | 1604.60 | 0.96 | 0.37 | 0.32 |
| Neutral | P127M | 1590 | 2950.98 | 3052.79 | 0.97 | 0.71 | 0.61 |
| Neutral | L128F | 1608 | 1165.63 | 1269.01 | 0.92 | 0.28 | 0.25 |
| Neutral | L128M | 1609 | 1898.38 | 2135.63 | 0.89 | 0.46 | 0.42 |
| Neutral | L128T | 1604 | 756.63 | 698.21 | 1.08 | 0.18 | 0.14 |
| Neutral | L128R | 1600 | 919.42 | 960.28 | 0.96 | 0.22 | 0.19 |
| Neutral | L128S | 1606 | 764.28 | 672.98 | 1.14 | 0.18 | 0.13 |
| Neutral | L128G | 1607 | 738.26 | 694.65 | 1.06 | 0.18 | 0.14 |
| Neutral | L128I | 1611 | 1482.67 | 1715.03 | 0.86 | 0.36 | 0.34 |
| Neutral | L128Q | 1603 | 1042.55 | 936.43 | 1.11 | 0.25 | 0.19 |
| Neutral | L128P | 1614 | 792.57 | 760.45 | 1.04 | 0.19 | 0.15 |
| Neutral | L128A | 1613 | 769.15 | 712.50 | 1.08 | 0.19 | 0.14 |
| Neutral | L128D | 1596 | 682.02 | 642.58 | 1.06 | 0.16 | 0.13 |
| Down | L128V | 1612 | 1285.36 | 1696.88 | 0.76 | 0.31 | 0.34 |
| Neutral | L128W | 1610 | 776.89 | 664.61 | 1.17 | 0.19 | 0.13 |
| Neutral | L128C | 1601 | 856.43 | 770.10 | 1.11 | 0.21 | 0.15 |
| Neutral | L128K | 1599 | 858.27 | 846.02 | 1.01 | 0.21 | 0.17 |
| Neutral | T129G | 1625 | 4435.98 | 5356.41 | 0.83 | 1.07 | 1.06 |
| Down | T129A | 1632 | 2021.18 | 2774.35 | 0.73 | 0.49 | 0.55 |
| Neutral | T129C | 1620 | 1057.55 | 1033.96 | 1.02 | 0.26 | 0.21 |
| Neutral | T129K | 1618 | 3686.95 | 4446.15 | 0.83 | 0.89 | 0.88 |
| Down | T129F | 1626 | 2980.80 | 3803.12 | 0.78 | 0.72 | 0.76 |
| Neutral | T129Y | 1623 | 2527.88 | 2885.14 | 0.88 | 0.61 | 0.57 |
| Neutral | T129S | 1624 | 1649.34 | 1529.13 | 1.08 | 0.40 | 0.30 |
| Neutral | T129R | 1619 | 3334.95 | 3827.40 | 0.87 | 0.81 | 0.76 |
| Neutral | T129V | 1630 | 4967.86 | 5698.42 | 0.87 | 1.20 | 1.13 |
| Neutral | T129L | 1631 | 1649.57 | 1692.51 | 0.97 | 0.40 | 0.34 |
| Down | T129H | 1617 | 3019.81 | 3803.29 | 0.79 | 0.73 | 0.76 |
| Neutral | T129P | 1633 | 647.52 | 619.28 | 1.05 | 0.16 | 0.12 |
| Neutral | T129E | 1616 | 3205.16 | 3919.94 | 0.82 | 0.77 | 0.78 |
| Neutral | T129I | 1629 | 3967.14 | 4452.39 | 0.89 | 0.96 | 0.88 |
| Down | T129M | 1627 | 4118.98 | 5214.21 | 0.79 | 1.00 | 1.04 |
| Neutral | F130L | 1650 | 1452.17 | 1651.58 | 0.88 | 0.25 | 0.23 |
| Neutral | F130P | 1652 | 703.36 | 797.39 | 0.88 | 0.12 | 0.11 |
| Neutral | F130C | 1639 | 803.88 | 939.50 | 0.86 | 0.14 | 0.13 |
| Neutral | F130R | 1638 | 613.42 | 687.58 | 0.89 | 0.10 | 0.09 |
| Down | F130Y | 1643 | 2355.45 | 3604.50 | 0.65 | 0.40 | 0.49 |
| Down | F130H | 1636 | 1209.72 | 1960.40 | 0.62 | 0.21 | 0.27 |
| Down | F130I | 1648 | 4480.99 | 5648.72 | 0.79 | 0.76 | 0.77 |
| Down | F130V | 1649 | 3403.91 | 4744.33 | 0.72 | 0.58 | 0.65 |
| Neutral | F130K | 1637 | 581.97 | 670.87 | 0.87 | 0.10 | 0.09 |
| Down | F130T | 1642 | 1529.21 | 2157.46 | 0.71 | 0.26 | 0.30 |
| Neutral | F130E | 1635 | 571.41 | 648.15 | 0.88 | 0.10 | 0.09 |
| Down | F130A | 1651 | 1414.89 | 1990.16 | 0.71 | 0.24 | 0.27 |
| Neutral | F130N | 1640 | 616.91 | 710.45 | 0.87 | 0.10 | 0.10 |
| Neutral | F130G | 1645 | 1553.35 | 1726.90 | 0.90 | 0.26 | 0.24 |
| Down | F130S | 1644 | 793.40 | 1055.93 | 0.75 | 0.13 | 0.14 |
| Down | T131F | 1664 | 2738.64 | 4500.49 | 0.61 | 0.48 | 0.59 |
| Neutral | T131P | 1671 | 540.49 | 640.19 | 0.84 | 0.10 | 0.08 |
| Down | T131A | 1670 | 3622.28 | 6028.39 | 0.60 | 0.64 | 0.79 |
| Down | T131S | 1662 | 3644.14 | 5779.25 | 0.63 | 0.64 | 0.75 |
| Down | T131G | 1663 | 3345.71 | 5523.72 | 0.61 | 0.59 | 0.72 |
| Down | 1131I | 1667 | 2987.26 | 4570.78 | 0.65 | 0.53 | 0.60 |
| Down | T131L | 1669 | 3081.92 | 4518.80 | 0.68 | 0.54 | 0.59 |
| Down | T131H | 1655 | 4201.01 | 5298.03 | 0.79 | 0.74 | 0.69 |
| Down | T131Q | 1660 | 6169.43 | 8400.64 | 0.73 | 1.08 | 1.10 |
| Neutral | T131D | 1653 | 8629.30 | 9616.48 | 0.90 | 1.52 | 1.26 |
| Down | T131E | 1654 | 4396.59 | 6846.70 | 0.64 | 0.77 | 0.89 |
| Down | T131C | 1658 | 2232.15 | 3514.32 | 0.64 | 0.39 | 0.46 |
| Down | T131R | 1657 | 4325.73 | 6209.92 | 0.70 | 0.76 | 0.81 |
| Down | T131Y | 1661 | 2684.82 | 3916.43 | 0.69 | 0.47 | 0.51 |
| Down | T131M | 1665 | 3101.25 | 4674.29 | 0.66 | 0.55 | 0.61 |
| Down | K132G | 1682 | 3779.04 | 5835.32 | 0.65 | 0.64 | 0.80 |
| Down | K132V | 1687 | 3181.94 | 4834.70 | 0.66 | 0.54 | 0.66 |
| Down | K132L | 1688 | 2407.98 | 3744.64 | 0.64 | 0.41 | 0.51 |
| Down | K132A | 1689 | 5397.96 | 7468.39 | 0.72 | 0.92 | 1.02 |
| Down | K132P | 1690 | 4062.71 | 5742.05 | 0.71 | 0.69 | 0.79 |
| Down | K132F | 1683 | 2012.87 | 2934.12 | 0.69 | 0.34 | 0.40 |
| Neutral | K132R | 1675 | 7317.48 | 8467.31 | 0.86 | 1.24 | 1.16 |
| Down | K132I | 1686 | 1811.13 | 2747.29 | 0.66 | 0.31 | 0.38 |
| Down | K132H | 1674 | 3291.99 | 4588.07 | 0.72 | 0.56 | 0.63 |
| Neutral | K132S | 1681 | 4947.26 | 4913.96 | 1.01 | 0.84 | 0.67 |
| Down | K132M | 1684 | 4521.82 | 6773.06 | 0.67 | 0.77 | 0.93 |
| Down | K132D | 1672 | 2079.75 | 3166.80 | 0.66 | 0.35 | 0.43 |
| Down | K132T | 1679 | 2515.58 | 4096.35 | 0.61 | 0.43 | 0.56 |
| Down | K132Y | 1680 | 2363.32 | 3794.19 | 0.62 | 0.40 | 0.52 |
| Down | K132E | 1673 | 3617.16 | 5597.32 | 0.65 | 0.61 | 0.77 |
| Down | V133G | 1702 | 3203.88 | 5198.66 | 0.62 | 0.54 | 0.71 |
| Down | V133E | 1692 | 3621.55 | 5211.22 | 0.69 | 0.62 | 0.71 |
| Neutral | V133T | 1699 | 7931.49 | 8920.49 | 0.89 | 1.35 | 1.22 |
| Down | V133N | 1697 | 4321.90 | 6145.40 | 0.70 | 0.73 | 0.84 |
| Down | V133A | 1708 | 4764.29 | 6847.44 | 0.70 | 0.81 | 0.94 |
| Down | V133H | 1693 | 3351.37 | 4739.59 | 0.71 | 0.57 | 0.65 |
| Down | V133P | 1709 | 1405.33 | 2047.83 | 0.69 | 0.24 | 0.28 |
| Down | V133K | 1694 | 5737.27 | 7514.38 | 0.76 | 0.97 | 1.03 |
| Down | V133R | 1695 | 5773.82 | 7252.24 | 0.80 | 0.98 | 0.99 |
| Neutral | V133L | 1707 | 7039.08 | 8445.43 | 0.83 | 1.20 | 1.16 |
| Down | V133W | 1705 | 2475.35 | 3564.76 | 0.69 | 0.42 | 0.49 |
| Down | V133C | 1696 | 1863.63 | 2666.24 | 0.70 | 0.32 | 0.37 |
| Down | V133D | 1691 | 1792.46 | 2630.40 | 0.68 | 0.30 | 0.36 |
| Down | V133M | 1704 | 4618.45 | 6302.34 | 0.73 | 0.78 | 0.86 |
| Down | V133S | 1701 | 3077.53 | 4401.10 | 0.70 | 0.52 | 0.60 |
| Down | S134V | 1725 | 4041.51 | 5701.67 | 0.71 | 0.69 | 0.78 |
| Neutral | S134H | 1712 | 6079.44 | 7343.68 | 0.83 | 1.03 | 1.01 |
| Down | S134P | 1728 | 4779.98 | 6326.78 | 0.76 | 0.81 | 0.87 |
| Down | S134G | 1720 | 5540.33 | 7442.86 | 0.74 | 0.94 | 1.02 |
| Neutral | S134N | 1716 | 6292.89 | 7595.95 | 0.83 | 1.07 | 1.04 |
| Down | S134R | 1714 | 5129.73 | 6824.16 | 0.75 | 0.87 | 0.94 |
| Down | S134L | 1726 | 6015.18 | 8101.31 | 0.74 | 1.02 | 1.11 |
| Down | S134Q | 1717 | 4325.14 | 6159.02 | 0.70 | 0.73 | 0.84 |
| Neutral | S134E | 1711 | 7105.19 | 8577.53 | 0.83 | 1.21 | 1.18 |
| Down | S134Y | 1719 | 5061.86 | 6645.94 | 0.76 | 0.86 | 0.91 |
| Down | S134A | 1727 | 5179.47 | 6920.72 | 0.75 | 0.88 | 0.95 |
| Down | S134K | 1713 | 5768.02 | 7876.85 | 0.73 | 0.98 | 1.08 |
| Neutral | S134D | 1710 | 6958.26 | 8316.41 | 0.84 | 1.18 | 1.14 |
| Down | S134T | 1718 | 5585.98 | 7301.80 | 0.77 | 0.95 | 1.00 |
| Down | S134C | 1715 | 1950.58 | 2625.09 | 0.74 | 0.33 | 0.36 |
| Down | E135V | 1744 | 4036.77 | 5545.23 | 0.73 | 0.69 | 0.76 |
| Neutral | E135M | 1741 | 8700.42 | 9297.63 | 0.94 | 1.48 | 1.27 |
| Down | E135S | 1738 | 3895.80 | 5128.41 | 0.76 | 0.66 | 0.70 |
| Down | E135D | 1729 | 4858.77 | 6640.34 | 0.73 | 0.83 | 0.91 |
| Down | E135T | 1736 | 4870.41 | 6518.41 | 0.75 | 0.83 | 0.89 |
| Down | E135L | 1745 | 3276.24 | 4342.02 | 0.75 | 0.56 | 0.59 |
| Down | E135A | 1746 | 5143.68 | 7429.20 | 0.69 | 0.87 | 1.02 |
| Down | E135W | 1742 | 3407.93 | 4761.19 | 0.72 | 0.58 | 0.65 |
| Down | E135F | 1740 | 3206.26 | 4561.41 | 0.70 | 0.54 | 0.63 |
| Down | E135P | 1747 | 1077.62 | 1567.43 | 0.69 | 0.18 | 0.21 |
| Neutral | E135R | 1732 | 815.91 | 921.41 | 0.89 | 0.14 | 0.13 |
| Down | E135N | 1734 | 4626.44 | 6661.57 | 0.69 | 0.79 | 0.91 |
| Neutral | E135H | 1730 | 6074.22 | 7339.12 | 0.83 | 1.03 | 1.01 |
| Down | E135Q | 1735 | 5656.70 | 7144.49 | 0.79 | 0.96 | 0.98 |
| Down | E135I | 1743 | 2140.04 | 5232.08 | 0.41 | 0.36 | 0.72 |
| Down | G136V | 1763 | 1813.26 | 2616.78 | 0.69 | 0.31 | 0.36 |
| Down | G136W | 1761 | 993.10 | 1243.43 | 0.80 | 0.17 | 0.17 |
| Down | G136D | 1748 | 3591.52 | 5274.69 | 0.68 | 0.61 | 0.72 |
| Down | G136M | 1760 | 3515.40 | 5367.37 | 0.65 | 0.60 | 0.74 |
| Down | G136N | 1754 | 3503.65 | 5155.57 | 0.68 | 0.60 | 0.71 |
| Down | G136A | 1765 | 3559.58 | 5813.34 | 0.61 | 0.60 | 0.80 |
| Down | G136L | 1764 | 2187.68 | 3866.01 | 0.57 | 0.37 | 0.53 |
| Down | G136C | 1753 | 905.15 | 1515.22 | 0.60 | 0.15 | 0.21 |
| Down | G136P | 1766 | 3234.60 | 4934.89 | 0.66 | 0.55 | 0.68 |
| Down | G136T | 1756 | 2555.79 | 3746.36 | 0.68 | 0.43 | 0.51 |
| Down | G136R | 1752 | 2716.62 | 4398.06 | 0.62 | 0.46 | 0.60 |
| Down | G136S | 1758 | 3375.11 | 4670.21 | 0.72 | 0.57 | 0.64 |
| Down | G136I | 1762 | 2006.39 | 3604.58 | 0.56 | 0.34 | 0.49 |
| Down | G136H | 1750 | 3564.72 | 4804.54 | 0.74 | 0.61 | 0.66 |
| Down | G136E | 1749 | 5583.49 | 7289.45 | 0.77 | 0.95 | 1.00 |
| Down | Q137A | 1784 | 3966.25 | 6312.83 | 0.63 | 0.75 | 0.85 |
| Down | Q137R | 1771 | 3671.71 | 6256.44 | 0.59 | 0.69 | 0.84 |
| Down | Q137G | 1777 | 4573.46 | 6739.55 | 0.68 | 0.86 | 0.91 |
| Down | Q137K | 1770 | 6317.49 | 8133.50 | 0.78 | 1.19 | 1.09 |
| Down | Q137H | 1769 | 5645.75 | 7063.96 | 0.80 | 1.06 | 0.95 |
| Down | Q137P | 1785 | 5676.99 | 7744.50 | 0.73 | 1.07 | 1.04 |
| Down | Q137S | 1776 | 5384.46 | 7395.46 | 0.73 | 1.01 | 1.00 |
| Down | Q137L | 1783 | 5870.03 | 8003.53 | 0.73 | 1.10 | 1.08 |
| Down | Q137W | 1780 | 3200.77 | 5519.86 | 0.58 | 0.60 | 0.74 |
| Down | Q137F | 1778 | 3505.51 | 5883.52 | 0.60 | 0.66 | 0.79 |
| Down | Q137T | 1774 | 6636.95 | 8394.25 | 0.79 | 1.25 | 1.13 |
| Down | Q137C | 1772 | 1924.03 | 2898.49 | 0.66 | 0.36 | 0.39 |
| Down | Q137Y | 1775 | 5307.87 | 7091.79 | 0.75 | 1.00 | 0.95 |
| Down | Q137N | 1773 | 5369.70 | 7661.25 | 0.70 | 1.01 | 1.03 |
| Down | Q137E | 1768 | 5683.74 | 7333.42 | 0.78 | 1.07 | 0.99 |
| Down | A138V | 1802 | 1926.65 | 3043.75 | 0.63 | 0.36 | 0.41 |
| Neutral | A138L | 1803 | 594.07 | 675.23 | 0.88 | 0.11 | 0.09 |
| Down | A138P | 1804 | 1481.25 | 2478.85 | 0.60 | 0.28 | 0.33 |
| Down | A138C | 1791 | 1603.91 | 2981.97 | 0.54 | 0.30 | 0.40 |
| Down | A138T | 1794 | 1740.56 | 2785.40 | 0.62 | 0.33 | 0.37 |
| Down | A138S | 1796 | 2042.67 | 2909.34 | 0.70 | 0.38 | 0.39 |
| Down | A138R | 1790 | 759.61 | 962.30 | 0.79 | 0.14 | 0.13 |
| Down | A138G | 1797 | 3108.95 | 4692.85 | 0.66 | 0.58 | 0.63 |
| Down | A138E | 1787 | 1450.57 | 2644.44 | 0.55 | 0.27 | 0.36 |
| Down | A138H | 1788 | 667.58 | 839.37 | 0.80 | 0.13 | 0.11 |
| Neutral | A138M | 1799 | 626.50 | 749.79 | 0.84 | 0.12 | 0.10 |
| Down | A138Q | 1793 | 1747.09 | 2754.75 | 0.63 | 0.33 | 0.37 |
| Down | A138I | 1801 | 1984.57 | 3124.09 | 0.64 | 0.37 | 0.42 |
| Neutral | A138D | 1786 | 601.71 | 673.39 | 0.89 | 0.11 | 0.09 |
| Neutral | A138W | 1800 | 595.15 | 681.04 | 0.87 | 0.11 | 0.09 |
| Neutral | D139R | 1808 | 639.90 | 725.74 | 0.88 | 0.12 | 0.10 |
| Neutral | D139V | 1820 | 733.94 | 879.96 | 0.83 | 0.14 | 0.12 |
| Down | D139M | 1817 | 820.44 | 1093.19 | 0.75 | 0.15 | 0.15 |
| Neutral | D139C | 1809 | 763.17 | 886.67 | 0.86 | 0.14 | 0.12 |
| Down | D139P | 1823 | 794.89 | 1048.41 | 0.76 | 0.15 | 0.14 |
| Down | D139S | 1814 | 1060.53 | 1350.12 | 0.79 | 0.20 | 0.18 |
| Neutral | D139L | 1821 | 802.45 | 923.25 | 0.87 | 0.15 | 0.12 |
| Neutral | D139I | 1819 | 759.45 | 884.92 | 0.86 | 0.14 | 0.12 |
| Down | D139H | 1806 | 1442.05 | 1944.83 | 0.74 | 0.27 | 0.26 |
| Down | D139A | 1822 | 899.50 | 1179.38 | 0.76 | 0.17 | 0.16 |
| Neutral | D139G | 1815 | 667.47 | 801.55 | 0.83 | 0.13 | 0.11 |
| Neutral | D139F | 1816 | 670.14 | 828.73 | 0.81 | 0.13 | 0.11 |
| Down | D139N | 1810 | 1743.46 | 2795.27 | 0.62 | 0.33 | 0.38 |
| Neutral | D139W | 1818 | 641.04 | 769.42 | 0.83 | 0.12 | 0.10 |
| Neutral | D139Y | 1813 | 643.83 | 701.07 | 0.92 | 0.12 | 0.09 |
| Down | D139E | 1805 | 4365.22 | 7664.89 | 0.57 | 0.48 | 1.01 |
| Neutral | I140D | 1824 | 447.31 | 470.26 | 0.95 | 0.08 | 0.06 |
| Neutral | I140K | 1827 | 470.80 | 510.28 | 0.92 | 0.08 | 0.07 |
| Neutral | I140A | 1841 | 521.91 | 583.80 | 0.89 | 0.09 | 0.08 |
| Neutral | I140G | 1835 | 514.54 | 519.88 | 0.99 | 0.09 | 0.07 |
| Neutral | I140C | 1829 | 552.10 | 550.46 | 1.00 | 0.10 | 0.07 |
| Neutral | I140Y | 1833 | 476.67 | 511.05 | 0.93 | 0.08 | 0.07 |
| Down | I140V | 1839 | 1483.60 | 2240.10 | 0.66 | 0.26 | 0.29 |
| Neutral | I140W | 1838 | 541.30 | 540.55 | 1.00 | 0.10 | 0.07 |
| Neutral | I140F | 1836 | 671.22 | 710.61 | 0.94 | 0.12 | 0.09 |
| Neutral | I140H | 1826 | 568.54 | 584.67 | 0.97 | 0.10 | 0.08 |
| Down | I140L | 1840 | 4551.18 | 6862.42 | 0.66 | 0.80 | 0.90 |
| Neutral | I140R | 1828 | 479.35 | 467.38 | 1.03 | 0.08 | 0.06 |
| Neutral | I140E | 1825 | 480.00 | 481.92 | 1.00 | 0.08 | 0.06 |
| Down | I140M | 1837 | 1888.65 | 2695.29 | 0.70 | 0.33 | 0.35 |
| Neutral | I140T | 1832 | 493.59 | 505.63 | 0.98 | 0.09 | 0.07 |
| Down | M141E | 1844 | 2661.78 | 3381.08 | 0.79 | 0.64 | 0.66 |
| Neutral | M141I | 1857 | 3206.64 | 3834.28 | 0.84 | 0.77 | 0.74 |
| Neutral | M141R | 1847 | 3645.85 | 4050.91 | 0.90 | 0.88 | 0.79 |
| Neutral | M141T | 1851 | 1916.97 | 2186.65 | 0.88 | 0.46 | 0.42 |
| Neutral | M141P | 1861 | 957.33 | 1027.91 | 0.93 | 0.23 | 0.20 |
| Neutral | M141S | 1853 | 2578.82 | 3190.11 | 0.81 | 0.62 | 0.62 |
| Neutral | M141C | 1848 | 1162.41 | 1355.08 | 0.86 | 0.28 | 0.26 |
| Down | M141L | 1859 | 3257.69 | 4218.46 | 0.77 | 0.79 | 0.82 |
| Down | M141A | 1860 | 2798.52 | 3561.95 | 0.79 | 0.68 | 0.69 |
| Down | M141D | 1843 | 1943.58 | 2586.12 | 0.75 | 0.47 | 0.50 |
| Neutral | M141W | 1856 | 3860.87 | 4822.22 | 0.80 | 0.93 | 0.94 |
| Neutral | M141G | 1854 | 1252.97 | 1525.59 | 0.82 | 0.30 | 0.30 |
| Neutral | M141H | 1845 | 2221.73 | 2624.41 | 0.85 | 0.54 | 0.51 |
| Neutral | M141Y | 1852 | 2117.90 | 2326.92 | 0.91 | 0.51 | 0.45 |
| Neutral | M141N | 1849 | 3446.02 | 4175.18 | 0.83 | 0.83 | 0.81 |
| Down | I142L | 1878 | 4079.65 | 6338.98 | 0.64 | 0.72 | 0.83 |
| Down | I142M | 1875 | 2514.92 | 3872.66 | 0.65 | 0.44 | 0.51 |
| Neutral | I142G | 1873 | 590.45 | 573.21 | 1.03 | 0.10 | 0.07 |
| Neutral | I142K | 1865 | 567.58 | 566.13 | 1.00 | 0.10 | 0.07 |
| Down | I142A | 1879 | 1102.77 | 1776.73 | 0.62 | 0.19 | 0.23 |
| Neutral | I142N | 1868 | 544.78 | 582.84 | 0.93 | 0.10 | 0.08 |
| Neutral | I142W | 1876 | 614.88 | 660.20 | 0.93 | 0.11 | 0.09 |
| Neutral | I142P | 1880 | 517.98 | 553.16 | 0.94 | 0.09 | 0.07 |
| Neutral | I142Q | 1869 | 561.05 | 579.03 | 0.97 | 0.10 | 0.08 |
| Neutral | I142Y | 1871 | 535.36 | 568.63 | 0.94 | 0.09 | 0.07 |
| Down | I142V | 1877 | 2412.99 | 3835.99 | 0.63 | 0.42 | 0.50 |
| Neutral | I142T | 1870 | 619.92 | 700.51 | 0.88 | 0.11 | 0.09 |
| Neutral | I142R | 1866 | 592.22 | 631.35 | 0.94 | 0.10 | 0.08 |
| Neutral | I142S | 1872 | 560.11 | 608.47 | 0.92 | 0.10 | 0.08 |
| Down | I142F | 1874 | 988.49 | 1616.93 | 0.61 | 0.17 | 0.21 |
| Neutral | S143P | 1899 | 681.44 | 714.91 | 0.95 | 0.13 | 0.10 |
| Down | S143C | 1886 | 1242.25 | 1638.96 | 0.76 | 0.23 | 0.22 |
| Neutral | S143E | 1882 | 679.14 | 698.14 | 0.97 | 0.13 | 0.09 |
| Down | S143G | 1891 | 2178.31 | 3221.72 | 0.68 | 0.41 | 0.43 |
| Down | S143H | 1883 | 1946.43 | 3055.74 | 0.64 | 0.37 | 0.41 |
| Down | S143R | 1885 | 5284.60 | 7026.38 | 0.75 | 0.99 | 0.95 |
| Down | S143L | 1897 | 1855.11 | 3143.09 | 0.59 | 0.35 | 0.42 |
| Down | S143Q | 1888 | 4008.07 | 5922.69 | 0.68 | 0.75 | 0.80 |
| Down | S143N | 1887 | 3447.12 | 4827.78 | 0.71 | 0.65 | 0.65 |
| Neutral | S143W | 1894 | 1164.49 | 1414.47 | 0.82 | 0.22 | 0.19 |
| Down | S143A | 1898 | 4862.16 | 6797.05 | 0.72 | 0.91 | 0.91 |
| Down | S143T | 1889 | 3510.83 | 4873.23 | 0.72 | 0.66 | 0.66 |
| Down | S143Y | 1890 | 2566.36 | 3755.42 | 0.68 | 0.48 | 0.51 |
| Down | S143M | 1893 | 3680.60 | 6112.93 | 0.60 | 0.69 | 0.82 |
| Neutral | S143I | 1895 | 6798.46 | 8447.06 | 0.80 | 1.28 | 1.14 |
| Neutral | F144K | 1903 | 683.92 | 723.08 | 0.95 | 0.13 | 0.10 |
| Neutral | F144M | 1912 | 727.58 | 785.61 | 0.93 | 0.14 | 0.11 |
| Neutral | F144E | 1901 | 684.55 | 697.38 | 0.98 | 0.13 | 0.09 |
| Neutral | F144S | 1910 | 711.27 | 779.76 | 0.91 | 0.13 | 0.10 |
| Neutral | F144L | 1916 | 668.14 | 725.88 | 0.92 | 0.13 | 0.10 |
| Down | F144W | 1913 | 3272.56 | 4375.61 | 0.75 | 0.62 | 0.59 |
| Neutral | F144P | 1918 | 658.07 | 729.61 | 0.90 | 0.12 | 0.10 |
| Neutral | F144R | 1904 | 633.36 | 704.49 | 0.90 | 0.12 | 0.09 |
| Neutral | F144N | 1906 | 648.28 | 686.56 | 0.94 | 0.12 | 0.09 |
| Neutral | F144C | 1905 | 656.21 | 698.34 | 0.94 | 0.12 | 0.09 |
| Neutral | F144G | 1911 | 641.29 | 662.20 | 0.97 | 0.12 | 0.09 |
| Neutral | F144T | 1908 | 704.60 | 804.24 | 0.88 | 0.13 | 0.11 |
| Neutral | F144Q | 1907 | 679.28 | 759.34 | 0.89 | 0.13 | 0.10 |
| Neutral | F144H | 1902 | 766.54 | 861.04 | 0.89 | 0.14 | 0.12 |
| Neutral | F144V | 1915 | 664.73 | 737.66 | 0.90 | 0.12 | 0.10 |
| Down | V145A | 1936 | 5042.62 | 7103.17 | 0.71 | 0.89 | 0.93 |
| Down | V145T | 1927 | 3518.22 | 5408.09 | 0.65 | 0.62 | 0.71 |
| Down | V145L | 1935 | 4048.83 | 6522.67 | 0.62 | 0.71 | 0.85 |
| Down | V145P | 1937 | 2148.04 | 3271.70 | 0.66 | 0.38 | 0.43 |
| Down | V145K | 1922 | 4566.52 | 6542.14 | 0.70 | 0.80 | 0.85 |
| Down | V145N | 1925 | 5756.42 | 8553.91 | 0.67 | 1.01 | 1.12 |
| Down | V145D | 1919 | 3249.52 | 5915.18 | 0.55 | 0.57 | 0.77 |
| Down | V145H | 1921 | 3868.79 | 6370.16 | 0.61 | 0.68 | 0.83 |
| Down | V145R | 1923 | 5093.69 | 7494.19 | 0.68 | 0.90 | 0.98 |
| Down | V145Q | 1926 | 4550.79 | 6385.09 | 0.71 | 0.80 | 0.83 |
| Down | V145S | 1929 | 5229.00 | 7486.54 | 0.70 | 0.92 | 0.98 |
| Down | V145G | 1930 | 2139.70 | 3072.06 | 0.70 | 0.38 | 0.40 |
| Down | V145W | 1933 | 1735.30 | 3046.73 | 0.57 | 0.31 | 0.40 |
| Down | V145C | 1924 | 1652.16 | 3231.89 | 0.51 | 0.29 | 0.42 |
| Down | V145E | 1920 | 4086.60 | 6893.09 | 0.59 | 0.72 | 0.90 |
| Down | R146T | 1945 | 4145.84 | 6737.53 | 0.62 | 0.78 | 0.91 |
| Down | R146L | 1954 | 2149.16 | 3444.38 | 0.62 | 0.40 | 0.46 |
| Down | R146N | 1943 | 4441.83 | 6346.03 | 0.70 | 0.83 | 0.85 |
| Neutral | R146H | 1940 | 2791.26 | 3298.03 | 0.85 | 0.52 | 0.44 |
| Down | R146Q | 1944 | 4232.35 | 6620.08 | 0.64 | 0.80 | 0.89 |
| Down | R146K | 1941 | 5360.91 | 7104.88 | 0.75 | 1.01 | 0.96 |
| Neutral | R146C | 1942 | 776.54 | 868.97 | 0.89 | 0.15 | 0.12 |
| Neutral | R146S | 1947 | 8627.00 | 9288.66 | 0.93 | 1.62 | 1.25 |
| Down | R146D | 1938 | 3803.07 | 5389.79 | 0.71 | 0.71 | 0.73 |
| Down | R146A | 1955 | 4939.79 | 6859.12 | 0.72 | 0.93 | 0.92 |
| Down | R146Y | 1946 | 3175.81 | 5447.89 | 0.58 | 0.60 | 0.73 |
| Neutral | R146P | 1956 | 3019.88 | 2923.15 | 1.03 | 0.57 | 0.39 |
| Down | R146V | 1953 | 3662.01 | 6193.78 | 0.59 | 0.69 | 0.83 |
| Down | R146E | 1939 | 2538.71 | 3832.21 | 0.66 | 0.48 | 0.52 |
| Down | R146F | 1949 | 1272.11 | 2074.69 | 0.61 | 0.24 | 0.28 |
| Neutral | G147R | 1961 | 7744.82 | 8412.88 | 0.92 | 1.45 | 1.25 |
| Neutral | G147F | 1968 | 7821.91 | 7899.45 | 0.99 | 1.47 | 1.18 |
| Neutral | G147I | 1971 | 1451.75 | 1461.30 | 0.99 | 0.27 | 0.22 |
| Down | G147L | 1973 | 1325.33 | 1787.45 | 0.74 | 0.25 | 0.27 |
| Neutral | G147A | 1974 | 2288.45 | 2655.58 | 0.86 | 0.43 | 0.40 |
| Down | G147E | 1958 | 1802.97 | 2340.36 | 0.77 | 0.34 | 0.35 |
| Neutral | G147H | 1959 | 6234.09 | 7432.44 | 0.84 | 1.17 | 1.11 |
| Down | G147W | 1970 | 5140.21 | 6807.71 | 0.76 | 0.96 | 1.01 |
| Down | G147T | 1965 | 5531.13 | 7240.25 | 0.76 | 1.04 | 1.08 |
| Neutral | G147C | 1962 | 6950.51 | 7385.23 | 0.94 | 1.30 | 1.10 |
| Down | G147S | 1967 | 3071.28 | 3887.91 | 0.79 | 0.58 | 0.58 |
| Neutral | G147V | 1972 | 4516.19 | 5576.27 | 0.81 | 0.85 | 0.83 |
| Neutral | G147Q | 1964 | 6879.67 | 7686.98 | 0.89 | 1.29 | 1.14 |
| Neutral | G147M | 1969 | 6059.54 | 7381.69 | 0.82 | 1.14 | 1.10 |
| Up | G147P | 1975 | 494.94 | 392.93 | 1.26 | 0.07 | 0.05 |
| Neutral | D148R | 1979 | 5874.44 | 7069.98 | 0.83 | 1.10 | 1.05 |
| Down | D148I | 1990 | 4934.66 | 6621.95 | 0.75 | 0.93 | 0.99 |
| Neutral | D148T | 1983 | 5534.68 | 6527.74 | 0.85 | 1.04 | 0.97 |
| Neutral | D148G | 1986 | 5545.91 | 6487.49 | 0.85 | 1.04 | 0.97 |
| Neutral | D148L | 1992 | 1738.87 | 2136.70 | 0.81 | 0.33 | 0.32 |
| Neutral | D148V | 1991 | 4521.62 | 5307.74 | 0.85 | 0.85 | 0.79 |
| Neutral | D148A | 1993 | 7276.18 | 7955.06 | 0.91 | 1.36 | 1.18 |
| Down | D148W | 1989 | 3622.09 | 4894.24 | 0.74 | 0.68 | 0.73 |
| Neutral | D148P | 1994 | 7311.56 | 7404.67 | 0.99 | 1.37 | 1.10 |
| Neutral | D148S | 1985 | 3190.82 | 3936.89 | 0.81 | 0.60 | 0.59 |
| Down | D148K | 1978 | 2414.59 | 3115.25 | 0.78 | 0.45 | 0.46 |
| Down | D148E | 1976 | 2457.68 | 3171.30 | 0.77 | 0.46 | 0.47 |
| Neutral | D148M | 1988 | 928.12 | 1156.79 | 0.80 | 0.17 | 0.17 |
| Neutral | D148N | 1981 | 5136.96 | 5810.99 | 0.88 | 0.96 | 0.87 |
| Neutral | D148C | 1980 | 2617.98 | 3259.70 | 0.80 | 0.49 | 0.49 |
| Neutral | H149W | 2008 | 578.88 | 610.12 | 0.95 | 0.10 | 0.08 |
| Neutral | H149A | 2012 | 574.51 | 606.50 | 0.95 | 0.10 | 0.08 |
| Neutral | H149L | 2011 | 562.23 | 585.57 | 0.96 | 0.10 | 0.08 |
| Neutral | H149C | 1999 | 532.13 | 536.84 | 0.99 | 0.09 | 0.07 |
| Neutral | H149Q | 2001 | 547.46 | 565.60 | 0.97 | 0.10 | 0.07 |
| Neutral | H149T | 2002 | 545.99 | 567.99 | 0.96 | 0.10 | 0.07 |
| Neutral | H149Y | 2003 | 553.52 | 575.93 | 0.96 | 0.10 | 0.08 |
| Neutral | H149P | 2013 | 502.45 | 522.17 | 0.96 | 0.09 | 0.07 |
| Neutral | H149V | 2010 | 515.00 | 521.68 | 0.99 | 0.09 | 0.07 |
| Neutral | H149R | 1998 | 481.87 | 534.48 | 0.90 | 0.08 | 0.07 |
| Neutral | H149G | 2005 | 492.47 | 525.75 | 0.94 | 0.09 | 0.07 |
| Neutral | H149E | 1996 | 476.14 | 472.99 | 1.01 | 0.08 | 0.06 |
| Neutral | H149S | 2004 | 481.76 | 508.54 | 0.95 | 0.08 | 0.07 |
| Neutral | H149I | 2009 | 510.38 | 533.47 | 0.96 | 0.09 | 0.07 |
| Neutral | H149N | 2000 | 542.00 | 555.29 | 0.98 | 0.10 | 0.07 |
| Neutral | R150S | 50 | 4221.17 | 4687.08 | 0.90 | 0.58 | 0.66 |
| Neutral | R150E | 42 | 9557.47 | 8282.03 | 1.15 | 1.31 | 1.17 |
| Neutral | R150G | 51 | 10002.15 | 8470.68 | 1.18 | 1.37 | 1.19 |
| Neutral | R150M | 53 | 8614.46 | 8306.99 | 1.04 | 1.18 | 1.17 |
| Up | R150P | 59 | 2291.14 | 828.28 | 2.77 | 0.31 | 0.12 |
| Neutral | R150T | 48 | 9808.17 | 8294.42 | 1.18 | 1.35 | 1.17 |
| Neutral | R150W | 54 | 8373.53 | 7574.51 | 1.11 | 1.15 | 1.07 |
| Neutral | R150A | 58 | 10175.13 | 8554.82 | 1.19 | 1.40 | 1.20 |
| Neutral | R150N | 46 | 10191.05 | 8571.32 | 1.19 | 1.40 | 1.21 |
| Neutral | R150K | 44 | 9471.29 | 8346.99 | 1.13 | 1.30 | 1.18 |
| Neutral | R150L | 57 | 9751.98 | 8444.63 | 1.15 | 1.34 | 1.19 |
| Neutral | R150V | 56 | 6869.28 | 6604.61 | 1.04 | 1.20 | 1.30 |
| Neutral | R150D | 41 | 7230.41 | 6033.28 | 1.20 | 1.26 | 1.19 |
| Down | R150I | 55 | 3120.05 | 4082.34 | 0.76 | 0.39 | 0.55 |
| Neutral | R150H | 43 | 8281.04 | 8056.17 | 1.03 | 1.05 | 1.08 |
| Neutral | D151R | 63 | 576.24 | 545.21 | 1.06 | 0.11 | 0.08 |
| Neutral | D151F | 71 | 626.76 | 601.08 | 1.04 | 0.12 | 0.09 |
| Neutral | D151P | 78 | 670.23 | 610.90 | 1.10 | 0.13 | 0.09 |
| Neutral | D151W | 73 | 691.38 | 656.86 | 1.05 | 0.13 | 0.10 |
| Neutral | D151Q | 66 | 634.58 | 619.91 | 1.02 | 0.12 | 0.09 |
| Neutral | D151L | 76 | 638.24 | 627.06 | 1.02 | 0.12 | 0.09 |
| Neutral | D151S | 69 | 612.74 | 579.48 | 1.06 | 0.11 | 0.09 |
| Up | D151G | 70 | 1073.32 | 733.89 | 1.46 | 0.20 | 0.11 |
| Neutral | D151A | 77 | 635.33 | 608.12 | 1.04 | 0.12 | 0.09 |
| Neutral | D151N | 65 | 631.72 | 612.41 | 1.03 | 0.12 | 0.09 |
| Neutral | D151K | 62 | 648.63 | 635.47 | 1.02 | 0.12 | 0.09 |
| Neutral | D151Y | 68 | 744.90 | 724.43 | 1.03 | 0.14 | 0.11 |
| Neutral | D151V | 75 | 586.23 | 585.19 | 1.00 | 0.11 | 0.09 |
| Neutral | D151T | 67 | 589.61 | 587.04 | 1.00 | 0.11 | 0.09 |
| Up | D151M | 72 | 2945.18 | 605.81 | 4.86 | 0.55 | 0.09 |
| Neutral | N152G | 2024 | 9852.70 | 8326.15 | 1.18 | 1.35 | 1.17 |
| Neutral | N152C | 2019 | 6322.44 | 7849.36 | 0.81 | 0.87 | 1.11 |
| Neutral | N152F | 2025 | 9762.67 | 8643.34 | 1.13 | 1.34 | 1.22 |
| Neutral | N152L | 2030 | 9176.14 | 8510.93 | 1.08 | 1.26 | 1.20 |
| Neutral | N152P | 2032 | 7767.98 | 7907.66 | 0.98 | 1.07 | 1.11 |
| Neutral | N152R | 2018 | 8348.81 | 7893.25 | 1.06 | 1.14 | 1.11 |
| Down | N152H | 2016 | 3318.01 | 4257.74 | 0.78 | 0.46 | 0.60 |
| Neutral | N152T | 2021 | 7155.46 | 7180.94 | 1.00 | 0.98 | 1.01 |
| Neutral | N152Y | 2022 | 8343.23 | 7992.79 | 1.04 | 1.14 | 1.13 |
| Neutral | N152K | 2017 | 7868.59 | 7956.82 | 0.99 | 1.08 | 1.12 |
| Neutral | N152D | 2014 | 10221.41 | 8616.74 | 1.19 | 1.40 | 1.21 |
| Neutral | N152W | 2027 | 5717.25 | 7086.82 | 0.81 | 0.78 | 1.00 |
| Neutral | N152I | 2028 | 10161.44 | 8648.89 | 1.17 | 1.39 | 1.22 |
| Neutral | N152A | 2031 | 6669.94 | 5660.16 | 1.18 | 1.17 | 1.12 |
| Down | N152S | 2023 | 4607.85 | 8096.31 | 0.57 | 0.58 | 1.08 |
| Neutral | S153I | 549 | 2873.12 | 2619.74 | 1.10 | 0.39 | 0.37 |
| Neutral | S153R | 539 | 4799.14 | 4905.35 | 0.98 | 0.66 | 0.69 |
| Neutral | S153K | 538 | 1002.00 | 1199.78 | 0.84 | 0.14 | 0.17 |
| Down | S153C | 540 | 1934.36 | 3181.56 | 0.61 | 0.27 | 0.45 |
| Neutral | S153G | 545 | 6175.12 | 6148.70 | 1.00 | 0.85 | 0.87 |
| Neutral | S153H | 537 | 9759.94 | 8837.02 | 1.10 | 1.34 | 1.24 |
| Neutral | S153L | 551 | 1285.63 | 1575.63 | 0.82 | 0.18 | 0.22 |
| Neutral | S153V | 550 | 8993.77 | 8047.48 | 1.12 | 1.23 | 1.13 |
| Neutral | S153T | 543 | 10530.07 | 8798.72 | 1.20 | 1.44 | 1.24 |
| Neutral | S153P | 553 | 9442.29 | 8513.31 | 1.11 | 1.29 | 1.20 |
| Neutral | S153A | 552 | 644.02 | 569.42 | 1.13 | 0.09 | 0.08 |
| Neutral | S153F | 546 | 10583.60 | 8979.56 | 1.18 | 1.45 | 1.26 |
| Neutral | S153D | 535 | 8477.40 | 8662.71 | 0.98 | 1.16 | 1.22 |
| Neutral | S153Q | 542 | 6654.12 | 7947.98 | 0.84 | 0.91 | 1.12 |
| Neutral | S153Y | 544 | 10164.62 | 8758.66 | 1.16 | 1.39 | 1.23 |
| Neutral | P154V | 2049 | 1257.75 | 1273.72 | 0.99 | 0.24 | 0.19 |
| Up | P154W | 2047 | 3838.51 | 2992.41 | 1.28 | 0.72 | 0.45 |
| Neutral | P154L | 2050 | 5826.55 | 6782.07 | 0.86 | 1.09 | 1.01 |
| Neutral | P154C | 2038 | 3097.69 | 3692.51 | 0.84 | 0.58 | 0.55 |
| Neutral | P154S | 2043 | 7417.09 | 8143.14 | 0.91 | 1.39 | 1.21 |
| Up | P154K | 2036 | 2407.68 | 1639.28 | 1.47 | 0.45 | 0.24 |
| Neutral | P154I | 2048 | 7298.30 | 7549.63 | 0.97 | 1.37 | 1.12 |
| Down | P154A | 2051 | 2043.76 | 2680.62 | 0.76 | 0.38 | 0.40 |
| Neutral | P154T | 2041 | 1763.73 | 2075.38 | 0.85 | 0.33 | 0.31 |
| Neutral | P154H | 2035 | 1072.51 | 1021.04 | 1.05 | 0.20 | 0.15 |
| Neutral | P154Y | 2042 | 946.74 | 834.91 | 1.13 | 0.18 | 0.12 |
| Neutral | P154N | 2039 | 1122.04 | 1229.36 | 0.91 | 0.21 | 0.18 |
| Neutral | P154F | 2045 | 845.38 | 757.86 | 1.12 | 0.16 | 0.11 |
| Neutral | P154R | 2037 | 1975.77 | 1915.36 | 1.03 | 0.37 | 0.29 |
| Neutral | P154Q | 2040 | 2228.56 | 2374.11 | 0.94 | 0.42 | 0.35 |
| Neutral | F155S | 89 | 894.19 | 833.57 | 1.07 | 0.17 | 0.12 |
| Neutral | F155T | 87 | 1137.71 | 1084.01 | 1.05 | 0.21 | 0.16 |
| Neutral | F155G | 90 | 807.68 | 718.82 | 1.12 | 0.15 | 0.11 |
| Neutral | F155N | 85 | 715.78 | 688.72 | 1.04 | 0.13 | 0.10 |
| Neutral | F155R | 83 | 702.49 | 695.27 | 1.01 | 0.13 | 0.10 |
| Neutral | F155W | 92 | 715.40 | 693.53 | 1.03 | 0.13 | 0.10 |
| Up | F155L | 95 | 1322.13 | 864.19 | 1.53 | 0.25 | 0.13 |
| Neutral | F155Q | 86 | 731.28 | 738.56 | 0.99 | 0.14 | 0.11 |
| Neutral | F155M | 91 | 8252.43 | 8163.55 | 1.01 | 1.55 | 1.22 |
| Neutral | F155E | 80 | 685.90 | 683.12 | 1.00 | 0.13 | 0.10 |
| Up | F155A | 96 | 1250.93 | 760.12 | 1.65 | 0.23 | 0.11 |
| Neutral | F155P | 97 | 666.89 | 658.85 | 1.01 | 0.13 | 0.10 |
| Neutral | F155V | 94 | 681.25 | 679.13 | 1.00 | 0.13 | 0.10 |
| Neutral | F155H | 81 | 696.34 | 683.06 | 1.02 | 0.13 | 0.10 |
| Neutral | F155Y | 88 | 676.73 | 629.34 | 1.08 | 0.13 | 0.09 |
| Up | D156H | 99 | 2722.09 | 2081.55 | 1.31 | 0.51 | 0.31 |
| Up | D156L | 114 | 2548.30 | 1597.53 | 1.60 | 0.48 | 0.24 |
| Neutral | D156E | 98 | 6300.50 | 6871.25 | 0.92 | 1.18 | 1.02 |
| Up | D156A | 115 | 2679.29 | 1734.45 | 1.54 | 0.50 | 0.26 |
| Up | D156W | 111 | 1575.39 | 1268.36 | 1.24 | 0.30 | 0.19 |
| Neutral | D156C | 102 | 2842.85 | 2704.37 | 1.05 | 0.53 | 0.40 |
| Neutral | D156P | 116 | 1002.13 | 998.80 | 1.00 | 0.19 | 0.15 |
| Up | D156V | 113 | 1400.88 | 766.80 | 1.83 | 0.26 | 0.11 |
| Up | D156K | 100 | 1292.89 | 966.62 | 1.34 | 0.24 | 0.14 |
| Neutral | D156S | 107 | 969.70 | 837.57 | 1.16 | 0.18 | 0.12 |
| Neutral | D156G | 108 | 794.14 | 709.60 | 1.12 | 0.15 | 0.11 |
| Up | D156T | 105 | 2871.09 | 1843.03 | 1.56 | 0.54 | 0.27 |
| Neutral | D156Y | 106 | 3406.50 | 3113.95 | 1.09 | 0.64 | 0.46 |
| Up | D156R | 101 | 2431.23 | 1545.89 | 1.57 | 0.46 | 0.23 |
| Up | D156M | 110 | 817.96 | 502.82 | 1.63 | 0.12 | 0.07 |
| Up | G157K | 2055 | 677.09 | 562.66 | 1.20 | 0.09 | 0.08 |
| Neutral | G157D | 2052 | 603.28 | 513.64 | 1.17 | 0.08 | 0.07 |
| Neutral | G157F | 2064 | 9535.19 | 8450.24 | 1.13 | 1.31 | 1.19 |
| Up | G157R | 2056 | 704.56 | 540.98 | 1.30 | 0.10 | 0.08 |
| Neutral | G157H | 2054 | 608.42 | 567.38 | 1.07 | 0.08 | 0.08 |
| Up | G157L | 2069 | 582.39 | 476.09 | 1.22 | 0.08 | 0.07 |
| Up | G157N | 2059 | 721.55 | 534.46 | 1.35 | 0.10 | 0.08 |
| Up | G157Y | 2062 | 654.13 | 541.41 | 1.21 | 0.09 | 0.08 |
| Up | G157S | 2063 | 924.62 | 596.70 | 1.55 | 0.13 | 0.08 |
| Up | G157T | 2061 | 669.55 | 551.99 | 1.21 | 0.09 | 0.08 |
| Up | G157A | 2070 | 861.29 | 552.54 | 1.56 | 0.12 | 0.08 |
| Up | G157Q | 2060 | 655.49 | 522.72 | 1.25 | 0.09 | 0.07 |
| Neutral | G157P | 2071 | 635.63 | 591.49 | 1.07 | 0.09 | 0.08 |
| Neutral | G157V | 2068 | 654.45 | 573.19 | 1.14 | 0.09 | 0.08 |
| Neutral | G157M | 2065 | 716.52 | 615.65 | 1.16 | 0.10 | 0.09 |
| Neutral | P158S | 2082 | 7974.07 | 7118.62 | 1.12 | 1.09 | 1.00 |
| Neutral | P158Y | 2081 | 7544.63 | 6885.81 | 1.10 | 1.03 | 0.97 |
| Neutral | P158R | 2076 | 7142.54 | 6214.55 | 1.15 | 0.98 | 0.88 |
| Up | P158L | 2089 | 9290.77 | 6775.04 | 1.37 | 1.27 | 0.95 |
| Neutral | P158V | 2088 | 10642.99 | 8919.30 | 1.19 | 1.46 | 1.26 |
| Up | P158C | 2077 | 6284.97 | 4792.49 | 1.31 | 0.86 | 0.67 |
| Neutral | P158A | 2090 | 9579.29 | 8514.00 | 1.13 | 1.31 | 1.20 |
| Up | P158W | 2086 | 5175.38 | 3078.22 | 1.68 | 0.71 | 0.43 |
| Neutral | P158I | 2087 | 10312.96 | 8597.26 | 1.20 | 1.41 | 1.21 |
| Up | P158F | 2084 | 6595.54 | 4090.71 | 1.61 | 0.90 | 0.58 |
| Up | P158Q | 2079 | 10928.51 | 8709.20 | 1.25 | 1.50 | 1.23 |
| Neutral | P158T | 2080 | 4204.23 | 3507.76 | 1.20 | 0.53 | 0.47 |
| Neutral | P158G | 2083 | 6277.86 | 5496.27 | 1.14 | 0.79 | 0.73 |
| Neutral | P158K | 2075 | 6860.82 | 6680.30 | 1.03 | 0.87 | 0.89 |
| Neutral | P158N | 2078 | 3656.04 | 3874.48 | 0.94 | 0.46 | 0.52 |
| Up | P158D | 2072 | 8959.02 | 7355.10 | 1.22 | 0.98 | 0.96 |
| Neutral | G159R | 121 | 6441.49 | 5914.02 | 1.09 | 0.88 | 0.83 |
| Neutral | G159S | 127 | 6594.46 | 6573.14 | 1.00 | 0.90 | 0.93 |
| Neutral | G159Q | 124 | 3996.96 | 4391.10 | 0.91 | 0.55 | 0.62 |
| Neutral | G159P | 135 | 596.30 | 564.24 | 1.06 | 0.08 | 0.08 |
| Up | G159V | 132 | 2453.98 | 732.46 | 3.35 | 0.34 | 0.10 |
| Neutral | G159K | 120 | 554.74 | 515.44 | 1.08 | 0.08 | 0.07 |
| Neutral | G159A | 134 | 5157.14 | 4685.20 | 1.10 | 0.71 | 0.66 |
| Up | G159Y | 126 | 1029.19 | 752.76 | 1.37 | 0.14 | 0.11 |
| Neutral | G159E | 118 | 4327.74 | 4027.23 | 1.07 | 0.59 | 0.57 |
| Up | G159T | 125 | 5059.91 | 1734.12 | 2.92 | 0.69 | 0.24 |
| Up | G159M | 129 | 5905.06 | 4874.00 | 1.21 | 0.75 | 0.65 |
| Neutral | G159I | 131 | 5725.99 | 5357.20 | 1.07 | 0.72 | 0.72 |
| Neutral | G159W | 130 | 6787.40 | 6287.71 | 1.08 | 0.86 | 0.84 |
| Neutral | G159L | 133 | 8231.62 | 7638.64 | 1.08 | 1.04 | 1.02 |
| Neutral | G159C | 122 | 2897.77 | 3053.86 | 0.95 | 0.37 | 0.41 |
| Down | G160A | 2108 | 2080.01 | 2823.12 | 0.74 | 0.60 | 0.58 |
| Down | G160H | 2093 | 2001.10 | 3085.22 | 0.65 | 0.57 | 0.63 |
| Down | G160N | 2097 | 3546.69 | 5339.11 | 0.66 | 1.02 | 1.09 |
| Neutral | G160W | 2104 | 4334.72 | 3946.12 | 1.10 | 1.24 | 0.80 |
| Down | G160R | 2095 | 2347.11 | 3791.36 | 0.62 | 0.67 | 0.77 |
| Neutral | G160P | 2109 | 1047.77 | 929.25 | 1.13 | 0.30 | 0.19 |
| Neutral | G160I | 2105 | 1794.48 | 1596.11 | 1.12 | 0.51 | 0.33 |
| Down | G160M | 2103 | 2506.95 | 3576.91 | 0.70 | 0.72 | 0.73 |
| Neutral | G160C | 2096 | 580.68 | 627.99 | 0.92 | 0.17 | 0.13 |
| Down | G160Q | 2098 | 4740.98 | 6839.68 | 0.69 | 1.36 | 1.39 |
| Neutral | G160V | 2106 | 3284.36 | 3030.37 | 1.08 | 0.94 | 0.62 |
| Down | G160S | 2101 | 2991.02 | 4281.08 | 0.70 | 0.86 | 0.87 |
| Neutral | G160E | 2092 | 3899.28 | 4071.63 | 0.96 | 1.12 | 0.83 |
| Down | G160L | 2107 | 3396.11 | 4411.61 | 0.77 | 0.97 | 0.90 |
| Neutral | G160T | 2099 | 3844.32 | 3943.21 | 0.97 | 1.10 | 0.80 |
| Down | N161S | 2119 | 1251.34 | 2417.50 | 0.52 | 0.36 | 0.49 |
| Down | N161C | 2115 | 1591.15 | 2710.58 | 0.59 | 0.46 | 0.55 |
| Down | N161L | 2126 | 4840.46 | 7275.68 | 0.67 | 1.39 | 1.48 |
| Neutral | N161R | 2114 | 6437.08 | 7915.53 | 0.81 | 1.85 | 1.61 |
| Down | N161G | 2120 | 3755.93 | 6728.88 | 0.56 | 1.08 | 1.37 |
| Down | N161W | 2123 | 3135.58 | 3994.07 | 0.79 | 0.90 | 0.81 |
| Down | N161Y | 2118 | 5507.52 | 7319.79 | 0.75 | 1.58 | 1.49 |
| Down | N161E | 2111 | 5410.44 | 8192.46 | 0.66 | 1.55 | 1.67 |
| Down | N161P | 2128 | 1231.02 | 1593.36 | 0.77 | 0.35 | 0.32 |
| Neutral | N161T | 2117 | 7464.29 | 9082.12 | 0.82 | 2.14 | 1.85 |
| Down | N161H | 2112 | 2727.71 | 5034.74 | 0.54 | 0.78 | 1.03 |
| Neutral | N161I | 2124 | 8070.21 | 9914.56 | 0.81 | 2.31 | 2.02 |
| Down | N161V | 2125 | 5238.40 | 7429.22 | 0.71 | 1.50 | 1.51 |
| Down | N161F | 2121 | 3890.45 | 6624.80 | 0.59 | 1.12 | 1.35 |
| Down | N161Q | 2116 | 4690.72 | 7412.73 | 0.63 | 1.35 | 1.51 |
| Neutral | L162A | 2146 | 584.17 | 505.94 | 1.15 | 0.17 | 0.10 |
| Neutral | L162G | 2140 | 582.48 | 602.57 | 0.97 | 0.17 | 0.12 |
| Neutral | L162C | 2134 | 475.91 | 466.85 | 1.02 | 0.14 | 0.10 |
| Neutral | L162P | 2147 | 514.26 | 519.71 | 0.99 | 0.15 | 0.11 |
| Neutral | L162R | 2133 | 492.19 | 498.99 | 0.99 | 0.14 | 0.10 |
| Down | L162I | 2144 | 2948.11 | 4018.68 | 0.73 | 0.85 | 0.82 |
| Neutral | L162S | 2139 | 473.63 | 459.28 | 1.03 | 0.14 | 0.09 |
| Neutral | L162D | 2129 | 512.72 | 487.18 | 1.05 | 0.15 | 0.10 |
| Neutral | L162M | 2142 | 1013.31 | 1138.86 | 0.89 | 0.29 | 0.23 |
| Neutral | L162E | 2130 | 563.63 | 631.85 | 0.89 | 0.16 | 0.13 |
| Neutral | L162T | 2137 | 473.46 | 477.00 | 0.99 | 0.14 | 0.10 |
| Neutral | L162Y | 2138 | 484.26 | 519.58 | 0.93 | 0.14 | 0.11 |
| Neutral | L162F | 2141 | 484.37 | 469.30 | 1.03 | 0.14 | 0.10 |
| Neutral | L162W | 2143 | 463.12 | 457.12 | 1.01 | 0.13 | 0.09 |
| Neutral | L162Q | 2136 | 480.75 | 481.03 | 1.00 | 0.14 | 0.10 |
| Neutral | A163R | 2152 | 562.68 | 563.06 | 1.00 | 0.16 | 0.11 |
| Neutral | A163G | 2159 | 819.22 | 999.88 | 0.82 | 0.23 | 0.20 |
| Neutral | A163Y | 2157 | 562.12 | 549.69 | 1.02 | 0.16 | 0.11 |
| Neutral | A163P | 2166 | 557.10 | 559.72 | 1.00 | 0.16 | 0.11 |
| Neutral | A163S | 2158 | 572.70 | 542.75 | 1.06 | 0.16 | 0.11 |
| Neutral | A163L | 2165 | 532.98 | 539.88 | 0.99 | 0.15 | 0.11 |
| Neutral | A163C | 2153 | 528.01 | 546.64 | 0.97 | 0.15 | 0.11 |
| Neutral | A163K | 2151 | 510.99 | 502.63 | 1.02 | 0.15 | 0.10 |
| Neutral | A163V | 2164 | 567.33 | 572.66 | 0.99 | 0.16 | 0.12 |
| Down | A163F | 2160 | 931.85 | 1182.48 | 0.79 | 0.27 | 0.24 |
| Neutral | A163E | 2149 | 560.80 | 539.21 | 1.04 | 0.16 | 0.11 |
| Neutral | A163T | 2156 | 538.98 | 537.66 | 1.00 | 0.15 | 0.11 |
| Neutral | A163Q | 2155 | 586.94 | 586.24 | 1.00 | 0.17 | 0.12 |
| Neutral | A163I | 2163 | 554.29 | 579.47 | 0.96 | 0.16 | 0.12 |
| Neutral | A163N | 2154 | 575.87 | 580.49 | 0.99 | 0.17 | 0.12 |
| Neutral | H164L | 2183 | 547.21 | 565.25 | 0.97 | 0.16 | 0.12 |
| Neutral | H164M | 2179 | 552.91 | 590.51 | 0.94 | 0.16 | 0.12 |
| Neutral | H164K | 2169 | 575.53 | 589.33 | 0.98 | 0.17 | 0.12 |
| Neutral | H164P | 2185 | 573.34 | 570.59 | 1.00 | 0.16 | 0.12 |
| Neutral | H164C | 2171 | 551.45 | 576.69 | 0.96 | 0.16 | 0.12 |
| Neutral | H164R | 2170 | 558.91 | 553.87 | 1.01 | 0.16 | 0.11 |
| Neutral | H164A | 2184 | 549.93 | 598.96 | 0.92 | 0.16 | 0.12 |
| Neutral | H164V | 2182 | 567.08 | 579.35 | 0.98 | 0.16 | 0.12 |
| Down | H164S | 2176 | 4849.81 | 6939.34 | 0.70 | 1.39 | 1.41 |
| Down | H164N | 2172 | 437.45 | 585.42 | 0.75 | 0.13 | 0.12 |
| Neutral | H164G | 2177 | 545.54 | 547.89 | 1.00 | 0.16 | 0.11 |
| Neutral | H164F | 2178 | 540.67 | 537.69 | 1.01 | 0.16 | 0.11 |
| Neutral | H164Y | 2175 | 558.66 | 548.15 | 1.02 | 0.16 | 0.11 |
| Neutral | H164Q | 2173 | 566.62 | 555.39 | 1.02 | 0.16 | 0.11 |
| Neutral | H164E | 2168 | 569.92 | 612.16 | 0.93 | 0.16 | 0.12 |
| Neutral | A165W | 2200 | 583.56 | 591.99 | 0.99 | 0.17 | 0.12 |
| Neutral | A165V | 2202 | 560.38 | 564.19 | 0.99 | 0.16 | 0.11 |
| Down | A165G | 2197 | 445.09 | 575.94 | 0.77 | 0.13 | 0.12 |
| Neutral | A165K | 2189 | 537.18 | 537.57 | 1.00 | 0.15 | 0.11 |
| Neutral | A165L | 2203 | 552.58 | 553.45 | 1.00 | 0.16 | 0.11 |
| Neutral | A165P | 2204 | 535.50 | 554.41 | 0.97 | 0.15 | 0.11 |
| Down | A165Q | 2193 | 983.84 | 1344.06 | 0.73 | 0.28 | 0.27 |
| Neutral | A165D | 2186 | 534.17 | 577.13 | 0.93 | 0.15 | 0.12 |
| Neutral | A165H | 2188 | 515.90 | 536.85 | 0.96 | 0.15 | 0.11 |
| Neutral | A165F | 2198 | 493.42 | 496.39 | 0.99 | 0.14 | 0.10 |
| Down | A165S | 2196 | 390.18 | 578.00 | 0.68 | 0.11 | 0.12 |
| Neutral | A165T | 2194 | 506.15 | 502.78 | 1.01 | 0.15 | 0.10 |
| Neutral | A165R | 2190 | 485.08 | 477.19 | 1.02 | 0.14 | 0.10 |
| Neutral | A165N | 2192 | 509.08 | 499.01 | 1.02 | 0.15 | 0.10 |
| Neutral | A165M | 2199 | 473.24 | 523.60 | 0.90 | 0.14 | 0.11 |
| Neutral | F166G | 2216 | 623.89 | 586.56 | 1.06 | 0.11 | 0.08 |
| Neutral | F166S | 2215 | 724.53 | 695.67 | 1.04 | 0.12 | 0.10 |
| Neutral | F166L | 2221 | 760.25 | 829.02 | 0.92 | 0.13 | 0.12 |
| Neutral | F166V | 2220 | 552.68 | 564.25 | 0.98 | 0.09 | 0.08 |
| Neutral | F166P | 2223 | 530.80 | 562.94 | 0.94 | 0.09 | 0.08 |
| Neutral | F166N | 2211 | 613.07 | 589.89 | 1.04 | 0.10 | 0.08 |
| Neutral | F166R | 2209 | 534.62 | 543.15 | 0.98 | 0.09 | 0.08 |
| Neutral | F166A | 2222 | 638.77 | 712.81 | 0.90 | 0.11 | 0.10 |
| Neutral | F166K | 2208 | 598.42 | 615.59 | 0.97 | 0.10 | 0.09 |
| Neutral | F166H | 2207 | 2770.43 | 2606.89 | 1.06 | 0.47 | 0.37 |
| Neutral | F166W | 2218 | 8234.80 | 8549.89 | 0.96 | 1.40 | 1.20 |
| Neutral | F166I | 2219 | 617.86 | 613.36 | 1.01 | 0.10 | 0.09 |
| Neutral | F166M | 2217 | 537.05 | 571.21 | 0.94 | 0.09 | 0.08 |
| Neutral | F166C | 2210 | 661.10 | 639.33 | 1.03 | 0.11 | 0.09 |
| Neutral | F166E | 2206 | 616.99 | 582.48 | 1.06 | 0.10 | 0.08 |
| Neutral | Q167D | 2224 | 4883.56 | 4579.11 | 1.07 | 0.83 | 0.64 |
| Neutral | Q167R | 2228 | 7660.88 | 8025.72 | 0.95 | 1.30 | 1.12 |
| Neutral | Q167A | 2241 | 8466.37 | 8182.70 | 1.03 | 1.44 | 1.15 |
| Neutral | Q167S | 2233 | 7915.08 | 8512.14 | 0.93 | 1.34 | 1.19 |
| Neutral | Q167F | 2235 | 8209.07 | 8535.93 | 0.96 | 1.39 | 1.20 |
| Down | Q167Y | 2232 | 5687.17 | 7642.43 | 0.74 | 0.96 | 1.07 |
| Neutral | Q167P | 2242 | 7513.70 | 8011.11 | 0.94 | 1.27 | 1.12 |
| Neutral | Q167T | 2231 | 7772.59 | 8173.09 | 0.95 | 1.32 | 1.15 |
| Neutral | Q167V | 2239 | 7867.97 | 8191.44 | 0.96 | 1.33 | 1.15 |
| Neutral | Q167L | 2240 | 7174.37 | 7937.04 | 0.90 | 1.22 | 1.11 |
| Neutral | Q167M | 2236 | 8005.59 | 8974.74 | 0.89 | 1.36 | 1.26 |
| Down | Q167N | 2230 | 3612.25 | 5004.93 | 0.72 | 0.61 | 0.70 |
| Neutral | Q167G | 2234 | 6671.99 | 7782.93 | 0.86 | 1.13 | 1.09 |
| Neutral | Q167K | 2227 | 6453.33 | 7646.48 | 0.84 | 1.09 | 1.07 |
| Down | Q167E | 2225 | 5009.36 | 6388.75 | 0.78 | 0.85 | 0.90 |
| Neutral | P168N | 2249 | 638.46 | 590.71 | 1.08 | 0.11 | 0.08 |
| Neutral | P168F | 2255 | 673.09 | 638.53 | 1.05 | 0.11 | 0.09 |
| Neutral | P168R | 2247 | 7038.51 | 7902.50 | 0.89 | 1.19 | 1.11 |
| Neutral | P168W | 2257 | 737.53 | 666.57 | 1.11 | 0.13 | 0.09 |
| Neutral | P168A | 2261 | 833.88 | 736.90 | 1.13 | 0.14 | 0.10 |
| Neutral | P168T | 2251 | 646.42 | 645.28 | 1.00 | 0.11 | 0.09 |
| Neutral | P168V | 2259 | 499.02 | 557.37 | 0.90 | 0.08 | 0.08 |
| Neutral | P168G | 2254 | 686.51 | 644.44 | 1.07 | 0.12 | 0.09 |
| Neutral | P168C | 2248 | 568.42 | 598.90 | 0.95 | 0.10 | 0.08 |
| Neutral | P168M | 2256 | 734.84 | 652.57 | 1.13 | 0.12 | 0.09 |
| Neutral | P168H | 2245 | 590.54 | 588.07 | 1.00 | 0.10 | 0.08 |
| Neutral | P168L | 2260 | 715.20 | 706.06 | 1.01 | 0.12 | 0.10 |
| Neutral | P168S | 2253 | 641.79 | 605.44 | 1.06 | 0.11 | 0.08 |
| Neutral | P168I | 2258 | 560.15 | 568.90 | 0.98 | 0.09 | 0.08 |
| Neutral | P168D | 2243 | 530.69 | 575.63 | 0.92 | 0.09 | 0.08 |
| Neutral | G169H | 2264 | 791.08 | 828.63 | 0.95 | 0.13 | 0.12 |
| Down | G169A | 2279 | 1556.29 | 2632.37 | 0.59 | 0.26 | 0.37 |
| Neutral | G169E | 2263 | 789.82 | 829.24 | 0.95 | 0.13 | 0.12 |
| Neutral | G169C | 2267 | 714.55 | 744.33 | 0.96 | 0.12 | 0.10 |
| Neutral | G169S | 2272 | 1196.93 | 1427.18 | 0.84 | 0.20 | 0.20 |
| Neutral | G169L | 2278 | 450.44 | 534.57 | 0.84 | 0.08 | 0.07 |
| Neutral | G169V | 2277 | 703.56 | 675.20 | 1.04 | 0.12 | 0.09 |
| Neutral | G169T | 2270 | 676.59 | 685.16 | 0.99 | 0.11 | 0.10 |
| Neutral | G169R | 2266 | 1119.16 | 1166.00 | 0.96 | 0.19 | 0.16 |
| Neutral | G169W | 2275 | 802.02 | 921.44 | 0.87 | 0.14 | 0.13 |
| Neutral | G169M | 2274 | 962.20 | 1133.87 | 0.85 | 0.16 | 0.16 |
| Neutral | G169I | 2276 | 671.79 | 677.10 | 0.99 | 0.11 | 0.09 |
| Neutral | G169P | 2280 | 671.60 | 683.22 | 0.98 | 0.11 | 0.10 |
| Neutral | G169D | 2262 | 714.59 | 766.96 | 0.93 | 0.12 | 0.11 |
| Neutral | G169Q | 2269 | 977.05 | 901.01 | 1.08 | 0.17 | 0.13 |
| Down | P170L | 2298 | 5969.84 | 7995.99 | 0.75 | 1.01 | 1.12 |
| Down | P170R | 2285 | 3566.07 | 5876.72 | 0.61 | 0.60 | 0.82 |
| Down | P170I | 2296 | 5073.27 | 7150.78 | 0.71 | 0.86 | 1.00 |
| Neutral | P170T | 2289 | 6734.46 | 8153.81 | 0.83 | 1.14 | 1.14 |
| Down | P170F | 2293 | 2114.36 | 3365.04 | 0.63 | 0.36 | 0.47 |
| Down | P170Q | 2288 | 4204.94 | 6162.63 | 0.68 | 0.71 | 0.86 |
| Down | P170G | 2292 | 5005.05 | 6924.03 | 0.72 | 0.85 | 0.97 |
| Down | P170S | 2291 | 4526.99 | 6064.79 | 0.75 | 0.77 | 0.85 |
| Down | P170H | 2283 | 4569.14 | 6879.10 | 0.66 | 0.77 | 0.96 |
| Down | P170C | 2286 | 931.84 | 2355.40 | 0.40 | 0.16 | 0.33 |
| Down | P170M | 2294 | 3323.56 | 6318.16 | 0.53 | 0.56 | 0.89 |
| Down | P170K | 2284 | 4379.75 | 6206.45 | 0.71 | 0.74 | 0.87 |
| Down | P170W | 2295 | 1794.33 | 2781.05 | 0.65 | 0.30 | 0.39 |
| Neutral | P170D | 2281 | 1434.38 | 1462.91 | 0.98 | 0.25 | 0.29 |
| Neutral | P170A | 2299 | 2733.72 | 2793.24 | 0.98 | 0.48 | 0.55 |
| Down | G171S | 564 | 2129.39 | 3316.87 | 0.64 | 0.36 | 0.46 |
| Down | G171M | 566 | 2104.33 | 3308.36 | 0.64 | 0.36 | 0.46 |
| Down | G171N | 560 | 4674.81 | 6965.17 | 0.67 | 0.79 | 0.98 |
| Up | G171P | 572 | 1570.74 | 1204.39 | 1.30 | 0.27 | 0.17 |
| Down | G171R | 558 | 1604.06 | 2486.74 | 0.65 | 0.27 | 0.35 |
| Down | G171Y | 563 | 1519.56 | 2342.05 | 0.65 | 0.26 | 0.33 |
| Down | G171A | 571 | 3517.89 | 5269.99 | 0.67 | 0.60 | 0.74 |
| Down | G171Q | 561 | 2361.29 | 3915.33 | 0.60 | 0.40 | 0.55 |
| Down | G171H | 556 | 1662.65 | 2616.63 | 0.64 | 0.28 | 0.37 |
| Down | G171L | 570 | 1551.95 | 2516.17 | 0.62 | 0.26 | 0.35 |
| Down | G171W | 567 | 1068.10 | 1663.46 | 0.64 | 0.18 | 0.23 |
| Down | G171C | 559 | 1982.45 | 3409.68 | 0.58 | 0.34 | 0.48 |
| Down | G171K | 557 | 1324.98 | 1867.15 | 0.71 | 0.22 | 0.26 |
| Neutral | G171E | 555 | 1154.96 | 1199.65 | 0.96 | 0.20 | 0.24 |
| Neutral | G171D | 554 | 791.81 | 690.33 | 1.15 | 0.14 | 0.14 |
| Neutral | I172Y | 2309 | 7427.25 | 7893.50 | 0.94 | 0.93 | 0.95 |
| Neutral | I172T | 2308 | 5861.67 | 6776.91 | 0.86 | 0.73 | 0.81 |
| Neutral | I172P | 2318 | 6297.28 | 7073.49 | 0.89 | 0.79 | 0.85 |
| Down | I172A | 2317 | 4666.76 | 6048.64 | 0.77 | 0.58 | 0.73 |
| Neutral | I172L | 2316 | 9324.48 | 8876.38 | 1.05 | 1.17 | 1.07 |
| Neutral | I172Q | 2307 | 6906.03 | 7743.66 | 0.89 | 0.87 | 0.93 |
| Down | I172E | 2301 | 3517.33 | 4567.20 | 0.77 | 0.44 | 0.55 |
| Down | I172C | 2305 | 1784.43 | 2422.99 | 0.74 | 0.22 | 0.29 |
| Neutral | I172M | 2313 | 9859.60 | 9096.03 | 1.08 | 1.24 | 1.09 |
| Neutral | I172D | 2300 | 4276.25 | 4281.60 | 1.00 | 0.54 | 0.51 |
| Neutral | I172V | 2315 | 9541.02 | 9174.91 | 1.04 | 1.20 | 1.10 |
| Neutral | I172R | 2304 | 7010.86 | 7581.48 | 0.92 | 0.88 | 0.91 |
| Neutral | I172G | 2311 | 2169.59 | 2350.53 | 0.92 | 0.27 | 0.28 |
| Neutral | I172W | 2314 | 5870.25 | 7244.46 | 0.81 | 0.74 | 0.87 |
| Neutral | I172N | 2306 | 5235.67 | 6253.19 | 0.84 | 0.66 | 0.75 |
| Down | G173C | 2324 | 816.12 | 1115.07 | 0.73 | 0.10 | 0.13 |
| Neutral | G173L | 2325 | 454.21 | 401.73 | 1.13 | 0.06 | 0.05 |
| Neutral | G173K | 2322 | 741.76 | 685.79 | 1.08 | 0.09 | 0.08 |
| Neutral | G173W | 2332 | 1278.44 | 1132.78 | 1.13 | 0.16 | 0.14 |
| Neutral | G173S | 2329 | 865.76 | 793.10 | 1.09 | 0.11 | 0.10 |
| Neutral | G173A | 2326 | 1041.22 | 1038.66 | 1.00 | 0.13 | 0.12 |
| Neutral | G173R | 2323 | 973.70 | 877.71 | 1.11 | 0.12 | 0.11 |
| Neutral | G173N | 2325 | 818.38 | 931.59 | 0.88 | 0.10 | 0.11 |
| Neutral | G173T | 2327 | 481.41 | 485.39 | 0.99 | 0.06 | 0.06 |
| Neutral | G173D | 2319 | 474.45 | 424.47 | 1.12 | 0.06 | 0.05 |
| Neutral | G173V | 2324 | 505.39 | 476.04 | 1.06 | 0.06 | 0.06 |
| Neutral | G173F | 2330 | 670.10 | 610.91 | 1.10 | 0.08 | 0.07 |
| Neutral | G173M | 2331 | 1085.74 | 1324.87 | 0.82 | 0.14 | 0.16 |
| Neutral | G173Y | 2328 | 1390.14 | 1296.93 | 1.07 | 0.17 | 0.16 |
| Neutral | G173P | 2327 | 458.79 | 435.59 | 1.05 | 0.06 | 0.05 |
| Neutral | G174R | 2342 | 452.76 | 437.41 | 1.04 | 0.06 | 0.05 |
| Neutral | G174A | 2355 | 491.35 | 460.84 | 1.07 | 0.06 | 0.06 |
| Neutral | G174E | 2339 | 489.49 | 459.57 | 1.07 | 0.06 | 0.06 |
| Neutral | G174F | 2349 | 598.90 | 520.03 | 1.15 | 0.08 | 0.06 |
| Neutral | G174H | 2340 | 577.19 | 518.90 | 1.11 | 0.07 | 0.06 |
| Neutral | G174T | 2346 | 505.38 | 483.64 | 1.04 | 0.06 | 0.06 |
| Neutral | G174D | 2338 | 476.79 | 454.13 | 1.05 | 0.06 | 0.05 |
| Neutral | G174S | 2348 | 641.62 | 580.36 | 1.11 | 0.08 | 0.07 |
| Neutral | G174P | 2356 | 525.07 | 505.41 | 1.04 | 0.07 | 0.06 |
| Neutral | G174W | 2351 | 538.38 | 502.50 | 1.07 | 0.07 | 0.06 |
| Neutral | G174V | 2353 | 504.50 | 425.17 | 1.19 | 0.06 | 0.05 |
| Neutral | G174N | 2344 | 506.54 | 460.95 | 1.10 | 0.06 | 0.06 |
| Up | G174Y | 2347 | 722.10 | 525.97 | 1.37 | 0.09 | 0.06 |
| Neutral | G174M | 2350 | 516.58 | 464.32 | 1.11 | 0.06 | 0.06 |
| Neutral | G174L | 2354 | 474.83 | 436.08 | 1.09 | 0.06 | 0.05 |
| Neutral | D175I | 2371 | 697.29 | 708.65 | 0.98 | 0.09 | 0.09 |
| Neutral | D175T | 2364 | 601.82 | 560.11 | 1.07 | 0.08 | 0.07 |
| Neutral | D175N | 2362 | 1495.98 | 1413.58 | 1.06 | 0.19 | 0.17 |
| Neutral | D175V | 2372 | 694.28 | 652.82 | 1.06 | 0.09 | 0.08 |
| Neutral | D175S | 2366 | 664.04 | 579.78 | 1.15 | 0.08 | 0.07 |
| Neutral | D175R | 2360 | 593.04 | 505.98 | 1.17 | 0.07 | 0.06 |
| Down | D175G | 2367 | 3147.62 | 4207.02 | 0.75 | 0.39 | 0.51 |
| Up | D175A | 2374 | 633.65 | 519.61 | 1.22 | 0.08 | 0.06 |
| Neutral | D175F | 2368 | 768.41 | 804.63 | 0.95 | 0.10 | 0.10 |
| Neutral | D175C | 2361 | 535.75 | 498.44 | 1.07 | 0.07 | 0.06 |
| Neutral | D175Q | 2363 | 702.74 | 633.64 | 1.11 | 0.09 | 0.08 |
| Neutral | D175Y | 2365 | 574.71 | 539.79 | 1.06 | 0.07 | 0.06 |
| Neutral | D175L | 2373 | 591.05 | 549.49 | 1.08 | 0.07 | 0.07 |
| Up | D175H | 2358 | 830.09 | 564.37 | 1.47 | 0.10 | 0.07 |
| Neutral | D175P | 2375 | 635.08 | 610.89 | 1.04 | 0.08 | 0.07 |
| Up | D175E | 2357 | 959.14 | 495.19 | 1.94 | 0.10 | 0.07 |
| Up | A176F | 148 | 10486.82 | 6516.31 | 1.61 | 1.31 | 0.78 |
| Neutral | A176Q | 143 | 6410.52 | 6665.27 | 0.96 | 0.80 | 0.80 |
| Neutral | A176V | 152 | 8890.53 | 8780.42 | 1.01 | 1.11 | 1.05 |
| Neutral | A176E | 137 | 589.82 | 546.54 | 1.08 | 0.07 | 0.07 |
| Neutral | A176T | 144 | 8471.98 | 8213.74 | 1.03 | 1.06 | 0.99 |
| Neutral | A176C | 141 | 6777.92 | 5924.96 | 1.14 | 0.85 | 0.71 |
| Neutral | A176L | 153 | 7190.01 | 6291.31 | 1.14 | 0.90 | 0.76 |
| Neutral | A176P | 154 | 639.90 | 596.40 | 1.07 | 0.08 | 0.07 |
| Neutral | A176N | 142 | 1351.92 | 1250.94 | 1.08 | 0.17 | 0.15 |
| Neutral | A176G | 147 | 2185.25 | 2395.33 | 0.91 | 0.27 | 0.29 |
| Down | A176S | 146 | 3003.29 | 3887.12 | 0.77 | 0.38 | 0.47 |
| Neutral | A176R | 140 | 919.15 | 792.44 | 1.16 | 0.12 | 0.10 |
| Neutral | A176K | 139 | 561.66 | 522.94 | 1.07 | 0.07 | 0.06 |
| Neutral | A176D | 136 | 863.82 | 792.98 | 1.09 | 0.11 | 0.10 |
| Neutral | A176W | 150 | 482.38 | 414.85 | 1.16 | 0.06 | 0.06 |
| Neutral | H177T | 2383 | 600.03 | 570.23 | 1.05 | 0.08 | 0.07 |
| Neutral | H177P | 2394 | 579.96 | 544.77 | 1.06 | 0.07 | 0.07 |
| Neutral | H177Q | 2382 | 593.68 | 549.35 | 1.08 | 0.07 | 0.07 |
| Neutral | H177A | 2393 | 536.01 | 523.32 | 1.02 | 0.07 | 0.06 |
| Neutral | H177S | 2385 | 561.60 | 524.64 | 1.07 | 0.07 | 0.06 |
| Neutral | H177G | 2386 | 559.31 | 519.85 | 1.08 | 0.07 | 0.06 |
| Neutral | H177W | 2389 | 547.21 | 520.18 | 1.05 | 0.07 | 0.06 |
| Neutral | H177L | 2392 | 486.50 | 433.60 | 1.12 | 0.06 | 0.05 |
| Neutral | H177V | 2391 | 508.58 | 447.50 | 1.14 | 0.06 | 0.05 |
| Neutral | H177I | 2390 | 489.45 | 455.90 | 1.07 | 0.06 | 0.05 |
| Down | H177R | 2379 | 1913.95 | 2460.77 | 0.78 | 0.24 | 0.30 |
| Neutral | H177N | 2381 | 504.44 | 478.07 | 1.06 | 0.06 | 0.06 |
| Neutral | H177Y | 2384 | 519.99 | 467.72 | 1.11 | 0.07 | 0.06 |
| Neutral | H177C | 2380 | 521.67 | 489.93 | 1.06 | 0.07 | 0.06 |
| Neutral | H177D | 2376 | 534.87 | 505.07 | 1.06 | 0.07 | 0.06 |
| Neutral | F178G | 2406 | 451.96 | 391.96 | 1.15 | 0.05 | 0.05 |
| Up | F178C | 2400 | 491.76 | 403.57 | 1.22 | 0.05 | 0.05 |
| Neutral | F178W | 2408 | 488.21 | 441.35 | 1.11 | 0.05 | 0.05 |
| Neutral | F178R | 2399 | 492.40 | 411.21 | 1.20 | 0.05 | 0.05 |
| Neutral | F178K | 2398 | 490.87 | 494.09 | 0.99 | 0.05 | 0.06 |
| Neutral | F178S | 2405 | 489.84 | 507.26 | 0.97 | 0.05 | 0.06 |
| Neutral | F178H | 2397 | 525.63 | 500.02 | 1.05 | 0.06 | 0.06 |
| Neutral | F178P | 2413 | 441.78 | 397.05 | 1.11 | 0.05 | 0.05 |
| Neutral | F178V | 2410 | 742.61 | 814.06 | 0.91 | 0.08 | 0.10 |
| Neutral | F178A | 2412 | 421.25 | 367.26 | 1.15 | 0.05 | 0.04 |
| Neutral | F178Q | 2402 | 409.62 | 360.29 | 1.14 | 0.04 | 0.04 |
| Neutral | F178Y | 2404 | 861.20 | 830.80 | 1.04 | 0.09 | 0.10 |
| Neutral | F178I | 2409 | 1118.23 | 1329.96 | 0.84 | 0.12 | 0.16 |
| Neutral | F178T | 2403 | 560.54 | 487.01 | 1.15 | 0.10 | 0.10 |
| Up | F178L | 2411 | 1788.95 | 1314.38 | 1.36 | 0.31 | 0.26 |
| Neutral | F178E | 2396 | 524.72 | 515.62 | 1.02 | 0.06 | 0.07 |
| Neutral | D179P | 173 | 526.54 | 527.98 | 1.00 | 0.06 | 0.06 |
| Neutral | D179L | 171 | 444.31 | 410.22 | 1.08 | 0.05 | 0.05 |
| Neutral | D179E | 155 | 520.82 | 438.27 | 1.19 | 0.06 | 0.05 |
| Neutral | D179G | 165 | 470.21 | 426.64 | 1.10 | 0.05 | 0.05 |
| Neutral | D179S | 164 | 461.51 | 421.09 | 1.10 | 0.05 | 0.05 |
| Neutral | D179A | 172 | 464.49 | 431.24 | 1.08 | 0.05 | 0.05 |
| Neutral | D179K | 157 | 483.67 | 456.75 | 1.06 | 0.05 | 0.05 |
| Neutral | D179T | 162 | 451.18 | 419.76 | 1.07 | 0.05 | 0.05 |
| Neutral | D179I | 169 | 425.91 | 372.56 | 1.14 | 0.05 | 0.04 |
| Neutral | D179R | 158 | 473.21 | 450.10 | 1.05 | 0.05 | 0.05 |
| Up | D179N | 160 | 2433.73 | 812.01 | 3.00 | 0.26 | 0.10 |
| Neutral | D179W | 168 | 465.31 | 423.56 | 1.10 | 0.05 | 0.05 |
| Neutral | D179Q | 161 | 446.51 | 414.79 | 1.08 | 0.05 | 0.05 |
| Up | D179V | 170 | 604.63 | 490.35 | 1.23 | 0.11 | 0.10 |
| Up | D179C | 159 | 613.81 | 503.76 | 1.22 | 0.11 | 0.10 |
| Neutral | E180M | 186 | 9630.23 | 8513.41 | 1.13 | 1.04 | 1.00 |
| Neutral | E180P | 192 | 523.92 | 492.75 | 1.06 | 0.06 | 0.06 |
| Neutral | E180K | 176 | 4017.43 | 3889.45 | 1.03 | 0.43 | 0.46 |
| Up | E180Y | 182 | 6655.19 | 5379.42 | 1.24 | 0.72 | 0.63 |
| Neutral | E180Q | 180 | 5146.93 | 4568.90 | 1.13 | 0.56 | 0.54 |
| Neutral | E180R | 177 | 6932.51 | 6309.81 | 1.10 | 0.75 | 0.74 |
| Neutral | E180A | 191 | 9562.37 | 8450.18 | 1.13 | 1.04 | 1.00 |
| Up | E180T | 181 | 3718.16 | 2425.13 | 1.53 | 0.40 | 0.29 |
| Neutral | E180I | 188 | 9126.95 | 7770.14 | 1.17 | 0.99 | 0.92 |
| Up | E180F | 185 | 7014.78 | 5382.78 | 1.30 | 0.76 | 0.63 |
| Neutral | E180C | 178 | 2926.15 | 2569.75 | 1.14 | 0.32 | 0.30 |
| Up | E180G | 184 | 5952.65 | 4547.28 | 1.31 | 1.04 | 0.90 |
| Up | E180S | 183 | 5217.80 | 3977.60 | 1.31 | 0.91 | 0.78 |
| Up | E180N | 179 | 6534.65 | 4843.84 | 1.35 | 1.14 | 0.96 |
| Up | E180D | 174 | 7738.70 | 6277.22 | 1.23 | 1.35 | 1.24 |
| Neutral | D181S | 202 | 9064.64 | 8368.97 | 1.08 | 0.98 | 0.99 |
| Neutral | D181Q | 199 | 7875.57 | 7127.19 | 1.11 | 0.85 | 0.84 |
| Neutral | D181P | 211 | 753.20 | 639.76 | 1.18 | 0.08 | 0.08 |
| Up | D181Y | 201 | 1137.94 | 716.86 | 1.59 | 0.12 | 0.08 |
| Up | D181R | 196 | 997.11 | 712.77 | 1.40 | 0.11 | 0.08 |
| Up | D181V | 208 | 945.65 | 721.77 | 1.31 | 0.10 | 0.09 |
| Up | D181F | 204 | 933.48 | 670.40 | 1.39 | 0.10 | 0.08 |
| Neutral | D181A | 210 | 7936.89 | 7854.96 | 1.01 | 0.86 | 0.93 |
| Neutral | D181T | 200 | 6867.00 | 6057.09 | 1.13 | 0.74 | 0.71 |
| Up | D181L | 209 | 1727.20 | 1274.09 | 1.36 | 0.19 | 0.15 |
| Neutral | D181E | 193 | 8647.28 | 8246.36 | 1.05 | 0.94 | 0.97 |
| Up | D181K | 195 | 1087.36 | 696.83 | 1.56 | 0.12 | 0.08 |
| Up | D181M | 205 | 3805.65 | 2986.75 | 1.27 | 0.41 | 0.35 |
| Up | D181C | 197 | 549.29 | 447.40 | 1.23 | 0.10 | 0.09 |
| Up | D181G | 203 | 2764.20 | 2056.56 | 1.34 | 0.48 | 0.41 |
| Neutral | E182C | 216 | 601.45 | 561.21 | 1.07 | 0.07 | 0.07 |
| Neutral | E182P | 230 | 606.01 | 574.24 | 1.06 | 0.07 | 0.07 |
| Up | E182S | 221 | 967.49 | 642.27 | 1.51 | 0.10 | 0.08 |
| Up | E182T | 219 | 2995.97 | 1779.42 | 1.68 | 0.32 | 0.21 |
| Neutral | E182R | 215 | 661.10 | 622.75 | 1.06 | 0.07 | 0.07 |
| Neutral | E182D | 212 | 2078.47 | 2140.28 | 0.97 | 0.23 | 0.25 |
| Neutral | E182A | 229 | 619.23 | 531.55 | 1.16 | 0.07 | 0.06 |
| Neutral | E182F | 223 | 1484.85 | 1677.82 | 0.88 | 0.16 | 0.20 |
| Neutral | E182L | 228 | 569.35 | 524.25 | 1.09 | 0.06 | 0.06 |
| Neutral | E182I | 226 | 606.88 | 519.75 | 1.17 | 0.07 | 0.06 |
| Neutral | E182Y | 220 | 593.61 | 561.88 | 1.06 | 0.06 | 0.07 |
| Up | E182Q | 218 | 1393.28 | 804.84 | 1.73 | 0.15 | 0.09 |
| Neutral | E182W | 225 | 556.78 | 536.32 | 1.04 | 0.06 | 0.06 |
| Up | E182M | 224 | 649.73 | 524.43 | 1.24 | 0.11 | 0.10 |
| Neutral | E182G | 222 | 604.92 | 543.78 | 1.11 | 0.11 | 0.11 |
| Neutral | R183P | 2432 | 9143.00 | 8148.29 | 1.12 | 0.99 | 0.96 |
| Neutral | R183K | 2417 | 9843.98 | 8685.25 | 1.13 | 1.07 | 1.02 |
| Neutral | R183W | 2427 | 8144.07 | 7669.02 | 1.06 | 0.88 | 0.90 |
| Neutral | R183E | 2415 | 9873.25 | 8403.44 | 1.17 | 1.07 | 0.99 |
| Neutral | R183A | 2431 | 9386.14 | 8368.29 | 1.12 | 1.02 | 0.99 |
| Down | R183T | 2421 | 4841.94 | 8385.09 | 0.58 | 0.52 | 0.99 |
| Neutral | R183L | 2430 | 517.07 | 532.72 | 0.97 | 0.06 | 0.06 |
| Neutral | R183N | 2419 | 10062.02 | 8456.13 | 1.19 | 1.09 | 1.00 |
| Neutral | R183H | 2416 | 9434.01 | 8295.55 | 1.14 | 1.02 | 0.98 |
| Neutral | R183V | 2429 | 9252.08 | 7954.42 | 1.16 | 1.00 | 0.94 |
| Neutral | R183C | 2418 | 6603.93 | 6597.30 | 1.00 | 0.72 | 0.78 |
| Neutral | R183M | 2426 | 9679.52 | 8250.27 | 1.17 | 1.05 | 0.97 |
| Down | R183I | 2428 | 495.34 | 8009.63 | 0.06 | 0.05 | 0.94 |
| Up | R183G | 2424 | 7326.36 | 6021.39 | 1.22 | 1.28 | 1.19 |
| Up | R183S | 2423 | 7896.17 | 6240.74 | 1.27 | 1.38 | 1.23 |
| Neutral | W184G | 2444 | 430.62 | 391.79 | 1.10 | 0.05 | 0.05 |
| Neutral | W184H | 2435 | 440.24 | 428.35 | 1.03 | 0.05 | 0.05 |
| Neutral | W184L | 2449 | 476.77 | 428.90 | 1.11 | 0.06 | 0.05 |
| Neutral | W184E | 2434 | 463.88 | 438.97 | 1.06 | 0.05 | 0.05 |
| Neutral | W184P | 2451 | 437.57 | 387.71 | 1.13 | 0.05 | 0.05 |
| Neutral | W184N | 2439 | 467.91 | 468.52 | 1.00 | 0.06 | 0.06 |
| Neutral | W184A | 2450 | 452.63 | 451.66 | 1.00 | 0.05 | 0.06 |
| Neutral | W184T | 2441 | 421.08 | 419.51 | 1.00 | 0.05 | 0.05 |
| Neutral | W184R | 2437 | 457.42 | 390.02 | 1.17 | 0.05 | 0.05 |
| Neutral | W184Q | 2440 | 450.92 | 448.33 | 1.01 | 0.05 | 0.05 |
| Neutral | W184V | 2448 | 454.60 | 407.30 | 1.12 | 0.05 | 0.05 |
| Neutral | W184S | 2443 | 486.70 | 485.16 | 1.00 | 0.06 | 0.06 |
| Neutral | W184M | 2446 | 447.30 | 395.61 | 1.13 | 0.05 | 0.05 |
| Neutral | W184I | 2447 | 478.17 | 503.24 | 0.95 | 0.06 | 0.06 |
| Neutral | W184F | 2445 | 455.86 | 427.51 | 1.07 | 0.05 | 0.05 |
| Up | T185R | 235 | 1728.04 | 851.07 | 2.03 | 0.20 | 0.10 |
| Up | T185Y | 239 | 937.75 | 540.66 | 1.73 | 0.11 | 0.07 |
| Neutral | T185W | 244 | 577.54 | 501.10 | 1.15 | 0.07 | 0.06 |
| Up | T185H | 233 | 1448.04 | 783.89 | 1.85 | 0.17 | 0.10 |
| Up | T185G | 241 | 3922.30 | 1990.15 | 1.97 | 0.46 | 0.24 |
| Neutral | T185P | 249 | 1773.27 | 1542.44 | 1.15 | 0.21 | 0.19 |
| Neutral | T185S | 240 | 9554.77 | 8267.62 | 1.16 | 1.12 | 1.01 |
| Up | T185V | 246 | 1648.14 | 897.66 | 1.84 | 0.19 | 0.11 |
| Up | T185Q | 238 | 1594.81 | 583.93 | 2.73 | 0.19 | 0.07 |
| Up | T185N | 237 | 790.61 | 546.44 | 1.45 | 0.09 | 0.07 |
| Up | T185C | 236 | 1554.42 | 1248.58 | 1.24 | 0.18 | 0.15 |
| Neutral | T185L | 247 | 483.25 | 463.52 | 1.04 | 0.06 | 0.06 |
| Up | T185A | 248 | 1599.64 | 711.08 | 2.25 | 0.19 | 0.09 |
| Up | T185E | 232 | 1324.02 | 703.76 | 1.88 | 0.16 | 0.09 |
| Neutral | T185D | 231 | 485.86 | 418.67 | 1.16 | 0.06 | 0.06 |
| Neutral | N186G | 2462 | 7592.31 | 6944.43 | 1.09 | 0.89 | 0.85 |
| Neutral | N186A | 2469 | 7466.07 | 7519.13 | 0.99 | 0.88 | 0.92 |
| Neutral | N186T | 2459 | 8897.05 | 8063.02 | 1.10 | 1.05 | 0.98 |
| Neutral | N186R | 2456 | 3212.69 | 3085.21 | 1.04 | 0.38 | 0.38 |
| Neutral | N186L | 2468 | 8097.42 | 7286.32 | 1.11 | 0.95 | 0.89 |
| Neutral | N186P | 2470 | 2173.37 | 1948.86 | 1.12 | 0.26 | 0.24 |
| Neutral | N186S | 2461 | 6854.56 | 6735.79 | 1.02 | 0.81 | 0.82 |
| Neutral | N186V | 2467 | 6303.91 | 6575.96 | 0.96 | 0.74 | 0.80 |
| Neutral | N186Q | 2458 | 4834.56 | 4621.18 | 1.05 | 0.57 | 0.56 |
| Neutral | N186H | 2454 | 3390.53 | 3309.97 | 1.02 | 0.40 | 0.40 |
| Neutral | N186C | 2457 | 3139.47 | 3113.35 | 1.01 | 0.37 | 0.38 |
| Neutral | N186E | 2453 | 3801.36 | 3332.52 | 1.14 | 0.45 | 0.41 |
| Neutral | N186F | 2463 | 3794.65 | 3316.48 | 1.14 | 0.45 | 0.40 |
| Neutral | N186Y | 2460 | 6301.09 | 7570.59 | 0.83 | 0.74 | 0.92 |
| Neutral | N186D | 2452 | 6853.09 | 6333.37 | 1.08 | 0.81 | 0.77 |
| Up | N187R | 254 | 1042.36 | 709.74 | 1.47 | 0.12 | 0.09 |
| Up | N187M | 262 | 1731.67 | 995.07 | 1.74 | 0.20 | 0.12 |
| Neutral | N187S | 259 | 9538.59 | 8971.12 | 1.06 | 1.12 | 1.10 |
| Neutral | N187T | 257 | 9856.38 | 8855.58 | 1.11 | 1.16 | 1.08 |
| Neutral | N187L | 266 | 505.93 | 464.62 | 1.09 | 0.06 | 0.06 |
| Neutral | N187W | 263 | 1694.86 | 1425.68 | 1.19 | 0.20 | 0.17 |
| Up | N187F | 261 | 1240.41 | 731.98 | 1.69 | 0.15 | 0.09 |
| Up | N187K | 253 | 2331.93 | 1140.19 | 2.05 | 0.27 | 0.14 |
| Up | N187I | 264 | 1444.98 | 683.03 | 2.12 | 0.17 | 0.08 |
| Up | N187A | 267 | 4379.80 | 2616.49 | 1.67 | 0.52 | 0.32 |
| Neutral | N187P | 268 | 644.27 | 572.98 | 1.12 | 0.08 | 0.07 |
| Neutral | N187D | 250 | 9843.65 | 8801.57 | 1.12 | 1.16 | 1.07 |
| Neutral | N187G | 260 | 535.06 | 514.10 | 1.04 | 0.07 | 0.07 |
| Neutral | N187C | 255 | 1804.28 | 1860.67 | 0.97 | 0.23 | 0.25 |
| Neutral | N187H | 252 | 1143.07 | 1071.67 | 1.07 | 0.14 | 0.14 |
| Neutral | F188P | 2489 | 10012.21 | 8943.91 | 1.12 | 1.18 | 1.09 |
| Neutral | F188I | 2485 | 7342.21 | 6782.40 | 1.08 | 0.86 | 0.83 |
| Neutral | F188N | 2477 | 10024.22 | 8961.63 | 1.12 | 1.18 | 1.09 |
| Neutral | F188S | 2481 | 9564.51 | 8841.98 | 1.08 | 1.13 | 1.08 |
| Neutral | F188Q | 2478 | 9591.39 | 8664.63 | 1.11 | 1.13 | 1.06 |
| Neutral | F188K | 2474 | 8347.12 | 7497.38 | 1.11 | 0.98 | 0.92 |
| Neutral | F188G | 2482 | 9891.61 | 9065.43 | 1.09 | 1.16 | 1.11 |
| Neutral | F188W | 2484 | 9389.97 | 8774.36 | 1.07 | 1.10 | 1.07 |
| Neutral | F188E | 2472 | 10235.38 | 8984.46 | 1.14 | 1.20 | 1.10 |
| Neutral | F188H | 2473 | 2065.12 | 1901.41 | 1.09 | 0.24 | 0.23 |
| Neutral | F188D | 2471 | 10087.61 | 8889.75 | 1.13 | 1.19 | 1.09 |
| Up | F188A | 2488 | 1502.70 | 1231.99 | 1.22 | 0.18 | 0.15 |
| Neutral | F188L | 2487 | 8309.64 | 7501.30 | 1.11 | 0.98 | 0.92 |
| Neutral | F188R | 2475 | 8182.64 | 7750.05 | 1.06 | 0.96 | 0.95 |
| Up | F188V | 2486 | 7116.29 | 5860.00 | 1.21 | 1.24 | 1.16 |
| Neutral | R189L | 2506 | 9236.08 | 8947.54 | 1.03 | 1.09 | 1.09 |
| Neutral | R189G | 2500 | 10307.88 | 9096.35 | 1.13 | 1.21 | 1.11 |
| Neutral | R189K | 2493 | 9365.15 | 9033.15 | 1.04 | 1.10 | 1.10 |
| Neutral | R189P | 2508 | 3200.68 | 3533.96 | 0.91 | 0.38 | 0.43 |
| Neutral | R189E | 2491 | 9552.57 | 8789.28 | 1.09 | 1.12 | 1.07 |
| Neutral | R189V | 2505 | 9150.17 | 8088.39 | 1.13 | 1.08 | 0.99 |
| Neutral | R189D | 2490 | 9506.16 | 8933.41 | 1.06 | 1.12 | 1.09 |
| Neutral | R189Y | 2498 | 9893.14 | 8946.52 | 1.11 | 1.16 | 1.09 |
| Neutral | R189C | 2494 | 5318.06 | 5457.78 | 0.97 | 0.63 | 0.67 |
| Neutral | R189A | 2507 | 9718.09 | 8798.13 | 1.10 | 1.14 | 1.07 |
| Neutral | R189H | 2492 | 1360.90 | 1350.33 | 1.01 | 0.16 | 0.16 |
| Neutral | R189W | 2503 | 7657.12 | 7070.92 | 1.08 | 0.90 | 0.86 |
| Neutral | R189N | 2495 | 7842.39 | 6675.36 | 1.17 | 1.37 | 1.32 |
| Neutral | R189T | 2497 | 7610.10 | 6459.94 | 1.18 | 1.33 | 1.27 |
| Neutral | R189Q | 2496 | 7465.37 | 6396.79 | 1.17 | 1.30 | 1.26 |
| Down | E190A | 590 | 1510.06 | 2116.94 | 0.71 | 0.21 | 0.23 |
| Neutral | E190H | 574 | 6276.13 | 7564.04 | 0.83 | 0.88 | 0.83 |
| Down | E190V | 588 | 643.37 | 1658.11 | 0.39 | 0.09 | 0.18 |
| Up | E190P | 591 | 2420.68 | 1767.43 | 1.37 | 0.34 | 0.19 |
| Neutral | E190C | 577 | 1827.25 | 2083.88 | 0.88 | 0.26 | 0.23 |
| Up | E190G | 583 | 5313.99 | 4365.93 | 1.22 | 0.75 | 0.48 |
| Down | E190R | 576 | 1185.26 | 1810.53 | 0.65 | 0.17 | 0.20 |
| Down | E190I | 587 | 1880.80 | 2886.28 | 0.65 | 0.27 | 0.32 |
| Down | E190S | 582 | 4542.61 | 5987.33 | 0.76 | 0.64 | 0.66 |
| Down | E190T | 580 | 2293.47 | 4444.68 | 0.52 | 0.32 | 0.49 |
| Up | E190M | 585 | 2557.21 | 1317.73 | 1.94 | 0.36 | 0.15 |
| Neutral | E190L | 589 | 2542.38 | 2986.91 | 0.85 | 0.36 | 0.33 |
| Down | E190K | 575 | 2960.37 | 4343.12 | 0.68 | 0.42 | 0.48 |
| Up | E190Y | 581 | 7243.54 | 5742.33 | 1.26 | 1.27 | 1.13 |
| Up | E190D | 573 | 7910.21 | 6468.78 | 1.22 | 1.38 | 1.28 |
| Neutral | Y191T | 600 | 611.75 | 535.95 | 1.14 | 0.07 | 0.06 |
| Neutral | Y191H | 594 | 2333.85 | 2191.64 | 1.06 | 0.28 | 0.24 |
| Neutral | Y191G | 602 | 428.17 | 432.65 | 0.99 | 0.05 | 0.05 |
| Neutral | Y191L | 608 | 379.02 | 357.82 | 1.06 | 0.05 | 0.04 |
| Up | Y191P | 610 | 1359.30 | 1046.33 | 1.30 | 0.16 | 0.12 |
| Neutral | Y191Q | 599 | 451.92 | 403.46 | 1.12 | 0.05 | 0.05 |
| Neutral | Y191K | 595 | 464.62 | 406.52 | 1.14 | 0.06 | 0.05 |
| Neutral | Y191D | 592 | 392.24 | 370.67 | 1.06 | 0.05 | 0.04 |
| Neutral | Y191A | 609 | 452.13 | 418.53 | 1.08 | 0.05 | 0.05 |
| Neutral | Y191W | 605 | 395.63 | 411.91 | 0.96 | 0.05 | 0.05 |
| Neutral | Y191S | 601 | 530.80 | 447.13 | 1.19 | 0.06 | 0.05 |
| Up | Y191V | 607 | 1553.58 | 1254.11 | 1.24 | 0.19 | 0.14 |
| Neutral | Y191E | 593 | 395.04 | 407.49 | 0.97 | 0.05 | 0.05 |
| Neutral | Y191R | 596 | 652.95 | 725.68 | 0.90 | 0.08 | 0.08 |
| Neutral | Y191C | 597 | 530.42 | 463.90 | 1.14 | 0.06 | 0.05 |
| Up | N192R | 615 | 640.72 | 482.61 | 1.33 | 0.09 | 0.05 |
| Neutral | N192L | 627 | 591.92 | 571.56 | 1.04 | 0.08 | 0.06 |
| Neutral | N192Q | 617 | 1089.41 | 1020.23 | 1.07 | 0.15 | 0.11 |
| Neutral | N192P | 629 | 685.62 | 856.11 | 0.80 | 0.10 | 0.09 |
| Up | N192H | 613 | 2274.24 | 1058.80 | 2.15 | 0.32 | 0.12 |
| Up | N192S | 620 | 2043.65 | 1630.74 | 1.25 | 0.29 | 0.18 |
| Neutral | N192W | 624 | 548.30 | 538.86 | 1.02 | 0.08 | 0.06 |
| Up | N192G | 621 | 899.47 | 659.29 | 1.36 | 0.13 | 0.07 |
| Up | N192D | 611 | 4213.33 | 2216.40 | 1.90 | 0.59 | 0.24 |
| Neutral | N192V | 626 | 588.02 | 537.64 | 1.09 | 0.08 | 0.06 |
| Neutral | N192A | 628 | 574.26 | 543.66 | 1.06 | 0.08 | 0.06 |
| Neutral | N192T | 618 | 536.50 | 576.21 | 0.93 | 0.08 | 0.06 |
| Neutral | N192K | 614 | 685.26 | 633.89 | 1.08 | 0.10 | 0.07 |
| Up | N192C | 616 | 1310.46 | 987.31 | 1.33 | 0.18 | 0.11 |
| Neutral | N192M | 623 | 547.98 | 537.29 | 1.02 | 0.08 | 0.06 |
| Neutral | L193P | 2527 | 388.57 | 381.15 | 1.02 | 0.05 | 0.04 |
| Neutral | L193G | 2520 | 437.84 | 478.44 | 0.92 | 0.05 | 0.05 |
| Neutral | L193F | 2521 | 481.49 | 491.33 | 0.98 | 0.06 | 0.05 |
| Neutral | L193S | 2519 | 448.35 | 449.03 | 1.00 | 0.05 | 0.05 |
| Neutral | L193W | 2523 | 481.79 | 460.74 | 1.05 | 0.06 | 0.05 |
| Neutral | L193A | 2526 | 510.96 | 468.83 | 1.09 | 0.06 | 0.05 |
| Neutral | L193R | 2513 | 481.08 | 477.55 | 1.01 | 0.06 | 0.05 |
| Neutral | L193Q | 2516 | 417.53 | 412.01 | 1.01 | 0.05 | 0.05 |
| Neutral | L193E | 2510 | 401.70 | 409.23 | 0.98 | 0.05 | 0.05 |
| Neutral | L193K | 2512 | 417.39 | 426.26 | 0.98 | 0.05 | 0.05 |
| Neutral | L193N | 2515 | 432.35 | 434.95 | 0.99 | 0.05 | 0.05 |
| Down | L193I | 2524 | 2767.03 | 3467.03 | 0.80 | 0.33 | 0.39 |
| Neutral | L193T | 2517 | 679.48 | 638.88 | 1.06 | 0.08 | 0.07 |
| Neutral | L193D | 2509 | 419.37 | 424.41 | 0.99 | 0.05 | 0.05 |
| Neutral | L193Y | 2518 | 3022.00 | 2706.28 | 1.12 | 0.36 | 0.30 |
| Neutral | H194S | 639 | 5518.27 | 6112.38 | 0.90 | 0.78 | 0.67 |
| Neutral | H194E | 631 | 7667.53 | 8295.22 | 0.92 | 1.08 | 0.91 |
| Neutral | H194K | 632 | 5130.62 | 6124.27 | 0.84 | 0.72 | 0.67 |
| Neutral | H194Q | 636 | 6399.62 | 7113.56 | 0.90 | 0.90 | 0.78 |
| Down | H194V | 645 | 1611.06 | 5696.43 | 0.28 | 0.23 | 0.63 |
| Up | H194T | 637 | 3884.64 | 2598.12 | 1.50 | 0.55 | 0.29 |
| Neutral | H194L | 646 | 5710.11 | 6872.56 | 0.83 | 0.80 | 0.76 |
| Neutral | H194Y | 638 | 4922.31 | 5688.29 | 0.87 | 0.69 | 0.63 |
| Down | H194F | 641 | 3787.65 | 5388.18 | 0.70 | 0.53 | 0.59 |
| Neutral | H194G | 640 | 4636.22 | 5437.23 | 0.85 | 0.65 | 0.60 |
| Down | H194I | 644 | 2901.13 | 3777.68 | 0.77 | 0.41 | 0.42 |
| Down | H194W | 643 | 5434.60 | 7448.23 | 0.73 | 0.77 | 0.82 |
| Down | H194M | 642 | 2941.85 | 9057.43 | 0.32 | 0.41 | 1.00 |
| Up | H194A | 647 | 4681.45 | 2746.90 | 1.70 | 0.66 | 0.30 |
| Neutral | H194P | 648 | 5264.79 | 5058.19 | 1.04 | 0.74 | 0.56 |
| Up | R195C | 273 | 4231.32 | 1853.20 | 2.28 | 0.60 | 0.20 |
| Neutral | R195F | 280 | 687.70 | 720.42 | 0.95 | 0.10 | 0.08 |
| Neutral | R195W | 282 | 5099.23 | 4524.84 | 1.13 | 0.72 | 0.50 |
| Neutral | R195T | 276 | 1101.98 | 1175.85 | 0.94 | 0.16 | 0.13 |
| Neutral | R195L | 285 | 5073.57 | 4520.73 | 1.12 | 0.72 | 0.50 |
| Up | R195G | 279 | 5269.21 | 3025.93 | 1.74 | 0.74 | 0.33 |
| Up | R195Q | 275 | 1958.69 | 1361.83 | 1.44 | 0.28 | 0.15 |
| Down | R195K | 272 | 3839.86 | 7080.78 | 0.54 | 0.54 | 0.78 |
| Neutral | R195S | 278 | 642.14 | 649.21 | 0.99 | 0.09 | 0.07 |
| Up | R195A | 286 | 5605.90 | 3852.81 | 1.46 | 0.79 | 0.42 |
| Up | R195D | 269 | 2724.53 | 1907.81 | 1.43 | 0.38 | 0.21 |
| Neutral | R195P | 287 | 571.50 | 615.21 | 0.93 | 0.08 | 0.07 |
| Neutral | R195Y | 277 | 763.31 | 794.42 | 0.96 | 0.11 | 0.09 |
| Neutral | R195E | 270 | 7597.55 | 8468.35 | 0.90 | 1.07 | 0.93 |
| Up | R195V | 284 | 1711.48 | 1037.62 | 1.65 | 0.24 | 0.11 |
| Neutral | V196T | 2536 | 1040.90 | 1268.04 | 0.82 | 0.12 | 0.14 |
| Neutral | V196D | 2528 | 443.04 | 446.39 | 0.99 | 0.05 | 0.05 |
| Neutral | V196G | 2539 | 490.83 | 494.67 | 0.99 | 0.06 | 0.06 |
| Neutral | V196E | 2529 | 488.55 | 489.74 | 1.00 | 0.06 | 0.05 |
| Neutral | V196A | 2545 | 452.36 | 452.12 | 1.00 | 0.05 | 0.05 |
| Up | V196S | 2538 | 1186.52 | 949.52 | 1.25 | 0.14 | 0.11 |
| Neutral | V196Q | 2535 | 412.17 | 430.91 | 0.96 | 0.05 | 0.05 |
| Neutral | V196P | 2546 | 576.83 | 620.88 | 0.93 | 0.07 | 0.07 |
| Neutral | V196R | 2532 | 493.29 | 474.38 | 1.04 | 0.06 | 0.05 |
| Neutral | V196H | 2530 | 465.64 | 479.66 | 0.97 | 0.06 | 0.05 |
| Neutral | V196Y | 2537 | 462.28 | 474.94 | 0.97 | 0.06 | 0.05 |
| Neutral | V196I | 2543 | 1125.67 | 1229.87 | 0.92 | 0.13 | 0.14 |
| Neutral | V196L | 2544 | 464.80 | 491.01 | 0.95 | 0.06 | 0.05 |
| Neutral | V196K | 2531 | 455.84 | 482.44 | 0.94 | 0.05 | 0.05 |
| Neutral | V196M | 2541 | 479.36 | 518.00 | 0.93 | 0.06 | 0.06 |
| Down | A197G | 2558 | 1238.39 | 2552.91 | 0.49 | 0.17 | 0.28 |
| Up | A197S | 2557 | 3959.39 | 2633.91 | 1.50 | 0.56 | 0.29 |
| Up | A197L | 2564 | 1013.13 | 809.32 | 1.25 | 0.14 | 0.09 |
| Neutral | A197P | 2565 | 857.06 | 933.29 | 0.92 | 0.12 | 0.10 |
| Down | A197V | 2563 | 2549.12 | 4355.70 | 0.59 | 0.36 | 0.48 |
| Neutral | A197Y | 2556 | 650.21 | 722.49 | 0.90 | 0.09 | 0.08 |
| Neutral | A197Q | 2554 | 658.64 | 652.52 | 1.01 | 0.09 | 0.07 |
| Neutral | A197R | 2551 | 635.08 | 640.91 | 0.99 | 0.09 | 0.07 |
| Down | A197T | 2555 | 1933.94 | 4482.59 | 0.43 | 0.27 | 0.49 |
| Up | A197I | 2562 | 1440.69 | 1060.51 | 1.36 | 0.20 | 0.12 |
| Neutral | A197H | 2549 | 604.11 | 638.63 | 0.95 | 0.09 | 0.07 |
| Neutral | A197E | 2548 | 686.96 | 624.22 | 1.10 | 0.10 | 0.07 |
| Down | A197W | 2561 | 1448.83 | 2588.64 | 0.56 | 0.20 | 0.29 |
| Down | A197N | 2553 | 623.17 | 840.56 | 0.74 | 0.09 | 0.09 |
| Up | A197C | 2552 | 4012.80 | 3140.52 | 1.28 | 0.70 | 0.62 |
| Neutral | A198T | 296 | 761.19 | 700.22 | 1.09 | 0.11 | 0.08 |
| Down | A198K | 291 | 490.20 | 1179.92 | 0.42 | 0.07 | 0.13 |
| Up | A198S | 298 | 4061.28 | 3136.65 | 1.29 | 0.57 | 0.35 |
| Neutral | A198H | 290 | 581.41 | 575.73 | 1.01 | 0.08 | 0.06 |
| Neutral | A198G | 299 | 2610.82 | 2368.26 | 1.10 | 0.37 | 0.26 |
| Down | A198E | 289 | 485.45 | 662.62 | 0.73 | 0.07 | 0.07 |
| Neutral | A198P | 306 | 656.48 | 580.71 | 1.13 | 0.09 | 0.06 |
| Up | A198L | 305 | 1339.94 | 726.74 | 1.84 | 0.19 | 0.08 |
| Neutral | A198R | 292 | 570.33 | 565.56 | 1.01 | 0.08 | 0.06 |
| Down | A198V | 304 | 3026.36 | 7305.85 | 0.41 | 0.43 | 0.80 |
| Up | A198M | 301 | 1384.46 | 999.55 | 1.39 | 0.20 | 0.11 |
| Neutral | A198F | 300 | 572.48 | 559.57 | 1.02 | 0.08 | 0.06 |
| Neutral | A198W | 302 | 560.48 | 547.72 | 1.02 | 0.08 | 0.06 |
| Down | A198Y | 297 | 486.57 | 612.28 | 0.79 | 0.07 | 0.07 |
| Up | A198D | 288 | 633.49 | 474.50 | 1.34 | 0.09 | 0.05 |
| Neutral | H199I | 2580 | 520.35 | 496.48 | 1.05 | 0.08 | 0.07 |
| Neutral | H199P | 2584 | 437.57 | 404.21 | 1.08 | 0.07 | 0.05 |
| Neutral | H199G | 2576 | 436.53 | 392.94 | 1.11 | 0.07 | 0.05 |
| Neutral | H199N | 2571 | 420.26 | 375.18 | 1.12 | 0.07 | 0.05 |
| Neutral | H199S | 2575 | 411.09 | 377.36 | 1.09 | 0.06 | 0.05 |
| Neutral | H199L | 2582 | 531.61 | 530.53 | 1.00 | 0.08 | 0.07 |
| Neutral | H199M | 2578 | 413.37 | 384.23 | 1.08 | 0.07 | 0.05 |
| Neutral | H199A | 2583 | 391.56 | 381.36 | 1.03 | 0.06 | 0.05 |
| Neutral | H199C | 2570 | 404.49 | 366.35 | 1.10 | 0.06 | 0.05 |
| Neutral | H199K | 2568 | 402.34 | 383.95 | 1.05 | 0.06 | 0.05 |
| Neutral | H199R | 2569 | 422.19 | 387.94 | 1.09 | 0.07 | 0.05 |
| Neutral | H199V | 2581 | 421.16 | 378.71 | 1.11 | 0.07 | 0.05 |
| Neutral | H199W | 2579 | 377.01 | 345.02 | 1.09 | 0.06 | 0.05 |
| Neutral | H199T | 2573 | 399.21 | 382.65 | 1.04 | 0.06 | 0.05 |
| Neutral | H199E | 2567 | 399.49 | 385.83 | 1.04 | 0.06 | 0.05 |
| Neutral | E200P | 2603 | 414.11 | 409.55 | 1.01 | 0.07 | 0.06 |
| Neutral | E200G | 2595 | 440.94 | 402.85 | 1.09 | 0.07 | 0.05 |
| Neutral | E200A | 2602 | 448.41 | 413.61 | 1.08 | 0.07 | 0.06 |
| Neutral | E200T | 2592 | 461.19 | 418.51 | 1.10 | 0.07 | 0.06 |
| Neutral | E200I | 2599 | 457.88 | 419.19 | 1.09 | 0.07 | 0.06 |
| Neutral | E200W | 2598 | 418.40 | 403.05 | 1.04 | 0.07 | 0.05 |
| Neutral | E200R | 2588 | 449.83 | 425.86 | 1.06 | 0.07 | 0.06 |
| Neutral | E200F | 2596 | 446.49 | 417.58 | 1.07 | 0.07 | 0.06 |
| Neutral | E200M | 2597 | 448.32 | 428.16 | 1.05 | 0.07 | 0.06 |
| Neutral | E200D | 2585 | 428.91 | 401.64 | 1.07 | 0.07 | 0.05 |
| Neutral | E200V | 2600 | 426.45 | 407.13 | 1.05 | 0.07 | 0.06 |
| Neutral | E200C | 2589 | 413.11 | 384.79 | 1.07 | 0.07 | 0.05 |
| Neutral | E200S | 2594 | 422.57 | 391.02 | 1.08 | 0.07 | 0.05 |
| Neutral | E200Y | 2593 | 412.07 | 393.97 | 1.05 | 0.07 | 0.05 |
| Neutral | E200N | 2590 | 430.94 | 412.07 | 1.05 | 0.07 | 0.06 |
| Down | L201A | 2621 | 754.66 | 957.77 | 0.79 | 0.12 | 0.13 |
| Neutral | L201R | 2608 | 442.35 | 442.57 | 1.00 | 0.07 | 0.06 |
| Neutral | L201E | 2605 | 464.22 | 443.89 | 1.05 | 0.07 | 0.06 |
| Neutral | L201P | 2622 | 494.97 | 471.92 | 1.05 | 0.08 | 0.06 |
| Neutral | L201G | 2615 | 574.82 | 590.26 | 0.97 | 0.09 | 0.08 |
| Down | L201V | 2620 | 3359.21 | 4623.67 | 0.73 | 0.53 | 0.62 |
| Down | L201T | 2612 | 1509.22 | 2175.97 | 0.69 | 0.24 | 0.29 |
| Up | L201I | 2619 | 2861.66 | 2231.87 | 1.28 | 0.45 | 0.30 |
| Neutral | L201S | 2614 | 859.79 | 964.65 | 0.89 | 0.14 | 0.13 |
| Neutral | L201W | 2618 | 1258.36 | 1335.56 | 0.94 | 0.20 | 0.18 |
| Neutral | L201Q | 2611 | 657.51 | 749.98 | 0.88 | 0.10 | 0.10 |
| Neutral | L201D | 2604 | 486.09 | 471.81 | 1.03 | 0.08 | 0.06 |
| Down | L201M | 2617 | 5637.84 | 7147.36 | 0.79 | 0.89 | 0.97 |
| Neutral | L201K | 2607 | 484.89 | 467.23 | 1.04 | 0.08 | 0.06 |
| Neutral | L201N | 2610 | 440.03 | 432.42 | 1.02 | 0.07 | 0.06 |
| Neutral | G202T | 2631 | 556.53 | 546.05 | 1.02 | 0.09 | 0.07 |
| Neutral | G202Y | 2632 | 533.64 | 530.73 | 1.01 | 0.08 | 0.07 |
| Neutral | G202E | 2624 | 558.69 | 543.68 | 1.03 | 0.09 | 0.07 |
| Neutral | G202V | 2638 | 569.22 | 572.58 | 0.99 | 0.09 | 0.08 |
| Neutral | G202S | 2633 | 512.82 | 503.35 | 1.02 | 0.08 | 0.07 |
| Neutral | G202L | 2639 | 513.71 | 508.34 | 1.01 | 0.08 | 0.07 |
| Neutral | G202I | 2637 | 535.96 | 516.37 | 1.04 | 0.08 | 0.07 |
| Neutral | G202M | 2635 | 507.94 | 500.04 | 1.02 | 0.08 | 0.07 |
| Neutral | G202H | 2625 | 567.88 | 547.25 | 1.04 | 0.09 | 0.07 |
| Neutral | G202C | 2628 | 508.19 | 499.05 | 1.02 | 0.08 | 0.07 |
| Neutral | G202R | 2627 | 537.10 | 511.28 | 1.05 | 0.08 | 0.07 |
| Neutral | G202P | 2641 | 544.39 | 535.24 | 1.02 | 0.09 | 0.07 |
| Neutral | G202A | 2640 | 580.75 | 571.95 | 1.02 | 0.09 | 0.08 |
| Neutral | G202K | 2626 | 531.07 | 520.45 | 1.02 | 0.08 | 0.07 |
| Neutral | G202D | 2623 | 559.64 | 544.50 | 1.03 | 0.09 | 0.07 |
| Down | H203Y | 2650 | 910.26 | 1218.02 | 0.75 | 0.14 | 0.16 |
| Neutral | H203E | 2643 | 7284.23 | 7937.91 | 0.92 | 1.15 | 1.07 |
| Neutral | H203R | 2645 | 545.70 | 545.36 | 1.00 | 0.09 | 0.07 |
| Neutral | H203Q | 2648 | 570.55 | 541.42 | 1.05 | 0.09 | 0.07 |
| Neutral | H203P | 2660 | 547.00 | 527.67 | 1.04 | 0.09 | 0.07 |
| Neutral | H203G | 2652 | 558.88 | 576.91 | 0.97 | 0.09 | 0.08 |
| Neutral | H203T | 2649 | 534.16 | 535.33 | 1.00 | 0.08 | 0.07 |
| Neutral | H203D | 2642 | 542.85 | 530.31 | 1.02 | 0.09 | 0.07 |
| Down | H203L | 2658 | 1224.67 | 1746.14 | 0.70 | 0.19 | 0.24 |
| Neutral | H203N | 2647 | 547.92 | 532.11 | 1.03 | 0.09 | 0.07 |
| Neutral | H203A | 2659 | 513.18 | 515.49 | 1.00 | 0.08 | 0.07 |
| Neutral | H203S | 2651 | 534.50 | 507.56 | 1.05 | 0.08 | 0.07 |
| Neutral | H203V | 2657 | 565.64 | 554.43 | 1.02 | 0.09 | 0.07 |
| Neutral | H203I | 2656 | 568.56 | 613.73 | 0.93 | 0.09 | 0.08 |
| Neutral | H203C | 2646 | 504.41 | 522.69 | 0.97 | 0.08 | 0.07 |
| Neutral | S204R | 2665 | 557.42 | 544.69 | 1.02 | 0.09 | 0.07 |
| Neutral | S204N | 2667 | 733.30 | 754.34 | 0.97 | 0.12 | 0.10 |
| Neutral | S204A | 2678 | 3654.83 | 3972.28 | 0.92 | 0.58 | 0.54 |
| Down | S204T | 2669 | 1697.49 | 3586.11 | 0.47 | 0.27 | 0.48 |
| Neutral | S204Y | 2670 | 550.01 | 538.07 | 1.02 | 0.09 | 0.07 |
| Up | S204V | 2676 | 3063.02 | 1827.71 | 1.68 | 0.48 | 0.25 |
| Neutral | S204L | 2677 | 501.10 | 594.44 | 0.84 | 0.08 | 0.08 |
| Neutral | S204H | 2663 | 486.78 | 508.13 | 0.96 | 0.08 | 0.07 |
| Neutral | S204D | 2661 | 507.05 | 489.81 | 1.04 | 0.08 | 0.07 |
| Neutral | S204Q | 2668 | 530.67 | 472.92 | 1.12 | 0.08 | 0.06 |
| Neutral | S204G | 2671 | 1483.41 | 1333.79 | 1.11 | 0.23 | 0.18 |
| Neutral | S204W | 2674 | 487.01 | 504.11 | 0.97 | 0.08 | 0.07 |
| Up | S204I | 2675 | 634.82 | 516.30 | 1.23 | 0.10 | 0.07 |
| Neutral | S204K | 2664 | 484.92 | 471.83 | 1.03 | 0.08 | 0.06 |
| Neutral | S204P | 2679 | 483.87 | 506.90 | 0.95 | 0.08 | 0.07 |
| Neutral | L205T | 2688 | 1304.89 | 1099.25 | 1.19 | 0.13 | 0.12 |
| Neutral | L205D | 2680 | 774.29 | 830.37 | 0.93 | 0.08 | 0.09 |
| Neutral | L205S | 2690 | 686.11 | 601.35 | 1.14 | 0.07 | 0.07 |
| Neutral | L205G | 2691 | 792.45 | 790.93 | 1.00 | 0.08 | 0.09 |
| Neutral | L205P | 2698 | 592.15 | 673.32 | 0.88 | 0.06 | 0.07 |
| Neutral | L205E | 2681 | 473.89 | 446.64 | 1.06 | 0.05 | 0.05 |
| Down | L205V | 2696 | 5589.64 | 7308.12 | 0.76 | 0.57 | 0.80 |
| Neutral | L205M | 2693 | 8334.85 | 8229.20 | 1.01 | 0.85 | 0.90 |
| Neutral | L205N | 2686 | 1426.11 | 1322.80 | 1.08 | 0.15 | 0.15 |
| Down | L205C | 2685 | 1903.14 | 2394.15 | 0.79 | 0.20 | 0.26 |
| Down | L205I | 2695 | 5644.28 | 7817.06 | 0.72 | 0.58 | 0.86 |
| Neutral | L205A | 2697 | 1796.22 | 1704.85 | 1.05 | 0.18 | 0.19 |
| Neutral | L205R | 2684 | 508.62 | 575.22 | 0.88 | 0.05 | 0.06 |
| Neutral | L205W | 2694 | 497.92 | 427.60 | 1.16 | 0.05 | 0.05 |
| Neutral | L205Q | 2687 | 2191.83 | 2399.54 | 0.91 | 0.22 | 0.26 |
| Neutral | G206I | 321 | 467.21 | 460.72 | 1.01 | 0.05 | 0.05 |
| Neutral | G206V | 322 | 619.10 | 682.58 | 0.91 | 0.06 | 0.07 |
| Up | G206A | 324 | 4554.61 | 2702.11 | 1.69 | 0.47 | 0.30 |
| Neutral | G206C | 312 | 491.44 | 469.90 | 1.05 | 0.05 | 0.05 |
| Up | G206S | 317 | 1226.37 | 919.66 | 1.33 | 0.13 | 0.10 |
| Neutral | G206P | 325 | 503.21 | 497.87 | 1.01 | 0.05 | 0.05 |
| Neutral | G206L | 323 | 499.74 | 469.53 | 1.06 | 0.05 | 0.05 |
| Neutral | G206D | 307 | 490.08 | 451.61 | 1.09 | 0.05 | 0.05 |
| Neutral | G206M | 319 | 478.55 | 451.47 | 1.06 | 0.05 | 0.05 |
| Neutral | G206R | 311 | 677.07 | 831.95 | 0.81 | 0.07 | 0.09 |
| Neutral | G206Q | 314 | 805.32 | 851.38 | 0.95 | 0.08 | 0.09 |
| Neutral | G206E | 308 | 469.86 | 447.60 | 1.05 | 0.05 | 0.05 |
| Neutral | G206H | 309 | 463.25 | 437.73 | 1.06 | 0.05 | 0.05 |
| Neutral | G206T | 315 | 475.20 | 491.10 | 0.97 | 0.05 | 0.05 |
| Neutral | G206W | 320 | 472.91 | 437.66 | 1.08 | 0.05 | 0.05 |
| Up | L207S | 659 | 657.07 | 501.03 | 1.31 | 0.07 | 0.05 |
| Neutral | L207Y | 658 | 1032.96 | 1142.52 | 0.90 | 0.11 | 0.13 |
| Neutral | L207A | 666 | 6302.90 | 5614.64 | 1.12 | 0.65 | 0.62 |
| Up | L207R | 653 | 3476.88 | 1332.44 | 2.61 | 0.36 | 0.15 |
| Neutral | L207P | 667 | 528.87 | 508.95 | 1.04 | 0.05 | 0.06 |
| Up | L207Q | 656 | 671.72 | 518.36 | 1.30 | 0.07 | 0.06 |
| Neutral | L207N | 655 | 551.03 | 476.05 | 1.16 | 0.06 | 0.05 |
| Up | L207K | 652 | 860.90 | 594.92 | 1.45 | 0.09 | 0.07 |
| Neutral | L207M | 662 | 11903.05 | 12984.69 | 0.92 | 1.22 | 1.42 |
| Neutral | L207W | 663 | 509.40 | 470.26 | 1.08 | 0.05 | 0.05 |
| Neutral | L207H | 651 | 620.20 | 595.55 | 1.04 | 0.06 | 0.07 |
| Neutral | L207D | 649 | 523.82 | 473.80 | 1.11 | 0.05 | 0.05 |
| Neutral | L207V | 665 | 656.95 | 550.54 | 1.19 | 0.08 | 0.07 |
| Neutral | L207I | 664 | 645.37 | 550.32 | 1.17 | 0.08 | 0.07 |
| Up | L207G | 660 | 610.01 | 484.35 | 1.26 | 0.08 | 0.06 |
| Neutral | S208D | 2699 | 10064.82 | 9325.26 | 1.08 | 1.03 | 1.02 |
| Neutral | S208V | 2714 | 10469.49 | 9334.16 | 1.12 | 1.07 | 1.02 |
| Neutral | S208P | 2717 | 9922.26 | 9236.91 | 1.07 | 1.02 | 1.01 |
| Neutral | S208G | 2709 | 10452.64 | 9295.93 | 1.12 | 1.07 | 1.02 |
| Neutral | S208A | 2716 | 10553.22 | 9517.15 | 1.11 | 1.08 | 1.04 |
| Neutral | S208K | 2702 | 22659.58 | 19984.18 | 1.13 | 2.32 | 2.19 |
| Neutral | S208N | 2705 | 9993.85 | 9327.07 | 1.07 | 1.02 | 1.02 |
| Neutral | S208F | 2710 | 8826.28 | 9040.21 | 0.98 | 0.91 | 0.99 |
| Neutral | S208Q | 2706 | 10196.89 | 9183.58 | 1.11 | 1.05 | 1.01 |
| Neutral | S208W | 2712 | 9229.04 | 9226.75 | 1.00 | 0.95 | 1.01 |
| Neutral | S208T | 2707 | 9241.73 | 8912.77 | 1.04 | 0.95 | 0.98 |
| Neutral | S208E | 2700 | 10198.81 | 9401.75 | 1.08 | 1.05 | 1.03 |
| Down | S208C | 2704 | 10497.72 | 16287.64 | 0.64 | 1.08 | 1.79 |
| Neutral | S208R | 2703 | 7639.06 | 6465.10 | 1.18 | 1.34 | 1.28 |
| Up | S208L | 2715 | 7811.78 | 6354.14 | 1.23 | 1.37 | 1.25 |
| Neutral | H209T | 2725 | 466.30 | 415.72 | 1.12 | 0.11 | 0.08 |
| Neutral | H209Y | 2726 | 471.70 | 455.15 | 1.04 | 0.11 | 0.09 |
| Neutral | H209R | 2721 | 489.49 | 463.09 | 1.06 | 0.12 | 0.09 |
| Neutral | H209Q | 2724 | 513.42 | 476.96 | 1.08 | 0.12 | 0.09 |
| Neutral | H209A | 2735 | 511.91 | 469.64 | 1.09 | 0.12 | 0.09 |
| Neutral | H209G | 2728 | 495.58 | 466.25 | 1.06 | 0.12 | 0.09 |
| Neutral | H209N | 2723 | 455.09 | 424.90 | 1.07 | 0.11 | 0.08 |
| Neutral | H209P | 2736 | 526.85 | 480.73 | 1.10 | 0.13 | 0.09 |
| Neutral | H209W | 2731 | 516.05 | 484.16 | 1.07 | 0.12 | 0.09 |
| Neutral | H209V | 2733 | 499.35 | 465.99 | 1.07 | 0.12 | 0.09 |
| Neutral | H209D | 2718 | 479.48 | 442.06 | 1.08 | 0.12 | 0.09 |
| Neutral | H209S | 2727 | 490.77 | 438.98 | 1.12 | 0.12 | 0.09 |
| Neutral | H209F | 2729 | 490.42 | 437.68 | 1.12 | 0.12 | 0.09 |
| Neutral | H209L | 2734 | 491.46 | 441.89 | 1.11 | 0.12 | 0.09 |
| Neutral | H209C | 2722 | 471.56 | 420.60 | 1.12 | 0.11 | 0.08 |
| Neutral | S210C | 331 | 634.06 | 565.38 | 1.12 | 0.15 | 0.11 |
| Neutral | S210G | 336 | 643.08 | 581.11 | 1.11 | 0.16 | 0.11 |
| Up | S210I | 340 | 778.38 | 625.00 | 1.25 | 0.19 | 0.12 |
| Neutral | S210R | 330 | 644.74 | 565.67 | 1.14 | 0.16 | 0.11 |
| Neutral | S210L | 342 | 737.60 | 623.25 | 1.18 | 0.18 | 0.12 |
| Up | S210V | 341 | 1190.35 | 856.63 | 1.39 | 0.29 | 0.17 |
| Neutral | S210H | 328 | 605.43 | 521.90 | 1.16 | 0.15 | 0.10 |
| Neutral | S210N | 332 | 615.29 | 556.38 | 1.11 | 0.15 | 0.11 |
| Neutral | S210F | 337 | 529.93 | 487.42 | 1.09 | 0.13 | 0.09 |
| Neutral | S210P | 344 | 544.94 | 513.59 | 1.06 | 0.13 | 0.10 |
| Neutral | S210W | 339 | 527.32 | 486.97 | 1.08 | 0.13 | 0.09 |
| Neutral | S210Q | 333 | 593.74 | 548.93 | 1.08 | 0.14 | 0.11 |
| Neutral | S210T | 334 | 2977.61 | 3427.71 | 0.87 | 0.72 | 0.67 |
| Neutral | S210K | 329 | 625.14 | 573.41 | 1.09 | 0.15 | 0.11 |
| Neutral | S210A | 343 | 1682.05 | 1546.97 | 1.09 | 0.25 | 0.21 |
| Neutral | T211P | 2755 | 3493.13 | 3774.82 | 0.93 | 0.84 | 0.73 |
| Neutral | T211R | 2741 | 4636.24 | 5429.67 | 0.85 | 1.12 | 1.05 |
| Neutral | T211K | 2740 | 4457.25 | 5411.31 | 0.82 | 1.08 | 1.05 |
| Neutral | T211G | 2747 | 3443.93 | 3543.72 | 0.97 | 0.83 | 0.69 |
| Down | T211M | 2749 | 3806.80 | 4871.37 | 0.78 | 0.92 | 0.95 |
| Neutral | T211N | 2743 | 5924.95 | 6170.25 | 0.96 | 1.43 | 1.20 |
| Neutral | T211V | 2752 | 5095.76 | 5335.63 | 0.96 | 1.23 | 1.04 |
| Neutral | T211H | 2739 | 1885.69 | 1829.82 | 1.03 | 0.46 | 0.36 |
| Neutral | T211Q | 2744 | 4868.86 | 5772.70 | 0.84 | 1.18 | 1.12 |
| Neutral | T211S | 2746 | 4641.02 | 4565.80 | 1.02 | 1.12 | 0.89 |
| Neutral | T211A | 2754 | 2696.88 | 2830.43 | 0.95 | 0.65 | 0.55 |
| Neutral | T211F | 2748 | 1412.47 | 1277.53 | 1.11 | 0.34 | 0.25 |
| Neutral | T211D | 2737 | 2442.24 | 2154.48 | 1.13 | 0.59 | 0.42 |
| Neutral | T211W | 2750 | 1362.99 | 1207.40 | 1.13 | 0.33 | 0.23 |
| Neutral | T211L | 2753 | 2376.23 | 2102.07 | 1.13 | 0.35 | 0.28 |
| Neutral | D212E | 668 | 4877.68 | 4473.75 | 1.09 | 1.18 | 0.87 |
| Neutral | D212A | 685 | 2710.82 | 2417.65 | 1.12 | 0.66 | 0.47 |
| Neutral | D212K | 670 | 2296.16 | 2049.97 | 1.12 | 0.55 | 0.40 |
| Neutral | D212R | 671 | 2273.87 | 2004.06 | 1.13 | 0.55 | 0.39 |
| Neutral | D212T | 675 | 2923.39 | 2699.75 | 1.08 | 0.71 | 0.52 |
| Neutral | D212N | 673 | 4575.59 | 5229.75 | 0.87 | 1.11 | 1.02 |
| Up | D212G | 678 | 1011.62 | 657.28 | 1.54 | 0.24 | 0.13 |
| Neutral | D212S | 677 | 5035.28 | 4894.92 | 1.03 | 1.22 | 0.95 |
| Neutral | D212P | 686 | 3270.81 | 2918.36 | 1.12 | 0.79 | 0.57 |
| Neutral | D212Q | 674 | 2823.54 | 2576.63 | 1.10 | 0.68 | 0.50 |
| Neutral | D212V | 683 | 2000.60 | 1876.86 | 1.07 | 0.48 | 0.36 |
| Neutral | D212L | 684 | 517.72 | 497.60 | 1.04 | 0.13 | 0.10 |
| Neutral | D212F | 679 | 2378.07 | 2185.27 | 1.09 | 0.57 | 0.42 |
| Neutral | D212H | 669 | 4696.49 | 4001.41 | 1.17 | 0.70 | 0.53 |
| Neutral | D212Y | 676 | 5489.99 | 5319.27 | 1.03 | 0.49 | 0.55 |
| Neutral | I213Q | 2763 | 9326.77 | 8702.80 | 1.07 | 0.96 | 0.95 |
| Neutral | I213T | 2764 | 9396.39 | 8742.82 | 1.07 | 0.96 | 0.96 |
| Neutral | I213C | 2761 | 9396.24 | 8859.11 | 1.06 | 0.96 | 0.97 |
| Neutral | I213P | 2774 | 10248.90 | 9319.88 | 1.10 | 1.05 | 1.02 |
| Neutral | I213H | 2758 | 9826.58 | 9076.23 | 1.08 | 1.01 | 1.00 |
| Neutral | I213A | 2773 | 10044.30 | 9249.07 | 1.09 | 1.03 | 1.01 |
| Neutral | I213V | 2771 | 10260.18 | 9459.80 | 1.08 | 1.05 | 1.04 |
| Neutral | I213G | 2767 | 21327.14 | 19706.88 | 1.08 | 2.19 | 2.16 |
| Neutral | I213N | 2762 | 8790.33 | 7995.03 | 1.10 | 0.90 | 0.88 |
| Neutral | I213L | 2772 | 9974.73 | 9208.92 | 1.08 | 1.02 | 1.01 |
| Neutral | I213S | 2766 | 9599.72 | 9004.65 | 1.07 | 0.98 | 0.99 |
| Neutral | I213M | 2769 | 9987.31 | 9083.77 | 1.10 | 1.02 | 1.00 |
| Neutral | I213R | 2760 | 9253.06 | 8997.34 | 1.03 | 0.95 | 0.99 |
| Neutral | I213K | 2759 | 9682.80 | 9286.32 | 1.04 | 0.99 | 1.02 |
| Neutral | I213F | 2768 | 9368.13 | 8940.38 | 1.05 | 0.96 | 0.98 |
| Neutral | I213D | 2756 | 7017.06 | 7368.43 | 0.95 | 0.77 | 0.97 |
| Neutral | I213E | 2757 | 8169.74 | 7234.77 | 1.13 | 0.90 | 0.95 |
| Neutral | G214L | 2791 | 13500.23 | 13135.46 | 1.03 | 1.38 | 1.44 |
| Neutral | G214Q | 2782 | 9914.48 | 9182.63 | 1.08 | 1.02 | 1.01 |
| Neutral | G214S | 2785 | 9503.68 | 9036.70 | 1.05 | 0.97 | 0.99 |
| Neutral | G214T | 2783 | 9940.86 | 9214.25 | 1.08 | 1.02 | 1.01 |
| Neutral | G214V | 2790 | 8185.36 | 7785.72 | 1.05 | 0.84 | 0.85 |
| Neutral | G214I | 2789 | 6068.79 | 5773.01 | 1.05 | 0.62 | 0.63 |
| Neutral | G214R | 2779 | 9720.43 | 9083.04 | 1.07 | 1.00 | 1.00 |
| Neutral | G214P | 2793 | 8763.31 | 8875.24 | 0.99 | 0.90 | 0.97 |
| Neutral | G214E | 2776 | 21602.30 | 19851.77 | 1.09 | 2.22 | 2.18 |
| Neutral | G214A | 2792 | 10063.30 | 9154.93 | 1.10 | 1.03 | 1.00 |
| Neutral | G214D | 2775 | 9967.49 | 9121.71 | 1.09 | 1.02 | 1.00 |
| Neutral | G214F | 2786 | 9750.30 | 9157.75 | 1.06 | 1.00 | 1.00 |
| Neutral | G214Y | 2784 | 9886.62 | 9025.45 | 1.10 | 1.01 | 0.99 |
| Neutral | G214M | 2787 | 9472.77 | 8919.05 | 1.06 | 0.97 | 0.98 |
| Neutral | G214C | 2780 | 6716.52 | 7097.60 | 0.95 | 0.69 | 0.78 |
| Neutral | A215L | 2811 | 454.59 | 428.41 | 1.06 | 0.07 | 0.06 |
| Neutral | A215Q | 2801 | 765.06 | 739.09 | 1.04 | 0.12 | 0.10 |
| Neutral | A215M | 2807 | 672.22 | 624.41 | 1.08 | 0.10 | 0.09 |
| Down | A215G | 2805 | 4240.44 | 6854.29 | 0.62 | 0.66 | 0.96 |
| Neutral | A215W | 2808 | 377.79 | 348.04 | 1.09 | 0.06 | 0.05 |
| Neutral | A215S | 2804 | 559.99 | 538.20 | 1.04 | 0.09 | 0.08 |
| Neutral | A215T | 2802 | 664.02 | 711.35 | 0.93 | 0.10 | 0.10 |
| Neutral | A215V | 2810 | 473.67 | 492.63 | 0.96 | 0.07 | 0.07 |
| Neutral | A215N | 2800 | 4328.77 | 4488.89 | 0.96 | 0.67 | 0.63 |
| Neutral | A215P | 2812 | 638.50 | 596.48 | 1.07 | 0.10 | 0.08 |
| Neutral | A215H | 2796 | 3954.04 | 4447.65 | 0.89 | 0.61 | 0.62 |
| Neutral | A215K | 2797 | 420.46 | 402.71 | 1.04 | 0.07 | 0.06 |
| Neutral | A215I | 2809 | 413.93 | 386.28 | 1.07 | 0.06 | 0.05 |
| Neutral | A215R | 2798 | 421.35 | 389.00 | 1.08 | 0.07 | 0.05 |
| Neutral | A215C | 2799 | 437.44 | 425.03 | 1.03 | 0.07 | 0.06 |
| Neutral | A215D | 2794 | 1031.48 | 913.25 | 1.13 | 0.11 | 0.12 |
| Neutral | L216A | 2830 | 808.93 | 759.54 | 1.07 | 0.13 | 0.12 |
| Neutral | L216C | 2818 | 473.05 | 462.23 | 1.02 | 0.08 | 0.07 |
| Neutral | L216D | 2813 | 497.61 | 457.15 | 1.09 | 0.08 | 0.07 |
| Neutral | L216E | 2814 | 480.72 | 458.21 | 1.05 | 0.08 | 0.07 |
| Neutral | L216G | 2824 | 473.61 | 452.00 | 1.05 | 0.08 | 0.07 |
| Neutral | L216I | 2828 | 7525.06 | 8586.88 | 0.88 | 1.20 | 1.37 |
| Neutral | L216K | 2816 | 478.52 | 460.66 | 1.04 | 0.08 | 0.07 |
| Neutral | L216M | 2826 | 4641.29 | 5160.67 | 0.90 | 0.74 | 0.83 |
| Neutral | L216P | 2831 | 466.46 | 475.96 | 0.98 | 0.07 | 0.08 |
| Neutral | L216Q | 2820 | 693.10 | 638.62 | 1.09 | 0.11 | 0.10 |
| Neutral | L216R | 2817 | 458.77 | 437.34 | 1.05 | 0.07 | 0.07 |
| Neutral | L216S | 2823 | 454.85 | 441.50 | 1.03 | 0.07 | 0.07 |
| Neutral | L216T | 2821 | 1484.74 | 1392.55 | 1.07 | 0.24 | 0.22 |
| Down | L216V | 2829 | 5022.20 | 6281.17 | 0.80 | 0.80 | 1.01 |
| Neutral | L216W | 2827 | 479.55 | 454.07 | 1.06 | 0.08 | 0.07 |
| Neutral | M217P | 2850 | 458.79 | 440.59 | 1.04 | 0.07 | 0.06 |
| Neutral | M217Y | 2841 | 459.96 | 427.87 | 1.07 | 0.07 | 0.06 |
| Neutral | M217T | 2840 | 699.27 | 663.16 | 1.05 | 0.11 | 0.09 |
| Down | M217C | 2837 | 5441.67 | 7486.86 | 0.73 | 0.85 | 1.05 |
| Neutral | M217S | 2842 | 470.92 | 424.03 | 1.11 | 0.07 | 0.06 |
| Neutral | M217L | 2848 | 443.33 | 403.49 | 1.10 | 0.07 | 0.06 |
| Neutral | M217N | 2838 | 462.12 | 424.21 | 1.09 | 0.07 | 0.06 |
| Neutral | M217R | 2836 | 454.58 | 442.20 | 1.03 | 0.07 | 0.06 |
| Neutral | M217Q | 2839 | 449.94 | 427.47 | 1.05 | 0.07 | 0.06 |
| Neutral | M217K | 2835 | 506.96 | 458.74 | 1.11 | 0.08 | 0.06 |
| Neutral | M217G | 2843 | 746.17 | 728.78 | 1.02 | 0.12 | 0.10 |
| Neutral | M217A | 2849 | 437.36 | 410.18 | 1.07 | 0.07 | 0.06 |
| Neutral | M217H | 2834 | 442.18 | 398.29 | 1.11 | 0.07 | 0.06 |
| Neutral | M217I | 2846 | 483.00 | 449.94 | 1.07 | 0.08 | 0.06 |
| Neutral | M217D | 2832 | 503.49 | 491.20 | 1.03 | 0.04 | 0.05 |
| Neutral | Y218C | 350 | 511.72 | 486.65 | 1.05 | 0.08 | 0.07 |
| Down | Y218F | 356 | 4555.92 | 6084.93 | 0.75 | 0.71 | 0.85 |
| Neutral | Y218W | 358 | 8521.86 | 9311.36 | 0.92 | 1.32 | 1.30 |
| Neutral | Y218L | 361 | 834.41 | 743.23 | 1.12 | 0.13 | 0.10 |
| Neutral | Y218A | 362 | 1935.94 | 1652.76 | 1.17 | 0.30 | 0.23 |
| Neutral | Y218P | 363 | 503.58 | 469.06 | 1.07 | 0.08 | 0.07 |
| Neutral | Y218R | 349 | 508.52 | 465.38 | 1.09 | 0.08 | 0.07 |
| Neutral | Y218N | 351 | 704.77 | 640.35 | 1.10 | 0.11 | 0.09 |
| Neutral | Y218V | 360 | 527.03 | 480.30 | 1.10 | 0.08 | 0.07 |
| Neutral | Y218Q | 352 | 513.25 | 468.66 | 1.10 | 0.08 | 0.07 |
| Up | Y218I | 359 | 698.50 | 542.67 | 1.29 | 0.11 | 0.08 |
| Neutral | Y218D | 345 | 835.29 | 885.84 | 0.94 | 0.13 | 0.12 |
| Up | Y218S | 354 | 3702.49 | 3099.73 | 1.19 | 0.58 | 0.43 |
| Neutral | Y218G | 355 | 504.65 | 460.32 | 1.10 | 0.08 | 0.06 |
| Neutral | Y218E | 346 | 511.24 | 471.64 | 1.08 | 0.08 | 0.07 |
| Neutral | P219L | 2868 | 578.24 | 550.18 | 1.05 | 0.09 | 0.08 |
| Neutral | P219C | 2856 | 622.59 | 613.51 | 1.01 | 0.10 | 0.09 |
| Neutral | P219V | 2867 | 586.82 | 583.21 | 1.01 | 0.09 | 0.08 |
| Neutral | P219D | 2851 | 819.59 | 881.94 | 0.93 | 0.13 | 0.12 |
| Neutral | P219F | 2863 | 571.45 | 542.25 | 1.05 | 0.09 | 0.08 |
| Neutral | P219A | 2869 | 1749.52 | 1799.14 | 0.97 | 0.27 | 0.25 |
| Neutral | P219T | 2859 | 870.52 | 853.07 | 1.02 | 0.14 | 0.12 |
| Neutral | P219E | 2852 | 895.73 | 858.50 | 1.04 | 0.14 | 0.12 |
| Neutral | P219Q | 2858 | 601.64 | 557.23 | 1.08 | 0.09 | 0.08 |
| Neutral | P219R | 2855 | 580.05 | 533.83 | 1.09 | 0.09 | 0.07 |
| Neutral | P219H | 2853 | 595.81 | 592.49 | 1.01 | 0.09 | 0.08 |
| Neutral | P219G | 2862 | 625.62 | 619.20 | 1.01 | 0.10 | 0.09 |
| Neutral | P219K | 2854 | 647.47 | 633.20 | 1.02 | 0.10 | 0.09 |
| Neutral | P219S | 2861 | 1549.48 | 1669.93 | 0.93 | 0.24 | 0.23 |
| Neutral | P219W | 2865 | 929.41 | 912.72 | 1.02 | 0.14 | 0.13 |
| Down | S220R | 2874 | 7949.20 | 10460.71 | 0.76 | 1.23 | 1.46 |
| Neutral | S220A | 2887 | 9804.98 | 9347.41 | 1.05 | 1.52 | 1.31 |
| Neutral | S220Q | 2878 | 9804.83 | 9328.79 | 1.05 | 1.52 | 1.30 |
| Neutral | S220T | 2877 | 9371.43 | 9378.23 | 1.00 | 1.46 | 1.31 |
| Down | S220L | 2886 | 1688.62 | 2607.71 | 0.65 | 0.26 | 0.36 |
| Down | S220K | 2873 | 2607.58 | 3704.87 | 0.70 | 0.40 | 0.52 |
| Neutral | S220G | 2880 | 9916.14 | 9356.60 | 1.06 | 1.54 | 1.31 |
| Down | S220H | 2872 | 1496.17 | 1874.12 | 0.80 | 0.23 | 0.26 |
| Neutral | S220E | 2871 | 3553.14 | 3992.18 | 0.89 | 0.55 | 0.56 |
| Neutral | S220M | 2882 | 7913.94 | 8545.54 | 0.93 | 1.23 | 1.20 |
| Neutral | S220V | 2885 | 10179.81 | 9414.03 | 1.08 | 1.58 | 1.32 |
| Neutral | S220P | 2888 | 592.32 | 587.51 | 1.01 | 0.09 | 0.08 |
| Down | S220I | 2884 | 6596.23 | 8678.69 | 0.76 | 1.02 | 1.21 |
| Down | S220F | 2881 | 2458.37 | 3612.28 | 0.68 | 0.38 | 0.51 |
| Neutral | S220N | 2876 | 10548.94 | 9399.76 | 1.12 | 1.64 | 1.31 |
| Up | Y221W | 2902 | 1201.23 | 891.46 | 1.35 | 0.19 | 0.12 |
| Neutral | Y221K | 2892 | 595.72 | 575.31 | 1.04 | 0.09 | 0.08 |
| Neutral | Y221Q | 2896 | 592.45 | 568.96 | 1.04 | 0.09 | 0.08 |
| Neutral | Y221C | 2894 | 583.88 | 558.96 | 1.04 | 0.09 | 0.08 |
| Neutral | Y221N | 2895 | 607.96 | 599.09 | 1.01 | 0.09 | 0.08 |
| Neutral | Y221P | 2907 | 575.23 | 546.02 | 1.05 | 0.09 | 0.08 |
| Neutral | Y221V | 2904 | 600.84 | 608.45 | 0.99 | 0.09 | 0.09 |
| Neutral | Y221A | 2906 | 613.20 | 571.57 | 1.07 | 0.10 | 0.08 |
| Neutral | Y221G | 2899 | 558.30 | 544.78 | 1.02 | 0.09 | 0.08 |
| Neutral | Y221R | 2893 | 508.18 | 483.59 | 1.05 | 0.08 | 0.07 |
| Neutral | Y221S | 2898 | 551.66 | 511.82 | 1.08 | 0.09 | 0.07 |
| Up | Y221M | 2901 | 733.99 | 576.28 | 1.27 | 0.11 | 0.08 |
| Neutral | Y221T | 2897 | 552.92 | 554.37 | 1.00 | 0.09 | 0.08 |
| Neutral | Y221L | 2905 | 600.40 | 544.47 | 1.10 | 0.09 | 0.08 |
| Neutral | Y221E | 2890 | 585.19 | 609.28 | 0.96 | 0.09 | 0.09 |
| Down | T222L | 2924 | 1251.44 | 1749.83 | 0.72 | 0.21 | 0.25 |
| Down | T222Y | 2916 | 3088.86 | 4344.09 | 0.71 | 0.52 | 0.61 |
| Neutral | T222R | 2912 | 7857.83 | 8130.34 | 0.97 | 1.33 | 1.14 |
| Neutral | T222V | 2923 | 6050.08 | 7520.37 | 0.80 | 1.03 | 1.06 |
| Neutral | T222P | 2926 | 9566.57 | 8477.71 | 1.13 | 1.62 | 1.19 |
| Neutral | T222S | 2917 | 8669.64 | 8464.76 | 1.02 | 1.47 | 1.19 |
| Neutral | T222A | 2925 | 5927.34 | 6623.26 | 0.89 | 1.00 | 0.93 |
| Down | T222H | 2910 | 4207.02 | 5413.49 | 0.78 | 0.71 | 0.76 |
| Neutral | T222G | 2918 | 7265.81 | 7630.73 | 0.95 | 1.23 | 1.07 |
| Neutral | T222M | 2920 | 4765.98 | 5354.04 | 0.89 | 0.81 | 0.75 |
| Neutral | T222F | 2919 | 8084.32 | 8023.96 | 1.01 | 1.37 | 1.13 |
| Neutral | T222C | 2913 | 1134.10 | 1047.66 | 1.08 | 0.19 | 0.15 |
| Neutral | T222I | 2922 | 489.93 | 514.09 | 0.95 | 0.08 | 0.07 |
| Neutral | T222N | 2914 | 8082.92 | 8215.81 | 0.98 | 1.37 | 1.15 |
| Down | T222W | 2921 | 4390.84 | 5903.99 | 0.74 | 0.74 | 0.83 |
| Neutral | T222D | 2908 | 4859.28 | 5584.93 | 0.87 | 0.53 | 0.73 |
| Neutral | F223L | 380 | 2776.43 | 3305.29 | 0.84 | 0.47 | 0.46 |
| Neutral | F223T | 372 | 7801.97 | 7792.62 | 1.00 | 1.32 | 1.09 |
| Up | F223C | 369 | 3115.11 | 2488.91 | 1.25 | 0.53 | 0.35 |
| Neutral | F223R | 368 | 5508.50 | 5094.99 | 1.08 | 0.93 | 0.71 |
| Neutral | F223N | 370 | 7434.46 | 6650.94 | 1.12 | 1.26 | 0.93 |
| Neutral | F223P | 382 | 8466.83 | 7678.71 | 1.10 | 1.43 | 1.08 |
| Up | F223E | 365 | 7194.34 | 5884.03 | 1.22 | 1.22 | 0.83 |
| Up | F223G | 375 | 3236.56 | 2599.04 | 1.25 | 0.55 | 0.36 |
| Neutral | F223Q | 371 | 8100.68 | 7468.16 | 1.08 | 1.37 | 1.05 |
| Up | F223A | 381 | 5226.86 | 3982.92 | 1.31 | 0.89 | 0.56 |
| Up | F223S | 374 | 6006.80 | 4916.07 | 1.22 | 1.02 | 0.69 |
| Neutral | F223Y | 373 | 9072.25 | 8479.33 | 1.07 | 1.54 | 1.19 |
| Neutral | F223H | 366 | 8573.59 | 8056.97 | 1.06 | 1.45 | 1.13 |
| Neutral | F223K | 367 | 4021.97 | 3712.91 | 1.08 | 0.60 | 0.49 |
| Neutral | F223M | 376 | 525.66 | 441.29 | 1.19 | 0.08 | 0.06 |
| Neutral | S224G | 2937 | 5580.59 | 6030.81 | 0.93 | 0.89 | 0.97 |
| Neutral | S224T | 2935 | 6189.79 | 7398.93 | 0.84 | 0.99 | 1.18 |
| Neutral | S224Q | 2934 | 7258.89 | 8221.79 | 0.88 | 1.16 | 1.32 |
| Neutral | S224R | 2931 | 4718.67 | 4984.94 | 0.95 | 0.76 | 0.80 |
| Neutral | S224P | 2945 | 475.19 | 459.57 | 1.03 | 0.08 | 0.07 |
| Neutral | S224I | 2941 | 5653.45 | 6319.33 | 0.89 | 0.90 | 1.01 |
| Neutral | S224V | 2942 | 4074.45 | 5042.87 | 0.81 | 0.65 | 0.81 |
| Down | S224L | 2943 | 4272.54 | 5590.35 | 0.76 | 0.68 | 0.89 |
| Neutral | S224C | 2932 | 4057.16 | 4912.59 | 0.83 | 0.65 | 0.79 |
| Neutral | S224K | 2930 | 7286.24 | 8122.32 | 0.90 | 1.17 | 1.30 |
| Neutral | S224D | 2927 | 7201.97 | 8490.41 | 0.85 | 1.15 | 1.36 |
| Neutral | S224H | 2929 | 5928.85 | 6787.33 | 0.87 | 0.95 | 1.09 |
| Neutral | S224M | 2939 | 5967.51 | 6770.07 | 0.88 | 0.95 | 1.08 |
| Neutral | S224A | 2944 | 469.39 | 427.21 | 1.10 | 0.08 | 0.07 |
| Down | S224W | 2940 | 4323.69 | 5971.55 | 0.72 | 0.69 | 0.96 |
| Neutral | G225D | 2946 | 4925.13 | 4615.89 | 1.07 | 0.83 | 0.65 |
| Neutral | G225R | 2950 | 6317.32 | 6775.84 | 0.93 | 1.07 | 0.95 |
| Neutral | G225Q | 2953 | 8693.50 | 8267.06 | 1.05 | 1.47 | 1.16 |
| Neutral | G225M | 2958 | 3626.70 | 3585.88 | 1.01 | 0.61 | 0.50 |
| Neutral | G225P | 2964 | 4775.00 | 4558.87 | 1.05 | 0.81 | 0.64 |
| Neutral | G225W | 2959 | 6452.91 | 7515.31 | 0.86 | 1.09 | 1.05 |
| Neutral | G225S | 2956 | 4811.54 | 4789.30 | 1.00 | 0.82 | 0.67 |
| Neutral | G225E | 2947 | 9174.21 | 8356.85 | 1.10 | 1.55 | 1.17 |
| Neutral | G225V | 2961 | 3525.03 | 3330.02 | 1.06 | 0.60 | 0.47 |
| Neutral | G225T | 2954 | 7463.15 | 7841.71 | 0.95 | 1.26 | 1.10 |
| Neutral | G225K | 2949 | 7135.01 | 7721.15 | 0.92 | 1.21 | 1.08 |
| Neutral | G225N | 2952 | 5858.96 | 5807.35 | 1.01 | 0.99 | 0.81 |
| Neutral | G225C | 2951 | 1631.86 | 1835.77 | 0.89 | 0.28 | 0.26 |
| Neutral | G225H | 2948 | 8719.92 | 8448.61 | 1.03 | 1.48 | 1.19 |
| Neutral | G225A | 2963 | 6048.29 | 5768.91 | 1.05 | 1.03 | 0.81 |
| Neutral | D226S | 2974 | 8608.26 | 8605.77 | 1.00 | 1.46 | 1.21 |
| Neutral | D226W | 2978 | 1817.34 | 2172.37 | 0.84 | 0.31 | 0.30 |
| Down | D226R | 2968 | 5584.63 | 7070.57 | 0.79 | 0.95 | 0.99 |
| Neutral | D226A | 2982 | 6987.67 | 7786.46 | 0.90 | 1.18 | 1.09 |
| Neutral | D226N | 2970 | 6464.01 | 7314.30 | 0.88 | 1.10 | 1.03 |
| Neutral | D226T | 2972 | 3450.45 | 4219.45 | 0.82 | 0.58 | 0.59 |
| Neutral | D226E | 2965 | 9308.62 | 8744.05 | 1.06 | 1.58 | 1.23 |
| Neutral | D226L | 2981 | 3411.80 | 4254.22 | 0.80 | 0.58 | 0.60 |
| Neutral | D226P | 2983 | 8574.77 | 8325.60 | 1.03 | 1.45 | 1.17 |
| Neutral | D226H | 2966 | 4217.71 | 4180.90 | 1.01 | 0.71 | 0.59 |
| Neutral | D226G | 2975 | 6320.31 | 7359.33 | 0.86 | 1.07 | 1.03 |
| Neutral | D226I | 2979 | 7753.45 | 8016.92 | 0.97 | 1.31 | 1.12 |
| Neutral | D226M | 2977 | 6501.53 | 7210.62 | 0.90 | 1.10 | 1.01 |
| Neutral | D226V | 2980 | 3680.55 | 4504.86 | 0.82 | 0.62 | 0.63 |
| Neutral | D226C | 2969 | 7227.15 | 7735.09 | 0.93 | 1.22 | 1.09 |
| Neutral | V227A | 400 | 5109.18 | 5056.19 | 1.01 | 0.87 | 0.71 |
| Up | V227C | 388 | 4040.96 | 3278.65 | 1.23 | 0.68 | 0.46 |
| Up | V227D | 383 | 1190.09 | 731.34 | 1.63 | 0.20 | 0.10 |
| Up | V227E | 384 | 5381.63 | 2605.20 | 2.07 | 0.91 | 0.37 |
| Neutral | V227K | 386 | 580.24 | 550.24 | 1.05 | 0.10 | 0.08 |
| Up | V227L | 399 | 4883.98 | 4000.68 | 1.22 | 0.83 | 0.56 |
| Neutral | V227P | 401 | 3682.22 | 3644.94 | 1.01 | 0.62 | 0.51 |
| Up | V227S | 393 | 3863.33 | 3131.47 | 1.23 | 0.65 | 0.44 |
| Neutral | V227T | 391 | 9817.63 | 8523.33 | 1.15 | 1.66 | 1.20 |
| Up | V227W | 397 | 1845.46 | 1374.06 | 1.34 | 0.31 | 0.19 |
| Up | V227Y | 392 | 657.68 | 542.07 | 1.21 | 0.11 | 0.08 |
| Neutral | V227G | 394 | 1040.74 | 883.01 | 1.18 | 0.15 | 0.12 |
| Up | V227H | 385 | 689.20 | 504.65 | 1.37 | 0.10 | 0.07 |
| Up | V227Q | 390 | 696.97 | 506.11 | 1.38 | 0.10 | 0.07 |
| Neutral | V227R | 387 | 664.31 | 561.06 | 1.18 | 0.10 | 0.07 |
| Neutral | Q228A | 419 | 9710.68 | 9175.62 | 1.06 | 4.50 | 3.13 |
| Neutral | Q228D | 402 | 10931.89 | 9274.00 | 1.18 | 5.06 | 3.16 |
| Neutral | Q228E | 403 | 9825.63 | 9396.31 | 1.05 | 4.55 | 3.20 |
| Neutral | Q228G | 412 | 9400.23 | 9058.34 | 1.04 | 4.35 | 3.09 |
| Neutral | Q228H | 404 | 9748.08 | 9288.74 | 1.05 | 4.51 | 3.17 |
| Neutral | Q228K | 405 | 9999.23 | 9262.11 | 1.08 | 4.63 | 3.16 |
| Neutral | Q228L | 418 | 9199.01 | 8900.02 | 1.03 | 4.26 | 3.03 |
| Neutral | Q228M | 414 | 9510.07 | 8915.79 | 1.07 | 4.40 | 3.04 |
| Neutral | Q228N | 408 | 8774.26 | 8679.09 | 1.01 | 4.06 | 2.96 |
| Up | Q228P | 420 | 2862.74 | 1291.55 | 2.22 | 1.33 | 0.44 |
| Neutral | Q228R | 406 | 7443.02 | 8091.71 | 0.92 | 3.45 | 2.76 |
| Neutral | Q228S | 411 | 8188.30 | 8162.27 | 1.00 | 3.79 | 2.78 |
| Neutral | Q228T | 409 | 4335.26 | 5179.47 | 0.84 | 2.01 | 1.77 |
| Neutral | Q228W | 415 | 6169.39 | 6508.89 | 0.95 | 2.86 | 2.22 |
| Neutral | Q228Y | 410 | 7426.87 | 7840.08 | 0.95 | 3.44 | 2.67 |
| Neutral | L229R | 425 | 485.95 | 489.74 | 0.99 | 0.22 | 0.17 |
| Up | L229A | 438 | 2627.78 | 2118.07 | 1.24 | 1.22 | 0.72 |
| Up | L229T | 429 | 3780.54 | 1464.25 | 2.58 | 1.75 | 0.50 |
| Neutral | L229Q | 428 | 5328.09 | 5303.89 | 1.00 | 2.47 | 1.81 |
| Neutral | L229P | 439 | 4795.14 | 5009.73 | 0.96 | 2.22 | 1.71 |
| Neutral | L229E | 422 | 737.30 | 657.34 | 1.12 | 0.34 | 0.22 |
| Neutral | L229W | 435 | 577.28 | 520.84 | 1.11 | 0.27 | 0.18 |
| Neutral | L229M | 434 | 3207.73 | 2829.20 | 1.13 | 1.49 | 0.96 |
| Up | L229I | 436 | 1158.56 | 828.94 | 1.40 | 0.54 | 0.28 |
| Neutral | L229G | 432 | 552.22 | 520.30 | 1.06 | 0.26 | 0.18 |
| Up | L229C | 426 | 633.99 | 516.61 | 1.23 | 0.29 | 0.18 |
| Neutral | L229Y | 430 | 549.90 | 504.60 | 1.09 | 0.25 | 0.17 |
| Neutral | L229D | 421 | 498.06 | 485.50 | 1.03 | 0.23 | 0.17 |
| Neutral | L229H | 423 | 551.54 | 501.77 | 1.10 | 0.26 | 0.17 |
| Neutral | L229V | 437 | 6249.58 | 6487.57 | 0.96 | 2.89 | 2.21 |
| Up | A230L | 704 | 3437.91 | 2154.62 | 1.60 | 1.59 | 0.73 |
| Neutral | A230G | 698 | 6804.87 | 8304.63 | 0.82 | 3.15 | 2.83 |
| Neutral | A230W | 701 | 4773.24 | 5118.69 | 0.93 | 2.21 | 1.74 |
| Up | A230P | 705 | 699.78 | 568.62 | 1.23 | 0.32 | 0.19 |
| Neutral | A230D | 687 | 7281.83 | 8033.59 | 0.91 | 3.37 | 2.74 |
| Up | A230R | 691 | 2986.52 | 2304.10 | 1.30 | 1.38 | 0.79 |
| Up | A230I | 702 | 4609.64 | 3490.44 | 1.32 | 2.13 | 1.19 |
| Neutral | A230S | 697 | 9181.71 | 8982.15 | 1.02 | 4.25 | 3.06 |
| Neutral | A230C | 692 | 5061.18 | 5781.86 | 0.88 | 2.34 | 1.97 |
| Up | A230V | 703 | 5030.94 | 3433.18 | 1.47 | 2.33 | 1.17 |
| Neutral | A230T | 695 | 8822.74 | 9169.52 | 0.96 | 4.08 | 3.13 |
| Neutral | A230Y | 696 | 3327.47 | 2858.53 | 1.16 | 1.54 | 0.97 |
| Neutral | A230M | 700 | 9543.01 | 9520.33 | 1.00 | 4.42 | 3.25 |
| Neutral | A230N | 693 | 9217.40 | 9384.02 | 0.98 | 4.27 | 3.20 |
| Up | A230H | 689 | 8514.47 | 6763.46 | 1.26 | 3.94 | 2.31 |
| Neutral | Q231I | 2998 | 4161.47 | 3993.24 | 1.04 | 1.93 | 1.36 |
| Neutral | Q231A | 3001 | 6899.50 | 6650.48 | 1.04 | 3.19 | 2.27 |
| Neutral | Q231F | 2995 | 4049.29 | 4120.56 | 0.98 | 1.87 | 1.40 |
| Neutral | Q231P | 3002 | 613.73 | 591.34 | 1.04 | 0.28 | 0.20 |
| Neutral | Q231Y | 2992 | 2460.04 | 2960.32 | 0.83 | 1.14 | 1.01 |
| Down | Q231R | 2988 | 366.16 | 1013.08 | 0.36 | 0.17 | 0.35 |
| Up | Q231L | 3000 | 3744.09 | 2834.26 | 1.32 | 1.73 | 0.97 |
| Neutral | Q231D | 2984 | 7507.92 | 7957.26 | 0.94 | 3.48 | 2.71 |
| Neutral | Q231G | 2994 | 5743.70 | 6012.88 | 0.96 | 2.66 | 2.05 |
| Neutral | Q231V | 2999 | 6114.28 | 6172.88 | 0.99 | 2.83 | 2.10 |
| Neutral | Q231W | 2997 | 4910.80 | 4767.26 | 1.03 | 2.27 | 1.62 |
| Neutral | Q231S | 2993 | 6593.10 | 7180.32 | 0.92 | 3.05 | 2.45 |
| Neutral | Q231H | 2986 | 4961.12 | 5622.05 | 0.88 | 2.30 | 1.92 |
| Up | Q231C | 2989 | 970.74 | 697.37 | 1.39 | 0.45 | 0.24 |
| Down | Q231M | 2996 | 3314.86 | 4166.20 | 0.80 | 1.53 | 1.42 |
| Neutral | D232H | 3004 | 6046.51 | 7174.55 | 0.84 | 2.80 | 2.45 |
| Down | D232G | 3013 | 5492.29 | 7079.04 | 0.78 | 2.54 | 2.41 |
| Neutral | D232R | 3006 | 5077.01 | 5692.86 | 0.89 | 2.35 | 1.94 |
| Neutral | D232P | 3021 | 7665.95 | 8291.54 | 0.92 | 3.55 | 2.83 |
| Neutral | D232Y | 3011 | 3001.62 | 3628.15 | 0.83 | 1.39 | 1.24 |
| Neutral | D232N | 3008 | 825.42 | 739.97 | 1.12 | 0.38 | 0.25 |
| Up | D232S | 3012 | 14389.74 | 5104.26 | 2.82 | 6.66 | 1.74 |
| Neutral | D232F | 3014 | 3599.26 | 3719.64 | 0.97 | 1.67 | 1.27 |
| Neutral | D232V | 3018 | 7938.31 | 9176.75 | 0.87 | 3.68 | 3.13 |
| Neutral | D232K | 3005 | 4844.31 | 5829.58 | 0.83 | 2.24 | 1.99 |
| Neutral | D232W | 3016 | 8404.13 | 9037.60 | 0.93 | 3.89 | 3.08 |
| Neutral | D232Q | 3009 | 7550.58 | 8008.46 | 0.94 | 3.50 | 2.73 |
| Neutral | D232E | 3003 | 9294.39 | 9251.91 | 1.00 | 4.30 | 3.15 |
| Neutral | D232T | 3010 | 9434.20 | 9583.53 | 0.98 | 4.37 | 3.27 |
| Up | D232L | 3019 | 7603.68 | 4213.70 | 1.80 | 3.52 | 1.44 |
| Neutral | D233Q | 446 | 653.34 | 640.95 | 1.02 | 0.30 | 0.22 |
| Neutral | D233P | 458 | 629.51 | 626.42 | 1.00 | 0.29 | 0.21 |
| Neutral | D233S | 449 | 637.89 | 623.07 | 1.02 | 0.30 | 0.21 |
| Neutral | D233T | 447 | 621.24 | 615.06 | 1.01 | 0.29 | 0.21 |
| Neutral | D233A | 457 | 650.58 | 634.46 | 1.03 | 0.30 | 0.22 |
| Neutral | D233W | 453 | 644.19 | 649.94 | 0.99 | 0.30 | 0.22 |
| Neutral | D233G | 450 | 657.96 | 666.27 | 0.99 | 0.30 | 0.23 |
| Up | D233R | 443 | 715.14 | 467.03 | 1.53 | 0.33 | 0.16 |
| Up | D233E | 440 | 2881.17 | 1918.57 | 1.50 | 1.33 | 0.65 |
| Neutral | D233N | 445 | 580.50 | 572.32 | 1.01 | 0.27 | 0.20 |
| Neutral | D233V | 455 | 609.36 | 603.42 | 1.01 | 0.28 | 0.21 |
| Neutral | D233M | 452 | 581.45 | 593.79 | 0.98 | 0.27 | 0.20 |
| Neutral | D233L | 456 | 584.42 | 597.47 | 0.98 | 0.27 | 0.20 |
| Neutral | D233K | 442 | 608.53 | 615.71 | 0.99 | 0.28 | 0.21 |
| Neutral | D233I | 454 | 682.66 | 661.78 | 1.03 | 0.32 | 0.23 |
| Up | I234A | 476 | 1458.10 | 1018.50 | 1.43 | 0.31 | 0.18 |
| Up | I234T | 467 | 1451.51 | 1188.67 | 1.22 | 0.31 | 0.21 |
| Down | I234V | 474 | 3474.82 | 5245.94 | 0.66 | 0.73 | 0.91 |
| Up | I234W | 473 | 743.35 | 570.02 | 1.30 | 0.16 | 0.10 |
| Up | I234E | 460 | 1301.06 | 840.09 | 1.55 | 0.27 | 0.15 |
| Neutral | I234G | 470 | 498.38 | 467.78 | 1.07 | 0.10 | 0.08 |
| Down | I234L | 475 | 2584.47 | 3312.61 | 0.78 | 0.54 | 0.57 |
| Up | I234H | 461 | 684.95 | 503.63 | 1.36 | 0.14 | 0.09 |
| Down | I234M | 472 | 3478.87 | 4732.62 | 0.74 | 0.73 | 0.82 |
| Up | I234N | 465 | 633.30 | 513.69 | 1.23 | 0.13 | 0.09 |
| Neutral | I234Y | 468 | 749.28 | 930.94 | 0.80 | 0.16 | 0.16 |
| Neutral | I234P | 477 | 470.41 | 431.33 | 1.09 | 0.10 | 0.07 |
| Neutral | I234D | 459 | 428.28 | 397.06 | 1.08 | 0.09 | 0.07 |
| Up | I234Q | 466 | 1095.18 | 837.53 | 1.31 | 0.23 | 0.15 |
| Up | I234C | 464 | 702.09 | 483.22 | 1.45 | 0.15 | 0.08 |
| Neutral | D235H | 3023 | 5217.44 | 6443.75 | 0.81 | 1.10 | 1.12 |
| Neutral | D235G | 3032 | 5966.03 | 6875.44 | 0.87 | 1.26 | 1.19 |
| Down | D235A | 3039 | 5874.20 | 9191.04 | 0.64 | 1.24 | 1.59 |
| Neutral | D235P | 3040 | 488.90 | 464.91 | 1.05 | 0.10 | 0.08 |
| Neutral | D235L | 3038 | 6353.97 | 6868.10 | 0.93 | 1.34 | 1.19 |
| Down | D235V | 3037 | 4167.59 | 6418.00 | 0.65 | 0.88 | 1.11 |
| Neutral | D235E | 3022 | 8377.14 | 8154.10 | 1.03 | 1.76 | 1.41 |
| Neutral | D235R | 3025 | 7249.34 | 7013.16 | 1.03 | 1.53 | 1.22 |
| Neutral | D235Q | 3028 | 6969.55 | 7752.26 | 0.90 | 1.47 | 1.34 |
| Neutral | D235T | 3029 | 6608.45 | 7282.18 | 0.91 | 1.39 | 1.26 |
| Down | D235C | 3026 | 3805.25 | 5237.38 | 0.73 | 0.80 | 0.91 |
| Down | D235S | 3031 | 3798.36 | 6310.00 | 0.60 | 0.80 | 1.09 |
| Neutral | D235N | 3027 | 6427.98 | 6780.43 | 0.95 | 1.35 | 1.18 |
| Neutral | D235Y | 3030 | 3539.06 | 3728.70 | 0.95 | 0.75 | 0.65 |
| Neutral | D235I | 3036 | 5390.78 | 5499.20 | 0.98 | 1.14 | 0.95 |
| Neutral | G236M | 3053 | 8157.95 | 7452.06 | 1.09 | 1.72 | 1.29 |
| Neutral | G236R | 3045 | 8890.85 | 8115.23 | 1.10 | 1.87 | 1.41 |
| Neutral | G236D | 3041 | 3820.99 | 4576.94 | 0.83 | 0.80 | 0.79 |
| Neutral | G236S | 3051 | 9887.69 | 8558.48 | 1.16 | 2.08 | 1.48 |
| Down | G236T | 3049 | 6244.13 | 7949.24 | 0.79 | 1.32 | 1.38 |
| Neutral | G236C | 3046 | 8441.80 | 7993.25 | 1.06 | 1.78 | 1.39 |
| Neutral | G236K | 3044 | 9473.18 | 8370.29 | 1.13 | 2.00 | 1.45 |
| Neutral | G236E | 3042 | 7240.97 | 7573.43 | 0.96 | 1.53 | 1.31 |
| Up | G236P | 3059 | 969.12 | 668.23 | 1.45 | 0.20 | 0.12 |
| Neutral | G236I | 3055 | 5356.96 | 5189.19 | 1.03 | 1.13 | 0.90 |
| Down | G236Y | 3050 | 4511.53 | 5725.61 | 0.79 | 0.95 | 0.99 |
| Neutral | G236L | 3057 | 8099.87 | 7699.72 | 1.05 | 1.71 | 1.34 |
| Down | G236V | 3056 | 4448.72 | 6422.58 | 0.69 | 0.94 | 1.11 |
| Neutral | G236N | 3047 | 8477.40 | 8088.17 | 1.05 | 1.79 | 1.40 |
| Neutral | G236F | 3052 | 5761.86 | 5560.83 | 1.04 | 1.21 | 0.96 |
| Neutral | I237S | 3070 | 587.31 | 536.19 | 1.10 | 0.12 | 0.09 |
| Up | I237L | 3076 | 2880.14 | 2240.61 | 1.29 | 0.61 | 0.39 |
| Neutral | I237R | 3064 | 572.70 | 548.66 | 1.04 | 0.12 | 0.10 |
| Neutral | I237Q | 3067 | 552.21 | 543.69 | 1.02 | 0.12 | 0.09 |
| Neutral | I237K | 3063 | 571.56 | 531.05 | 1.08 | 0.12 | 0.09 |
| Neutral | I237D | 3060 | 567.39 | 512.64 | 1.11 | 0.12 | 0.09 |
| Down | I237A | 3077 | 1512.93 | 2138.58 | 0.71 | 0.32 | 0.37 |
| Neutral | I237T | 3068 | 572.40 | 524.74 | 1.09 | 0.12 | 0.09 |
| Neutral | I237E | 3061 | 555.97 | 535.94 | 1.04 | 0.12 | 0.09 |
| Neutral | I237C | 3065 | 565.11 | 532.36 | 1.06 | 0.12 | 0.09 |
| Neutral | I237G | 3071 | 620.23 | 586.38 | 1.06 | 0.13 | 0.10 |
| Neutral | I237P | 3078 | 554.04 | 497.24 | 1.11 | 0.12 | 0.09 |
| Neutral | I237Y | 3069 | 688.92 | 602.65 | 1.14 | 0.15 | 0.10 |
| Down | I237W | 3074 | 4188.38 | 5663.94 | 0.74 | 0.62 | 0.75 |
| Neutral | I237N | 3066 | 5368.49 | 6271.59 | 0.86 | 0.80 | 0.83 |
| Down | Q238G | 3089 | 1382.45 | 2524.64 | 0.55 | 0.29 | 0.44 |
| Down | Q238H | 3081 | 3150.20 | 5045.01 | 0.62 | 0.66 | 0.88 |
| Down | Q238S | 3088 | 3298.60 | 4524.89 | 0.73 | 0.69 | 0.78 |
| Down | Q238Y | 3087 | 2078.90 | 2953.44 | 0.70 | 0.44 | 0.51 |
| Down | Q238F | 3090 | 1342.33 | 1916.87 | 0.70 | 0.28 | 0.33 |
| Down | Q238E | 3080 | 4075.95 | 5719.51 | 0.71 | 0.86 | 0.99 |
| Down | Q238L | 3095 | 3030.44 | 4771.52 | 0.64 | 0.64 | 0.83 |
| Neutral | Q238W | 3092 | 3649.81 | 4317.00 | 0.85 | 0.77 | 0.75 |
| Neutral | Q238P | 3097 | 568.68 | 548.50 | 1.04 | 0.12 | 0.10 |
| Down | Q238R | 3083 | 4199.78 | 5952.76 | 0.71 | 0.88 | 1.03 |
| Down | Q238C | 3084 | 3179.60 | 4072.46 | 0.78 | 0.67 | 0.71 |
| Neutral | Q238N | 3085 | 3119.13 | 3894.89 | 0.80 | 0.66 | 0.68 |
| Down | Q238I | 3093 | 3863.21 | 5191.15 | 0.74 | 0.81 | 0.90 |
| Neutral | Q238T | 3086 | 7425.48 | 7998.67 | 0.93 | 1.56 | 1.39 |
| Down | Q238K | 3082 | 4717.87 | 5952.01 | 0.79 | 0.99 | 1.03 |
| Neutral | A239S | 3108 | 7235.02 | 7630.43 | 0.95 | 1.52 | 1.32 |
| Down | A239Q | 3105 | 4817.25 | 8226.13 | 0.59 | 1.01 | 1.43 |
| Down | A239T | 3106 | 1232.13 | 2351.52 | 0.52 | 0.26 | 0.41 |
| Neutral | A239P | 3116 | 606.39 | 564.14 | 1.07 | 0.13 | 0.10 |
| Neutral | A239V | 3114 | 6075.94 | 6919.38 | 0.88 | 1.28 | 1.20 |
| Neutral | A239L | 3115 | 7174.28 | 7878.58 | 0.91 | 1.51 | 1.37 |
| Neutral | A239Y | 3107 | 5570.87 | 6668.58 | 0.84 | 1.17 | 1.16 |
| Neutral | A239I | 3113 | 6821.36 | 7628.60 | 0.89 | 1.44 | 1.32 |
| Neutral | A239C | 3103 | 4986.74 | 5916.10 | 0.84 | 1.05 | 1.03 |
| Neutral | A239G | 3109 | 6430.98 | 7617.20 | 0.84 | 1.35 | 1.32 |
| Down | A239W | 3112 | 2215.28 | 4554.04 | 0.49 | 0.47 | 0.79 |
| Neutral | A239F | 3110 | 719.92 | 750.33 | 0.96 | 0.15 | 0.13 |
| Neutral | A239K | 3101 | 8365.39 | 8161.53 | 1.02 | 1.76 | 1.42 |
| Neutral | A239H | 3100 | 6013.93 | 6892.53 | 0.87 | 1.27 | 1.20 |
| Neutral | A239R | 3102 | 8860.20 | 8322.26 | 1.06 | 1.87 | 1.44 |
| Neutral | A239D | 3098 | 9256.74 | 8197.40 | 1.13 | 1.02 | 1.08 |
| Up | I240G | 489 | 550.59 | 455.20 | 1.21 | 0.09 | 0.06 |
| Neutral | I240Q | 485 | 1050.40 | 921.68 | 1.14 | 0.16 | 0.12 |
| Down | I240P | 496 | 2259.38 | 3251.71 | 0.69 | 0.35 | 0.42 |
| Down | I240R | 482 | 2771.00 | 3465.26 | 0.80 | 0.43 | 0.44 |
| Up | I240S | 488 | 2033.91 | 1204.66 | 1.69 | 0.32 | 0.15 |
| Neutral | I240K | 481 | 5557.21 | 6183.54 | 0.90 | 0.87 | 0.79 |
| Down | I240V | 493 | 4682.76 | 6307.59 | 0.74 | 0.73 | 0.81 |
| Neutral | I240D | 478 | 480.83 | 456.39 | 1.05 | 0.08 | 0.06 |
| Neutral | I240A | 495 | 2099.13 | 1776.41 | 1.18 | 0.33 | 0.23 |
| Up | I240C | 483 | 970.78 | 650.04 | 1.49 | 0.15 | 0.08 |
| Neutral | I240L | 494 | 8303.04 | 8506.66 | 0.98 | 1.30 | 1.09 |
| Down | I240F | 490 | 1345.29 | 2090.14 | 0.64 | 0.21 | 0.27 |
| Up | I240Y | 487 | 1910.61 | 1482.53 | 1.29 | 0.30 | 0.19 |
| Neutral | I240M | 491 | 8056.10 | 7463.56 | 1.08 | 1.26 | 0.95 |
| Neutral | I240T | 486 | 2147.14 | 1862.29 | 1.15 | 0.34 | 0.24 |
| Neutral | Y241V | 3132 | 568.18 | 567.15 | 1.00 | 0.09 | 0.07 |
| Neutral | Y241A | 3134 | 514.00 | 498.25 | 1.03 | 0.08 | 0.06 |
| Neutral | Y241G | 3127 | 484.83 | 493.78 | 0.98 | 0.08 | 0.06 |
| Neutral | Y241H | 3119 | 555.41 | 547.86 | 1.01 | 0.09 | 0.07 |
| Neutral | Y241R | 3121 | 479.35 | 491.61 | 0.98 | 0.08 | 0.06 |
| Neutral | Y241P | 3135 | 542.62 | 468.74 | 1.16 | 0.09 | 0.06 |
| Neutral | Y241Q | 3124 | 494.42 | 468.65 | 1.05 | 0.08 | 0.06 |
| Neutral | Y241L | 3133 | 486.82 | 484.95 | 1.00 | 0.08 | 0.06 |
| Neutral | Y241T | 3125 | 574.08 | 548.16 | 1.05 | 0.09 | 0.07 |
| Neutral | Y241S | 3126 | 512.62 | 498.70 | 1.03 | 0.08 | 0.06 |
| Neutral | Y241W | 3130 | 592.83 | 556.32 | 1.07 | 0.09 | 0.07 |
| Neutral | Y241N | 3123 | 438.44 | 443.51 | 0.99 | 0.07 | 0.06 |
| Neutral | Y241M | 3129 | 488.24 | 448.13 | 1.09 | 0.08 | 0.06 |
| Neutral | Y241I | 3131 | 469.78 | 446.31 | 1.05 | 0.07 | 0.06 |
| Neutral | Y241D | 3117 | 454.99 | 443.57 | 1.03 | 0.07 | 0.06 |
| Neutral | G242A | 3153 | 1948.43 | 1965.86 | 0.99 | 0.31 | 0.25 |
| Neutral | G242F | 3147 | 2367.13 | 2861.31 | 0.83 | 0.37 | 0.37 |
| Down | G242L | 3152 | 4261.36 | 6043.02 | 0.71 | 0.67 | 0.77 |
| Neutral | G242N | 3142 | 1712.51 | 1893.88 | 0.90 | 0.27 | 0.24 |
| Neutral | G242P | 3154 | 2683.19 | 3311.87 | 0.81 | 0.42 | 0.42 |
| Down | G242W | 3149 | 1200.76 | 1522.34 | 0.79 | 0.19 | 0.19 |
| Neutral | G242T | 3144 | 1845.15 | 1926.23 | 0.96 | 0.29 | 0.25 |
| Neutral | G242R | 3140 | 1425.79 | 1462.84 | 0.97 | 0.22 | 0.19 |
| Neutral | G242V | 3151 | 1864.42 | 2075.51 | 0.90 | 0.29 | 0.27 |
| Down | G242S | 3146 | 3463.26 | 4491.54 | 0.77 | 0.54 | 0.57 |
| Down | G242I | 3150 | 881.04 | 2441.87 | 0.36 | 0.14 | 0.31 |
| Neutral | G242Y | 3145 | 895.61 | 928.34 | 0.96 | 0.14 | 0.12 |
| Neutral | G242H | 3138 | 1038.60 | 1063.68 | 0.98 | 0.16 | 0.14 |
| Neutral | G242E | 3137 | 1039.40 | 1200.19 | 0.87 | 0.16 | 0.15 |
| Neutral | G242K | 3139 | 1259.85 | 1404.80 | 0.90 | 0.20 | 0.18 |
| Down | R243P | 3173 | 3936.04 | 7438.61 | 0.53 | 0.62 | 0.95 |
| Neutral | R243K | 3158 | 8397.44 | 8514.77 | 0.99 | 1.32 | 1.09 |
| Neutral | R243T | 3162 | 7451.28 | 7306.32 | 1.02 | 1.17 | 0.93 |
| Neutral | R243L | 3171 | 6953.44 | 7458.28 | 0.93 | 1.09 | 0.95 |
| Neutral | R243A | 3172 | 8253.02 | 8378.15 | 0.99 | 1.29 | 1.07 |
| Neutral | R243H | 3157 | 6757.06 | 7710.25 | 0.88 | 1.06 | 0.99 |
| Neutral | R243Q | 3161 | 7563.55 | 8367.33 | 0.90 | 1.19 | 1.07 |
| Neutral | R243S | 3164 | 7872.26 | 8367.98 | 0.94 | 1.23 | 1.07 |
| Down | R243I | 3169 | 4421.12 | 8337.68 | 0.53 | 0.69 | 1.07 |
| Neutral | R243C | 3159 | 6128.24 | 6907.63 | 0.89 | 0.96 | 0.88 |
| Neutral | R243N | 3160 | 7064.71 | 7808.36 | 0.90 | 1.11 | 1.00 |
| Neutral | R243Y | 3163 | 6415.10 | 7427.20 | 0.86 | 1.01 | 0.95 |
| Neutral | R243G | 3165 | 9279.36 | 8697.39 | 1.07 | 1.46 | 1.11 |
| Neutral | R243D | 3155 | 5769.78 | 6318.28 | 0.91 | 0.90 | 0.81 |
| Neutral | R243V | 3170 | 6349.88 | 7531.41 | 0.84 | 1.00 | 0.96 |
| Neutral | S244P | 3192 | 7394.47 | 7844.16 | 0.94 | 1.16 | 1.00 |
| Down | S244L | 3190 | 3480.19 | 7154.31 | 0.49 | 0.55 | 0.91 |
| Neutral | S244W | 3187 | 10346.96 | 9035.98 | 1.15 | 1.62 | 1.15 |
| Neutral | S244M | 3186 | 728.14 | 748.02 | 0.97 | 0.11 | 0.10 |
| Neutral | S244V | 3189 | 6842.04 | 7456.02 | 0.92 | 1.07 | 0.95 |
| Neutral | S244Q | 3181 | 9318.66 | 8746.49 | 1.07 | 1.46 | 1.12 |
| Neutral | S244D | 3174 | 6915.01 | 7609.44 | 0.91 | 1.08 | 0.97 |
| Neutral | S244E | 3175 | 8814.39 | 8156.16 | 1.08 | 1.38 | 1.04 |
| Neutral | S244T | 3182 | 7442.34 | 8205.48 | 0.91 | 1.17 | 1.05 |
| Down | S244H | 3176 | 5019.42 | 8528.78 | 0.59 | 0.79 | 1.09 |
| Neutral | S244G | 3184 | 888.96 | 801.21 | 1.11 | 0.14 | 0.10 |
| Neutral | S244A | 3191 | 9174.68 | 8474.43 | 1.08 | 1.44 | 1.08 |
| Neutral | S244F | 3185 | 962.91 | 1017.49 | 0.95 | 0.15 | 0.13 |
| Neutral | S244Y | 3183 | 6333.20 | 6595.86 | 0.96 | 0.99 | 0.84 |
| Neutral | S244R | 3178 | 10483.23 | 9488.64 | 1.10 | 0.93 | 0.99 |
| Neutral | Q245P | 3211 | 8046.62 | 8690.91 | 0.93 | 1.26 | 1.11 |
| Neutral | Q245I | 3207 | 7611.43 | 8270.47 | 0.92 | 1.19 | 1.06 |
| Down | Q245F | 3204 | 3940.03 | 8048.83 | 0.49 | 0.62 | 1.03 |
| Neutral | Q245V | 3208 | 7785.27 | 8186.90 | 0.95 | 1.22 | 1.05 |
| Up | Q245M | 3205 | 494.18 | 323.62 | 1.53 | 0.08 | 0.04 |
| Neutral | Q245T | 3200 | 8684.29 | 8676.53 | 1.00 | 1.36 | 1.11 |
| Neutral | Q245E | 3194 | 10044.47 | 8646.78 | 1.16 | 1.58 | 1.10 |
| Neutral | Q245S | 3202 | 8700.39 | 8695.56 | 1.00 | 1.36 | 1.11 |
| Neutral | Q245R | 3197 | 8323.06 | 8629.37 | 0.96 | 1.31 | 1.10 |
| Neutral | Q245G | 3203 | 8495.47 | 8561.87 | 0.99 | 1.33 | 1.09 |
| Neutral | Q245H | 3195 | 8236.63 | 8640.32 | 0.95 | 1.29 | 1.10 |
| Neutral | Q245L | 3209 | 6762.99 | 6774.37 | 1.00 | 1.06 | 0.87 |
| Neutral | Q245K | 3196 | 347.86 | 290.28 | 1.20 | 0.05 | 0.04 |
| Neutral | Q245W | 3206 | 7517.93 | 8157.63 | 0.92 | 1.18 | 1.04 |
| Neutral | Q245C | 3198 | 7377.19 | 7707.00 | 0.96 | 1.16 | 0.98 |
| Down | N246W | 3225 | 3998.57 | 5256.41 | 0.76 | 0.55 | 0.68 |
| Neutral | N246R | 3216 | 6324.43 | 7263.78 | 0.87 | 0.87 | 0.93 |
| Neutral | N246A | 3229 | 7162.60 | 7821.64 | 0.92 | 0.98 | 1.00 |
| Neutral | N246F | 3223 | 5961.78 | 6704.16 | 0.89 | 0.82 | 0.86 |
| Neutral | N246G | 3222 | 7132.52 | 7954.86 | 0.90 | 0.98 | 1.02 |
| Neutral | N246P | 3230 | 5753.82 | 6382.30 | 0.90 | 0.79 | 0.82 |
| Neutral | N246V | 327 | 7113.82 | 7563.12 | 0.94 | 0.98 | 0.97 |
| Neutral | N246Q | 3218 | 8249.22 | 7962.93 | 1.04 | 1.13 | 1.02 |
| Neutral | N246Y | 3220 | 6460.04 | 7091.47 | 0.91 | 0.89 | 0.91 |
| Neutral | N246C | 3217 | 3668.07 | 4131.97 | 0.89 | 0.50 | 0.53 |
| Neutral | N246I | 3226 | 6761.84 | 6684.68 | 1.01 | 0.93 | 0.86 |
| Neutral | N246L | 3228 | 7470.87 | 7558.25 | 0.99 | 1.03 | 0.97 |
| Neutral | N246S | 3221 | 7681.59 | 7872.41 | 0.98 | 1.05 | 1.01 |
| Neutral | N246T | 3219 | 7476.51 | 7504.31 | 1.00 | 1.03 | 0.96 |
| Neutral | N246K | 3215 | 8008.77 | 7820.31 | 1.02 | 1.10 | 1.00 |
| Neutral | N246D | 3212 | 7062.38 | 7827.99 | 0.90 | 0.78 | 1.03 |
| Neutral | P247A | 3249 | 8242.00 | 7947.96 | 1.04 | 1.13 | 1.02 |
| Neutral | P247D | 3231 | 6640.01 | 7179.97 | 0.92 | 0.91 | 0.92 |
| Neutral | P247E | 3232 | 8181.45 | 7231.43 | 1.13 | 1.12 | 0.93 |
| Neutral | P247F | 3243 | 8964.42 | 7929.76 | 1.13 | 1.23 | 1.02 |
| Neutral | P247G | 3242 | 7256.65 | 7455.20 | 0.97 | 1.00 | 0.96 |
| Neutral | P247H | 3233 | 8093.84 | 7667.72 | 1.06 | 1.11 | 0.99 |
| Neutral | P247I | 3246 | 7375.24 | 7729.05 | 0.95 | 1.01 | 0.99 |
| Neutral | P247K | 3234 | 8454.74 | 7912.16 | 1.07 | 1.16 | 1.02 |
| Neutral | P247L | 3248 | 8316.29 | 8009.70 | 1.04 | 1.14 | 1.03 |
| Neutral | P247N | 3237 | 8142.72 | 8006.73 | 1.02 | 1.12 | 1.03 |
| Neutral | P247Q | 3238 | 8231.43 | 7739.72 | 1.06 | 1.13 | 0.99 |
| Neutral | P247R | 3235 | 7029.19 | 7443.10 | 0.94 | 0.96 | 0.96 |
| Neutral | P247S | 3241 | 8040.91 | 7895.89 | 1.02 | 1.10 | 1.01 |
| Neutral | P247T | 3239 | 7243.03 | 7527.94 | 0.96 | 0.99 | 0.97 |
| Neutral | P247V | 3247 | 7907.19 | 7717.20 | 1.02 | 1.08 | 0.99 |
| Neutral | V248W | 3264 | 6631.29 | 6916.87 | 0.96 | 0.91 | 0.89 |
| Neutral | V248L | 3266 | 8767.88 | 8252.54 | 1.06 | 1.20 | 1.06 |
| Neutral | V248Q | 3257 | 6709.44 | 6735.33 | 1.00 | 0.92 | 0.87 |
| Neutral | V248M | 3263 | 7437.73 | 7338.43 | 1.01 | 1.02 | 0.94 |
| Neutral | V248Y | 3259 | 6509.63 | 6927.69 | 0.94 | 0.89 | 0.89 |
| Neutral | V248G | 3261 | 6438.97 | 6744.48 | 0.95 | 0.88 | 0.87 |
| Neutral | V248C | 3255 | 3692.16 | 3816.99 | 0.97 | 0.51 | 0.49 |
| Neutral | V248R | 3254 | 7253.81 | 7153.37 | 1.01 | 1.00 | 0.92 |
| Neutral | V248A | 3267 | 8420.73 | 7739.03 | 1.09 | 1.16 | 0.99 |
| Neutral | V248H | 3252 | 8578.28 | 7867.88 | 1.09 | 1.18 | 1.01 |
| Neutral | V248I | 3265 | 8473.10 | 8209.35 | 1.03 | 1.16 | 1.05 |
| Neutral | V248T | 3258 | 8100.54 | 7751.03 | 1.05 | 1.11 | 1.00 |
| Neutral | V248K | 3253 | 7147.53 | 7653.87 | 0.93 | 0.98 | 0.98 |
| Neutral | V248S | 3260 | 6899.65 | 6729.67 | 1.03 | 0.95 | 0.86 |
| Neutral | V248F | 3262 | 6736.68 | 6651.01 | 1.01 | 0.92 | 0.85 |
| Neutral | V248E | 3251 | 9210.34 | 8235.44 | 1.12 | 1.01 | 1.08 |
| Neutral | Q249T | 3276 | 6909.47 | 7370.27 | 0.94 | 0.95 | 0.95 |
| Neutral | Q249W | 3282 | 10145.55 | 8691.89 | 1.17 | 1.39 | 1.12 |
| Neutral | Q249R | 373 | 7102.73 | 7103.74 | 1.00 | 0.97 | 0.91 |
| Down | Q249E | 3270 | 3987.22 | 7583.88 | 0.53 | 0.55 | 0.97 |
| Neutral | Q249A | 3286 | 8992.77 | 8414.65 | 1.07 | 1.23 | 1.08 |
| Neutral | Q249P | 3287 | 8376.56 | 8108.11 | 1.03 | 1.15 | 1.04 |
| Neutral | Q249C | 3274 | 5978.93 | 5496.03 | 1.09 | 0.82 | 0.71 |
| Neutral | Q249G | 3279 | 7612.71 | 7662.25 | 0.99 | 1.04 | 0.98 |
| Neutral | Q249N | 3275 | 7180.54 | 7257.66 | 0.99 | 0.99 | 0.93 |
| Neutral | Q249K | 3272 | 7772.72 | 7296.54 | 1.07 | 1.07 | 0.94 |
| Neutral | Q249I | 3283 | 7262.56 | 7159.06 | 1.01 | 1.00 | 0.92 |
| Neutral | Q249Y | 3277 | 6047.16 | 6053.08 | 1.00 | 0.83 | 0.78 |
| Neutral | Q249V | 3284 | 8717.93 | 8059.04 | 1.08 | 1.20 | 1.04 |
| Neutral | Q249L | 3285 | 6532.65 | 6824.78 | 0.96 | 0.90 | 0.88 |
| Neutral | Q249H | 3271 | 8441.70 | 7557.69 | 1.12 | 1.16 | 0.97 |
| Neutral | P250L | 3305 | 9455.47 | 8580.12 | 1.10 | 1.30 | 1.10 |
| Neutral | P250S | 3298 | 7684.90 | 7513.77 | 1.02 | 1.05 | 0.97 |
| Neutral | P250R | 3292 | 7701.81 | 7566.23 | 1.02 | 1.06 | 0.97 |
| Neutral | P250Y | 3297 | 7886.68 | 7534.22 | 1.05 | 1.08 | 0.97 |
| Neutral | P250M | 3301 | 8416.52 | 8221.73 | 1.02 | 1.15 | 1.06 |
| Neutral | P250F | 3300 | 8150.35 | 7703.24 | 1.06 | 1.12 | 0.99 |
| Neutral | P250A | 3306 | 8963.20 | 8460.94 | 1.06 | 1.23 | 1.09 |
| Neutral | P250K | 3291 | 7830.18 | 7732.04 | 1.01 | 1.07 | 0.99 |
| Neutral | P250G | 3299 | 7623.88 | 7834.34 | 0.97 | 1.05 | 1.01 |
| Neutral | P250N | 3294 | 7600.44 | 7961.88 | 0.95 | 1.04 | 1.02 |
| Down | P250T | 3296 | 1147.37 | 1489.99 | 0.77 | 0.16 | 0.19 |
| Neutral | P250W | 3302 | 7431.76 | 7755.84 | 0.96 | 1.02 | 1.00 |
| Neutral | P250D | 3288 | 7767.77 | 7525.09 | 1.03 | 1.07 | 0.97 |
| Neutral | P250V | 3304 | 7355.32 | 7719.82 | 0.95 | 1.01 | 0.99 |
| Neutral | P250Q | 3295 | 7797.52 | 8203.80 | 0.95 | 1.07 | 1.05 |
| Down | I251A | 3324 | 4953.41 | 8984.79 | 0.55 | 0.48 | 0.96 |
| Neutral | I251Q | 3314 | 10910.92 | 9221.40 | 1.18 | 1.07 | 0.98 |
| Neutral | I251G | 3318 | 11041.83 | 9640.57 | 1.15 | 1.08 | 1.03 |
| Neutral | I251L | 3323 | 11028.53 | 9408.72 | 1.17 | 1.08 | 1.00 |
| Neutral | I251K | 3310 | 11050.61 | 9421.73 | 1.17 | 1.08 | 1.01 |
| Neutral | I251R | 3311 | 10950.25 | 9220.62 | 1.19 | 1.07 | 0.98 |
| Neutral | I251E | 3308 | 10262.05 | 9115.62 | 1.13 | 1.00 | 0.97 |
| Neutral | I251D | 3307 | 10582.82 | 9557.71 | 1.11 | 1.04 | 1.02 |
| Neutral | I251T | 3315 | 10884.22 | 9485.20 | 1.15 | 1.06 | 1.01 |
| Neutral | I251C | 3312 | 10348.04 | 9428.04 | 1.10 | 1.01 | 1.01 |
| Neutral | I251Y | 3316 | 10319.00 | 9450.22 | 1.09 | 1.01 | 1.01 |
| Neutral | I251P | 3325 | 10762.38 | 9410.57 | 1.14 | 1.05 | 1.00 |
| Neutral | I251S | 3317 | 8445.88 | 7160.96 | 1.18 | 1.07 | 0.96 |
| Neutral | I251W | 3321 | 7305.95 | 6974.26 | 1.05 | 0.92 | 0.93 |
| Neutral | I251V | 3322 | 8343.83 | 7350.61 | 1.14 | 0.91 | 0.98 |
| Neutral | G252F | 3337 | 7921.80 | 7529.24 | 1.05 | 1.09 | 0.97 |
| Neutral | G252W | 3339 | 6989.36 | 7313.18 | 0.96 | 0.96 | 0.94 |
| Neutral | G252A | 3343 | 8567.46 | 8300.90 | 1.03 | 1.18 | 1.07 |
| Neutral | G252R | 3330 | 7756.55 | 7447.08 | 1.04 | 1.06 | 0.96 |
| Neutral | G252L | 3342 | 8684.63 | 8094.21 | 1.07 | 1.19 | 1.04 |
| Neutral | G252E | 3327 | 7651.86 | 7211.52 | 1.06 | 1.05 | 0.93 |
| Neutral | G252D | 3326 | 7977.50 | 7049.47 | 1.13 | 1.09 | 0.91 |
| Neutral | G252K | 3329 | 9685.27 | 8502.04 | 1.14 | 1.33 | 1.09 |
| Neutral | G252S | 3336 | 7596.71 | 6986.94 | 1.09 | 1.04 | 0.90 |
| Neutral | G252T | 3334 | 7242.98 | 7147.95 | 1.01 | 0.99 | 0.92 |
| Neutral | G252P | 3344 | 8175.79 | 8226.12 | 0.99 | 1.12 | 1.06 |
| Neutral | G252H | 3328 | 8030.53 | 7802.24 | 1.03 | 1.10 | 1.00 |
| Neutral | G252C | 3331 | 5540.29 | 5421.44 | 1.02 | 0.76 | 0.70 |
| Neutral | G252V | 3341 | 7910.50 | 7997.71 | 0.99 | 1.09 | 1.03 |
| Neutral | G252I | 3340 | 7702.75 | 7964.05 | 0.97 | 1.06 | 1.02 |
| Neutral | P253C | 3350 | 7906.13 | 8213.73 | 0.96 | 0.99 | 1.04 |
| Neutral | P253G | 3356 | 9640.00 | 8446.66 | 1.14 | 1.20 | 1.07 |
| Neutral | P253Q | 3352 | 9482.36 | 8631.24 | 1.10 | 1.18 | 1.09 |
| Neutral | P253I | 3360 | 6906.18 | 7721.21 | 0.89 | 0.86 | 0.97 |
| Neutral | P253L | 3362 | 8851.11 | 8489.29 | 1.04 | 1.10 | 1.07 |
| Neutral | P253R | 3349 | 9020.78 | 8580.86 | 1.05 | 1.12 | 1.08 |
| Neutral | P253A | 3363 | 8697.23 | 8410.29 | 1.03 | 1.08 | 1.06 |
| Neutral | P253E | 3346 | 9074.45 | 8476.99 | 1.07 | 1.13 | 1.07 |
| Neutral | P253Y | 3354 | 7935.28 | 8171.53 | 0.97 | 0.99 | 1.03 |
| Neutral | P253W | 3359 | 6635.85 | 7293.26 | 0.91 | 0.83 | 0.92 |
| Neutral | P253M | 3358 | 6895.66 | 7648.23 | 0.90 | 0.86 | 0.96 |
| Neutral | P253V | 3361 | 7058.87 | 7756.04 | 0.91 | 0.88 | 0.98 |
| Neutral | P253T | 3353 | 6728.25 | 7541.00 | 0.89 | 0.84 | 0.95 |
| Neutral | P253K | 3348 | 6929.49 | 7400.65 | 0.94 | 0.86 | 0.93 |
| Neutral | P253N | 3351 | 7354.73 | 7533.05 | 0.98 | 0.92 | 0.95 |
| Neutral | Q254R | 3368 | 9454.92 | 8474.29 | 1.12 | 1.18 | 1.07 |
| Neutral | Q254G | 3374 | 3549.45 | 3806.63 | 0.93 | 0.44 | 0.48 |
| Neutral | Q254W | 3377 | 3389.45 | 3326.38 | 1.02 | 0.42 | 0.42 |
| Neutral | Q254T | 3371 | 7491.28 | 7853.86 | 0.95 | 0.93 | 0.99 |
| Neutral | Q254A | 3381 | 7226.25 | 7451.70 | 0.97 | 0.90 | 0.94 |
| Neutral | Q254F | 3375 | 6263.95 | 6007.53 | 1.04 | 0.78 | 0.76 |
| Neutral | Q254D | 3364 | 9098.08 | 8154.92 | 1.12 | 1.13 | 1.03 |
| Neutral | Q254P | 3382 | 6827.99 | 7340.40 | 0.93 | 0.85 | 0.93 |
| Neutral | Q254L | 3380 | 7602.15 | 7940.64 | 0.96 | 0.95 | 1.00 |
| Neutral | Q254C | 3369 | 9284.18 | 8479.77 | 1.09 | 1.16 | 1.07 |
| Neutral | Q254Y | 3372 | 8847.02 | 7831.28 | 1.13 | 1.10 | 0.99 |
| Neutral | Q254I | 3378 | 9340.36 | 8662.75 | 1.08 | 1.16 | 1.09 |
| Neutral | Q254E | 3365 | 9466.76 | 8516.08 | 1.11 | 1.18 | 1.07 |
| Neutral | Q254V | 3379 | 9803.92 | 8575.31 | 1.14 | 1.22 | 1.08 |
| Neutral | Q254S | 3373 | 7768.13 | 8801.19 | 0.88 | 1.15 | 1.17 |
| Neutral | T255I | 3397 | 9880.58 | 8415.65 | 1.17 | 1.23 | 1.06 |
| Neutral | T255Q | 3390 | 9537.20 | 8410.86 | 1.13 | 1.19 | 1.06 |
| Neutral | T255P | 3401 | 7468.08 | 7296.37 | 1.02 | 0.93 | 0.92 |
| Neutral | T255R | 3387 | 5740.42 | 4974.50 | 1.15 | 0.72 | 0.63 |
| Neutral | T255C | 3388 | 2626.79 | 2503.21 | 1.05 | 0.33 | 0.32 |
| Neutral | T255N | 3389 | 5128.08 | 4479.75 | 1.14 | 0.64 | 0.57 |
| Neutral | T255S | 3392 | 7334.60 | 6905.71 | 1.06 | 0.91 | 0.87 |
| Neutral | T255V | 3398 | 5463.42 | 5187.78 | 1.05 | 0.68 | 0.65 |
| Neutral | T255E | 3384 | 7691.31 | 7194.23 | 1.07 | 0.96 | 0.91 |
| Neutral | T255G | 3393 | 8166.77 | 7682.14 | 1.06 | 1.02 | 0.97 |
| Neutral | T255K | 3386 | 6636.15 | 5647.18 | 1.18 | 0.83 | 0.71 |
| Neutral | T255A | 3400 | 4436.98 | 4322.98 | 1.03 | 0.55 | 0.55 |
| Neutral | T255F | 3394 | 3562.89 | 3107.64 | 1.15 | 0.44 | 0.39 |
| Neutral | T255L | 3399 | 4904.06 | 4266.71 | 1.15 | 0.61 | 0.54 |
| Neutral | T255H | 3385 | 8243.01 | 7352.60 | 1.12 | 1.22 | 0.98 |
| Up | P256S | 3412 | 10876.81 | 9018.60 | 1.21 | 1.36 | 1.14 |
| Up | P256V | 3418 | 10408.68 | 8594.11 | 1.21 | 1.30 | 1.08 |
| Neutral | P256F | 3414 | 6020.49 | 5181.94 | 1.16 | 0.75 | 0.65 |
| Neutral | P256Y | 3411 | 10270.90 | 8699.77 | 1.18 | 1.28 | 1.10 |
| Neutral | P256I | 3417 | 9089.54 | 7980.23 | 1.14 | 1.13 | 1.01 |
| Neutral | P256A | 3420 | 9426.67 | 8868.67 | 1.06 | 1.18 | 1.12 |
| Neutral | P256L | 3419 | 8342.08 | 7217.69 | 1.16 | 1.04 | 0.91 |
| Neutral | P256G | 3413 | 4631.84 | 4679.24 | 0.99 | 0.58 | 0.59 |
| Neutral | P256N | 3408 | 4406.75 | 3946.90 | 1.12 | 0.55 | 0.50 |
| Neutral | P256R | 3406 | 4975.17 | 4155.27 | 1.20 | 0.62 | 0.52 |
| Neutral | P256Q | 3409 | 6177.77 | 5546.92 | 1.11 | 0.77 | 0.70 |
| Neutral | P256E | 3403 | 9266.75 | 8366.07 | 1.11 | 1.16 | 1.06 |
| Neutral | P256K | 3405 | 5919.72 | 5928.31 | 1.00 | 0.74 | 0.75 |
| Neutral | P256M | 3415 | 8787.02 | 8554.52 | 1.03 | 1.10 | 1.08 |
| Neutral | P256C | 3407 | 4674.45 | 4633.67 | 1.01 | 0.69 | 0.62 |
| Neutral | K257C | 3425 | 4327.83 | 4267.45 | 1.01 | 0.54 | 0.54 |
| Neutral | K257M | 3433 | 5985.85 | 5236.20 | 1.14 | 0.75 | 0.66 |
| Neutral | K257V | 3436 | 7316.42 | 7115.65 | 1.03 | 0.91 | 0.90 |
| Neutral | K257A | 3438 | 9355.23 | 8528.52 | 1.10 | 1.17 | 1.08 |
| Neutral | K257E | 3422 | 10237.19 | 9141.73 | 1.12 | 1.28 | 1.15 |
| Neutral | K257S | 3430 | 9952.97 | 8464.79 | 1.18 | 1.24 | 1.07 |
| Neutral | K257L | 3437 | 10053.73 | 8711.61 | 1.15 | 1.25 | 1.10 |
| Neutral | K257I | 3435 | 8609.80 | 7806.76 | 1.10 | 1.07 | 0.98 |
| Neutral | K257G | 3431 | 8280.79 | 7718.36 | 1.07 | 1.03 | 0.97 |
| Neutral | K257N | 3426 | 8528.22 | 7707.49 | 1.11 | 1.06 | 0.97 |
| Neutral | K257F | 3432 | 7720.51 | 6633.90 | 1.16 | 0.96 | 0.84 |
| Neutral | K257W | 3434 | 7039.69 | 7120.56 | 0.99 | 0.88 | 0.90 |
| Neutral | K257R | 3424 | 9688.77 | 9114.18 | 1.06 | 1.21 | 1.15 |
| Neutral | K257P | 3439 | 8039.60 | 7464.88 | 1.08 | 1.19 | 0.99 |
| Neutral | K257T | 3428 | 9346.88 | 8849.42 | 1.06 | 1.39 | 1.18 |
| Neutral | A258Q | 3447 | 7000.31 | 6977.33 | 1.00 | 0.87 | 0.88 |
| Neutral | A258Y | 3449 | 6636.02 | 5998.83 | 1.11 | 0.83 | 0.76 |
| Neutral | A258W | 3454 | 9438.05 | 8527.86 | 1.11 | 1.18 | 1.08 |
| Neutral | A258G | 3451 | 7204.05 | 7778.97 | 0.93 | 0.90 | 0.98 |
| Neutral | A258L | 3457 | 1222.62 | 1226.40 | 1.00 | 0.15 | 0.15 |
| Neutral | A258F | 3452 | 9548.91 | 8531.04 | 1.12 | 1.19 | 1.08 |
| Neutral | A258M | 3453 | 8161.79 | 8061.20 | 1.01 | 1.02 | 1.02 |
| Neutral | A258N | 3446 | 7808.83 | 6968.56 | 1.12 | 0.97 | 0.88 |
| Neutral | A258V | 3456 | 8395.80 | 8391.43 | 1.00 | 1.05 | 1.06 |
| Neutral | A258T | 3448 | 8674.71 | 7958.00 | 1.09 | 1.08 | 1.00 |
| Neutral | A258I | 3455 | 8452.43 | 7509.34 | 1.13 | 1.05 | 0.95 |
| Up | A258D | 3440 | 7741.51 | 6346.88 | 1.22 | 0.97 | 0.80 |
| Neutral | A258R | 3444 | 9008.56 | 7908.51 | 1.14 | 1.12 | 1.00 |
| Neutral | A258E | 3441 | 10198.40 | 8709.16 | 1.17 | 1.27 | 1.10 |
| Neutral | A258P | 3458 | 10414.06 | 9178.82 | 1.13 | 1.55 | 1.22 |

[0523] The 199 hMMP-1 putative hit mutants were rescreened, using the same assay, and 104 primary hits were confirmed (see Table 11, below). hMMP-1 mutants that were active at 25° C. and had at least a 16% decrease in activity at 37° C. (e.g., the ratio of the activities at 25° C. or 37° C. (25° C./37° C.) is greater than or equal to 1.2) were deemed to be confirmed primary temperature sensitive hits.

[0524] Table 10, below, lists the hMMP-1 mutation, the average RFU at 25° C. and 37° C., and the ratio of the activities (25° C./37° C.). The Table also lists the temperature phenotype:DOWN, indicates the ratio (25° C./37° C.) of the activity of the mutant is decreased compared to the ratio (25° C./37° C.) of the activity of the wildtype, i.e. decreased greater than 16% the activity of the wildtype; NEUTRAL, indicates the ratio (25° C./37° C.) of the activity of the mutant is similar to the ratio (25° C./37° C.) of the activity of wildtype, i.e. within 16% of the activity of the wildtype; and UP, indicates the ratio (25° C./37° C.) of the activity of the mutant is increased compared to the ratio (25° C./37° C.) of the activity of the wildtype, i.e. increased more than 16% the activity of the wildtype.

[0525] Table 10, below, also lists the residual activities at 25° C. and 37° C., as compared to wild type hMMP-1. The residual activity is the ratio of the hMMP-1 mutant activity versus the wildtype hMMP-1 activity at the indicated temperature, either 25° C. or 37° C. A ratio of less than one indicates that a given mutant has less activity than the wildtype at the indicated temperature and a ratio of greater than one indicates that the mutant has more activity than the wildtype. Several of the hMMP-1 primary hit mutants exhibited activities that were comparable to or greater than wildtype hMMP-1 at 25° C. All of the hMMP-1 confirmed as primary hits exhibited decreated activities at 37° C., thereby reconfirming their decreased activity at elevated temperatures.

TABLE 10
Results of Initial Screen for Temperature Sensitive hMMP-1 mutants

| | | | | | | Res. | |
|---|---|---|---|---|---|---|---|
| | | | Avg. | Avg. | | Act. | Res. Act. |
| Temp. | hMMP-1 | SEQ | RFU | RFU | Ratio | Mut/wt | Mut/wt |
| Phenotype | mutation | ID NO | 25° C. | 37° C. | 25° C./37° C. | 25° C. | 37° C. |
| Neutral | T84F | 847 | 6312.72 | 6453.46 | 0.98 | 1.10 | 1.27 |
| Neutral | E85F | 866 | 6092.47 | 6362.37 | 0.96 | 1.06 | 1.26 |
| Up | L95K | 6 | 1333.28 | 1191.46 | 1.12 | 0.15 | 0.14 |
| Down | L95I | 18 | 1707.98 | 2294.02 | 0.74 | 0.30 | 0.45 |
| Down | R98D | 1083 | 2905.96 | 3867.31 | 0.75 | 0.33 | 0.47 |
| Down | I99Q | 1109 | 3318.21 | 4623.91 | 0.72 | 0.37 | 0.56 |
| Down | E100V | 512 | 3980.72 | 5009.20 | 0.79 | 1.26 | 1.01 |
| Neutral | E100R | 500 | 7410.11 | 7964.52 | 0.93 | 0.83 | 0.96 |
| Neutral | E100S | 506 | 3768.09 | 4664.58 | 0.81 | 0.42 | 0.56 |
| Neutral | E100T | 504 | 6985.28 | 7478.12 | 0.93 | 0.79 | 0.90 |
| Neutral | E100F | 508 | 6709.27 | 7436.60 | 0.90 | 0.75 | 0.90 |
| Neutral | E100I | 511 | 8824.19 | 8458.79 | 1.04 | 0.99 | 1.02 |
| Neutral | E100N | 502 | 8809.68 | 8215.63 | 1.07 | 0.99 | 0.99 |
| Neutral | T103Y | 524 | 1181.09 | 1423.76 | 0.83 | 0.37 | 0.29 |
| Neutral | P104A | 1177 | 8861.30 | 8360.82 | 1.06 | 1.00 | 1.01 |
| Up | P104M | 1172 | 6709.44 | 7118.65 | 0.94 | 0.88 | 0.75 |
| Up | D105A | 39 | 2674.16 | 1227.06 | 2.18 | 0.65 | 0.24 |
| Up | D105F | 33 | 2009.56 | 1221.58 | 1.65 | 0.49 | 0.24 |
| Up | D105G | 32 | 2407.89 | 1686.68 | 1.43 | 0.58 | 0.34 |
| Up | D105I | 36 | 1732.38 | 1105.99 | 1.57 | 0.42 | 0.22 |
| Up | D105L | 38 | 1563.61 | 859.56 | 1.82 | 0.38 | 0.17 |
| Up | D105N | 27 | 3766.72 | 1475.08 | 2.55 | 0.91 | 0.29 |
| Up | D105R | 25 | 3892.02 | 2016.90 | 1.93 | 0.94 | 0.40 |
| Up | D105S | 31 | 3646.49 | 2727.22 | 1.34 | 0.88 | 0.54 |
| Up | D105T | 29 | 2513.64 | 1729.46 | 1.45 | 0.61 | 0.34 |
| Up | D105W | 35 | 2565.93 | 1855.05 | 1.38 | 0.62 | 0.37 |
| Neutral | D105E | 22 | 4000.92 | 3366.64 | 1.19 | 0.59 | 0.45 |
| Neutral | L106C | 1183 | 2995.56 | 3678.33 | 0.81 | 0.34 | 0.44 |
| Neutral | L106S | 1188 | 2730.64 | 2899.36 | 0.94 | 0.31 | 0.35 |
| Neutral | A109H | 1237 | 7206.01 | 7536.96 | 0.96 | 0.81 | 0.91 |
| Neutral | D110A | 1271 | 4179.59 | 5112.44 | 0.82 | 0.47 | 0.62 |
| Neutral | V111R | 1277 | 2401.69 | 2925.16 | 0.82 | 0.27 | 0.35 |
| Neutral | D112S | 1301 | 7203.69 | 7600.93 | 0.95 | 0.81 | 0.92 |
| Neutral | A118T | 1414 | 745.83 | 665.63 | 1.12 | 0.13 | 0.13 |
| Down | S123V | 1516 | 3220.29 | 4504.25 | 0.71 | 0.41 | 0.60 |
| Neutral | N124D | 1520 | 6218.73 | 6620.92 | 0.94 | 0.92 | 0.88 |
| Neutral | T126S | 1567 | 7114.42 | 6856.69 | 1.04 | 1.06 | 0.91 |
| Up | G147P | 1975 | 494.94 | 392.93 | 1.26 | 0.07 | 0.05 |
| Up | R150P | 59 | 2291.14 | 828.28 | 2.77 | 0.31 | 0.12 |
| Neutral | R150V | 56 | 6869.28 | 6604.61 | 1.04 | 1.20 | 1.30 |
| Neutral | R150D | 41 | 7230.41 | 6033.28 | 1.20 | 1.26 | 1.19 |
| Down | R150I | 55 | 3120.05 | 4082.34 | 0.76 | 0.39 | 0.55 |
| Neutral | R150H | 43 | 8281.04 | 8056.17 | 1.03 | 1.05 | 1.08 |
| Up | D151G | 70 | 1073.32 | 733.89 | 1.46 | 0.20 | 0.11 |
| Neutral | N152A | 2031 | 6669.94 | 5660.16 | 1.18 | 1.17 | 1.12 |
| Down | N152S | 2023 | 4607.85 | 8096.31 | 0.57 | 0.58 | 1.08 |
| Neutral | S153T | 543 | 10530.07 | 8798.72 | 1.20 | 1.44 | 1.24 |
| Up | F155L | 95 | 1322.13 | 864.19 | 1.53 | 0.25 | 0.13 |
| Up | F155A | 96 | 1250.93 | 760.12 | 1.65 | 0.23 | 0.11 |
| Up | D156H | 99 | 2722.09 | 2081.55 | 1.31 | 0.51 | 0.31 |
| Up | D156L | 114 | 2548.30 | 1597.53 | 1.60 | 0.48 | 0.24 |
| Up | D156A | 115 | 2679.29 | 1734.45 | 1.54 | 0.50 | 0.26 |
| Up | D156W | 111 | 1575.39 | 1268.36 | 1.24 | 0.30 | 0.19 |
| Up | D156V | 113 | 1400.88 | 766.80 | 1.83 | 0.26 | 0.11 |
| Up | D156K | 100 | 1292.89 | 966.62 | 1.34 | 0.24 | 0.14 |
| Up | D156T | 105 | 2871.09 | 1843.03 | 1.56 | 0.54 | 0.27 |
| Up | D156R | 101 | 2431.23 | 1545.89 | 1.57 | 0.46 | 0.23 |
| Up | D156M | 110 | 817.96 | 502.82 | 1.63 | 0.12 | 0.07 |
| Neutral | P158T | 2080 | 4204.23 | 3507.76 | 1.20 | 0.53 | 0.47 |
| Neutral | P158G | 2083 | 6277.86 | 5496.27 | 1.14 | 0.79 | 0.73 |
| Neutral | P158K | 2075 | 6860.82 | 6680.30 | 1.03 | 0.87 | 0.89 |
| Neutral | P158N | 2078 | 3656.04 | 3874.48 | 0.94 | 0.46 | 0.52 |
| Up | G159V | 132 | 2453.98 | 732.46 | 3.35 | 0.34 | 0.10 |
| Up | G159T | 125 | 5059.91 | 1734.12 | 2.92 | 0.69 | 0.24 |
| Up | G159M | 129 | 5905.06 | 4874.00 | 1.21 | 0.75 | 0.65 |
| Neutral | G159I | 131 | 5725.99 | 5357.20 | 1.07 | 0.72 | 0.72 |
| Neutral | G159W | 130 | 6787.40 | 6287.71 | 1.08 | 0.86 | 0.84 |
| Neutral | G159L | 133 | 8231.62 | 7638.64 | 1.08 | 1.04 | 1.02 |
| Neutral | G159C | 122 | 2897.77 | 3053.86 | 0.95 | 0.37 | 0.41 |
| Neutral | P170D | 2281 | 1434.38 | 1462.91 | 0.98 | 0.25 | 0.29 |
| Neutral | P170A | 2299 | 2733.72 | 2793.24 | 0.98 | 0.48 | 0.55 |
| Up | G171P | 572 | 1570.74 | 1204.39 | 1.30 | 0.27 | 0.17 |
| Neutral | G171E | 555 | 1154.96 | 1199.65 | 0.96 | 0.20 | 0.24 |
| Neutral | G171D | 554 | 791.81 | 690.33 | 1.15 | 0.14 | 0.14 |
| Up | A176F | 148 | 10486.82 | 6516.31 | 1.61 | 1.31 | 0.78 |
| Neutral | A176W | 150 | 482.38 | 414.85 | 1.16 | 0.06 | 0.06 |
| Neutral | F178T | 2403 | 560.54 | 487.01 | 1.15 | 0.10 | 0.10 |
| Up | F178L | 2411 | 1788.95 | 1314.38 | 1.36 | 0.31 | 0.26 |
| Up | D179N | 160 | 2433.73 | 812.01 | 3.00 | 0.26 | 0.10 |
| Up | D179V | 170 | 604.63 | 490.35 | 1.23 | 0.11 | 0.10 |
| Up | D179C | 159 | 613.81 | 503.76 | 1.22 | 0.11 | 0.10 |
| Up | E180Y | 182 | 6655.19 | 5379.42 | 1.24 | 0.72 | 0.63 |
| Neutral | E180R | 177 | 6932.51 | 6309.81 | 1.10 | 0.75 | 0.74 |
| Up | E180T | 181 | 3718.16 | 2425.13 | 1.53 | 0.40 | 0.29 |
| Up | E180F | 185 | 7014.78 | 5382.78 | 1.30 | 0.76 | 0.63 |
| Up | E180G | 184 | 5952.65 | 4547.28 | 1.31 | 1.04 | 0.90 |
| Up | E180S | 183 | 5217.80 | 3977.60 | 1.31 | 0.91 | 0.78 |
| Up | E180N | 179 | 6534.65 | 4843.84 | 1.35 | 1.14 | 0.96 |
| Up | E180D | 174 | 7738.70 | 6277.22 | 1.23 | 1.35 | 1.24 |
| Neutral | D181T | 200 | 6867.00 | 6057.09 | 1.13 | 0.74 | 0.71 |
| Up | D181L | 209 | 1727.20 | 1274.09 | 1.36 | 0.19 | 0.15 |
| Up | D181K | 195 | 1087.36 | 696.83 | 1.56 | 0.12 | 0.08 |
| Up | D181C | 197 | 549.29 | 447.40 | 1.23 | 0.10 | 0.09 |
| Up | D181G | 203 | 2764.20 | 2056.56 | 1.34 | 0.48 | 0.41 |
| Up | E182T | 219 | 2995.97 | 1779.42 | 1.68 | 0.32 | 0.21 |
| Up | E182Q | 218 | 1393.28 | 804.84 | 1.73 | 0.15 | 0.09 |
| Up | E182M | 224 | 649.73 | 524.43 | 1.24 | 0.11 | 0.10 |
| Neutral | E182G | 222 | 604.92 | 543.78 | 1.11 | 0.11 | 0.11 |
| Up | R183G | 2424 | 7326.36 | 6021.39 | 1.22 | 1.28 | 1.19 |
| Up | R183S | 2423 | 7896.17 | 6240.74 | 1.27 | 1.38 | 1.23 |
| Up | T185R | 235 | 1728.04 | 851.07 | 2.03 | 0.20 | 0.10 |
| Up | T185Y | 239 | 937.75 | 540.66 | 1.73 | 0.11 | 0.07 |
| Up | T185H | 233 | 1448.04 | 783.89 | 1.85 | 0.17 | 0.10 |
| Up | T185G | 241 | 3922.30 | 1990.15 | 1.97 | 0.46 | 0.24 |
| Up | T185V | 246 | 1648.14 | 897.66 | 1.84 | 0.19 | 0.11 |
| Up | T185Q | 238 | 1594.81 | 583.93 | 2.73 | 0.19 | 0.07 |
| Up | T185A | 248 | 1599.64 | 711.08 | 2.25 | 0.19 | 0.09 |
| Up | T185E | 232 | 1324.02 | 703.76 | 1.88 | 0.16 | 0.09 |
| Neutral | T185D | 231 | 485.86 | 418.67 | 1.16 | 0.06 | 0.06 |
| Up | N187R | 254 | 1042.36 | 709.74 | 1.47 | 0.12 | 0.09 |
| Up | N187M | 262 | 1731.67 | 995.07 | 1.74 | 0.20 | 0.12 |
| Neutral | N187W | 263 | 1694.86 | 1425.68 | 1.19 | 0.20 | 0.17 |
| Up | N187F | 261 | 1240.41 | 731.98 | 1.69 | 0.15 | 0.09 |
| Up | N187K | 253 | 2331.93 | 1140.19 | 2.05 | 0.27 | 0.14 |
| Up | N187I | 264 | 1444.98 | 683.03 | 2.12 | 0.17 | 0.08 |
| Up | N187A | 267 | 4379.80 | 2616.49 | 1.67 | 0.52 | 0.32 |
| Neutral | N187G | 260 | 535.06 | 514.10 | 1.04 | 0.07 | 0.07 |
| Neutral | N187C | 255 | 1804.28 | 1860.67 | 0.97 | 0.23 | 0.25 |
| Neutral | N187H | 252 | 1143.07 | 1071.67 | 1.07 | 0.14 | 0.14 |
| Up | F188V | 2486 | 7116.29 | 5860.00 | 1.21 | 1.24 | 1.16 |
| Neutral | R189N | 2495 | 7842.39 | 6675.36 | 1.17 | 1.37 | 1.32 |
| Neutral | R189T | 2497 | 7610.10 | 6459.94 | 1.18 | 1.33 | 1.27 |
| Neutral | R189Q | 2496 | 7465.37 | 6396.79 | 1.17 | 1.30 | 1.26 |
| Up | E190G | 583 | 5313.99 | 4365.93 | 1.22 | 0.75 | 0.48 |
| Up | E190Y | 581 | 7243.54 | 5742.33 | 1.26 | 1.27 | 1.13 |
| Up | E190D | 573 | 7910.21 | 6468.78 | 1.22 | 1.38 | 1.28 |
| Up | Y191V | 607 | 1553.58 | 1254.11 | 1.24 | 0.19 | 0.14 |
| Up | N192H | 613 | 2274.24 | 1058.80 | 2.15 | 0.32 | 0.12 |
| Up | N192S | 620 | 2043.65 | 1630.74 | 1.25 | 0.29 | 0.18 |
| Up | N192D | 611 | 4213.33 | 2216.40 | 1.90 | 0.59 | 0.24 |
| Up | N192C | 616 | 1310.46 | 987.31 | 1.33 | 0.18 | 0.11 |
| Neutral | H194P | 648 | 5264.79 | 5058.19 | 1.04 | 0.74 | 0.56 |
| Up | R195C | 273 | 4231.32 | 1853.20 | 2.28 | 0.60 | 0.20 |
| Neutral | R195W | 282 | 5099.23 | 4524.84 | 1.13 | 0.72 | 0.50 |
| Neutral | R195L | 285 | 5073.57 | 4520.73 | 1.12 | 0.72 | 0.50 |
| Up | R195G | 279 | 5269.21 | 3025.93 | 1.74 | 0.74 | 0.33 |
| Up | R195Q | 275 | 1958.69 | 1361.83 | 1.44 | 0.28 | 0.15 |
| Up | R195A | 286 | 5605.90 | 3852.81 | 1.46 | 0.79 | 0.42 |
| Up | R195D | 269 | 2724.53 | 1907.81 | 1.43 | 0.38 | 0.21 |
| Up | R195V | 284 | 1711.48 | 1037.62 | 1.65 | 0.24 | 0.11 |
| Up | A197C | 2552 | 4012.80 | 3140.52 | 1.28 | 0.70 | 0.62 |
| Neutral | A198G | 299 | 2610.82 | 2368.26 | 1.10 | 0.37 | 0.26 |
| Up | A198L | 305 | 1339.94 | 726.74 | 1.84 | 0.19 | 0.08 |
| Up | A198M | 301 | 1384.46 | 999.55 | 1.39 | 0.20 | 0.11 |
| Up | G206A | 324 | 4554.61 | 2702.11 | 1.69 | 0.47 | 0.30 |
| Up | G206S | 317 | 1226.37 | 919.66 | 1.33 | 0.13 | 0.10 |
| Up | L207R | 653 | 3476.88 | 1332.44 | 2.61 | 0.36 | 0.15 |
| Neutral | L207V | 665 | 656.95 | 550.54 | 1.19 | 0.08 | 0.07 |
| Neutral | L207I | 664 | 645.37 | 550.32 | 1.17 | 0.08 | 0.07 |
| Up | L207G | 660 | 610.01 | 484.35 | 1.26 | 0.08 | 0.06 |
| Neutral | S208R | 2703 | 7639.06 | 6465.10 | 1.18 | 1.34 | 1.28 |
| Up | S208L | 2715 | 7811.78 | 6354.14 | 1.23 | 1.37 | 1.25 |
| Up | S210V | 341 | 1190.35 | 856.63 | 1.39 | 0.29 | 0.17 |
| Neutral | S210A | 343 | 1682.05 | 1546.97 | 1.09 | 0.25 | 0.21 |
| Neutral | T211L | 2753 | 2376.23 | 2102.07 | 1.13 | 0.35 | 0.28 |
| Up | D212G | 678 | 1011.62 | 657.28 | 1.54 | 0.24 | 0.13 |
| Neutral | D212H | 669 | 4696.49 | 4001.41 | 1.17 | 0.70 | 0.53 |
| Up | Y218S | 354 | 3702.49 | 3099.73 | 1.19 | 0.58 | 0.43 |
| Up | F223C | 369 | 3115.11 | 2488.91 | 1.25 | 0.53 | 0.35 |
| Up | F223E | 365 | 7194.34 | 5884.03 | 1.22 | 1.22 | 0.83 |
| Up | F223G | 375 | 3236.56 | 2599.04 | 1.25 | 0.55 | 0.36 |
| Up | F223A | 381 | 5226.86 | 3982.92 | 1.31 | 0.89 | 0.56 |
| Up | F223S | 374 | 6006.80 | 4916.07 | 1.22 | 1.02 | 0.69 |
| Neutral | F223K | 367 | 4021.97 | 3712.91 | 1.08 | 0.60 | 0.49 |
| Neutral | F223M | 376 | 525.66 | 441.29 | 1.19 | 0.08 | 0.06 |
| Up | V227C | 388 | 4040.96 | 3278.65 | 1.23 | 0.68 | 0.46 |
| Up | V227D | 383 | 1190.09 | 731.34 | 1.63 | 0.20 | 0.10 |
| Up | V227E | 384 | 5381.63 | 2605.20 | 2.07 | 0.91 | 0.37 |
| Up | V227L | 399 | 4883.98 | 4000.68 | 1.22 | 0.83 | 0.56 |
| Up | V227S | 393 | 3863.33 | 3131.47 | 1.23 | 0.65 | 0.44 |
| Up | V227W | 397 | 1845.46 | 1374.06 | 1.34 | 0.31 | 0.19 |
| Neutral | V227G | 394 | 1040.74 | 883.01 | 1.18 | 0.15 | 0.12 |
| Up | V227H | 385 | 689.20 | 504.65 | 1.37 | 0.10 | 0.07 |
| Up | V227Q | 390 | 696.97 | 506.11 | 1.38 | 0.10 | 0.07 |
| Neutral | V227R | 387 | 664.31 | 561.06 | 1.18 | 0.10 | 0.07 |
| Up | Q228P | 420 | 2862.74 | 1291.55 | 2.22 | 1.33 | 0.44 |
| Up | L229A | 438 | 2627.78 | 2118.07 | 1.24 | 1.22 | 0.72 |
| Up | L229T | 429 | 3780.54 | 1464.25 | 2.58 | 1.75 | 0.50 |
| Up | L229I | 436 | 1158.56 | 828.94 | 1.40 | 0.54 | 0.28 |
| Up | A230V | 703 | 5030.94 | 3433.18 | 1.47 | 2.33 | 1.17 |
| Up | D233E | 440 | 2881.17 | 1918.57 | 1.50 | 1.33 | 0.65 |
| Up | I234A | 476 | 1458.10 | 1018.50 | 1.43 | 0.31 | 0.18 |
| Up | I234T | 467 | 1451.51 | 1188.67 | 1.22 | 0.31 | 0.21 |
| Up | I234E | 460 | 1301.06 | 840.09 | 1.55 | 0.27 | 0.15 |
| Up | I234Q | 466 | 1095.18 | 837.53 | 1.31 | 0.23 | 0.15 |
| Up | I237L | 475 | 2880.14 | 2240.61 | 1.29 | 0.61 | 0.39 |
| Down | I237W | 3074 | 4188.38 | 5663.94 | 0.74 | 0.62 | 0.75 |
| Neutral | I237N | 3066 | 5368.49 | 6271.59 | 0.86 | 0.80 | 0.83 |
| Up | I240S | 488 | 2033.91 | 1204.66 | 1.69 | 0.32 | 0.15 |
| Neutral | I240A | 495 | 2099.13 | 1776.41 | 1.18 | 0.33 | 0.23 |
| Up | I240C | 483 | 970.78 | 650.04 | 1.49 | 0.15 | 0.08 |
| Neutral | I251S | 3317 | 8445.88 | 7160.96 | 1.18 | 1.07 | 0.96 |
| Neutral | I251W | 3321 | 7305.95 | 6974.26 | 1.05 | 0.92 | 0.93 |
| Neutral | Q254S | 3373 | 7768.13 | 8801.19 | 0.88 | 1.15 | 1.17 |
| Neutral | T255H | 3385 | 8243.01 | 7352.60 | 1.12 | 1.22 | 0.98 |
| Neutral | P256C | 3407 | 4674.45 | 4633.67 | 1.01 | 0.69 | 0.62 |
| Neutral | K257P | 3439 | 8039.60 | 7464.88 | 1.08 | 1.19 | 0.99 |
| Neutral | K257T | 3428 | 9346.88 | 8849.42 | 1.06 | 1.39 | 1.18 |
| Neutral | A258P | 3458 | 10414.06 | 9178.82 | 1.13 | 1.55 | 1.22 |

TABLE 11
Reconfirmed HITs

| Temperature | hMMP-1 | SEQ ID |
|---|---|---|
| Phenotype | mutation | NO |
| Up | L95K | 6 |
| Down | E100V | 512 |
| Neutral | T103Y | 524 |
| Up | D105A | 39 |
| Up | D105F | 33 |
| Up | D105G | 32 |
| Up | D105I | 36 |
| Up | D105L | 38 |
| Up | D105N | 27 |
| Up | D105R | 25 |
| Up | D105S | 31 |
| Up | D105T | 29 |
| Up | D105W | 35 |
| Up | R150P | 59 |
| Up | D151G | 70 |
| Neutral | S153T | 543 |
| Up | F155L | 95 |
| Up | F155A | 96 |
| Up | D156H | 99 |
| Up | D156L | 114 |
| Up | D156A | 115 |
| Up | D156W | 111 |
| Up | D156V | 113 |
| Up | D156K | 100 |
| Up | D156T | 105 |
| Up | D156R | 101 |
| Up | G159V | 132 |
| Up | G159T | 125 |
| Up | G171P | 572 |
| Up | A176F | 148 |
| Up | D179N | 160 |
| Up | E180Y | 182 |
| Neutral | E180R | 177 |
| Up | E180T | 181 |
| Up | E180F | 185 |
| Neutral | D181T | 200 |
| Up | D181L | 209 |
| Up | D181K | 195 |
| Up | E182T | 219 |
| Up | E182Q | 218 |
| Up | T185R | 235 |
| Up | T185Y | 239 |
| Up | T185H | 233 |
| Up | T185G | 241 |
| Up | T185V | 246 |
| Up | T185Q | 238 |
| Up | T185A | 248 |
| Up | T185E | 232 |
| Up | N187R | 254 |
| Up | N187M | 262 |
| Neutral | N187W | 263 |
| Up | N187F | 261 |
| Up | N187K | 253 |
| Up | N187I | 264 |
| Up | N187A | 267 |
| Up | E190G | 583 |
| Up | Y191V | 607 |
| Up | N192H | 613 |
| Up | N192S | 620 |
| Up | N192D | 611 |
| Up | N192C | 616 |
| Neutral | H194P | 648 |
| Up | R195C | 273 |
| Neutral | R195W | 282 |
| Neutral | R195L | 285 |
| Up | R195G | 279 |
| Up | R195Q | 275 |
| Up | R195A | 286 |
| Up | R195D | 269 |
| Up | R195V | 284 |
| Neutral | A198G | 299 |
| Up | A198L | 305 |
| Up | A198M | 301 |
| Up | G206A | 324 |
| Up | G206S | 317 |
| Up | L207R | 653 |
| Up | S210V | 341 |
| Up | D212G | 678 |
| Up | Y218S | 354 |
| Up | F223C | 369 |
| Up | F223E | 365 |
| Up | F223G | 375 |
| Up | F223A | 381 |
| Up | F223S | 374 |
| Up | V227C | 388 |
| Up | V227D | 383 |
| Up | V227E | 384 |
| Up | V227L | 399 |
| Up | V227S | 393 |
| Up | V227W | 397 |
| Up | Q228P | 420 |
| Up | L229A | 438 |
| Up | L229T | 429 |
| Up | L229I | 436 |
| Up | A230V | 703 |
| Up | D233E | 440 |
| Up | I234A | 476 |
| Up | I234T | 467 |
| Up | I234E | 460 |
| Up | I234Q | 466 |
| Up | I237L | 475 |
| Up | I240S | 488 |
| Neutral | I240A | 495 |
| Up | I240C | 483 |

### B. 14-mL Protein Expression

[0526] In this example, the hMMP-1 mutants that were identified as temperature sensitive primary hits in Example 2 were expressed in 14 ml culture tubes and their enzymatic activity was measured at 25° C., 34° C. and 37° C. for 1 hour, 2 hours or overnight in order to verify the desired phenotype of decreased activity at elevated temperatures. Protein was expressed and purified as in Example 1 with the exception that the expression was performed in 14 ml tubes rather than a 96-well plate.

[0527] Four (4) μl of each hMMP-1 mutant supernatant was transferred to a 96-well microplate. Supernatants were activated with APMA as described in Example 2A above, except that the solution was incubated at the reaction temperature of 25° C., 34° C., or 37° C. for 2 hours. As above, following activation, 100 μl of TCNB containing 10 μM Mca-K-P-L-G-L-Dpa-A-R-NH₂ fluorescent substrate was added to each tube at the indicated reaction temperature (25° C., 34° C. or 37° C.) for one hour. Wildtype hMMP-1 was used as a positive control and supernatant from cells transformed with the vector was used as a negative control. Fluorescence was detected by measuring fluorescence in a fluorescent plate reader at 320 nm exitation/405 nm emission. Relative fluorescence units (RFU) were determined. Duplicate reactions were performed for each sample, reaction temperature, and positive and negative control.

[0528] The data is shown in Table 12A (1 hour incubation); Table 12B (2 hour incubations) and Table 12C (overnight incubation), below. Mutants that were active at 25° C. but demonstrated at least a 33% decreased activity at 34° C. or 37° C. (i.e. had a ratio of activity at 25° C. and 34° C. or a ratio of activity of 25° C. and 37° C. equal to or greater than 1.5 under any of the time point conditions tested were identified as temperature sensitive hits. Tables 12A-12C, below, list the hMMP-1 mutation, the RFU at 25° C., 34° C. and 37° C., and the ratio of the activities (at both 25° C./34° C. and 25° C./37° C.) of 64 hMMP-1 mutants whose decreased enzymatic activity at elevated temperatures were confirmed. Some of the hMMP-1 mutants, were noticeably more active at 25° C. than at an elevated temperature. For example, hMMP-1 mutant D179N (SEQ ID NO:160) was 87.5% more active at 25° C. than 37° C. after an overnight incubation (see e.g. Table 12C). Additionally, although expression levels, and therefore overall RFU values, varied in different experiments, the ratios of the activities remained the same. For example, mutant D156T was tested twice (see Table 12C below) and although each test gave different data RFU values the ratio of the values were similar and consistently within the 1.5 ratio parameter.

TABLE 12A
Temperature Sensitive hMMP-1 Mutants, 1 hour incubation

| hMMP-1 | SEQ ID | RFU | RFU | RFU | Ratio | Ratio |
|---|---|---|---|---|---|---|
| mutation | NO | 25° C. | 34° C. | 37° C. | 25° C./34° C. | 25° C./37° C. |
| L95K | 6 | 2677.64 | 553.00 | 572.70 | 4.84 | 4.68 |
| D105A | 39 | 3496.48 | 697.79 | 1119.92 | 5.01 | 3.12 |
| D105F | 33 | 1749.85 | 554.69 | 685.49 | 3.15 | 2.55 |
| D105G | 32 | 7450.35 | 2196.32 | 3514.50 | 3.39 | 2.12 |
| D105I | 36 | 4720.96 | 638.42 | 943.44 | 7.39 | 5.00 |
| D105L | 38 | 2636.80 | 490.04 | 552.90 | 5.38 | 4.77 |
| D105N | 27 | 7487.95 | 776.33 | 1513.73 | 9.65 | 4.95 |
| D105R | 25 | 1732.70 | 641.23 | 736.92 | 2.70 | 2.35 |
| D105S | 31 | 8637.40 | 3782.36 | 6510.05 | 2.28 | 1.33 |
| D105W | 35 | 4263.51 | 1321.69 | 2422.77 | 3.23 | 1.76 |
| D105T | 29 | 2666.45 | 770.72 | 1685.33 | 3.46 | 1.58 |
| R150P | 59 | 7568.19 | 1678.59 | 2010.33 | 4.51 | 3.76 |
| D151G | 70 | 973.47 | 517.98 | 595.63 | 1.88 | 1.63 |
| F155A | 96 | 1800.92 | 592.07 | 596.31 | 3.04 | 3.02 |
| D156K | 100 | 8718.91 | 1733.90 | 1839.60 | 5.03 | 4.74 |
| D156T | 105 | 8034.06 | 2216.02 | 2255.25 | 3.63 | 3.56 |
| D156L | 114 | 1825.01 | 528.43 | 619.10 | 3.45 | 2.95 |
| D156A | 115 | 1495.21 | 450.17 | 496.04 | 3.32 | 3.01 |
| D156W | 111 | 1006.97 | 463.48 | 493.84 | 2.17 | 2.04 |
| D156V | 113 | 1140.60 | 484.30 | 504.38 | 2.36 | 2.26 |
| D156T | 105 | 2796.00 | 581.90 | 743.53 | 4.80 | 3.76 |
| D156H | 99 | 3489.60 | 578.59 | 711.59 | 6.03 | 4.90 |
| D156R | 101 | 4983.67 | 678.23 | 734.95 | 7.35 | 6.78 |
| G159V | 132 | 3416.77 | 705.80 | 739.87 | 4.84 | 4.62 |
| G159T | 125 | 4081.99 | 1732.63 | 1865.15 | 2.36 | 2.19 |
| A176F | 148 | 967.31 | 539.31 | 517.16 | 1.79 | 1.87 |
| D179N | 160 | 4105.85 | 492.00 | 513.37 | 8.35 | 8.00 |
| E180Y | 182 | 8803.90 | 3904.31 | 5268.18 | 2.25 | 1.67 |
| E180T | 181 | 5957.38 | 1155.89 | 1430.72 | 5.15 | 4.16 |
| E180F | 185 | 7484.41 | 2677.89 | 3141.69 | 2.79 | 2.38 |
| D181L | 209 | 1629.22 | 559.04 | 549.09 | 2.91 | 2.97 |
| D181K | 195 | 844.40 | 570.98 | 569.44 | 1.48 | 1.48 |
| E182T | 219 | 2244.96 | 653.93 | 668.01 | 3.43 | 3.36 |
| E182Q | 218 | 1066.68 | 583.87 | 582.84 | 1.83 | 1.83 |
| T185R | 235 | 1599.19 | 867.00 | 872.66 | 1.84 | 1.83 |
| T185H | 233 | 3616.30 | 1601.20 | 1842.01 | 2.26 | 1.96 |
| T185Q | 238 | 4365.21 | 1512.02 | 1899.46 | 2.89 | 2.30 |
| T185A | 248 | 1374.00 | 567.04 | 608.05 | 2.42 | 2.26 |
| T185E | 232 | 2145.28 | 1263.20 | 1399.76 | 1.70 | 1.53 |
| N187R | 254 | 1659.90 | 955.75 | 1054.91 | 1.74 | 1.57 |
| N187M | 262 | 2842.50 | 1343.95 | 1464.36 | 2.12 | 1.94 |
| N187F | 261 | 1846.10 | 716.62 | 786.07 | 2.58 | 2.35 |
| N187K | 253 | 2428.31 | 1703.73 | 1914.84 | 1.43 | 1.27 |
| N187I | 264 | 2455.44 | 717.51 | 773.59 | 3.42 | 3.17 |
| R195V | 284 | 3121.02 | 1947.80 | 2132.94 | 1.60 | 1.46 |
| A198L | 305 | 4547.61 | 1570.19 | 2061.87 | 2.90 | 2.21 |
| A198M | 301 | 1948.92 | 1101.86 | 1535.22 | 1.77 | 1.27 |
| G206A | 324 | 667.50 | 543.90 | 540.79 | 1.23 | 1.23 |
| G206S | 317 | 608.46 | 427.44 | 412.07 | 1.42 | 1.48 |
| S210V | 341 | 1952.12 | 961.54 | 1791.55 | 2.03 | 1.09 |
| Y218S | 354 | 1674.47 | 1531.03 | 1573.00 | 1.09 | 1.06 |
| F223E | 365 | 5837.16 | 2747.99 | 4955.08 | 2.12 | 1.18 |
| V227C | 388 | 1138.96 | 684.05 | 722.68 | 1.67 | 1.58 |
| V227E | 384 | 5892.76 | 653.81 | 803.12 | 9.01 | 7.34 |
| V227W | 397 | 716.50 | 607.92 | 646.75 | 1.18 | 1.11 |
| Q228P | 420 | 676.11 | 488.99 | 495.88 | 1.38 | 1.36 |
| L229T | 429 | 768.59 | 492.66 | 491.49 | 1.56 | 1.56 |
| L229I | 436 | 1470.04 | 753.87 | 1231.17 | 1.95 | 1.19 |
| D233E | 440 | 1195.07 | 959.25 | 1056.45 | 1.25 | 1.13 |
| I234A | 476 | 1402.15 | 1014.61 | 1127.63 | 1.38 | 1.24 |
| I234T | 467 | 857.79 | 644.52 | 712.49 | 1.33 | 1.20 |
| I234E | 460 | 2281.82 | 591.10 | 762.52 | 3.86 | 2.99 |
| I240S | 488 | 2678.36 | 776.88 | 1314.40 | 3.45 | 2.04 |
| I240C | 483 | 1540.91 | 474.82 | 666.63 | 3.25 | 2.31 |

TABLE 12B
Temperature Sensitive hMMP-1 Mutants, 2 hours incubation

| hMMP-1 | SEQ ID | RFU | RFU | RFU | Ratio | Ratio |
|---|---|---|---|---|---|---|
| mutation | NO | 25° C. | 34° C. | 37° C. | 25° C./34° C. | 25° C./37° C. |
| L95K | 6 | 4650.42 | 748.29 | 746.89 | 6.21 | 6.23 |
| D105A | 39 | 5669.31 | 824.07 | 1336.14 | 6.88 | 4.24 |
| D105F | 33 | 2980.00 | 623.89 | 818.63 | 4.78 | 3.64 |
| D105G | 32 | 8821.81 | 2759.24 | 4313.40 | 3.20 | 2.05 |
| D105I | 36 | 6832.34 | 780.32 | 1110.07 | 8.76 | 6.15 |
| D105L | 38 | 4206.38 | 534.24 | 607.46 | 7.87 | 6.92 |
| D105N | 27 | 8920.05 | 918.13 | 1727.44 | 9.72 | 5.16 |
| D105R | 25 | 2821.20 | 722.46 | 813.68 | 3.90 | 3.47 |
| D105S | 31 | 9355.63 | 4607.18 | 7274.97 | 2.03 | 1.29 |
| D105W | 35 | 6663.80 | 1690.93 | 3081.59 | 3.94 | 2.16 |
| D105T | 29 | 4457.16 | 974.63 | 2220.03 | 4.57 | 2.01 |
| R150P | 59 | 8750.30 | 2315.11 | 2497.86 | 3.78 | 3.50 |
| D151G | 70 | 1264.62 | 589.27 | 616.51 | 2.15 | 2.05 |
| F155A | 96 | 2824.01 | 779.72 | 746.59 | 3.62 | 3.78 |
| D156K | 100 | 8576.47 | 2210.63 | 2310.30 | 3.88 | 3.71 |
| D156T | 105 | 8727.27 | 2679.17 | 2752.35 | 3.26 | 3.17 |
| D156L | 114 | 2916.24 | 576.84 | 688.08 | 5.06 | 4.24 |
| D156A | 115 | 2299.63 | 533.68 | 554.21 | 4.31 | 4.15 |
| D156W | 111 | 1502.86 | 539.74 | 575.12 | 2.78 | 2.61 |
| D156V | 113 | 1593.06 | 534.71 | 542.36 | 2.98 | 2.94 |
| D156T | 105 | 4469.68 | 690.87 | 848.14 | 6.47 | 5.27 |
| D156H | 99 | 5387.79 | 698.77 | 819.82 | 7.71 | 6.57 |
| D156R | 101 | 7020.81 | 793.83 | 872.40 | 8.84 | 8.05 |
| G159V | 132 | 4673.44 | 856.78 | 838.46 | 5.45 | 5.57 |
| G159T | 125 | 6704.95 | 2294.40 | 2347.74 | 2.92 | 2.86 |
| A176F | 148 | 1609.85 | 654.43 | 618.72 | 2.46 | 2.60 |
| D179N | 160 | 5660.69 | 644.51 | 656.31 | 8.78 | 8.63 |
| E180Y | 182 | 8557.09 | 4979.24 | 6079.36 | 1.72 | 1.41 |
| E180T | 181 | 7870.99 | 1532.35 | 1794.15 | 5.14 | 4.39 |
| E180F | 185 | 8508.13 | 3597.75 | 3975.22 | 2.36 | 2.14 |
| D181L | 209 | 2710.97 | 619.39 | 611.92 | 4.38 | 4.43 |
| D181K | 195 | 1130.63 | 625.01 | 608.68 | 1.81 | 1.86 |
| E182T | 219 | 3702.08 | 791.23 | 826.28 | 4.68 | 4.48 |
| E182Q | 218 | 1331.50 | 639.84 | 623.11 | 2.08 | 2.14 |
| T185R | 235 | 2637.31 | 1187.63 | 1183.37 | 2.22 | 2.23 |
| T185H | 233 | 5593.77 | 2278.26 | 2534.15 | 2.46 | 2.21 |
| T185Q | 238 | 7006.87 | 2250.58 | 2642.74 | 3.11 | 2.65 |
| T185A | 248 | 2474.96 | 663.82 | 707.09 | 3.73 | 3.50 |
| T185E | 232 | 3948.43 | 2088.15 | 2091.32 | 1.89 | 1.89 |
| N187R | 254 | 3006.08 | 1352.97 | 1421.87 | 2.22 | 2.11 |
| N187M | 262 | 4934.44 | 1811.35 | 1893.07 | 2.72 | 2.61 |
| N187F | 261 | 3227.96 | 877.21 | 931.04 | 3.68 | 3.47 |
| N187K | 253 | 4182.49 | 2425.34 | 2652.79 | 1.72 | 1.58 |
| N187I | 264 | 4218.55 | 849.11 | 887.80 | 4.97 | 4.75 |
| R195V | 284 | 4847.81 | 2724.92 | 2984.10 | 1.78 | 1.62 |
| A198L | 305 | 6756.76 | 2056.50 | 2642.76 | 3.29 | 2.56 |
| A198M | 301 | 3777.50 | 1708.61 | 2155.58 | 2.21 | 1.75 |
| G206A | 324 | 872.27 | 603.01 | 586.57 | 1.45 | 1.49 |
| G206S | 317 | 932.69 | 492.65 | 463.60 | 1.89 | 2.01 |
| S210V | 341 | 3349.95 | 1249.47 | 2314.86 | 2.68 | 1.45 |
| Y218S | 354 | 2878.50 | 2373.98 | 2350.27 | 1.21 | 1.22 |
| F223E | 365 | 8318.70 | 3685.68 | 6209.93 | 2.26 | 1.34 |
| V227C | 388 | 1998.67 | 950.01 | 992.19 | 2.10 | 2.01 |
| V227E | 384 | 7904.54 | 839.00 | 1015.12 | 9.42 | 7.79 |
| V227W | 397 | 996.55 | 729.20 | 787.87 | 1.37 | 1.26 |
| Q228P | 420 | 1082.56 | 607.78 | 586.63 | 1.78 | 1.85 |
| L229T | 429 | 1221.05 | 580.15 | 564.49 | 2.10 | 2.16 |
| L229I | 436 | 2790.27 | 1050.86 | 1803.44 | 2.66 | 1.55 |
| D233E | 440 | 2195.02 | 1393.95 | 1454.71 | 1.57 | 1.51 |
| I234A | 476 | 2375.42 | 1473.70 | 1594.08 | 1.61 | 1.49 |
| I234T | 467 | 1199.18 | 713.83 | 796.81 | 1.68 | 1.50 |
| I234E | 460 | 3920.02 | 705.86 | 923.57 | 5.55 | 4.24 |
| I240S | 488 | 3867.71 | 973.97 | 1575.05 | 3.97 | 2.46 |
| I240C | 483 | 2688.75 | 561.91 | 853.66 | 4.78 | 3.15 |

TABLE 12C
Temperature Sensitive hMMP-1 Mutants, Overnight
incubation

| hMMP-1 | SEQ ID | RFU | RFU | RFU | Ratio | Ratio |
|---|---|---|---|---|---|---|
| mutation | NO | 25° C. | 34° C. | 37° C. | 25° C./34° C. | 25° C./37° C. |
| L95K | 6 | 7744.34 | 1803.12 | 1677.96 | 4.29 | 4.62 |
| D105A | 39 | 8466.62 | 1302.84 | 1931.17 | 6.50 | 4.38 |
| D105F | 33 | 6725.59 | 938.60 | 1173.23 | 7.17 | 5.73 |
| D105G | 32 | 8940.06 | 3560.75 | 5390.32 | 2.51 | 1.66 |
| D105I | 36 | 8394.32 | 1614.57 | 1958.96 | 5.20 | 4.29 |
| D105L | 38 | 6546.78 | 957.95 | 1070.51 | 6.83 | 6.12 |
| D105N | 27 | 9119.04 | 1459.16 | 2347.74 | 6.25 | 3.88 |
| D105R | 25 | 5775.25 | 1407.06 | 1499.57 | 4.10 | 3.85 |
| D105S | 31 | 9300.85 | 5584.70 | 8234.95 | 1.67 | 1.13 |
| D105W | 35 | 8617.36 | 2851.22 | 4593.06 | 3.02 | 1.88 |
| D105T | 29 | 7910.47 | 1899.25 | 3292.01 | 4.17 | 2.40 |
| R150P | 59 | 9011.11 | 3533.16 | 3559.66 | 2.55 | 2.53 |
| D151G | 70 | 1956.65 | 959.80 | 1097.68 | 2.04 | 1.78 |
| F155A | 96 | 4891.89 | 2016.76 | 1843.31 | 2.43 | 2.65 |
| D156K | 100 | 8696.27 | 3968.92 | 3858.90 | 2.19 | 2.25 |
| D156T | 105 | 8972.20 | 3971.43 | 3854.84 | 2.26 | 2.33 |
| D156L | 114 | 5254.55 | 972.64 | 1232.94 | 5.40 | 4.26 |
| D156A | 115 | 3585.37 | 1098.25 | 1110.73 | 3.26 | 3.23 |
| D156W | 111 | 2570.24 | 1091.27 | 1206.22 | 2.36 | 2.13 |
| D156V | 113 | 2208.99 | 954.21 | 997.64 | 2.31 | 2.21 |
| D156T | 105 | 7229.28 | 1256.02 | 1540.11 | 5.76 | 4.69 |
| D156H | 99 | 7587.19 | 1451.49 | 1763.27 | 5.23 | 4.30 |
| D156R | 101 | 8622.23 | 1735.02 | 1846.71 | 4.97 | 4.67 |
| G159V | 132 | 6555.27 | 1821.53 | 1683.20 | 3.60 | 3.89 |
| G159T | 125 | 9105.95 | 3210.57 | 3160.07 | 2.84 | 2.88 |
| A176F | 148 | 4191.69 | 1414.21 | 1336.32 | 2.96 | 3.14 |
| D179N | 160 | 7317.57 | 1504.84 | 1485.28 | 4.86 | 4.93 |
| E180Y | 182 | 9281.77 | 6080.89 | 6894.61 | 1.53 | 1.35 |
| E180T | 181 | 8475.04 | 2585.89 | 2809.15 | 3.28 | 3.02 |
| E180F | 185 | 9360.74 | 5183.25 | 5335.15 | 1.81 | 1.75 |
| D181L | 209 | 4534.34 | 1078.98 | 1000.80 | 4.20 | 4.53 |
| D181K | 195 | 1869.47 | 946.27 | 928.55 | 1.98 | 2.01 |
| E182T | 219 | 6752.25 | 1483.52 | 1496.55 | 4.55 | 4.51 |
| E182Q | 218 | 2212.75 | 1065.07 | 1035.24 | 2.08 | 2.14 |
| T185R | 235 | 6281.97 | 2425.71 | 2300.61 | 2.59 | 2.73 |
| T185H | 233 | 8531.85 | 3164.69 | 3515.59 | 2.70 | 2.43 |
| T185Q | 238 | 9044.23 | 3639.00 | 4012.93 | 2.49 | 2.25 |
| T185A | 248 | 6156.97 | 1110.68 | 1059.61 | 5.54 | 5.81 |
| T185E | 232 | 8479.18 | 3868.06 | 3892.33 | 2.19 | 2.18 |
| N187R | 254 | 7593.11 | 2415.63 | 2370.01 | 3.14 | 3.20 |
| N187M | 262 | 8605.76 | 2769.52 | 2720.28 | 3.11 | 3.16 |
| N187F | 261 | 7352.85 | 1612.23 | 1704.23 | 4.56 | 4.31 |
| N187K | 253 | 8667.36 | 3458.94 | 3709.62 | 2.51 | 2.34 |
| N187I | 264 | 8306.40 | 1459.25 | 1465.77 | 5.69 | 5.67 |
| R195V | 284 | 8634.05 | 4648.03 | 4960.91 | 1.86 | 1.74 |
| A198L | 305 | 8795.36 | 3469.36 | 4181.78 | 2.54 | 2.10 |
| A198M | 301 | 8352.73 | 3215.69 | 3637.79 | 2.60 | 2.30 |
| G206A | 324 | 2492.53 | 1038.14 | 974.96 | 2.40 | 2.56 |
| G206S | 317 | 2845.84 | 908.82 | 808.42 | 3.13 | 3.52 |
| S210V | 341 | 7104.17 | 2441.96 | 3939.90 | 2.91 | 1.80 |
| Y218S | 354 | 7740.61 | 4057.37 | 4093.29 | 1.91 | 1.89 |
| F223E | 365 | 9650.44 | 4849.58 | 7645.34 | 1.99 | 1.26 |
| V227C | 388 | 5833.84 | 2207.20 | 2432.82 | 2.64 | 2.40 |
| V227E | 384 | 8630.90 | 2283.07 | 2152.81 | 3.78 | 4.01 |
| V227W | 397 | 3070.92 | 1370.13 | 1456.45 | 2.24 | 2.11 |
| Q228P | 420 | 3673.33 | 1162.95 | 1081.32 | 3.16 | 3.40 |
| L229T | 429 | 3543.75 | 1103.34 | 1030.05 | 3.21 | 3.44 |
| L229I | 436 | 7333.92 | 1832.18 | 3268.93 | 4.00 | 2.24 |
| D233E | 440 | 6694.93 | 2570.71 | 2661.43 | 2.60 | 2.52 |
| I234A | 476 | 6250.56 | 3890.90 | 4043.80 | 1.61 | 1.55 |
| I234T | 467 | 3507.08 | 1099.58 | 1228.23 | 3.19 | 2.86 |
| I234E | 460 | 7541.73 | 1365.08 | 1901.96 | 5.52 | 3.97 |
| I240S | 488 | 4376.99 | 2108.15 | 2592.19 | 2.08 | 1.69 |
| I240C | 483 | 6170.51 | 1174.96 | 2223.23 | 5.25 | 2.78 |

[0529] Table 13 below depicts the residual activity (the ratio of hMMP-1 mutant RFU/wt hMMP-1 RFU) of the hMMP-1 mutants following overnight incubation with the fluorescent peptide. The activity of mutants at 25° C., 34° C., or 37° C. were compared to the activity of wildtype hMMP-1 at the respective temperatures. At 25° C., five hMMP-1 mutants (E180F, E180Y, D156T, D156K, R150P) were more active than wildtype hMMP-1 as indicated by a residual activity >1. At elevated temperatures, all of the hMMP-1 mutants exhibited an overall decrease in activity when compared to wildtype hMMP-1 at the same temperature, thus confirming the phenotype of the hMMP-1 mutants as temperature sensitive mutants.

TABLE 13
Residual Activity of hMMP-1 Temperature Sensitive Mutants,
Overnight Incubation

| | | Residual | Residual | Residual |
|---|---|---|---|---|
| hMMP-1 | SEQ ID | Activity | Activity | Activity |
| mutation | NO | 25° C. | 34° C. | 37° C. |
| L95K | 6 | 0.80 | 0.20 | 0.20 |
| D105A | 39 | 0.93 | 0.15 | 0.22 |
| D105F | 33 | 0.74 | 0.11 | 0.13 |
| D105G | 32 | 0.99 | 0.42 | 0.60 |
| D105I | 36 | 0.93 | 0.19 | 0.22 |
| D105L | 38 | 0.72 | 0.11 | 0.12 |
| D105N | 27 | 1.01 | 0.17 | 0.26 |
| D105R | 25 | 0.64 | 0.16 | 0.17 |
| D105S | 31 | 1.03 | 0.65 | 0.92 |
| D105W | 35 | 0.95 | 0.33 | 0.51 |
| D105T | 29 | 0.87 | 0.22 | 0.37 |
| R150P | 59 | 0.99 | 0.41 | 0.44 |
| D151G | 70 | 0.22 | 0.11 | 0.12 |
| F155A | 96 | 0.51 | 0.22 | 0.22 |
| D156K | 100 | 0.97 | 0.46 | 0.46 |
| D156T | 105 | 1.00 | 0.46 | 0.46 |
| D156L | 114 | 0.58 | 0.11 | 0.14 |
| D156A | 115 | 0.40 | 0.13 | 0.12 |
| D156W | 111 | 0.28 | 0.13 | 0.14 |
| D156V | 113 | 0.24 | 0.11 | 0.11 |
| D156T | 105 | 0.80 | 0.15 | 0.17 |
| D156H | 99 | 0.84 | 0.17 | 0.20 |
| D156R | 101 | 0.95 | 0.20 | 0.21 |
| G159V | 132 | 0.73 | 0.21 | 0.20 |
| G159T | 125 | 1.00 | 0.37 | 0.39 |
| A176F | 148 | 0.43 | 0.16 | 0.16 |
| D179N | 160 | 0.81 | 0.17 | 0.18 |
| E180Y | 182 | 1.02 | 0.70 | 0.85 |
| E180T | 181 | 0.93 | 0.30 | 0.35 |
| E180F | 185 | 1.03 | 0.60 | 0.66 |
| D181L | 209 | 0.50 | 0.12 | 0.12 |
| D181K | 195 | 0.21 | 0.11 | 0.11 |
| E182T | 219 | 0.74 | 0.17 | 0.18 |
| E182Q | 218 | 0.24 | 0.12 | 0.13 |
| T185R | 235 | 0.69 | 0.28 | 0.28 |
| T185H | 233 | 0.94 | 0.37 | 0.43 |
| T185Q | 238 | 1.00 | 0.42 | 0.49 |
| T185A | 248 | 0.68 | 0.13 | 0.13 |
| T185E | 232 | 0.93 | 0.45 | 0.48 |
| N187R | 254 | 0.84 | 0.28 | 0.29 |
| N187M | 262 | 0.95 | 0.32 | 0.33 |
| N187F | 261 | 0.81 | 0.19 | 0.21 |
| N187K | 253 | 0.95 | 0.40 | 0.46 |
| N187I | 264 | 0.92 | 0.17 | 0.18 |
| R195V | 284 | 0.96 | 0.54 | 0.59 |
| A198L | 305 | 0.98 | 0.40 | 0.49 |
| A198M | 301 | 0.87 | 0.36 | 0.42 |
| G206A | 324 | 0.27 | 0.12 | 0.12 |
| G206S | 317 | 0.31 | 0.10 | 0.10 |
| S210V | 341 | 0.78 | 0.29 | 0.44 |
| Y218S | 354 | 0.85 | 0.47 | 0.50 |
| F223E | 365 | 1.07 | 0.57 | 0.86 |
| V227C | 388 | 0.64 | 0.26 | 0.27 |
| V227E | 384 | 0.95 | 0.27 | 0.24 |
| V227W | 397 | 0.34 | 0.16 | 0.16 |
| Q228P | 420 | 0.38 | 0.13 | 0.13 |
| L229T | 429 | 0.37 | 0.12 | 0.12 |
| L229I | 436 | 0.76 | 0.20 | 0.38 |
| D233E | 440 | 0.69 | 0.28 | 0.31 |
| I234A | 476 | 0.69 | 0.45 | 0.45 |
| I234T | 467 | 0.39 | 0.13 | 0.14 |
| I234E | 460 | 0.83 | 0.16 | 0.21 |
| I240S | 488 | 0.48 | 0.25 | 0.29 |
| I240C | 483 | 0.68 | 0.14 | 0.25 |

C. hMMP-1 Top Mutant Hits

[0530] Fourteen (14) positions were identified as top hit positions: 95, 105, 150, 156, 159, 179, 180, 182, 185, 187, 198, 227, 234 and 240. Twenty three (23) hMMP-1 mutants at 14 positions were selected as top hits based on two criteria, including:1) the ratio of the activities (25° C. to 37° C. and 25° C. to 34° C.); and 2) the activity (in RFUs). All of the mutants listed in Table 14 below had an activity greater than 2000 and a ratio of 25° C. to 37° C. greater than 2. The eleven hits identified with a ** are the hits that ranked high for both the ratio or activities and the activity level, and were used to develop a combinatorial library as described in Example 3.

TABLE 14
Top Hits

| | | | |
|---|---|---|---|
| L95K** | D105I | D105N** | D105L |
| D105A | D105G | R150P** | D156R |
| D156H | D156K** | D156T** | G159V** |
| G159T | D179N** | E180T** | E180F |
| E182T | T185Q | N187I | A198L** |
| V227E** | I234E | I240S** | |

### Example 3

### Combinatorial hMMP-1 Variant Libraryanapec

[0531] 1. Generation

[0532] In this example, a combinatorial hMMP-1 variant library was generated from the mutants selected in Example 2C and shown in Table 14 with a double asterix (**). Mutants at positions 182, 185 and 187 were excluded in the generation of the combinatorial library because of the importance of these positions for hMMP-1 catalytic activity. The library was generated to contain every possible combination of amino acid variants for each of the selected mutants. Table 15 depicts all mutant combinations theoretically contained in the library. The theoretical diversity of the library is 1536 mutants, which includes wild type, the 11 single mutants and all possible combinations of the mutants. The positions indicated are with respect to positions corresponding to amino acid residues of hMMP-1 set forth in SEQ ID NO:2. Each row and column indicates one polypeptide containing the noted mutations. For example, 156K 179N 227E, refers to a polypeptide containing three amino acid replacements at positions corresponding to positions set forth in SEQ ID NO:2: D by K at position 156, D by N at position 179 and V by E at position 227. The library was generated and expressed as described in Example 1.

[0533] The constructed library (designated CPS library) contained a total of 1238 mutants, including the wildtype and 9 individual hits. The distribution of the number of mutations in the library was determined. The constructed and screened library contained 81% of the maximal diversity.

TABLE 15
Combinatorial Library Mutants

| | | | |
|---|---|---|---|
| 95K | 150P 156T | 156K 179N 227E | 150P 156T 240S |
| 105N | 105N 240S | 156K 179N 198L | 150P 156T 227E |
| 150P | 105N 227E | 156K 179N 180T | 150P 156T 198L |
| 156K | 105N 198L | 156K 159V 240S | 150P 156T 180T |
| 156T | 105N 180T | 156K 159V 227E | 150P 156T 179N |
| 159V | 105N 179N | 156K 159V 198L | 150P 156T 159V |
| 179N | 105N 159V | 156K 159V 180T | 105N 227E 240S |
| 180T | 105N 156K | 156K 159V 179N | 105N 198L 240S |
| 198L | 105N 156T | 156T 227E 240S | 105N 198L 227E |
| 227E | 105N 150P | 156T 198L 240S | 105N 180T 240S |
| 240S | 95K 240S | 156T 198L 227E | 105N 180T 227E |
| 227E 240S | 95K 227E | 156T 180T 240S | 105N 180T 198L |
| 198L 240S | 95K 198L | 156T 180T 227E | 105N 179N 240S |
| 198L 227E | 95K 180T | 156T 180T 198L | 105N 179N 227E |
| 180T 240S | 95K 179N | 156T 179N 240S | 105N 179N 198L |
| 180T 227E | 95K 159V | 156T 179N 227E | 105N 179N 180T |
| 180T 198L | 95K 156T | 156T 179N 198L | 105N 159V 240S |
| 179N 240S | 95K 150P | 156T 179N 180T | 105N 159V 227E |
| 179N 227E | 95K 105N | 156T 159V 240S | 105N 159V 198L |
| 179N 198L | 95K 156K | 156T 159V 227E | 105N 159V 180T |
| 179N 180T | 180T 227E 240S | 156T 159V 198L | 105N 159V 179N |
| 159V 240S | 180T 198L 240S | 156T 159V 180T | 105N 156K 240S |
| 159V 227E | 180T 198L 227E | 156T 159V 179N | 105N 156K 227E |
| 159V 198L | 179N 227E 240S | 150P 227E 240S | 105N 156K 198L |
| 159V 180T | 179N 198L 240S | 198L 227E 240S | 105N 156K 180T |
| 159V 179N | 179N 198L 227E | 150P 198L 240S | 105N 156K 179N |
| 156K 240S | 179N 180T 240S | 150P 198L 227E | 105N 156K 159V |
| 156K 227E | 179N 180T 227E | 150P 180T 240S | 105N 156T 240S |
| 156K 198L | 179N 180T 198L | 150P 180T 227E | 105N 156T 227E |
| 156K 180T | 159V 227E 240S | 150P 180T 198L | 105N 156T 198L |
| 156K 179N | 159V 198L 240S | 150P 179N 240S | 105N 156T 180T |
| 156K 159V | 159V 198L 227E | 150P 179N 227E | 105N 156T 179N |
| 156T 240S | 159V 180T 240S | 150P 179N 198L | 105N 156T 159V |
| 156T 227E | 159V 180T 227E | 150P 179N 180T | 105N 150P 240S |
| 156T 198L | 159V 180T 198L | 150P 159V 240S | 105N 150P 227E |
| 156T 180T | 159V 179N 240S | 150P 159V 227E | 105N 150P 198L |
| 156T 179N | 159V 179N 227E | 150P 159V 198L | 105N 150P 180T |
| 156T 159V | 159V 179N 198L | 150P 159V 180T | 105N 150P 179N |
| 150P 240S | 159V 179N 180T | 150P 159V 179N | 105N 150P 159V |
| 150P 227E | 156K 227E 240S | 150P 156K 240S | 105N 150P 156K |
| 150P 198L | 156K 198L 240S | 150P 156K 227E | 105N 150P 156T |
| 150P 180T | 156K 198L 227E | 150P 156K 198L | 95K 227E 240S |
| 150P 179N | 156K 180T 240S | 150P 156K 180T | 95K 198L 240S |
| 150P 156K | 156K 180T 227E | 156K 180T 198L | 150P 156K 179N |
| 150P 159V | 156K 179N 240S | 150P 156K 159V | 95K 180T 240S |

| | | |
|---|---|---|
| 95K 180T 227E | 179N 180T 198L 240S | 156T 159V 180T 198L |
| 95K 180T 198L | 179N 180T 198L 227E | 156T 159V 179N 240S |
| 95K 179N 240S | 159V 198L 227E 240S | 156T 159V 179N 227E |
| 95K 179N 227E | 159V 180T 227E 240S | 156T 159V 179N 198L |
| 95K 179N 198L | 159V 180T 198L 240S | 156T 159V 179N 180T |
| 95K 179N 180T | 159V 180T 198L 227E | 150P 198L 227E 240S |
| 95K 159V 240S | 159V 179N 227E 240S | 150P 180T 227E 240S |
| 95K 159V 227E | 159V 179N 198L 240S | 150P 180T 198L 240S |
| 95K 159V 198L | 159V 179N 198L 227E | 150P 180T 198L 227E |
| 95K 159V 180T | 159V 179N 180T 240S | 150P 179N 227E 240S |
| 95K 159V 179N | 159V 179N 180T 227E | 150P 179N 198L 240S |
| 95K 156K 240S | 159V 179N 180T 198L | 150P 179N 198L 227E |
| 95K 156K 227E | 156K 198L 227E 240S | 150P 179N 180T 240S |
| 95K 156K 198L | 156K 180T 227E 240S | 150P 179N 180T 227E |
| 95K 156K 180T | 156K 180T 198L 240S | 150P 179N 180T 198L |
| 95K 156K 179N | 156K 180T 198L 227E | 150P 159V 227E 240S |
| 95K 156K 159V | 156K 179N 227E 240S | 150P 159V 198L 240S |
| 95K 198L 227E | 156K 179N 198L 240S | 150P 159V 198L 227E |
| 95K 156T 240S | 156K 179N 198L 227E | 150P 159V 180T 240S |
| 95K 156T 227E | 156K 179N 180T 240S | 150P 159V 180T 227E |
| 95K 156T 198L | 156K 179N 180T 227E | 150P 159V 180T 198L |
| 95K 156T 180T | 156K 179N 180T 198L | 150P 159V 179N 240S |
| 95K 156T 179N | 156K 159V 227E 240S | 150P 159V 179N 227E |
| 95K 156T 159V | 156K 159V 198L 240S | 150P 159V 179N 198L |
| 95K 150P 240S | 156K 159V 198L 227E | 150P 159V 179N 180T |
| 95K 150P 227E | 156K 159V 180T 240S | 150P 156K 227E 240S |
| 95K 150P 198L | 156K 159V 180T 227E | 150P 156K 198L 240S |
| 95K 150P 180T | 156K 159V 180T 198L | 150P 156K 198L 227E |
| 95K 150P 179N | 156K 159V 179N 240S | 150P 156K 180T 240S |
| 95K 150P 159V | 156K 159V 179N 227E | 150P 156K 180T 227E |
| 95K 150P 156K | 156K 159V 179N 198L | 150P 156K 180T 198L |
| 95K 150P 156T | 156K 159V 179N 180T | 150P 156K 179N 240S |
| 95K 105N 240S | 156T 198L 227E 240S | 150P 156K 179N 227E |
| 95K 105N 227E | 156T 180T 227E 240S | 150P 156K 179N 198L |
| 95K 105N 198L | 156T 180T 198L 240S | 150P 156K 179N 180T |
| 95K 105N 180T | 156T 180T 198L 227E | 150P 156K 159V 240S |
| 95K 105N 179N | 156T 179N 227E 240S | 150P 156K 159V 227E |
| 95K 105N 159V | 156T 179N 198L 240S | 156T 179N 180T 240S |
| 95K 105N 156K | 156T 179N 198L 227E | 156T 179N 180T 227E |
| 95K 105N 156T | 156T 159V 227E 240S | 156T 179N 180T 198L |
| 95K 105N 150P | 156T 159V 198L 240S | 150P 156T 227E 240S |
| 180T 198L 227E 240S | 156T 159V 198L 227E | 150P 156T 198L 240S |
| 179N 198L 227E 240S | 156T 159V 180T 240S | 150P 156T 198L 227E |
| 179N 180T 227E 240S | 156T 159V 180T 227E | 150P 156T 180T 240S |
| 150P 156T 180T 227E | 105N 156T 198L 240S | 95K 180T 198L 227E |
| 150P 156T 180T 198L | 105N 156T 180T 227E | 95K 179N 180T 227E |
| 150P 156T 179N 240S | 105N 156T 180T 198L | 95K 179N 180T 198L |
| 150P 156T 179N 227E | 105N 156T 179N 240S | 95K 159V 227E 240S |
| 150P 156T 179N 198L | 105N 156T 179N 227E | 95K 159V 198L 240S |
| 150P 156T 179N 180T | 105N 156T 179N 198L | 95K 159V 198L 227E |
| 150P 156T 159V 240S | 105N 156T 179N 180T | 95K 159V 180T 240S |
| 150P 156T 159V 227E | 105N 156T 159V 240S | 95K 159V 180T 227E |
| 150P 156T 159V 198L | 105N 156T 159V 227E | 95K 159V 180T 198L |
| 150P 156T 159V 180T | 105N 156T 159V 198L | 95K 159V 179N 240S |
| 150P 156T 159V 179N | 105N 156T 159V 180T | 95K 159V 179N 227E |
| 105N 198L 227E 240S | 105N 156T 159V 179N | 95K 159V 179N 198L |
| 105N 180T 227E 240S | 105N 150P 227E 240S | 95K 159V 179N 180T |
| 105N 180T 198L 240S | 105N 150P 198L 240S | 95K 156K 227E 240S |
| 105N 180T 198L 227E | 105N 150P 198L 227E | 95K 156K 198L 240S |
| 105N 179N 227E 240S | 105N 150P 180T 240S | 95K 156K 198L 227E |
| 105N 179N 198L 240S | 105N 150P 180T 227E | 95K 156K 180T 240S |
| 105N 179N 198L 227E | 105N 150P 180T 198L | 95K 156K 180T 227E |
| 105N 179N 180T 240S | 105N 150P 179N 240S | 95K 156K 180T 198L |
| 105N 179N 180T 227E | 105N 150P 179N 227E | 95K 156K 179N 240S |
| 105N 179N 180T 198L | 105N 150P 179N 198L | 95K 156K 179N 227E |
| 105N 159V 227E 240S | 105N 150P 179N 180T | 95K 156K 179N 198L |
| 105N 159V 198L 240S | 105N 150P 159V 240S | 95K 156K 179N 180T |
| 105N 159V 198L 227E | 105N 150P 159V 227E | 95K 156K 159V 240S |
| 105N 159V 180T 240S | 105N 150P 159V 198L | 95K 156K 159V 227E |
| 105N 159V 180T 227E | 105N 150P 159V 180T | 95K 156K 159V 198L |
| 105N 159V 180T 198L | 105N 150P 159V 179N | 95K 156K 159V 180T |
| 105N 159V 179N 240S | 105N 150P 156K 240S | 95K 156K 159V 179N |
| 105N 159V 179N 227E | 105N 150P 156K 227E | 95K 156T 227E 240S |
| 105N 159V 179N 198L | 105N 150P 156K 198L | 95K 156T 198L 240S |
| 105N 159V 179N 180T | 105N 150P 156K 180T | 95K 156T 198L 227E |
| 105N 156K 227E 240S | 105N 156K 180T 227E | 95K 156T 180T 240S |
| 105N 156K 198L 240S | 105N 156K 180T 198L | 105N 150P 156K 179N |
| 105N 156K 198L 227E | 105N 156K 179N 240S | 105N 150P 156K 159V |
| 105N 156K 180T 240S | 105N 156K 179N 227E | 105N 150P 156T 240S |
| 150P 156K 159V 198L | 105N 156K 179N 198L | 105N 150P 156T 227E |
| 150P 156K 159V 180T | 105N 156K 179N 180T | 105N 150P 156T 198L |
| 150P 156K 159V 179N | 105N 150P 156T 179N | 105N 150P 156T 180T |
| 105N 156K 159V 240S | 105N 150P 156T 159V | 95K 156T 179N 198L |
| 105N 156K 159V 227E | 95K 198L 227E 240S | 95K 156T 179N 180T |
| 105N 156K 159V 198L | 95K 180T 227E 240S | 95K 156T 159V 240S |
| 105N 156K 159V 180T | 95K 180T 198L 240S | 95K 156T 159V 227E |
| 105N 156K 159V 179N | 95K 179N 227E 240S | 95K 156T 159V 198L |
| 105N 156T 227E 240S | 95K 179N 198L 240S | 95K 156T 159V 180T |
| 105N 156T 198L 227E | 95K 179N 198L 227E | 95K 156T 159V 179N |
| 105N 156T 180T 240S | 95K 179N 180T 240S | 95K 150P 227E 240S |

| | |
|---|---|
| 95K 150P 198L 240S | 95K 105N 156K 179N |
| 95K 150P 198L 227E | 95K 105N 156K 159V |
| 95K 150P 180T 240S | 95K 105N 156T 240S |
| 95K 150P 180T 227E | 95K 105N 156T 227E |
| 95K 150P 180T 198L | 95K 105N 156T 198L |
| 95K 150P 179N 240S | 95K 105N 156T 180T |
| 95K 150P 179N 227E | 95K 105N 156T 179N |
| 95K 150P 179N 198L | 95K 105N 156T 159V |
| 95K 150P 179N 180T | 95K 105N 150P 240S |
| 95K 150P 159V 240S | 95K 105N 150P 227E |
| 95K 150P 159V 227E | 95K 105N 150P 198L |
| 95K 150P 159V 198L | 95K 105N 150P 180T |
| 95K 150P 159V 180T | 95K 105N 150P 179N |
| 95K 150P 159V 179N | 95K 105N 150P 159V |
| 95K 150P 156K 240S | 95K 105N 150P 156K |
| 95K 150P 156K 227E | 95K 105N 150P 156T |
| 95K 150P 156K 198L | 95K 105N 179N 227E |
| 95K 150P 156K 180T | 95K 105N 179N 198L |
| 95K 150P 156K 179N | 95K 105N 179N 180T |
| 95K 150P 156K 159V | 95K 105N 159V 240S |
| 95K 150P 156T 240S | 156K 159V 179N 198L 227E |
| 95K 150P 156T 227E | 179N 180T 198L 227E 240S |
| 95K 150P 156T 198L | 159V 180T 198L 227E 240S |
| 95K 150P 156T 180T | 159V 179N 198L 227E 240S |
| 95K 150P 156T 179N | 159V 179N 180T 227E 240S |
| 95K 150P 156T 159V | 159V 179N 180T 198L 240S |
| 95K 105N 227E 240S | 159V 179N 180T 198L 227E |
| 95K 105N 198L 240S | 156K 180T 198L 227E 240S |
| 95K 105N 198L 227E | 156K 179N 198L 227E 240S |
| 95K 105N 180T 240S | 156K 179N 180T 227E 240S |
| 95K 105N 180T 227E | 156K 179N 180T 198L 240S |
| 95K 105N 180T 198L | 156K 179N 180T 198L 227E |
| 95K 105N 179N 240S | 156K 159V 198L 227E 240S |
| 95K 156T 180T 227E | 156K 159V 180T 227E 240S |
| 95K 156T 180T 198L | 156K 159V 180T 198L 240S |
| 95K 156T 179N 240S | 156K 159V 180T 198L 227E |
| 95K 156T 179N 227E | 156K 159V 179N 227E 240S |
| 95K 105N 159V 227E | 156K 159V 179N 198L 240S |
| 95K 105N 159V 198L | 150P 156K 159V 198L 227E |
| 95K 105N 159V 180T | 156K 159V 179N 180T 240S |
| 95K 105N 159V 179N | 156K 159V 179N 180T 227E |
| 95K 105N 156K 240S | 156K 159V 179N 180T 198L |
| 95K 105N 156K 227E | 156T 180T 198L 227E 240S |
| 95K 105N 156K 198L | 156T 179N 198L 227E 240S |
| 95K 105N 156K 180T | 156T 179N 180T 227E 240S |
| 156T 179N 180T 198L 240S | 150P 156K 159V 179N 180T |
| 156T 179N 180T 198L 227E | 150P 156T 198L 227E 240S |
| 156T 159V 198L 227E 240S | 150P 156T 180T 227E 240S |
| 156T 159V 180T 227E 240S | 150P 156T 180T 198L 240S |
| 156T 159V 180T 198L 240S | 150P 156T 180T 198L 227E |
| 156T 159V 180T 198L 227E | 150P 156T 179N 227E 240S |
| 156T 159V 179N 227E 240S | 150P 156T 179N 198L 240S |
| 156T 159V 179N 198L 240S | 150P 156T 179N 198L 227E |
| 156T 159V 179N 198L 227E | 150P 156T 179N 180T 240S |
| 156T 159V 179N 180T 240S | 150P 156T 179N 180T 227E |
| 156T 159V 179N 180T 227E | 150P 156T 179N 180T 198L |
| 156T 159V 179N 180T 198L | 150P 156T 159V 227E 240S |
| 150P 180T 198L 227E 240S | 150P 156T 159V 198L 240S |
| 150P 179N 198L 227E 240S | 150P 156T 159V 198L 227E |
| 150P 179N 180T 227E 240S | 150P 156T 159V 180T 240S |
| 150P 179N 180T 198L 240S | 150P 156T 159V 180T 227E |
| 150P 179N 180T 198L 227E | 150P 156T 159V 180T 198L |
| 150P 159V 198L 227E 240S | 150P 156T 159V 179N 240S |
| 150P 159V 180T 227E 240S | 150P 156T 159V 179N 227E |
| 150P 159V 180T 198L 240S | 150P 159V 180T 198L 227E |
| 150P 159V 179N 227E 240S | 150P 156T 159V 179N 180T |
| 150P 159V 179N 198L 240S | 105N 180T 198L 227E 240S |
| 150P 159V 179N 198L 227E | 105N 179N 198L 227E 240S |
| 150P 159V 179N 180T 240S | 105N 179N 180T 227E 240S |
| 150P 159V 179N 180T 227E | 105N 179N 180T 198L 240S |
| 150P 159V 179N 180T 198L | 105N 179N 180T 198L 227E |
| 150P 156K 198L 227E 240S | 105N 159V 198L 227E 240S |
| 150P 156K 180T 227E 240S | 105N 159V 180T 227E 240S |
| 150P 156K 180T 198L 240S | 105N 159V 180T 198L 240S |
| 150P 156K 180T 198L 227E | 105N 159V 180T 198L 227E |
| 150P 156K 179N 227E 240S | 105N 159V 179N 227E 240S |
| 150P 156K 179N 198L 240S | 105N 159V 179N 198L 240S |
| 150P 156K 179N 198L 227E | 105N 159V 179N 198L 227E |
| 150P 156K 179N 180T 240S | 105N 159V 179N 180T 240S |
| 150P 156K 179N 180T 227E | 105N 159V 179N 180T 227E |
| 150P 156K 179N 180T 198L | 105N 159V 179N 180T 198L |
| 150P 156K 159V 227E 240S | 105N 156K 198L 227E 240S |
| 150P 156K 159V 198L 240S | 105N 156K 180T 227E 240S |
| 105N 156K 180T 198L 240S | 105N 150P 179N 180T 240S |
| 150P 156K 159V 180T 240S | 105N 156K 180T 198L 227E |
| 150P 156K 159V 180T 227E | 105N 156K 179N 227E 240S |
| 150P 156K 159V 180T 198L | 105N 156K 179N 198L 240S |
| 150P 156K 159V 179N 240S | 105N 156K 179N 198L 227E |
| 150P 156K 159V 179N 227E | 105N 156K 179N 180T 240S |
| 150P 156K 159V 179N 198L | 105N 156K 179N 180T 227E |
| 105N 156K 179N 180T 198L | 105N 150P 159V 180T 227E |
| 105N 156K 159V 227E 240S | 105N 150P 159V 180T 198L |
| 105N 156K 159V 198L 240S | 105N 150P 159V 179N 240S |
| 105N 156K 159V 198L 227E | 105N 150P 159V 179N 227E |
| 105N 156K 159V 180T 240S | 105N 150P 159V 179N 198L |
| 105N 156K 159V 180T 227E | 105N 150P 159V 179N 180T |
| 105N 156K 159V 180T 198L | 105N 150P 156K 227E 240S |
| 105N 156K 159V 179N 240S | 105N 150P 156K 198L 240S |
| 105N 156K 159V 179N 227E | 105N 150P 156K 198L 227E |
| 105N 156K 159V 179N 198L | 105N 150P 156K 180T 240S |
| 105N 156K 159V 179N 180T | 105N 150P 156K 180T 227E |
| 105N 156T 198L 227E 240S | 105N 150P 156K 180T 198L |
| 105N 156T 180T 227E 240S | 105N 150P 156K 179N 240S |
| 105N 156T 180T 198L 240S | 105N 150P 156K 179N 227E |
| 105N 156T 180T 198L 227E | 105N 150P 156K 179N 198L |
| 105N 156T 179N 227E 240S | 105N 150P 156K 179N 180T |
| 105N 156T 179N 198L 240S | 105N 150P 156K 159V 240S |
| 105N 156T 179N 198L 227E | 105N 150P 156K 159V 227E |
| 105N 156T 179N 180T 240S | 105N 150P 156K 159V 198L |
| 150P 156T 159V 179N 198L | 105N 156T 179N 180T 227E |
| 105N 156T 179N 180T 198L | 105N 150P 156K 159V 179N |
| 105N 156T 159V 227E 240S | 105N 150P 156T 227E 240S |
| 105N 156T 159V 198L 240S | 105N 150P 156T 198L 240S |
| 105N 156T 159V 198L 227E | 105N 150P 156T 198L 227E |
| 105N 156T 159V 180T 240S | 105N 150P 156T 180T 240S |
| 105N 156T 159V 180T 227E | 105N 150P 156T 180T 227E |
| 105N 156T 159V 180T 198L | 105N 150P 156T 180T 198L |
| 105N 156T 159V 179N 240S | 105N 150P 156T 179N 240S |
| 105N 156T 159V 179N 227E | 105N 150P 156T 179N 227E |
| 105N 156T 159V 179N 198L | 105N 150P 156T 179N 198L |
| 105N 156T 159V 179N 180T | 105N 150P 156T 179N 180T |
| 105N 150P 198L 227E 240S | 105N 150P 156T 159V 240S |
| 105N 150P 180T 227E 240S | 105N 150P 156T 159V 227E |
| 105N 150P 180T 198L 240S | 105N 150P 156T 159V 198L |
| 105N 150P 180T 198L 227E | 105N 150P 156T 159V 180T |
| 105N 150P 179N 227E 240S | 105N 150P 156T 159V 179N |
| 105N 150P 179N 198L 240S | 95K 180T 198L 227E 240S |
| 105N 150P 179N 198L 227E | 95K 179N 198L 227E 240S |
| 95K 179N 180T 227E 240S | 95K 156T 159V 198L 227E |
| 105N 150P 179N 180T 227E | 95K 179N 180T 198L 240S |
| 105N 150P 179N 180T 198L | 95K 179N 180T 198L 227E |
| 105N 150P 159V 227E 240S | 95K 159V 198L 227E 240S |
| 105N 150P 159V 198L 240S | 95K 159V 180T 227E 240S |
| 105N 150P 159V 198L 227E | 95K 159V 180T 198L 240S |
| 105N 150P 159V 180T 240S | 95K 159V 180T 198L 227E |
| 95K 159V 179N 227E 240S | 95K 156T 159V 179N 180T |
| 95K 159V 179N 198L 240S | 95K 150P 198L 227E 240S |
| 95K 159V 179N 198L 227E | 95K 150P 180T 227E 240S |
| 95K 159V 179N 180T 240S | 95K 150P 180T 198L 240S |
| 95K 159V 179N 180T 227E | 95K 150P 180T 198L 227E |
| 95K 159V 179N 180T 198L | 95K 150P 179N 227E 240S |
| 95K 156K 198L 227E 240S | 95K 150P 179N 198L 240S |
| 95K 156K 180T 227E 240S | 95K 150P 179N 198L 227E |
| 95K 156K 180T 198L 240S | 95K 150P 179N 180T 240S |
| 95K 156K 180T 198L 227E | 95K 150P 179N 180T 227E |
| 95K 156K 179N 227E 240S | 95K 150P 179N 180T 198L |
| 95K 156K 179N 198L 240S | 95K 150P 159V 227E 240S |
| 95K 156K 179N 198L 227E | 95K 150P 159V 198L 240S |
| 95K 156K 179N 180T 240S | 95K 150P 159V 198L 227E |
| 95K 156K 179N 180T 227E | 95K 150P 159V 180T 240S |
| 95K 156K 179N 180T 198L | 95K 150P 159V 180T 227E |
| 95K 156K 159V 227E 240S | 95K 150P 159V 180T 198L |
| 95K 156K 159V 198L 240S | 95K 150P 159V 179N 240S |
| 95K 156K 159V 198L 227E | 95K 150P 159V 179N 227E |
| 105N 150P 156K 159V 180T | 95K 156K 159V 180T 240S |
| 95K 156K 159V 180T 227E | 95K 150P 159V 179N 180T |
| 95K 156K 159V 180T 198L | 95K 150P 156K 227E 240S |
| 95K 156K 159V 179N 240S | 95K 150P 156K 198L 240S |
| 95K 156K 159V 179N 227E | 95K 150P 156K 198L 227E |
| 95K 156K 159V 179N 198L | 95K 150P 156K 180T 240S |
| 95K 156K 159V 179N 180T | 95K 150P 156K 180T 227E |
| 95K 156T 198L 227E 240S | 95K 150P 156K 180T 198L |
| 95K 156T 180T 227E 240S | 95K 150P 156K 179N 240S |
| 95K 156T 180T 198L 240S | 95K 150P 156K 179N 227E |
| 95K 156T 180T 198L 227E | 95K 150P 156K 179N 198L |
| 95K 156T 179N 227E 240S | 95K 150P 156K 179N 180T |
| 95K 156T 179N 198L 240S | 95K 150P 156K 159V 240S |
| 95K 156T 179N 198L 227E | 95K 150P 156K 159V 227E |
| 95K 156T 179N 180T 240S | 95K 150P 156K 159V 198L |
| 95K 156T 179N 180T 227E | 95K 150P 156K 159V 180T |
| 95K 156T 179N 180T 198L | 95K 150P 156K 159V 179N |
| 95K 156T 159V 227E 240S | 95K 150P 156T 227E 240S |
| 95K 156T 159V 198L 240S | 95K 150P 156T 198L 240S |
| 95K 150P 156T 198L 227E | 95K 105N 156K 159V 198L |
| 95K 156T 159V 180T 240S | 95K 150P 156T 180T 240S |
| 95K 156T 159V 180T 227E | 95K 150P 156T 180T 227E |
| 95K 156T 159V 180T 198L | 95K 150P 156T 180T 198L |
| 95K 156T 159V 179N 240S | 95K 150P 156T 179N 240S |
| 95K 156T 159V 179N 227E | 95K 150P 156T 179N 227E |
| 95K 156T 159V 179N 198L | 95K 150P 156T 179N 198L |
| 95K 150P 156T 179N 180T | 95K 105N 156T 180T 227E |
| 95K 150P 156T 159V 240S | 95K 105N 156T 180T 198L |
| 95K 150P 156T 159V 227E | 95K 105N 156T 179N 240S |
| 95K 150P 156T 159V 198L | 95K 105N 156T 179N 227E |
| 95K 150P 156T 159V 180T | 95K 105N 156T 179N 198L |
| 95K 150P 156T 159V 179N | 95K 105N 156T 179N 180T |
| 95K 105N 198L 227E 240S | 95K 105N 156T 159V 240S |
| 95K 105N 180T 227E 240S | 95K 105N 156T 159V 227E |
| 95K 105N 180T 198L 240S | 95K 105N 156T 159V 198L |
| 95K 105N 180T 198L 227E | 95K 105N 156T 159V 180T |
| 95K 105N 179N 227E 240S | 95K 105N 156T 159V 179N |
| 95K 105N 179N 198L 240S | 95K 105N 150P 227E 240S |
| 95K 105N 179N 198L 227E | 95K 105N 150P 198L 240S |
| 95K 105N 179N 180T 240S | 95K 105N 150P 198L 227E |
| 95K 105N 179N 180T 227E | 95K 105N 150P 180T 240S |
| 95K 105N 179N 180T 198L | 95K 105N 150P 180T 227E |
| 95K 105N 159V 227E 240S | 95K 105N 150P 180T 198L |
| 95K 105N 159V 198L 240S | 95K 105N 150P 179N 240S |
| 95K 105N 159V 198L 227E | 95K 105N 150P 179N 227E |
| 95K 150P 159V 179N 198L | 95K 105N 159V 180T 240S |
| 95K 105N 159V 180T 227E | 95K 105N 150P 179N 180T |
| 95K 105N 159V 180T 198L | 95K 105N 150P 159V 240S |
| 95K 105N 159V 179N 240S | 95K 105N 150P 159V 227E |
| 95K 105N 159V 179N 227E | 95K 105N 150P 159V 198L |
| 95K 105N 159V 179N 198L | 95K 105N 150P 159V 180T |
| 95K 105N 159V 179N 180T | 95K 105N 150P 159V 179N |
| 95K 105N 156K 227E 240S | 95K 105N 150P 156K 240S |
| 95K 105N 156K 198L 240S | 95K 105N 150P 156K 227E |
| 95K 105N 156K 198L 227E | 95K 105N 150P 156K 198L |
| 95K 105N 156K 180T 240S | 95K 105N 150P 156K 180T |
| 95K 105N 156K 180T 227E | 95K 105N 150P 156K 179N |
| 95K 105N 156K 180T 198L | 95K 105N 150P 156K 159V |
| 95K 105N 156K 179N 240S | 95K 105N 150P 156T 240S |
| 95K 105N 156K 179N 227E | 95K 105N 150P 156T 227E |
| 95K 105N 156K 179N 198L | 95K 105N 150P 156T 198L |
| 95K 105N 156K 179N 180T | 95K 105N 150P 156T 180T |
| 95K 105N 156K 159V 240S | 95K 105N 150P 156T 179N |
| 95K 105N 156K 159V 227E | 95K 105N 150P 156T 159V |
| 95K 105N 150P 179N 198L | 150P 156T 159V 179N 198L 240S |
| 95K 105N 156K 159V 180T | 159V 179N 180T 198L 227E 240S |
| 95K 105N 156K 159V 179N | 156K 179N 180T 198L 227E 240S |
| 95K 105N 156T 227E 240S | 156K 159V 180T 198L 227E 240S |
| 95K 105N 156T 198L 240S | 156K 159V 179N 198L 227E 240S |
| 95K 105N 156T 198L 227E | 156K 159V 179N 180T 227E 240S |
| 95K 105N 156T 180T 240S | 156K 159V 179N 180T 198L 240S |
| 150P 156T 159V 179N 198L 227E | 105N 159V 179N 198L 227E 240S |
| 150P 156T 159V 179N 180T 240S | 105N 159V 179N 180T 227E 240S |
| 150P 156T 159V 179N 180T 227E | 105N 159V 179N 180T 198L 240S |
| 150P 156T 159V 179N 180T 198L | 105N 159V 179N 180T 198L 227E |
| 105N 179N 180T 198L 227E 240S | 105N 156K 180T 198L 227E 240S |
| 105N 159V 180T 198L 227E 240S | 105N 156K 179N 198L 227E 240S |
| 156K 159V 179N 180T 198L 227E | 105N 156K 179N 180T 227E 240S |
| 156T 179N 180T 198L 227E 240S | 105N 156K 179N 180T 198L 240S |
| 156T 159V 180T 198L 227E 240S | 105N 156K 179N 180T 198L 227E |
| 156T 159V 179N 198L 227E 240S | 105N 156K 159V 198L 227E 240S |
| 156T 159V 179N 180T 227E 240S | 105N 156K 159V 180T 227E 240S |
| 156T 159V 179N 180T 198L 240S | 105N 156K 159V 180T 198L 240S |
| 156T 159V 179N 180T 198L 227E | 105N 156K 159V 180T 198L 227E |
| 150P 179N 180T 198L 227E 240S | 105N 156K 159V 179N 227E 240S |
| 150P 159V 180T 198L 227E 240S | 105N 156K 159V 179N 198L 240S |
| 150P 159V 179N 198L 227E 240S | 105N 156K 159V 179N 198L 227E |
| 150P 159V 179N 180T 227E 240S | 105N 156K 159V 179N 180T 240S |
| 150P 159V 179N 180T 198L 240S | 105N 156K 159V 179N 180T 227E |
| 150P 159V 179N 180T 198L 227E | 105N 156K 159V 179N 180T 198L |
| 150P 156K 180T 198L 227E 240S | 105N 156T 180T 198L 227E 240S |
| 150P 156K 179N 198L 227E 240S | 105N 156T 179N 198L 227E 240S |
| 150P 156K 179N 180T 227E 240S | 105N 156T 179N 180T 227E 240S |
| 150P 156K 179N 180T 198L 240S | 105N 156T 179N 180T 198L 240S |
| 150P 156K 179N 180T 198L 227E | 105N 156T 179N 180T 198L 227E |
| 150P 156K 159V 198L 227E 240S | 105N 156T 159V 198L 227E 240S |
| 150P 156K 159V 180T 227E 240S | 105N 156T 159V 180T 227E 240S |
| 150P 156K 159V 180T 198L 240S | 105N 156T 159V 180T 198L 240S |
| 150P 156K 159V 180T 198L 227E | 105N 156T 159V 180T 198L 227E |
| 150P 156K 159V 179N 227E 240S | 105N 156T 159V 179N 227E 240S |
| 150P 156K 159V 179N 198L 240S | 105N 156T 159V 179N 198L 240S |
| 150P 156K 159V 179N 198L 227E | 105N 156T 159V 179N 198L 227E |
| 150P 156K 159V 179N 180T 240S | 105N 156T 159V 179N 180T 240S |
| 150P 156K 159V 179N 180T 227E | 105N 156T 159V 179N 180T 227E |
| 150P 156K 159V 179N 180T 198L | 105N 156T 159V 179N 180T 198L |
| 150P 156T 180T 198L 227E 240S | 105N 150P 180T 198L 227E 240S |
| 150P 156T 179N 198L 227E 240S | 105N 150P 179N 198L 227E 240S |
| 150P 156T 179N 180T 227E 240S | 105N 150P 179N 180T 227E 240S |
| 150P 156T 179N 180T 198L 240S | 105N 150P 179N 180T 198L 240S |
| 150P 156T 179N 180T 198L 227E | 105N 150P 156T 159V 180T 227E |
| 150P 156T 159V 198L 227E 240S | 105N 150P 159V 179N 227E 240S |
| 150P 156T 159V 180T 227E 240S | 105N 150P 159V 179N 198L 240S |
| 150P 156T 159V 180T 198L 240S | 105N 150P 159V 179N 198L 227E |
| 150P 156T 159V 180T 198L 227E | 105N 150P 159V 179N 180T 240S |
| 150P 156T 159V 179N 227E 240S | 105N 150P 159V 179N 180T 227E |
| 105N 150P 179N 180T 198L 227E | 105N 150P 159V 179N 180T 198L |
| 105N 150P 156K 198L 227E 240S | 95K 159V 180T 198L 227E 240S |
| 105N 150P 156K 180T 227E 240S | 95K 159V 179N 198L 227E 240S |
| 105N 150P 156K 180T 198L 240S | 95K 159V 179N 180T 227E 240S |
| 105N 150P 156K 180T 198L 227E | 95K 159V 179N 180T 198L 240S |
| 105N 150P 156K 179N 227E 240S | 95K 159V 179N 180T 198L 227E |
| 105N 150P 156K 179N 198L 240S | 95K 156K 180T 198L 227E 240S |
| 105N 150P 156K 179N 198L 227E | 95K 156K 179N 198L 227E 240S |
| 105N 150P 156K 179N 180T 240S | 95K 156K 179N 180T 227E 240S |
| 105N 150P 156K 179N 180T 227E | 95K 156K 179N 180T 198L 240S |
| 105N 150P 156K 179N 180T 198L | 95K 156K 179N 180T 198L 227E |
| 105N 150P 156K 159V 227E 240S | 95K 156K 159V 198L 227E 240S |
| 105N 150P 156K 159V 198L 240S | 95K 156K 159V 180T 227E 240S |
| 105N 150P 156K 159V 198L 227E | 95K 156K 159V 180T 198L 240S |
| 105N 150P 156K 159V 180T 240S | 95K 156K 159V 180T 198L 227E |
| 105N 150P 156K 159V 180T 227E | 95K 156K 159V 179N 227E 240S |
| 105N 150P 156K 159V 180T 198L | 95K 156K 159V 179N 198L 240S |
| 105N 150P 156K 159V 179N 240S | 95K 156K 159V 179N 198L 227E |
| 105N 150P 156K 159V 179N 227E | 95K 156K 159V 179N 180T 240S |
| 105N 150P 156K 159V 179N 198L | 95K 156K 159V 179N 180T 227E |
| 105N 150P 156K 159V 179N 180T | 95K 156K 159V 179N 180T 198L |
| 105N 150P 159V 198L 227E 240S | 95K 156T 180T 198L 227E 240S |
| 105N 150P 159V 180T 227E 240S | 95K 156T 179N 198L 227E 240S |
| 105N 150P 159V 180T 198L 240S | 95K 156T 179N 180T 227E 240S |
| 105N 150P 159V 180T 198L 227E | 95K 156T 179N 180T 198L 240S |
| 105N 150P 156T 198L 227E 240S | 95K 156T 179N 180T 198L 227E |
| 105N 150P 156T 180T 227E 240S | 95K 156T 159V 198L 227E 240S |
| 105N 150P 156T 180T 198L 240S | 95K 156T 159V 180T 227E 240S |
| 105N 150P 156T 180T 198L 227E | 95K 156T 159V 180T 198L 240S |
| 105N 150P 156T 179N 227E 240S | 95K 156T 159V 180T 198L 227E |
| 105N 150P 156T 179N 198L 240S | 95K 156T 159V 179N 227E 240S |
| 105N 150P 156T 179N 198L 227E | 95K 156T 159V 179N 198L 240S |
| 105N 150P 156T 179N 180T 240S | 95K 156T 159V 179N 198L 227E |
| 105N 150P 156T 179N 180T 227E | 95K 156T 159V 179N 180T 240S |
| 105N 150P 156T 179N 180T 198L | 95K 156T 159V 179N 180T 227E |
| 105N 150P 156T 159V 227E 240S | 95K 156T 159V 179N 180T 198L |
| 105N 150P 156T 159V 198L 240S | 95K 150P 180T 198L 227E 240S |
| 105N 150P 156T 159V 198L 227E | 95K 150P 179N 198L 227E 240S |
| 105N 150P 156T 159V 180T 240S | 95K 150P 179N 180T 227E 240S |
| 95K 150P 179N 180T 198L 240S | 95K 150P 156T 159V 180T 240S |
| 105N 150P 156T 159V 180T 198L | 95K 150P 179N 180T 198L 227E |
| 105N 150P 156T 159V 179N 240S | 95K 150P 159V 198L 227E 240S |
| 105N 150P 156T 159V 179N 227E | 95K 150P 159V 180T 227E 240S |
| 105N 150P 156T 159V 179N 198L | 95K 150P 159V 180T 198L 240S |
| 105N 150P 156T 159V 179N 180T | 95K 150P 159V 180T 198L 227E |
| 95K 179N 180T 198L 227E 240S | 95K 150P 159V 179N 227E 240S |
| 95K 150P 159V 179N 198L 240S | 95K 105N 179N 198L 227E 240S |
| 95K 150P 159V 179N 198L 227E | 95K 105N 179N 180T 227E 240S |
| 95K 150P 159V 179N 180T 240S | 95K 105N 179N 180T 198L 240S |
| 95K 150P 159V 179N 180T 227E | 95K 105N 179N 180T 198L 227E |
| 95K 150P 159V 179N 180T 198L | 95K 105N 159V 198L 227E 240S |
| 95K 150P 156K 198L 227E 240S | 95K 105N 159V 180T 227E 240S |
| 95K 150P 156K 180T 227E 240S | 95K 105N 159V 180T 198L 240S |
| 95K 150P 156K 180T 198L 240S | 95K 105N 159V 180T 198L 227E |
| 95K 150P 156K 180T 198L 227E | 95K 105N 159V 179N 227E 240S |
| 95K 150P 156K 179N 227E 240S | 95K 105N 159V 179N 198L 240S |
| 95K 150P 156K 179N 198L 240S | 95K 105N 159V 179N 198L 227E |
| 95K 150P 156K 179N 198L 227E | 95K 105N 159V 179N 180T 240S |
| 95K 150P 156K 179N 180T 240S | 95K 105N 159V 179N 180T 227E |
| 95K 150P 156K 179N 180T 227E | 95K 105N 159V 179N 180T 198L |
| 95K 150P 156K 179N 180T 198L | 95K 105N 156K 198L 227E 240S |
| 95K 150P 156K 159V 227E 240S | 95K 105N 156K 180T 227E 240S |
| 95K 150P 156K 159V 198L 240S | 95K 105N 156K 180T 198L 240S |
| 95K 150P 156K 159V 198L 227E | 95K 105N 156K 180T 198L 227E |
| 95K 150P 156K 159V 180T 240S | 95K 105N 156K 179N 227E 240S |
| 95K 150P 156K 159V 180T 227E | 95K 105N 156K 179N 198L 240S |
| 95K 150P 156K 159V 180T 198L | 95K 105N 156K 179N 198L 227E |
| 95K 150P 156K 159V 179N 240S | 95K 105N 156K 179N 180T 240S |
| 95K 150P 156K 159V 179N 227E | 95K 105N 156K 179N 180T 227E |
| 95K 150P 156K 159V 179N 198L | 95K 105N 156K 179N 180T 198L |
| 95K 150P 156K 159V 179N 180T | 95K 105N 156K 159V 227E 240S |
| 95K 150P 156T 198L 227E 240S | 95K 105N 156K 159V 198L 240S |
| 95K 150P 156T 180T 227E 240S | 95K 105N 156K 159V 198L 227E |
| 95K 150P 156T 180T 198L 240S | 95K 105N 156K 159V 180T 240S |
| 95K 150P 156T 180T 198L 227E | 95K 105N 156K 159V 180T 227E |
| 95K 150P 156T 179N 227E 240S | 95K 105N 156K 159V 180T 198L |
| 95K 150P 156T 179N 198L 240S | 95K 105N 156K 159V 179N 240S |
| 95K 150P 156T 179N 198L 227E | 95K 105N 156K 159V 179N 227E |
| 95K 150P 156T 179N 180T 240S | 95K 105N 156K 159V 179N 198L |
| 95K 150P 156T 179N 180T 227E | 95K 105N 156K 159V 179N 180T |
| 95K 150P 156T 179N 180T 198L | 95K 105N 156T 198L 227E 240S |
| 95K 150P 156T 159V 227E 240S | 95K 105N 156T 180T 227E 240S |
| 95K 150P 156T 159V 198L 240S | 95K 105N 156T 180T 198L 240S |
| 95K 150P 156T 159V 198L 227E | 95K 105N 156T 179N 227E 240S |
| 95K 150P 156T 159V 180T 227E | 95K 105N 156T 179N 198L 240S |
| 95K 150P 156T 159V 180T 198L | 95K 105N 156T 179N 198L 227E |
| 95K 150P 156T 159V 179N 240S | 95K 105N 156T 179N 180T 240S |
| 95K 150P 156T 159V 179N 227E | 95K 105N 156T 179N 180T 227E |
| 95K 150P 156T 159V 179N 198L | 95K 105N 156T 179N 180T 198L |
| 95K 150P 156T 159V 179N 180T | 95K 105N 156T 159V 227E 240S |
| 95K 105N 180T 198L 227E 240S | 95K 105N 156T 159V 198L 240S |

95K 105N 156T 159V 198L 227E
95K 105N 156T 159V 180T 240S
95K 105N 156T 159V 180T 227E
95K 105N 156T 159V 180T 198L
95K 105N 156T 159V 179N 240S
95K 105N 156T 159V 179N 227E
95K 105N 156T 159V 179N 198L
95K 105N 156T 159V 179N 180T
95K 105N 150P 198L 227E 240S
95K 105N 150P 180T 227E 240S
95K 105N 150P 180T 198L 240S
95K 105N 150P 180T 198L 227E
95K 105N 150P 179N 227E 240S
95K 105N 150P 179N 198L 240S
95K 105N 150P 179N 198L 227E
95K 105N 150P 179N 180T 240S
95K 105N 150P 179N 180T 227E
95K 105N 150P 179N 180T 198L
95K 105N 150P 159V 227E 240S
95K 105N 150P 159V 198L 240S
95K 105N 150P 159V 198L 227E
95K 105N 150P 159V 180T 240S
95K 105N 150P 159V 180T 227E
95K 105N 150P 159V 180T 198L
95K 105N 150P 159V 179N 240S
95K 105N 150P 159V 179N 227E
95K 105N 150P 156K 179N 198L
95K 105N 150P 156K 179N 180T
95K 105N 150P 156K 159V 240S
95K 105N 150P 156K 159V 227E
95K 105N 150P 156K 159V 198L
95K 105N 150P 156K 159V 180T
95K 105N 150P 156K 159V 179N
95K 105N 150P 159V 179N 198L
95K 105N 150P 159V 179N 180T
95K 105N 150P 156K 227E 240S
95K 105N 150P 156K 198L 240S
95K 105N 150P 156K 198L 227E
95K 105N 150P 156K 180T 240S
95K 105N 150P 156K 180T 227E
95K 105N 150P 156K 180T 198L
95K 105N 150P 156T 227E 240S
95K 105N 150P 156T 198L 240S
95K 105N 150P 156T 198L 227E
95K 105N 150P 156T 180T 240S
95K 105N 150P 156T 180T 227E
95K 105N 150P 156T 180T 198L
95K 105N 150P 156T 179N 240S
95K 105N 150P 156T 179N 227E
95K 105N 150P 156T 179N 198L
95K 105N 150P 156T 179N 180T
95K 105N 150P 156T 159V 240S
95K 105N 150P 156T 159V 227E
95K 105N 150P 156T 159V 198L
95K 105N 150P 156T 159V 180T
95K 105N 150P 156T 159V 179N
95K 105N 150P 156K 179N 240S
95K 105N 150P 156K 179N 227E
95K 105N 156T 180T 198L 227E
156K 159V 179N 180T 198L 227E 240S
156T 159V 179N 180T 198L 227E 240S
150P 159V 179N 180T 198L 227E 240S
150P 156K 179N 180T 198L 227E 240S
150P 156K 159V 180T 198L 227E 240S
150P 156K 159V 179N 198L 227E 240S
150P 156K 159V 179N 180T 227E 240S
150P 156K 159V 179N 180T 198L 240S
150P 156K 159V 179N 180T 198L 227E
150P 156T 179N 180T 198L 227E 240S
150P 156T 159V 180T 198L 227E 240S
150P 156T 159V 179N 198L 227E 240S
150P 156T 159V 179N 180T 227E 240S
150P 156T 159V 179N 180T 198L 240S
150P 156T 159V 179N 180T 198L 227E
105N 156K 179N 180T 198L 227E 240S
105N 156K 159V 180T 198L 227E 240S
105N 156K 159V 179N 198L 227E 240S
105N 156K 159V 179N 180T 198L 240S
105N 156K 159V 179N 180T 198L 227E
105N 159V 179N 180T 198L 227E 240S
105N 156K 159V 179N 180T 227E 240S
105N 156T 159V 179N 180T 198L 227E
105N 156T 179N 180T 198L 227E 240S
105N 150P 179N 180T 198L 227E 240S
105N 150P 159V 180T 198L 227E 240S
105N 150P 159V 179N 198L 227E 240S
105N 150P 159V 179N 180T 227E 240S
105N 150P 159V 179N 180T 198L 240S
105N 150P 159V 179N 180T 198L 227E
105N 150P 156K 180T 198L 227E 240S
105N 150P 156K 179N 198L 227E 240S
105N 150P 156K 179N 180T 227E 240S
105N 150P 156K 179N 180T 198L 240S
105N 150P 156K 179N 180T 198L 227E
105N 150P 156K 159V 198L 227E 240S
105N 150P 156K 159V 180T 227E 240S
105N 150P 156K 159V 180T 198L 240S
105N 150P 156K 159V 180T 198L 227E
105N 150P 156K 159V 179N 227E 240S
105N 150P 156K 159V 179N 198L 240S
105N 150P 156K 159V 179N 198L 227E
105N 150P 156K 159V 179N 180T 240S
105N 150P 156K 159V 179N 180T 227E
105N 150P 156K 159V 179N 180T 198L
105N 150P 156T 179N 198L 227E 240S
105N 150P 156T 179N 180T 227E 240S
105N 150P 156T 179N 180T 198L 240S
105N 150P 156T 179N 180T 198L 227E
105N 150P 156T 159V 198L 227E 240S
105N 150P 156T 159V 180T 227E 240S
105N 150P 156T 159V 180T 198L 240S
105N 150P 156T 159V 180T 198L 227E
105N 150P 156T 159V 179N 198L 240S
105N 150P 156T 159V 179N 198L 227E
105N 150P 156T 180T 198L 227E 240S
105N 156T 159V 179N 198L 227E 240S
105N 156T 159V 179N 180T 198L 240S
105N 156T 159V 179N 180T 227E 240S
105N 156T 159V 180T 198L 227E 240S
95K 156T 159V 179N 198L 227E 240S
95K 156T 159V 179N 180T 227E 240S
95K 156T 159V 179N 180T 198L 240S
95K 156T 159V 179N 180T 198L 227E
95K 150P 179N 180T 198L 227E 240S
95K 150P 159V 180T 198L 227E 240S
95K 150P 159V 179N 198L 227E 240S
95K 150P 159V 179N 180T 227E 240S
95K 150P 159V 179N 180T 198L 240S
95K 150P 159V 179N 180T 198L 227E
105N 150P 156T 159V 179N 227E 240S
105N 150P 156T 159V 179N 180T 240S
105N 150P 156T 159V 179N 180T 227E
105N 150P 156T 159V 179N 180T 198L
95K 159V 179N 180T 198L 227E 240S
95K 156K 179N 180T 198L 227E 240S
95K 156K 159V 180T 198L 227E 240S
95K 156K 159V 179N 198L 227E 240S
95K 156K 159V 179N 180T 227E 240S
95K 156K 159V 179N 180T 198L 240S
95K 156K 159V 179N 180T 198L 227E
95K 156T 179N 180T 198L 227E 240S
95K 156T 159V 180T 198L 227E 240S
95K 150P 156K 159V 179N 180T 227E
95K 150P 156K 159V 179N 180T 198L
95K 150P 156T 180T 198L 227E 240S
95K 150P 156T 179N 198L 227E 240S
95K 150P 156T 179N 180T 227E 240S
95K 150P 156T 179N 180T 198L 240S
95K 150P 156T 179N 180T 198L 227E
95K 150P 156T 159V 198L 227E 240S
95K 150P 156T 159V 180T 227E 240S
95K 150P 156T 159V 180T 198L 240S
95K 150P 156T 159V 180T 198L 227E
95K 150P 156T 159V 179N 227E 240S
95K 150P 156T 159V 179N 198L 240S
95K 150P 156T 159V 179N 198L 227E
95K 150P 156T 159V 179N 180T 240S
95K 150P 156T 159V 179N 180T 227E
95K 150P 156K 180T 198L 227E 240S
95K 150P 156K 179N 198L 227E 240S
95K 150P 156K 179N 180T 227E 240S
95K 150P 156K 179N 180T 198L 240S
95K 150P 156K 179N 180T 198L 227E
95K 150P 156K 159V 198L 227E 240S
95K 150P 156K 159V 180T 227E 240S
95K 150P 156K 159V 180T 198L 240S
95K 150P 156K 159V 180T 198L 227E
95K 150P 156K 159V 179N 227E 240S
95K 150P 156K 159V 179N 198L 240S
95K 150P 156K 159V 179N 198L 227E
95K 150P 156K 159V 179N 180T 240S
95K 105N 156K 180T 198L 227E 240S
95K 105N 156K 179N 198L 227E 240S
95K 105N 156K 179N 180T 227E 240S
95K 105N 156K 179N 180T 198L 240S
95K 105N 156K 179N 180T 198L 227E
95K 105N 156K 159V 198L 227E 240S
95K 105N 156K 159V 180T 227E 240S
95K 105N 156K 159V 180T 198L 240S
95K 105N 156K 159V 180T 198L 227E
95K 105N 156K 159V 179N 227E 240S
95K 105N 156K 159V 179N 198L 240S
95K 105N 156K 159V 179N 198L 227E
95K 105N 156K 159V 179N 180T 240S
95K 105N 156K 159V 179N 180T 227E
95K 105N 156K 159V 179N 180T 198L
95K 105N 156T 180T 198L 227E 240S
95K 150P 156T 159V 179N 180T 198L
95K 105N 179N 180T 198L 227E 240S
95K 105N 159V 180T 198L 227E 240S
95K 105N 159V 179N 198L 227E 240S
95K 105N 159V 179N 180T 227E 240S
95K 105N 159V 179N 180T 198L 240S
95K 105N 159V 179N 180T 198L 227E
95K 105N 156T 159V 180T 198L 227E
95K 105N 156T 159V 179N 227E 240S
95K 105N 156T 159V 179N 198L 240S
95K 105N 156T 159V 179N 198L 227E
95K 105N 156T 159V 179N 180T 240S
95K 105N 156T 159V 179N 180T 227E
95K 105N 156T 159V 179N 180T 198L
95K 105N 150P 180T 198L 227E 240S
95K 105N 150P 179N 198L 227E 240S
95K 105N 150P 179N 180T 227E 240S
95K 105N 150P 179N 180T 198L 240S
95K 105N 150P 179N 180T 198L 227E
95K 105N 150P 159V 198L 227E 240S
95K 105N 150P 159V 180T 227E 240S
95K 105N 150P 159V 180T 198L 240S
95K 105N 150P 159V 180T 198L 227E
95K 105N 150P 159V 179N 227E 240S
95K 105N 150P 159V 179N 198L 240S
95K 105N 150P 159V 179N 198L 227E
95K 105N 150P 159V 179N 180T 240S
95K 105N 150P 159V 179N 180T 227E
95K 105N 150P 159V 179N 180T 198L
95K 105N 150P 156K 198L 227E 240S
95K 105N 150P 156T 179N 227E 240S
95K 105N 150P 156T 179N 198L 240S
95K 105N 150P 156T 179N 198L 227E
95K 105N 150P 156T 179N 180T 240S
95K 105N 150P 156T 179N 180T 227E
95K 105N 150P 156T 179N 180T 198L
95K 105N 150P 156T 159V 227E 240S
95K 105N 150P 156T 159V 198L 240S
95K 105N 150P 156T 159V 198L 227E
95K 105N 150P 156T 159V 180T 240S
95K 105N 150P 156T 159V 180T 227E
95K 105N 150P 156T 159V 180T 198L
95K 105N 150P 156T 159V 179N 240S
95K 105N 150P 156T 159V 179N 227E
95K 105N 150P 156T 159V 179N 198L
95K 105N 150P 156T 159V 179N 180T
95K 105N 156T 179N 198L 227E 240S
95K 105N 156T 179N 180T 227E 240S
95K 105N 156T 179N 180T 198L 240S
95K 105N 156T 179N 180T 198L 227E
95K 105N 156T 159V 198L 227E 240S
95K 105N 156T 159V 180T 227E 240S
95K 105N 156T 159V 180T 198L 240S
95K 105N 150P 156K 180T 227E 240S
95K 105N 150P 156K 180T 198L 240S
95K 105N 150P 156K 180T 198L 227E
95K 105N 150P 156K 179N 227E 240S
95K 105N 150P 156K 179N 198L 240S
95K 105N 150P 156K 179N 198L 227E
95K 105N 150P 156K 179N 180T 240S
95K 105N 150P 156K 179N 180T 227E
95K 105N 150P 156K 179N 180T 198L
95K 105N 150P 156K 159V 227E 240S
95K 105N 150P 156K 159V 198L 240S
95K 105N 150P 156K 159V 198L 227E
95K 105N 150P 156K 159V 180T 240S
95K 105N 150P 156K 159V 180T 227E
95K 105N 150P 156K 159V 180T 198L
95K 105N 150P 156K 159V 179N 240S
95K 105N 150P 156K 159V 179N 227E
95K 105N 150P 156K 159V 179N 198L
95K 105N 150P 156K 159V 179N 180T
95K 105N 150P 156T 198L 227E 240S
95K 105N 150P 156T 180T 227E 240S
95K 105N 150P 156T 180T 198L 240S
95K 105N 150P 156T 180T 198L 227E
105N 150P 156K 159V 179N 198L 227E 240S
105N 150P 156K 159V 179N 180T 227E 240S
105N 150P 156K 159V 179N 180T 198L 240S
105N 150P 156K 159V 179N 180T 198L 227E
105N 150P 156T 179N 180T 198L 227E 240S
105N 150P 156T 159V 180T 198L 227E 240S
105N 150P 156T 159V 179N 198L 227E 240S
105N 150P 156T 159V 179N 180T 227E 240S
105N 150P 156T 159V 179N 180T 198L 240S
105N 150P 156T 159V 179N 180T 198L 227E
95K 150P 156T 159V 179N 180T 198L 240S
95K 150P 156T 159V 179N 180T 198L 227E
95K 105N 159V 179N 180T 198L 227E 240S
95K 105N 156K 179N 180T 198L 227E 240S
95K 105N 156K 159V 180T 198L 227E 240S
95K 105N 156K 159V 179N 198L 227E 240S
95K 105N 156K 159V 179N 180T 227E 240S
95K 105N 156K 159V 179N 180T 198L 240S
95K 105N 156K 159V 179N 180T 198L 227E
95K 105N 156T 179N 180T 198L 227E 240S
95K 156K 159V 179N 180T 198L 227E 240S
95K 156T 159V 179N 180T 198L 227E 240S
95K 150P 159V 179N 180T 198L 227E 240S
95K 150P 156K 179N 180T 198L 227E 240S
95K 150P 156K 159V 180T 198L 227E 240S
95K 150P 156K 159V 179N 198L 227E 240S
95K 105N 150P 159V 180T 198L 227E 240S
95K 105N 150P 156T 179N 180T 198L 227E
95K 105N 150P 156T 159V 198L 227E 240S
95K 105N 150P 156T 159V 180T 227E 240S
95K 105N 150P 156T 159V 180T 198L 240S
95K 105N 150P 156T 159V 180T 198L 227E
95K 105N 150P 156T 159V 179N 180T 227E
105N 150P 156K 159V 180T 198L 227E 240S
105N 150P 156K 179N 180T 198L 227E 240S
105N 150P 159V 179N 180T 198L 227E 240S
105N 156K 159V 179N 180T 198L 227E 240S
105N 156T 159V 179N 180T 198L 227E 240S
150P 156K 159V 179N 180T 198L 227E 240S
150P 156T 159V 179N 180T 198L 227E 240S
95K 105N 150P 156T 179N 180T 198L 240S
95K 105N 150P 179N 180T 198L 227E 240S
95K 105N 156T 159V 179N 180T 198L 240S
95K 105N 156T 159V 179N 180T 198L 227E
95K 105N 156T 159V 179N 180T 227E 240S
95K 105N 156T 159V 179N 198L 227E 240S
95K 105N 156T 159V 180T 198L 227E 240S
95K 150P 156K 159V 179N 180T 198L 240S
95K 150P 156K 159V 179N 180T 198L 227E
95K 150P 156K 159V 179N 180T 227E 240S
95K 150P 156T 159V 179N 180T 227E 240S
95K 150P 156T 159V 179N 198L 227E 240S
95K 150P 156T 159V 180T 198L 227E 240S
95K 150P 156T 179N 180T 198L 227E 240S
95K 105N 150P 156T 159V 179N 180T 198L
95K 105N 150P 159V 179N 198L 227E 240S
95K 105N 150P 159V 179N 180T 227E 240S
95K 105N 150P 159V 179N 180T 198L 240S
95K 105N 150P 159V 179N 180T 198L 227E
95K 105N 150P 156K 180T 198L 227E 240S
95K 105N 150P 156K 179N 198L 227E 240S
95K 105N 150P 156K 179N 180T 227E 240S
95K 105N 150P 156K 179N 180T 198L 240S
95K 105N 150P 156K 179N 180T 198L 227E
95K 105N 150P 156K 159V 198L 227E 240S
95K 105N 150P 156K 159V 180T 227E 240S
95K 105N 150P 156K 159V 180T 198L 240S
95K 105N 150P 156K 159V 180T 198L 227E
95K 105N 150P 156K 159V 179N 227E 240S
95K 105N 150P 156K 159V 179N 198L 240S
95K 105N 150P 156K 159V 179N 198L 227E
95K 105N 150P 156K 159V 179N 180T 240S
95K 105N 150P 156K 159V 179N 180T 227E
95K 105N 150P 156K 159V 179N 180T 198L
95K 105N 150P 156T 180T 198L 227E 240S
95K 105N 150P 156T 179N 198L 227E 240S
95K 105N 150P 156T 179N 180T 227E 240S
95K 105N 150P 156T 159V 179N 227E 240S
95K 105N 150P 156T 159V 179N 198L 240S
95K 105N 150P 156T 159V 179N 198L 227E
95K 105N 150P 156T 159V 179N 180T 240S
105N 150P 156K 159V 179N 180T 198L 227E 240S
105N 150P 156T 159V 179N 180T 198L 227E 240S
95K 150P 156K 159V 179N 180T 198L 227E 240S
95K 150P 156T 159V 179N 180T 198L 227E 240S
95K 105N 156K 159V 179N 180T 198L 227E 240S
95K 105N 156T 159V 179N 180T 198L 227E 240S
95K 105N 150P 159V 179N 180T 198L 227E 240S
95K 105N 150P 156K 179N 180T 198L 227E 240S
95K 105N 150P 156K 159V 180T 198L 227E 240S
95K 105N 150P 156K 159V 179N 198L 227E 240S
95K 105N 150P 156K 159V 179N 180T 227E 240S
95K 105N 150P 156K 159V 179N 180T 198L 240S
95K 105N 150P 156K 159V 179N 180T 198L 227E
95K 105N 150P 156T 179N 180T 198L 227E 240S
95K 105N 150P 156T 159V 180T 198L 227E 240S
95K 105N 150P 156T 159V 179N 198L 227E 240S
95K 105N 150P 156T 159V 179N 180T 227E 240S
95K 105N 150P 156T 159V 179N 180T 198L 240S
95K 105N 150P 156T 159V 179N 180T 198L 227E
95K 105N 150P 156K 159V 179N 180T 198L 227E 240S
95K 105N 150P 156T 159V 179N 180T 198L 227E 240S

[0534] 2. Screening

[0535] E. coli BL21 cells were transformed with the 1238 hMMP-1 CPS mutants in 96-well format and induced with IPTG at 25° C. as described in Example 1. The proteolytic activity of the hMMP-1 mutants were measured at 25° C. and 37° C. using fluorogenic peptide IX (R&D Systems, Minneapolis, Minn., Cat#ES010) as described in Example 2. Mutants that were active at 25° C. but showed minimal activity at 37° C. were identified as putative hits. The identified hits are set forth in Table 15B. The hits are sorted from the mutant with the lowest activity at 37° C. to the mutant with the highest activity at 37° C., i.e. wildtype. The results showed that many of the mutants, including combination mutants, exhibited 10% or less the activity of wildtype hMMP-1 at 25° C. The low activity was not due to problems with expression, since many of the mutants with no or low activities at 25° C. were expressed well. Several mutants (single and combination) exhibited substantial activity at 25° C. and also showed the best temperature profile (25° C./37° C.).

TABLE 15B
Temperature Profiles of Combination Mutants

| | | | | | 25° C.: | 37° C.: |
|---|---|---|---|---|---|---|
| | | | | Ratio | % Act. | % Act. |
| | SEQ ID | Avg. RFU | Avg. RFU | (25° C./ | of wt | of wt |
| Variant | NO | 25° C. | 37° C. | 37° C.) | 25° C. | 25° C. |
| D156K/G159V/D179N | 3507 | 1261.31 | 786.28 | 1.60 | 4.73 | 2.95 |
| R150P/V227E | 3508 | 1801.03 | 859.01 | 2.10 | 6.44 | 3.07 |
| D156T/V227E | 3509 | 2021.29 | 864.71 | 2.34 | 7.22 | 3.09 |
| G159V/A198L | 3510 | 1684.53 | 863.78 | 1.95 | 6.06 | 3.11 |
| D105N/A198L | 3511 | 1422.45 | 919.80 | 1.55 | 5.34 | 3.45 |
| L95K | 6 | 1389.81 | 969.67 | 1.43 | 5.00 | 3.49 |
| D179N/V227E | 3512 | 1446.86 | 948.41 | 1.53 | 5.43 | 3.56 |
| A198L/V227E | 3513 | 2740.04 | 1036.69 | 2.64 | 9.79 | 3.70 |
| E180T/V227E | 3514 | 2549.76 | 1038.44 | 2.46 | 9.11 | 3.71 |
| D179N/A198L | 3515 | 1411.89 | 968.14 | 1.46 | 5.45 | 3.74 |
| D156K/D179N | 3516 | 1227.63 | 973.51 | 1.26 | 4.74 | 3.76 |
| D105N/R150P/D156K/ | 3517 | 1668.82 | 1002.65 | 1.66 | 6.26 | 3.76 |
| G159V/D179N/E180T | | | | | | |
| D105N/R150P/E180T | 3518 | 1846.75 | 1003.36 | 1.84 | 6.93 | 3.76 |
| G159V/I240S | 3519 | 2565.48 | 1031.27 | 2.49 | 9.45 | 3.80 |
| D156T/D179N/I240S | 3520 | 1326.33 | 774.68 | 1.71 | 6.53 | 3.81 |
| D156T/G159V | 3521 | 1521.88 | 1048.30 | 1.45 | 5.71 | 3.93 |
| R150P/E180T | 3522 | 1636.14 | 1112.37 | 1.47 | 5.85 | 3.98 |
| D156T/D179N | 3523 | 3855.30 | 1049.65 | 3.67 | 14.72 | 4.01 |
| D179N/I240S | 3524 | 1890.16 | 826.28 | 2.29 | 9.30 | 4.07 |
| L95K/D156T/D179N | 3525 | 2075.52 | 1194.20 | 1.74 | 7.79 | 4.48 |
| D156T | 125 | 5564.55 | 1304.31 | 4.27 | 26.15 | 6.13 |
| G159V | 132 | 6330.31 | 1716.35 | 3.49 | 24.17 | 6.94 |
| G159V/D179N | 3526 | 4741.70 | 1896.45 | 2.50 | 17.79 | 7.12 |
| A198L | 305 | 4888.05 | 1555.23 | 3.14 | 22.97 | 7.31 |
| L95K/D105N/E180T | 3527 | 3640.58 | 2177.79 | 1.67 | 13.66 | 8.17 |
| R150P/D156T/A198L | 3528 | 2554.33 | 1770.29 | 1.44 | 12.00 | 8.32 |
| V227E | 384 | 21170.85 | 2439.36 | 9.01 | 76.14 | 8.45 |
| I240S | 488 | 5525.59 | 1486.79 | 3.72 | 33.21 | 8.94 |
| L95K/D105N/R150P/ | 3529 | 2930.99 | 2217.79 | 1.32 | 14.58 | 11.03 |
| D156T/G159V/A198L/ | | | | | | |
| V227E/I240S | | | | | | |
| L95K/R150P | 3530 | 6360.67 | 3108.26 | 2.05 | 30.68 | 14.99 |
| D105N/E180T | 3531 | 13018.08 | 4994.85 | 2.61 | 46.52 | 17.85 |
| R150P | 59 | 11979.01 | 4261.20 | 2.81 | 56.29 | 20.02 |
| D105N | 27 | 12356.79 | 4628.13 | 2.67 | 58.06 | 21.75 |
| E180T | 181 | 26456.92 | 11205.01 | 2.36 | 94.55 | 40.04 |
| Wildtype | 2 | 26316.84 | 22348.45 | 1.18 | 94.64 | 80.37 |

[0536] The results showing low activity at 25° C. for many of the combination mutants suggested that the combination mutants were altering the protein, such that their optimal temperature for activity was shifted below 25° C. To test this, the proteolytic activity of some of the combination mutants against the fluorogenic peptide IX was tested at 20° C., 25° C. and 37° C. Included among the combination mutants that were tested were: G159V/A198L; D156T/D179N; G159V/D179N; D179N/V227E; A198L/V227E; D156K/D179N; 179/240; and D156T/D179N/I240S. The results showed that several of the combination mutants had slightly higher activity at 20° C. than at 25° C., and little activity at 37° C. All of the mutants tested exhibited less activity (only about 33% of the activity or less) than wildtype MMP-1 at the corresponding temperature. One of the mutants, D156T/D179N, was tested and exhibited higher activity at 18° C. than wildtype.

### Example 4

### Reversibility of Enzymatic Activity Following Decrease in Temperature

[0537] In this example, the temperature sensitive hMMP-1 mutants that were confirmed in Example 2B were further assayed to determine whether enzymatic activity at 25° C. was reversible or irreversible following subsequent exposure to elevated temperatures followed by a return to 25° C. The hMMP-1 mutants were expressed in 14 ml culture tubes, as described in Example 2B. The putative hits were tested for their activities under five conditions: at 25° C., 34° C. or 37° C., and at 34° C. or 37° C. and subsequent re-exposure to the requisite temperature of 25° C. (see Table 16 for reaction conditions). Mutants that were active at 25° C., showed decreased activity when raised to 34° C. or 37° C. (i.e. the ratio of the activities at 25° C./34° C. or 25° C./37° C. is equal to or greater than 1.5), and exhibited a baseline activity when lowered again to 25° C. were scored as “Reversible Hits.” Mutants that were active at 25° C., showed decreased activity when raised to 34° C. or 37° C. (i.e. the ratio of the activities at 25° C./34° C. or 25° C./37° C. is equal to or greater than 1.5), and exhibited the same amount of decreased activity when lowered again to 25° C. were scored as “Irreversible Hits.”

### A. Reaction Conditions

[0538] The reversibility of enzymatic activity of each hMMP-1 mutant was determined using the previously described fluorescence assay as modified below. In short, the 4 μl of the supernatant of each hMMP-1 mutant was diluted in TCNB with 1 mM APMA and transferred to a 96-well plate. Five different wells were prepared for each hMMP-1 mutant as set forth in Table 16. The solution was incubated at the initial reaction temperature (25° C., 34° C., or 37° C.) for 2 hours. This activation step cleaves the pro-peptide and generates mature hMMP-1.

[0539] Following activation, 100 μl of TCNB with 10 μM Mca-K-P-L-G-L-Dpa-A-R-NH₂ fluorescent substrate was added to each well and reaction conditions were as summarized in Table 16, below. Briefly, each hMMP-1 mutant was exposed to each of the five reaction conditions by incubation of the hMMP-1 mutant in the presence of the fluorogenic substrate for an hour at the initial temperature. For each mutant, baseline activity at 25° C., 34° C., or 37° C. was assessed by incubation with the substrate for an additional 1 hour (2 hour condition) or overnight (overnight condition), followed by fluorescence measurement. To assess the reversibility/irreversibility of activity, samples incubated for an initial 1 hour at 34° C., or 37° C. were lowered to 25° C. and allowed to incubate for either an hour (2 hour condition) or 16 hours (overnight condition), followed by fluorescence measurement. Wildtype hMMP-1 was used as a positive control and supernatant from cells transformed with only vector was used as a negative control. Fluorescence was detected by measuring fluorescence in a fluorescent plate reader at 320 nm exitation/405 nm emission. Relative fluorescence units (RFU) were determined. Duplicate reactions were performed for each sample, reaction temperature, and positive and negative control.

TABLE 16
Reaction Conditions

| | Initial | Incubation | | |
|---|---|---|---|---|
| Condition | Temperature | at 25° C. | 2 Hours | Overnight |
| 25° C. | 25° C. | — | 2 hours | overnight |
| 34° C. | 34° C. | — | 2 hours | overnight |
| 34° C. to | 34° C. | 25° C. | a) 34° C. for 1 | a) 34° C. for 1 |
| 25° C. | | | hour | hour |
| | | | b) 25° C. for 1 | b) 25° C. for 16 |
| | | | hour | hours |
| 37° C. | 37° C. | — | 2 hours | overnight |
| 37° C. to | 37° C. | 25° C. | a) 37° C. for 1 | a) 37° C. for 1 |
| 25° C. | | | hour | hour |
| | | | b) 25° C. for 1 | b) 25° C. for 16 |
| | | | hour | hours |

B. Results: Partially Reversible hMMP-1 Mutants

[0540] Twenty six hMMP-1 mutants were determined to be partially reversible. Although the activity (in RFU) did not return to baseline activity observed at 25° C., an overall increase in activity was observed when the temperature was returned to 25° C. compared to activity at 34° C. or 37° C. The results are shown in Tables 17-20 below, which list the activities (in RFUs) and the ratios of the activities. Tables 17 and 18 summarize the results of reversibility at 34° C. or 37° C., respectively, of the hMMP-1 partially reversible mutants under the 2 hour condition. Tables 19 and 20 summarize the results of reversibility at 34° C. or 37° C., respectively, of the partially reversible hMMP-1 mutants under the overnight condition. The results are similar under all reaction conditions, temperature and time. The activity at 34° C. or 37° C. overnight is lower than the activity when incubated at 34° C. or 37° C. for one hour then 25° C. overnight. For example, the activity of E180Y at 34° C. is 6080 RFU but its activity at 34° C. then overnight at 25° C. increased to 8570 RFU (see Table 19, below).

TABLE 17
Partially Reversible hMMP-1 mutants (2 Hours, 34° C.)

| | | | | | | Ratio |
|---|---|---|---|---|---|---|
| | | | | RFU | Ratio | 25° C./ |
| hMMP-1 | SEQ ID | RFU | RFU | 34 to | 25° C./ | 34 to |
| mutation | NO | 25° C. | 34° C. | 25° C. | 34° C. | 25° C. |
| D105A | 39 | 5669.31 | 824.07 | 922.97 | 6.88 | 6.14 |
| D105F | 33 | 2980.00 | 623.89 | 725.03 | 4.78 | 4.11 |
| D105G | 32 | 8821.81 | 2759.24 | 2966.37 | 3.20 | 2.97 |
| D105S | 31 | 9355.63 | 4607.18 | 6681.63 | 2.03 | 1.40 |
| D105T | 29 | 4457.16 | 974.63 | 1534.71 | 4.57 | 2.90 |
| R150P | 59 | 8750.30 | 2315.11 | 2506.15 | 3.78 | 3.49 |
| G159T | 125 | 6704.95 | 2294.40 | 2344.57 | 2.92 | 2.86 |
| E180Y | 182 | 8557.09 | 4979.24 | 6224.87 | 1.72 | 1.37 |
| E180T | 181 | 7870.99 | 1532.35 | 1852.46 | 5.14 | 4.25 |
| E180F | 185 | 8508.13 | 3597.75 | 3915.71 | 2.36 | 2.17 |
| T185H | 233 | 5593.77 | 2278.26 | 2429.05 | 2.46 | 2.30 |
| T185Q | 238 | 7006.87 | 2250.58 | 2397.60 | 3.11 | 2.92 |
| T185A | 248 | 2474.96 | 663.82 | 822.83 | 3.73 | 3.01 |
| T185E | 232 | 3948.43 | 2088.15 | 1862.83 | 1.89 | 2.12 |
| N187R | 254 | 3006.08 | 1352.97 | 1343.94 | 2.22 | 2.24 |
| N187M | 262 | 4934.44 | 1811.35 | 1793.14 | 2.72 | 2.75 |
| N187K | 253 | 4182.49 | 2425.34 | 2415.57 | 1.72 | 1.73 |
| R195V | 284 | 4847.81 | 2724.92 | 2517.49 | 1.78 | 1.93 |
| A198L | 305 | 6756.76 | 2056.50 | 2046.15 | 3.29 | 3.30 |
| A198M | 301 | 3777.50 | 1708.61 | 1725.14 | 2.21 | 2.19 |
| S210V | 341 | 3349.95 | 1249.47 | 1622.57 | 2.68 | 2.06 |
| Y218S | 354 | 2878.50 | 2373.98 | 2187.48 | 1.21 | 1.32 |
| F223E | 365 | 8318.70 | 3685.68 | 5283.08 | 2.26 | 1.57 |
| V227W | 397 | 996.55 | 729.20 | 834.38 | 1.37 | 1.19 |
| L229I | 436 | 2790.27 | 1050.86 | 1738.46 | 2.66 | 1.61 |
| I240C | 483 | 2688.75 | 561.91 | 884.15 | 4.78 | 3.04 |

TABLE 18
Partially Reversible hMMP-1 mutants (2 Hours, 37° C.)

| | | | | | | Ratio |
|---|---|---|---|---|---|---|
| | | | | RFU | Ratio | 25° C./ |
| hMMP-1 | SEQ ID | RFU | RFU | 37 to | 25° C./ | 37 to |
| mutation | NO | 25° C. | 37° C. | 25° C. | 37° C. | 25° C. |
| D105A | 39 | 5669.31 | 1336.14 | 1509.52 | 4.24 | 3.76 |
| D105F | 33 | 2980.00 | 818.63 | 1004.23 | 3.64 | 2.97 |
| D105G | 32 | 8821.81 | 4313.40 | 4643.53 | 2.05 | 1.90 |
| D105S | 31 | 9355.63 | 7274.97 | 7453.42 | 1.29 | 1.26 |
| D105T | 29 | 4457.16 | 2220.03 | 2177.84 | 2.01 | 2.05 |
| R150P | 59 | 8750.30 | 2497.86 | 3115.73 | 3.50 | 2.81 |
| G159T | 125 | 6704.95 | 2347.74 | 2530.78 | 2.86 | 2.65 |
| E180Y | 182 | 8557.09 | 6079.36 | 6421.56 | 1.41 | 1.33 |
| E180T | 181 | 7870.99 | 1794.15 | 1824.99 | 4.39 | 4.31 |
| E180F | 185 | 8508.13 | 3975.22 | 3981.79 | 2.14 | 2.14 |
| T185H | 233 | 5593.77 | 2534.15 | 2693.25 | 2.21 | 2.08 |
| T185Q | 238 | 7006.87 | 2642.74 | 2589.77 | 2.65 | 2.71 |
| T185A | 248 | 2474.96 | 707.09 | 730.58 | 3.50 | 3.39 |
| T185E | 232 | 3948.43 | 2091.32 | 2106.55 | 1.89 | 1.87 |
| N187R | 254 | 3006.08 | 1421.87 | 1476.42 | 2.11 | 2.04 |
| N187M | 262 | 4934.44 | 1893.07 | 1998.97 | 2.61 | 2.47 |
| N187K | 253 | 4182.49 | 2652.79 | 2902.79 | 1.58 | 1.44 |
| R195V | 284 | 4847.81 | 2984.10 | 3555.03 | 1.62 | 1.36 |
| A198L | 305 | 6756.76 | 2642.76 | 2540.07 | 2.56 | 2.66 |
| A198M | 301 | 3777.50 | 2155.58 | 2802.78 | 1.75 | 1.35 |
| S210V | 341 | 3349.95 | 2314.86 | 2277.32 | 1.45 | 1.47 |
| Y218S | 354 | 2878.50 | 2350.27 | 2383.67 | 1.22 | 1.21 |
| F223E | 365 | 8318.70 | 6209.93 | 7415.02 | 1.34 | 1.12 |
| V227W | 397 | 996.55 | 787.87 | 850.67 | 1.26 | 1.17 |
| L229I | 436 | 2790.27 | 1803.44 | 2453.07 | 1.55 | 1.14 |
| I240C | 483 | 2688.75 | 853.66 | 872.62 | 3.15 | 3.08 |

TABLE 19
Partially Reversible hMMP-1 mutants (Overnight, 34° C.)

| | | | | | | Ratio |
|---|---|---|---|---|---|---|
| | | | | RFU | Ratio | 25° C./ |
| hMMP-1 | SEQ ID | RFU | RFU | 34 to | 25° C./ | 34 to |
| mutation | NO | 25° C. | 34° C. | 25° C. | 34° C. | 25° C. |
| D105A | 39 | 8466.62 | 1302.84 | 1532.38 | 6.50 | 5.53 |
| D105F | 33 | 6725.59 | 938.60 | 1172.86 | 7.17 | 5.73 |
| D105G | 32 | 8940.06 | 3560.75 | 5314.44 | 2.51 | 1.68 |
| D105S | 31 | 9300.85 | 5584.70 | 9413.56 | 1.67 | 0.99 |
| D105T | 29 | 7910.47 | 1899.25 | 3254.16 | 4.17 | 2.43 |
| R150P | 59 | 9011.11 | 3533.16 | 4443.96 | 2.55 | 2.03 |
| G159T | 125 | 9105.95 | 3210.57 | 4179.05 | 2.84 | 2.18 |
| E180Y | 182 | 9281.77 | 6080.89 | 8570.48 | 1.53 | 1.08 |
| E180T | 181 | 8475.04 | 2585.89 | 3901.87 | 3.28 | 2.17 |
| E180F | 185 | 9360.74 | 5183.25 | 7022.64 | 1.81 | 1.33 |
| T185H | 233 | 8531.85 | 3164.69 | 5520.76 | 2.70 | 1.55 |
| T185Q | 238 | 9044.23 | 3639.00 | 5467.27 | 2.49 | 1.65 |
| T185A | 248 | 6156.97 | 1110.68 | 1585.53 | 5.54 | 3.88 |
| T185E | 232 | 8479.18 | 3868.06 | 4836.97 | 2.19 | 1.75 |
| N187R | 254 | 7593.11 | 2415.63 | 3156.74 | 3.14 | 2.41 |
| N187M | 262 | 8605.76 | 2769.52 | 4008.68 | 3.11 | 2.15 |
| N187K | 253 | 8667.36 | 3458.94 | 5465.35 | 2.51 | 1.59 |
| R195V | 284 | 8634.05 | 4648.03 | 5966.81 | 1.86 | 1.45 |
| A198L | 305 | 8795.36 | 3469.36 | 5027.30 | 2.54 | 1.75 |
| A198M | 301 | 8352.73 | 3215.69 | 4220.51 | 2.60 | 1.98 |
| S210V | 341 | 7104.17 | 2441.96 | 3664.23 | 2.91 | 1.94 |
| Y218S | 354 | 7740.61 | 4057.37 | 5769.79 | 1.91 | 1.34 |
| F223E | 365 | 9650.44 | 4849.58 | 9311.40 | 1.99 | 1.04 |
| V227W | 397 | 3070.92 | 1370.13 | 1632.51 | 2.24 | 1.88 |
| L229I | 436 | 7333.92 | 1832.18 | 4427.24 | 4.00 | 1.66 |
| I240C | 483 | 6170.51 | 1174.96 | 2389.06 | 5.25 | 2.58 |

TABLE 20
Partially Reversible hMMP-1 mutants (Overnight, 37° C.)

| | | | | | | Ratio |
|---|---|---|---|---|---|---|
| | | | | RFU | Ratio | 25° C./ |
| hMMP-1 | SEQ ID | RFU | RFU | 37 to | 25° C./ | 37 to |
| mutation | NO | 25° C. | 37° C. | 25° C. | 37° C. | 25° C. |
| D105A | 39 | 8466.62 | 1931.17 | 2589.08 | 4.38 | 3.27 |
| D105F | 33 | 6725.59 | 1173.23 | 1759.31 | 5.73 | 3.82 |
| D105G | 32 | 8940.06 | 5390.32 | 7139.57 | 1.66 | 1.25 |
| D105S | 31 | 9300.85 | 8234.95 | 8615.33 | 1.13 | 1.08 |
| D105T | 29 | 7910.47 | 3292.01 | 4482.74 | 2.40 | 1.76 |
| R150P | 59 | 9011.11 | 3559.66 | 5181.30 | 2.53 | 1.74 |
| G159T | 125 | 9105.95 | 3160.07 | 4338.35 | 2.88 | 2.10 |
| E180Y | 182 | 9281.77 | 6894.61 | 8986.47 | 1.35 | 1.03 |
| E180T | 181 | 8475.04 | 2809.15 | 3649.72 | 3.02 | 2.32 |
| E180F | 185 | 9360.74 | 5335.15 | 7183.36 | 1.75 | 1.30 |
| T185H | 233 | 8531.85 | 3515.59 | 6101.91 | 2.43 | 1.40 |
| T185Q | 238 | 9044.23 | 4012.93 | 5623.60 | 2.25 | 1.61 |
| T185A | 248 | 6156.97 | 1059.61 | 1315.46 | 5.81 | 4.68 |
| T185E | 232 | 8479.18 | 3892.33 | 5330.81 | 2.18 | 1.59 |
| N187R | 254 | 7593.11 | 2370.01 | 3425.18 | 3.20 | 2.22 |
| N187M | 262 | 8605.76 | 2720.28 | 4400.27 | 3.16 | 1.96 |
| N187K | 253 | 8667.36 | 3709.62 | 6374.32 | 2.34 | 1.36 |
| R195V | 284 | 8634.05 | 4960.91 | 7212.05 | 1.74 | 1.20 |
| A198L | 305 | 8795.36 | 4181.78 | 5395.22 | 2.10 | 1.63 |
| A198M | 301 | 8352.73 | 3637.79 | 5914.49 | 2.30 | 1.41 |
| S210V | 341 | 7104.17 | 3939.90 | 4626.58 | 1.80 | 1.54 |
| Y218S | 354 | 7740.61 | 4093.29 | 6181.92 | 1.89 | 1.25 |
| F223E | 365 | 9650.44 | 7645.34 | 9149.09 | 1.26 | 1.05 |
| V227W | 397 | 3070.92 | 1456.45 | 1695.81 | 2.11 | 1.81 |
| L229I | 436 | 7333.92 | 3268.93 | 5729.00 | 2.24 | 1.28 |
| I240C | 483 | 6170.51 | 2223.23 | 2050.31 | 2.78 | 3.01 |

C. Results: Non Reversible hMMP-1 Mutants

[0541] Thirty eight hMMP-1 mutants were determined to be non reversible. The activity of these mutants at 34° C. or 37° C., which is decreased compared to the activity at 25° C., remained decreased when lowered to 25° C. The results are shown in Tables 21-24 below, which list the activities (in RFUs) and the ratios of the activities. Tables 21 and 22 summarize the results at 34° C. or 37° C., respectively, of the hMMP-1 irreversible mutants under the two hour condition. Tables 23 and 24 summarize the results of reversibility at 34° C. or 37° C., respectively, of the irreversible hMMP-1 mutants under the overnight condition. The results are similar under all reaction conditions, temperature and time. The activity at 34° C. or 37° C. overnight is the same or similar to the activity when incubated at 34° C. or 37° C. for one hour then 25° C. overnight. For example, the activity of D105R at 34° C. is 1407 RFU and its activity at 34° C. then overnight at 25° C. is 1424 RFU (see Table 23, below).

TABLE 21
Non Reversible hMMP-1 mutants (2 Hours, 34° C.)

| | | | | | | Ratio |
|---|---|---|---|---|---|---|
| | | | | RFU | Ratio | 25° C./ |
| hMMP-1 | SEQ ID | RFU | RFU | 34 to | 25° C./ | 34 to |
| mutation | NO | 25° C. | 34° C. | 25° C. | 34° C. | 25° C. |
| L95K | 6 | 4650.42 | 748.29 | 833.29 | 6.21 | 5.58 |
| D105I | 36 | 6832.34 | 780.32 | 908.39 | 8.76 | 7.52 |
| D105L | 38 | 4206.38 | 534.24 | 630.66 | 7.87 | 6.67 |
| D105N | 27 | 8920.05 | 918.13 | 1128.03 | 9.72 | 7.91 |
| D105R | 25 | 2821.20 | 722.46 | 843.19 | 3.90 | 3.35 |
| D105W | 35 | 6663.80 | 1690.93 | 2266.26 | 3.94 | 2.94 |
| D151G | 70 | 1264.62 | 589.27 | 664.86 | 2.15 | 1.90 |
| F155A | 96 | 2824.01 | 779.72 | 735.02 | 3.62 | 3.84 |
| D156K | 100 | 8576.47 | 2210.63 | 2318.28 | 3.88 | 3.70 |
| D156T | 105 | 8727.27 | 2679.17 | 2770.95 | 3.26 | 3.15 |
| D156L | 114 | 2916.24 | 576.84 | 655.46 | 5.06 | 4.45 |
| D156A | 115 | 2299.63 | 533.68 | 635.67 | 4.31 | 3.62 |
| D156W | 111 | 1502.86 | 539.74 | 637.12 | 2.78 | 2.36 |
| D156V | 113 | 1593.06 | 534.71 | 634.83 | 2.98 | 2.51 |
| D156H | 99 | 5387.79 | 698.77 | 784.55 | 7.71 | 6.87 |
| D156R | 101 | 7020.81 | 793.83 | 881.39 | 8.84 | 7.97 |
| G159V | 132 | 4673.44 | 856.78 | 789.92 | 5.45 | 5.92 |
| A176F | 148 | 1609.85 | 654.43 | 633.13 | 2.46 | 2.54 |
| D179N | 160 | 5660.69 | 644.51 | 644.98 | 8.78 | 8.78 |
| D181L | 209 | 2710.97 | 619.39 | 645.65 | 4.38 | 4.20 |
| D181K | 195 | 1130.63 | 625.01 | 609.58 | 1.81 | 1.85 |
| E182T | 219 | 3702.08 | 791.23 | 805.48 | 4.68 | 4.60 |
| E182Q | 218 | 1331.50 | 639.84 | 623.88 | 2.08 | 2.13 |
| T185R | 235 | 2637.31 | 1187.63 | 1158.47 | 2.22 | 2.28 |
| N187F | 261 | 3227.96 | 877.21 | 823.16 | 3.68 | 3.92 |
| N187I | 264 | 4218.55 | 849.11 | 869.19 | 4.97 | 4.85 |
| G206A | 324 | 872.27 | 603.01 | 592.13 | 1.45 | 1.47 |
| G206S | 317 | 932.69 | 492.65 | 507.75 | 1.89 | 1.84 |
| V227C | 388 | 1998.67 | 950.01 | 1115.17 | 2.10 | 1.79 |
| V227E | 384 | 7904.54 | 839.00 | 906.06 | 9.42 | 8.72 |
| Q228P | 420 | 1082.56 | 607.78 | 617.33 | 1.78 | 1.75 |
| L229T | 429 | 1221.05 | 580.15 | 605.83 | 2.10 | 2.02 |
| D233E | 440 | 2195.02 | 1393.95 | 1332.07 | 1.57 | 1.65 |
| I234A | 476 | 2375.42 | 1473.70 | 1456.58 | 1.61 | 1.63 |
| I234T | 467 | 1199.18 | 713.83 | 775.40 | 1.68 | 1.55 |
| I234E | 460 | 3920.02 | 705.86 | 829.15 | 5.55 | 4.73 |
| I240S | 488 | 3867.71 | 973.97 | 1027.84 | 3.97 | 3.76 |

TABLE 22
Non Reversible hMMP-1 mutants (2 Hours, 37° C.)

| | | | | | | Ratio |
|---|---|---|---|---|---|---|
| | | | | RFU | Ratio | 25° C./ |
| hMMP-1 | SEQ ID | RFU | RFU | 37 to | 25° C./ | 37 to |
| mutation | NO | 25° C. | 37° C. | 25° C. | 37° C. | 25° C. |
| L95K | 6 | 4650.42 | 746.89 | 1092.61 | 6.23 | 4.26 |
| D105I | 36 | 6832.34 | 1110.07 | 1104.96 | 6.15 | 6.18 |
| D105L | 38 | 4206.38 | 607.46 | 624.88 | 6.92 | 6.73 |
| D105N | 27 | 8920.05 | 1727.44 | 1820.97 | 5.16 | 4.90 |
| D105R | 25 | 2821.20 | 813.68 | 846.09 | 3.47 | 3.33 |
| D105W | 35 | 6663.80 | 3081.59 | 3123.49 | 2.16 | 2.13 |
| D151G | 70 | 1264.62 | 616.51 | 628.65 | 2.05 | 2.01 |
| F155A | 96 | 2824.01 | 746.59 | 867.76 | 3.78 | 3.25 |
| D156K | 100 | 8576.47 | 2310.30 | 2080.22 | 3.71 | 4.12 |
| D156T | 105 | 8727.27 | 2752.35 | 2251.21 | 3.17 | 3.88 |
| D156L | 114 | 2916.24 | 688.08 | 652.06 | 4.24 | 4.47 |
| D156A | 115 | 2299.63 | 554.21 | 606.45 | 4.15 | 3.79 |
| D156W | 111 | 1502.86 | 575.12 | 582.43 | 2.61 | 2.58 |
| D156V | 113 | 1593.06 | 542.36 | 544.49 | 2.94 | 2.93 |
| D156H | 99 | 5387.79 | 819.82 | 881.23 | 6.57 | 6.11 |
| D156R | 101 | 7020.81 | 872.40 | 944.17 | 8.05 | 7.44 |
| G159V | 132 | 4673.44 | 838.46 | 932.14 | 5.57 | 5.01 |
| A176F | 148 | 1609.85 | 618.72 | 741.21 | 2.60 | 2.17 |
| D179N | 160 | 5660.69 | 656.31 | 636.18 | 8.63 | 8.90 |
| D181L | 209 | 2710.97 | 611.92 | 668.31 | 4.43 | 4.06 |
| D181K | 195 | 1130.63 | 608.68 | 646.77 | 1.86 | 1.75 |
| E182T | 219 | 3702.08 | 826.28 | 746.25 | 4.48 | 4.96 |
| E182Q | 218 | 1331.50 | 623.11 | 629.01 | 2.14 | 2.12 |
| T185R | 235 | 2637.31 | 1183.37 | 1158.87 | 2.23 | 2.28 |
| N187F | 261 | 3227.96 | 931.04 | 856.03 | 3.47 | 3.77 |
| N187I | 264 | 4218.55 | 887.80 | 879.78 | 4.75 | 4.80 |
| G206A | 324 | 872.27 | 586.57 | 654.37 | 1.49 | 1.33 |
| G206S | 317 | 932.69 | 463.60 | 552.97 | 2.01 | 1.69 |
| V227C | 388 | 1998.67 | 992.19 | 1130.51 | 2.01 | 1.77 |
| V227E | 384 | 7904.54 | 1015.12 | 1127.74 | 7.79 | 7.01 |
| Q228P | 420 | 1082.56 | 586.63 | 777.28 | 1.85 | 1.39 |
| L229T | 429 | 1221.05 | 564.49 | 747.87 | 2.16 | 1.63 |
| D233E | 440 | 2195.02 | 1454.71 | 1976.42 | 1.51 | 1.11 |
| I234A | 476 | 2375.42 | 1594.08 | 1460.23 | 1.49 | 1.63 |
| I234T | 467 | 1199.18 | 796.81 | 833.55 | 1.50 | 1.44 |
| I234E | 460 | 3920.02 | 923.57 | 867.78 | 4.24 | 4.52 |
| I240S | 488 | 3867.71 | 1575.05 | 1594.10 | 2.46 | 2.43 |

TABLE 23
Non Reversible hMMP-1 mutants (Overnight, 34° C.)

| | | | | | | Ratio |
|---|---|---|---|---|---|---|
| | | | | RFU | Ratio | 25° C./ |
| hMMP-1 | SEQ ID | RFU | RFU | 34 to | 25° C./ | 34 to |
| mutation | NO | 25° C. | 34° C. | 25° C. | 34° C. | 25° C. |
| L95K | 6 | 7744.34 | 1803.12 | 1892.59 | 4.29 | 4.09 |
| D105I | 36 | 8394.32 | 1614.57 | 1736.52 | 5.20 | 4.83 |
| D105L | 38 | 6546.78 | 957.95 | 988.23 | 6.83 | 6.62 |
| D105N | 27 | 9119.04 | 1459.16 | 1822.40 | 6.25 | 5.00 |
| D105R | 25 | 5775.25 | 1407.06 | 1424.59 | 4.10 | 4.05 |
| D105W | 35 | 8617.36 | 2851.22 | 4709.94 | 3.02 | 1.83 |
| D151G | 70 | 1956.65 | 959.80 | 1013.03 | 2.04 | 1.93 |
| F155A | 96 | 4891.89 | 2016.76 | 1493.70 | 2.43 | 3.28 |
| D156K | 100 | 8696.27 | 3968.92 | 4371.25 | 2.19 | 1.99 |
| D156T | 105 | 8972.20 | 3971.43 | 4480.62 | 2.26 | 2.00 |
| D156L | 114 | 5254.55 | 972.64 | 1011.27 | 5.40 | 5.20 |
| D156A | 115 | 3585.37 | 1098.25 | 1057.84 | 3.26 | 3.39 |
| D156W | 111 | 2570.24 | 1091.27 | 1126.01 | 2.36 | 2.28 |
| D156V | 113 | 2208.99 | 954.21 | 954.54 | 2.31 | 2.31 |
| D156H | 99 | 7587.19 | 1451.49 | 1440.25 | 5.23 | 5.27 |
| D156R | 101 | 8622.23 | 1735.02 | 1760.60 | 4.97 | 4.90 |
| G159V | 132 | 6555.27 | 1821.53 | 1524.05 | 3.60 | 4.30 |
| A176F | 148 | 4191.69 | 1414.21 | 1181.99 | 2.96 | 3.55 |
| D179N | 160 | 7317.57 | 1504.84 | 1458.70 | 4.86 | 5.02 |
| D181L | 209 | 4534.34 | 1078.98 | 984.43 | 4.20 | 4.61 |
| D181K | 195 | 1869.47 | 946.27 | 841.77 | 1.98 | 2.22 |
| E182T | 219 | 6752.25 | 1483.52 | 1570.77 | 4.55 | 4.30 |
| E182Q | 218 | 2212.75 | 1065.07 | 929.49 | 2.08 | 2.38 |
| T185R | 235 | 6281.97 | 2425.71 | 2808.30 | 2.59 | 2.24 |
| N187F | 261 | 7352.85 | 1612.23 | 1533.32 | 4.56 | 4.80 |
| N187I | 264 | 8306.40 | 1459.25 | 1598.90 | 5.69 | 5.20 |
| G206A | 324 | 2492.53 | 1038.14 | 906.63 | 2.40 | 2.75 |
| G206S | 317 | 2845.84 | 908.82 | 816.00 | 3.13 | 3.49 |
| V227C | 388 | 5833.84 | 2207.20 | 2739.65 | 2.64 | 2.13 |
| V227E | 384 | 8630.90 | 2283.07 | 2096.30 | 3.78 | 4.12 |
| Q228P | 420 | 3673.33 | 1162.95 | 1213.48 | 3.16 | 3.03 |
| L229T | 429 | 3543.75 | 1103.34 | 1105.90 | 3.21 | 3.20 |
| D233E | 440 | 6694.93 | 2570.71 | 3171.20 | 2.60 | 2.11 |
| I234A | 476 | 6250.56 | 3890.90 | 3608.10 | 1.61 | 1.73 |
| I234T | 467 | 3507.08 | 1099.58 | 1194.99 | 3.19 | 2.93 |
| I234E | 460 | 7541.73 | 1365.08 | 1817.16 | 5.52 | 4.15 |
| I240S | 488 | 4376.99 | 2108.15 | 2290.56 | 2.08 | 1.91 |

TABLE 24
Non Reversible hMMP-1 mutants (Overnight, 37° C.)

| | | | | | | Ratio |
|---|---|---|---|---|---|---|
| | | | | RFU | Ratio | 25° C./ |
| hMMP-1 | SEQ ID | RFU | RFU | 37 to | 25° C./ | 37 to |
| mutation | NO | 25° C. | 37° C. | 25° C. | 37° C. | 25° C. |
| L95K | 6 | 7744.34 | 1677.96 | 2463.18 | 4.62 | 3.14 |
| D105I | 36 | 8394.32 | 1958.96 | 1925.73 | 4.29 | 4.36 |
| D105L | 38 | 6546.78 | 1070.51 | 939.53 | 6.12 | 6.97 |
| D105N | 27 | 9119.04 | 2347.74 | 2813.87 | 3.88 | 3.24 |
| D105R | 25 | 5775.25 | 1499.57 | 1312.01 | 3.85 | 4.40 |
| D105W | 35 | 8617.36 | 4593.06 | 5698.08 | 1.88 | 1.51 |
| D151G | 70 | 1956.65 | 1097.68 | 900.59 | 1.78 | 2.17 |
| F155A | 96 | 4891.89 | 1843.31 | 1882.95 | 2.65 | 2.60 |
| D156K | 100 | 8696.27 | 3858.90 | 4126.13 | 2.25 | 2.11 |
| D156T | 105 | 8972.20 | 3854.84 | 3990.29 | 2.33 | 2.25 |
| D156L | 114 | 5254.55 | 1232.94 | 1008.08 | 4.26 | 5.21 |
| D156A | 115 | 3585.37 | 1110.73 | 940.62 | 3.23 | 3.81 |
| D156W | 111 | 2570.24 | 1206.22 | 997.15 | 2.13 | 2.58 |
| D156V | 113 | 2208.99 | 997.64 | 777.35 | 2.21 | 2.84 |
| D156H | 99 | 7587.19 | 1763.27 | 1536.01 | 4.30 | 4.94 |
| D156R | 101 | 8622.23 | 1846.71 | 1764.13 | 4.67 | 4.89 |
| G159V | 132 | 6555.27 | 1683.20 | 1842.91 | 3.89 | 3.56 |
| A176F | 148 | 4191.69 | 1336.32 | 1553.01 | 3.14 | 2.70 |
| D179N | 160 | 7317.57 | 1485.28 | 1378.59 | 4.93 | 5.31 |
| D181L | 209 | 4534.34 | 1000.80 | 1020.08 | 4.53 | 4.45 |
| D181K | 195 | 1869.47 | 928.55 | 895.45 | 2.01 | 2.09 |
| E182T | 219 | 6752.25 | 1496.55 | 1319.53 | 4.51 | 5.12 |
| E182Q | 218 | 2212.75 | 1035.24 | 916.32 | 2.14 | 2.41 |
| T185R | 235 | 6281.97 | 2300.61 | 2829.34 | 2.73 | 2.22 |
| N187F | 261 | 7352.85 | 1704.23 | 1533.08 | 4.31 | 4.80 |
| N187I | 264 | 8306.40 | 1465.77 | 1560.83 | 5.67 | 5.32 |
| G206A | 324 | 2492.53 | 974.96 | 1057.32 | 2.56 | 2.36 |
| G206S | 317 | 2845.84 | 808.42 | 908.44 | 3.52 | 3.13 |
| V227C | 388 | 5833.84 | 2432.82 | 2707.71 | 2.40 | 2.15 |
| V227E | 384 | 8630.90 | 2152.81 | 2615.26 | 4.01 | 3.30 |
| Q228P | 420 | 3673.33 | 1081.32 | 1681.57 | 3.40 | 2.18 |
| L229T | 429 | 3543.75 | 1030.05 | 1488.58 | 3.44 | 2.38 |
| D233E | 440 | 6694.93 | 2661.43 | 4531.45 | 2.52 | 1.48 |
| I234A | 476 | 6250.56 | 4043.80 | 3433.03 | 1.55 | 1.82 |
| I234T | 467 | 3507.08 | 1228.23 | 1397.18 | 2.86 | 2.51 |
| I234E | 460 | 7541.73 | 1901.96 | 1783.16 | 3.97 | 4.23 |
| I240S | 488 | 4376.99 | 2592.19 | 3417.53 | 1.69 | 1.28 |

### Example 5

### Proteolytic Activity of hMMP-1 on Insoluble Collagen

[0542] In this example, the collagenase activity of hMMP-1 was assessed for the protein substrate collagen using SDS-PAGE analysis. Wildtype hMMP-1 cleaves insoluble collagen (α1(I) and α2(I) chains) into three-quarter and one-quarter length digestion products. In this assay, a fluorescein isothiocyanate (FITC)-conjugated collagen was used as the substrate and the reaction was monitored by SDS-PAGE of the reaction products. Cleavage of α1(I) and α2(I) collagen chains results in ¾ and ¼ length digestion products which are distinguishable from full length collagen by separation on SDS polyacrylamide gels. Alternatively, cleavage was assessed by fluorometric analysis. A similar assay can be used to assess the activity of mutant hMMPs for cleavage activity at 25° C. versus 34° C. or 37° C.

[0543] A. SDS-PAGE Analysis

[0544] In this Example, wild-type MMP-1 was tested for cleavage of insoluble collagen and assessed by SDS-PAGE. In short, 2 μg of hMMP-1 (purchased from R&D Systems, #901-MP; or BAP006_{—}2 and BAP006_{—}10 purified as described in Example 1.B) was diluted in TCNB containing 1 mM AMPA and incubated at the reaction temperature (25° C. or 37° C.) for 2 hours. This activation step cleaves the pro-peptide and generates mature hMMP-1. Subsequently, 6 μg of insoluble collagen conjugated to fluorescein isothiocyanate (FITC) (Anaspec #85111 or Sigma Collagen #C4361) in 20 μl TCNB was added to each activated hMMP-1 aliquot and the mixture was incubated at 25° C. or 37° C. for 24 hours or 6 days.

[0545] Cleavage of the insoluble collagen was observed by SDS/PAGE. The reaction mixture was separated on a 7.5 SDS polyacrylamide gel and visualized by staining with Coomassie Blue dye. SDS/PAGE results show that after 24 hours incubation at 25° C. or 37° C., hMMP-1 partially cleaved the α1(I) and α2(I) collagen chains into ¾ and ¼ length digestion products for all hMMP-1 proteins tested. After 6 days at 25° C., complete cleavage into ¾ and ¼ length digestion products was observed. After 6 days at 37° C., the collagen was digested completely. The ¾ and ¼ length collagen digestion products are thermally unstable at body temperature.

[0546] B. Fluorometric Analysis

[0547] Alternatively, collagenase activity was measured using a fluorescence assay. 5 μg hMMP-1 (purchased from R&D Systems, #901-MP; or BAP006_{—}2 and BAP006_{—}10 purified as described in Example 1.B) was diluted in TCNB containing 1 mM AMPA to a final concentration and incubated at 37° C. for 2 hours. The activity of hMMP-1 for FITC-labeled collagen (Sigma #C4361 or Elastin #CF₃₀₈) was assessed using a protocol adapted from Baici A et al. (1980) Anal. Biochem., 108: 230-232). Briefly, hMMP-1 was incubated with the substrate for 144 hours at 37° C. As a negative control, the substrate was incubated with buffer only. Following incubation, the reaction mixture was first centrifuged to remove insoluble particles. Fluorescence of the supernatant was detected by measuring fluorescence in a fluorescent plate reader at 495 nm excitation/520 nm emission. Relative fluorescence units (RFU) were determined. Duplicate reactions were performed for each sample.

[0548] The results (see Tables 25 and 26 below) show that incubation of insoluble collagen with wildtype hMMP-1 at 37° C. for 144 hours resulted in cleavage of collagen as indicated by high RFU values compared to buffer only control. For example, for cleavage of collagen from Sigma, all hMMPs tested had an RFU between about 1000.00-1200.00 compared to buffer only with an RFU value of about 400.00. The activity of purified collagens from CHO-S (BAP006_{—}2) and BL21 cells (BAP006_{—}10) for cleavage of Sigma insoluble collagen was comparable to hMMP-1 purchased from R&D systems. For cleavage of Elastin collagen, the activity of recombinant hMMP-1 purchased from R&D and BAP006_{—}10 were about 3000.00 RFU, while the activity of BAP006_{—}2 was about 2000.00 RFU. Buffer only exhibited a background fluorescence for cleavage of Elastin collagen of about 1500.00 RFU.

TABLE 25
Cleavage of Collagen (Sigma Insoluble Substrate)

| hMMP-1 | 37° C. | 37° C. | Avg 37° C. | St Dev |
|---|---|---|---|---|
| R&D systems | 1163.17 | 1137.81 | 1150.49 | 17.93 |
| Buffer only | 481.49 | 490.57 | 486.03 | 6.42 |
| BAP006_2 (CHO) | 1265.61 | 1275.17 | 1270.39 | 6.76 |
| BAP006_10 (BL21) | 1292.36 | 1335.14 | 1313.75 | 30.25 |

TABLE 26
Cleavage of Collagen (Elastin Insoluble Substrate)

| hMMP-1 | 37° C. | 37° C. | Avg 37° C. | St Dev |
|---|---|---|---|---|
| R&D systems | 3488.224 | 2981.417 | 3235.32 | 357.66 |
| Buffer only | 1312.511 | 1807.479 | 1560.00 | 350.00 |
| BAP006_2 (CHO) | 1729.757 | 2297.573 | 2013.67 | 401.51 |
| BAP006_10 (BL21) | 2669.758 | 3056.381 | 2863.07 | 273.38 |

### Example 6

### Identification of Temperature Sensitive Mutants in the Hemopexin Binding Domain

[0549] A hMMP-1 mutant library was generated similar to Example 1 by introducing mutations in the parent human MMP-1 DNA to generate single amino acid variants of MMP- in the hemopexin domain at amino acid positions 259, 260, 261, 262, 263, 264, 301, 302, 303, 304, 305, 306, 441, 442, 443, 444, 445 and 446. The mutants were expressed as described in Example 1 and tested for enzymatic activity against a fluorogenic peptide substrate as described in Example 2. One mutant, C259Q (set forth in SEQ ID NO:3532), was identified as a hit with increased activity at 25° C. compared to 37° C.

[0550] Next, 11 double mutants were generated containing C259Q and one of L95K; D105N; R150P; D156K; D156T; G159V; D179N; E180T; A198L; V227E or I240S. These double mutants were expressed as described in Example 1 and tested for enzymatic activity against a fluorogenic peptide substrate as described in Example 2. Five (5) double mutants were identified that are active at 25° C. but show decreased activity at 37° C. The identified double mutants were C259Q/D105N (SEQ ID NO:3533); C259Q/R150P (SEQ ID NO:3534); C259Q/G159V (SEQ ID NO:3535); C259Q/D179N (SEQ ID NO:3536); and C259Q/E180T (SEQ ID NO:3537). The mutants exhibited a ratio of activity (25° C./37° C.) of 10-fold to almost 25-fold, with the C259Q/D179N exhibiting the greatest ratio of activity at almost 25-fold.

### Example 7

### Generation of Activity & Temperature-Sensitive Combination Mutants

[0551] Three (3) hMMP-1 variant activity mutants (S208K set forth in SEQ ID NO:3538; I213G set forth in SEQ ID NO:3539; and G214E set forth in SEQ ID NO:3540), identified in Table 9 as having higher activity at 37° C. and 25° C., were used to generate double mutants with the temperature-sensitive hits set forth in Table 14. Each activity mutant was combined with each of the 11 temperature-sensitive hits set forth in Table 14 (**) to generate double mutants. Wildtype hMMP-1 and 31 double mutants were transformed into E. coli BL21 (DE3) competent cells in 14 mL tubes as described in Example 1. Protein was expressed as described in Example 1 upon the addition of 1 mM IPTG at 25° C. Cells were collected 6 hours post-induction. Periplasmic proteins were prepared by incubating the cells in OS buffer (200 mM Tris-HCl, pH 7.5, 20% sucrose, 1 mM EDTA) with DNAse, RNAse and lysozyme. After addition of H₂O to the cells in OS buffer, the cells were centrifuged. The supernatants which contain the periplasmic fractions were transferred to another tube. Supernatants were used to measure the proteolytic activity of hMMP-1 produced by BL21 cells transformed with the wildtype and the double mutants using the assay described in Example 2. The supernatants were incubated with APMA at 37° C. and 25° C. to activate the enzymes. Fluorogenic peptide IX was used as the substrate to determine the activity of hMMP-1. Fluorescence was measured using wavelengths of 320 nm (excitation) and 405 nm (emission) with a microtiter plate fluorescence reader. Duplicate reactions were done for each sample. The ratios were determined by dividing the activities at 25° C. to the activities at 37° C. The value of background activities were substrated from the activities of the wildtype and double mutants. The results showed that incorporation of the activity mutation did not increase the activity of the temperature-sensitive mutants at 25° C. Six (6) double mutants, however, were identified as exhibit activity at 25° C., but show decreased activity at 37° C. These double mutants include: S208K/G159V (SEQ ID NO:3541); S208K/D179N (SEQ ID NO:3542); S208K/V227E (SEQ ID NO:3543); G214E/G159V (SEQ ID NO:3544); G214E/D179N (SEQ ID NO:3545); and I213G/D179N (SEQ ID NO:3546). The ratio of activity (25° C./37° C.) of the mutants were as follows: almost 14-fold for the S208K/G159V mutant; about 14-fold for the S208K/D179N mutant; about 13-fold for the S208K/C227E mutant; about 8-fold for the G214E/G159V mutant; almost 14-fold for the G214E/D179N mutant; and about 14-fold for the I213G/D179N mutant. As expected, wild-type hMMP-1 exhibited a ratio of activity of about 1-fold.

### Example 8

### Proteolytic Activity of hMMP-1 Variants on Collagens

[0552] Cleavage activity of wild-type and various mutant hMMP-1's for Collagen Type I and Type IV at 25° C. or 37° C. was tested by separation on SDS polyacrylamide gels and analysis of digestion products. Wild-type hMMP-1 used in these experiments included mammalian expressed purchased from R&D systems (R&D Systems, Catalog #901-MP; NSO cells) or E. coli expressed (BL21 cells) as described in Example 1B. hMMP-1 variants were expressed in E. coli BL21 cells as described in Example 1A, and E. coli supernatant lysates were further purified using Q-Fast Flow Resin (GE Healthcare) to remove some contaminating proteins as described in Example 11. Briefly, 0.025 mL of wildtype hMMP-1 or hMMP-1 TS variant E. coli lysates were diluted into 0.175 mL TCNB buffer containing 1 mM APMA. The preparations were incubated for 2 hours at 25° C. to activate the MMP. Activation was confirmed by Western Blot, by a downward shift in MMP-1 molecular weight. The activated preparation was divided into 0.1 mL aliquots, then pre-incubated for another 2 hours at either 25° C. or 37° C. prior to addition to purified soluble or insoluble collagens. Then, 20 μg soluble Human Collagen Type I (BD Biosciences), 10 μg soluble Human Collagen Type IV (Millipore) after lyophilization to remove acetic acid, or 30 μg pH neutralized Gelled-Insoluble Rat Collagen Type I (BD Biosciences) were incubated in the presence of the activated and preincubated wildtype or variant hMMP-1's for 24 hours at 25° C. Digestion products were analyzed by SDS-PAGE. The results are depicted in Table 27. A (+) indicates that digestion products were present, while a (−) indicates that no digestion product of the collagen was observed. The results show that, as expected, each of the wildtype hMMP-1 tested digested Collagen I (both soluble and insoluble) whether preincubated at 25° C. or 37° C. In contrast, for the hMMP-1 variants, digestion products of collagen I were observed from both gelled and lyophilized collagen I, only when the variants were preincubated at 25° C. prior to exposure to collagen I. No collagen I digestion was observed, after 37C pre-incubation of the hMMP-1 variants. No Collagen IV digestion products were detected, confirming that, like wildtype hMMP-1, the variant hMMP-1's do not cleave collagen IV.

TABLE 27
MMP-1 Digestion of Purified Collagens

| | | | | | | | |
|---|---|---|---|---|---|---|---|
| | R&D | E. coli- | | | | | |
| Pre- | Systems | expressed | | | | | |
| incubation | WT MMP-1 | WT MMP-1 | D179N | G159V | S208K/G159V | D156R/D179N | V227E |

Digestion of Collagen Type I Lyophilized

| | | | | | | | |
|---|---|---|---|---|---|---|---|
| 25° C. | + | + | + | + | + | + | + |
| 37° C. | + | + | − | − | − | − | − |

Digestion of Collagen Type IV Lyophilized

| | | | | | | | |
|---|---|---|---|---|---|---|---|
| 25° C. | − | − | − | − | − | − | − |
| 37° C. | − | − | − | − | − | − | − |

Digestion of Collagen Type I Gels

| | | | | | | | |
|---|---|---|---|---|---|---|---|
| 25° C. | + | + | + | + | + | + | + |
| 37° C. | + | + | − | − | − | − | − |

### Example 9

### Kinetic Assay of hMMP-Variant Enzymatic Activity

[0553] Activity of wildtype or variant hMMP-1's expressed from E. coli lysates (Example 1) or enriched by Q-Fast Flow Resin (GE Healthcare) to remove some contaminating proteins (Example 11) was measured in a kinetic assay for cleavage of its substrate from the linear portion of the kinetic curve. Wildtype MMP-1 purchased from AnaSpec also was tested (catalog No. 72004).

[0554] Briefly, 0.01 mL of wildtype or variant hMMP-1's were diluted into 0.19 mL TCNB buffer containing 1 mM APMA. The preparations were incubated for 2 hours at 25° C. to activate the MMP. The preparations were then split (into two 100 μl aliquots) and pre-incubated at either 25° C. or 37° C. for 2 hours. Then, activated and pre-incubated hMMP-1 samples were added to a 96-well microplate to which Mca-K-P-L-G-L-Dpa-A-R-NH₂ fluorescent substrate was added to wells of the microplate.

[0555] Kinetic analysis of enzymatic activity was performed in a SpectraMax® florescent microplate reader at 25° C. Readings were taken once every ˜23 seconds from 0 to 3600 seconds (1 hour), and analyzed using Softmax® Pro Software (Molecular Devices). Based on the extended substrate digestion times monitored for the amount of substrate added to wells, the maximal processable substrate observed to be released is about 17000 RFU. The half maximal substrate processed (about 8500 RFU), by the fastest enzyme, released the 8500 RFU after 500 seconds into the reaction; therefore, the timepoint of 500 seconds was used as endpoint to determine Vmax, just before half substrate was used. The maximum slope of the kinetic display of relative fluorescence units released versus time was calculated with SOFTmax PRO software and is reported as V. units per second. Vmax units per second values at the 500 sec time point were used as end points for sample comparisons, which, as described above, is the timepoint where less than 50% of the substrate was utilized in the assay by all samples tested. Thus, the substrate has not become limiting in any well assayed. Higher Vmax values correspond to an increased presence of the processed substrate.

[0556] Table 28 sets forth the results of the analysis for hMMP-1 and variants produced in E. coli lysates or Q-Ft Enriched E. coli lysates. The kinetic results confirm the temperature-sensitivity of the variants at 25° C. as measured by end-point methods for screening.

TABLE 28
Kinetic Assay

| | E. coli Lysates | | | Q-FT Enriched | | |
|---|---|---|---|---|---|---|
| | Vmax per second | | Ratio | Vmax per second | | Ratio |
| | 25° C. | 37° C. | (25/37) | 25° C. | 37° C. | (25/37) |
| Ananspec | 7.208 | 8.879 | 0.8 | 8.042 | 9.177 | 0.9 |
| wildtype | 13.000 | 10.621 | 1.2 | 12.304 | 10.145 | 1.2 |
| D179N | 3.319 | 0.262 | 12.7 | 1.598 | 0.087 | 18.4 |
| G159V | 0.611 | 0.026 | 23.5 | 5.629 | 0.468 | 12.0 |
| S208K/G159V | 0.392 | 0.011 | 35.6 | 4.729 | 0.187 | 25.3 |
| D156T/D179N | 0.662 | 0.116 | 5.7 | 1.439 | 0.039 | 36.9 |
| V227E | 0.846 | 0.087 | 9.7 | 1.309 | 0.595 | 2.2 |

### Example 10

### Comparison of Expression and Specific Activity of hMMP-1 Variants with or without His Tag

[0557] hMMP-1 mutants were expressed in E. coli without a His tag using the pET base vector described in Example 1A.1. The proteins were expressed in E. coli BL21 cells as described in Example 1A.1. Expression of each mutant was assessed from Western blot analysis of periplasmic extracts of BL21 cells transformed with the constructs using a primary goat anti-hMMP1 antibody (R&D System) followed by detection with a secondary HRP-anti-goat IgG antibody (CalBioChem). The expression levels of each mutant with or without a His tag was normalized by dividing the value of their expression level by the value of the expression level of the wildtype hMMP-1 without a His tag. The normalized expression level of wild type hMMP-1 without a His tag is 1. The normalized expression level of the other tested proteins is set forth in Table 29.

TABLE 29
Normalized Expression Level

| | |
|---|---|
| Without a His tag | With a His tag |

| | Normalized to | | Normalized |
|---|---|---|---|
| Variant | wildtype | Variant | to wildtype |
| Wildtype | 1.00 | Wildtype-his | 0.51 |
| D105N | 0.57 | D105N-his | 0.77 |
| R150P | 0.39 | R150P-his | 0.46 |
| D156K | 0.68 | D156K-his | 2.52 |
| D156T | 0.66 | D156T-his | 0.75 |
| G159V | 0.30 | G159V-his | 0.11 |
| D179N | 1.21 | D179N-his | 1.22 |
| E180T | 0.98 | E180T-his | 1.05 |
| A198L | 0.07 | A198L-his | n/a |
| V227E | 0.20 | V227E-his | 0.04 |
| I240S | −0.01 | I240S-his | 0.03 |

[0558] The normalized expression levels were used to determine the specific activity of the mutants. Activity was assessed similar to Example 2 using a fluorogenic substrate. Each mutant was activated at the indicated temperature (25° C. or 37° C.) with APMA for 2 hours. Following activation, fluorogenic substrate peptide IX was added at 25° C. and incubated at the indicated temperature (25° C. or 37° C.) for four hours. Fluorescence was detected by measuring fluorescence in a fluorescent plate reader at 320 nm exitation/405 nm emission. Relative fluorescence units (RFU) were determined. Specific activities at 25° C. and 37° C. was determined by dividing the activities at 25° C. or 37° C. to the normalized expression level. Data was normalized to vector only and background RFU was subtracted. The therapeutic index (TI; ratio of normalized activity at 25° C./37° C.) was determined. The TI of wildtype with or without a His tag was about 1-fold.

[0559] The results show that the mutants without a His tag exhibited a TI ranging from almost 5-fold to about 30-fold. For example, the TI of variant D105N was about 5-fold; R150P was almost 5-fold; D156K was about 11-fold; D156K was about 10-fold; G159V was about 16-fold; D179N was about 30-fold; E180T was about 5-fold; A198L was about 10-fold; and V227E was almost 25-fold. The results show that the presence of the His tag had a decreasing effect on some of the mutants activity. For example, the results show that the mutants with a His tag exhibited a TI ranging from just greater than wild-type to about 10-fold. Most mutants with a His tag exhibited a TI that was less than 5-fold. The highest TI observed for the mutants containing a his tag was for D179N-his exhibiting a TI of about 10-fold compared to a TI of D179N without a His tag of about 30-fold.

[0560] The percentage of normalized activity of the variant MMPs without a his tag at the indicated temperature (25° C. or 37° C.) was compared to the activity of wildtype hMMP-1 without a his tag. For percentage of activity at 25° C., normalized activities of mutants activated and incubated with substrate at 25° C. were divided by the normalized activity of wildtype MMP-1 activated and incubated with substrate at 25° C. The results show that the mutants D105N, D156T, and E180T exhibited about 120% of the activity of wildtype; mutants G159V, S208K/G159V, V227E exhibited similar activity as wildtype, i.e. about 100% of the activity of wildtype; mutants D156T/D179N, R150P and D156K exhibited about 80% of the activity of wildtype; D179N exhibited about 50% of the activity of wildtype; and mutant D179N/I240S exhibited about 35% of the activity of wildtype.

[0561] For the percentage of activity at 37° C., normalized activities of mutants activated at 25° C., preincubated at 37° C. for 2 hours and incubated at 37° C. with substrate were divided by the normalized activity of wildtype MMP-1 activated at 25° C. and incubated with substrate at 25° C. The results show that mutants D179N, S208K/G159V, D156T/D179N, and D179N/I240S exhibited less than 5% of the activity of wildtype; mutant G159V exhibited just over 5% of the activity of wildtype; mutants V227E, D105N, D156K and D156T exhibited about 10% to about 12% the activity of wildtype; mutants R150P exhibited about 20% the activity of wildtype; and mutant E180T exhibited almost 30% the activity of wildtype.

### Example 11

### 100 mL Scale Expression and Purification of hMMP-1 Mutants with Q-Sepharose Fast Flow Resin

[0562] hMMP-1 and variants were purified and enriched from periplasmic preparation using a Q-Sepharose Fast Flow (FF) Resin (GE Healthcare). Briefly, wildtype hMMP-1 s and mutants were cloned into pET303CHis to either be expressed with or without a His tag using routine molecular biology techniques. The tested wildtype hMMP-1 included clone BAP006-09 (without a His tag; having a sequence of nucleotides set forth as nucleotides in SEQ ID NO:706 and containing a pel B signal sequence encoding amino acids set forth in SEQ ID NO:3547) and clone BAP006-10 (having a sequence of nucleotides set forth as nucleotides in SEQ ID NO:706 and containing a pel B signal sequence encoding amino acids set forth in SEQ ID NO:3547 and sequence encoding a C-terminal His tag as described in Example 1. B). Plasmids were transformed into BL21 (DE3) E. coli cells and the transformation culture was used to inoculate 15 mL LB medium containing ampicillin additives (in a 50 mL conical) and grown overnight at 37° C. LB without antibiotics was pre-warmed to 37° C. by incubating 100 mL LB medium (in a 500 mL or 100 mL Erlenmeyer flask) overnight. The OD₆₀₀ of the inoculated culture was measured the next morning until the OD₆₀₀ was 0.05-0.1. Ampicillin antibiotics were added to the pre-warmed LB. The 100 mL pre-warmed LB culture with antibiotics was inoculated with the 15 mL overnight culture. The OD₆₀₀ was measured after 60 and 120 minutes, and then every 30 minutes until the OD₆₀₀ reached about 0.6. At OD₆₀₀˜0.6, 1 mL was removed and spun down and periplasmic proteins were prepared as described below for use in analysis. The remaining culture was placed in a 25° C. incubator for 30 minutes (20° C. for combination mutants). The cultures were induced with IPTG at a final concentration of 1 mM and the culture was incubated at 25° C. (or 20° C.) with shaking for 6 hours. After 6 hours, the OD₆₀₀ was measured.

[0563] To prepare periplasmic proteins from the 100 mL culture, the induced culture was transferred to 250 mL conicals and the cells were spun down at 1500 g for 10 minutes at room temperature. An enzyme mix was prepared containing 10 mg DNAase and 10 mg lyzozyme dissolved in 1 mL RNAase (10 mg/mL). The mix was filter sterilized and stored at 4° C. Immediately before use, 50 μl of the enzyme mix was added to Buffer I (200 mM Tris/HcL pH7.5, 20% sucrose, 1 mM EDTA). From the cell culture, supernatant was removed and the pellet was carefully resuspended in 2.5 mL Buffer I/enzyme mixture per tube. The mixture was incubated at room temperature for 5 minutes. 2.5 mL of ice cold water tube was added, mixed by inversion, incubated on ice for 10 minutes, and centrifuged at 5000 g for 15 minutes at room temperature to spin down cell debris. Supernatant, containing the hMMP-1 proteins, was combined in a fresh tube as periplasmic proteins and stored in 500 μl aliquots at −20° C. or was purified further using Q Sepharose FF as described below.

[0564] Prior to further purifying the protein with Q Sepharose FF, the Q Sepharose FF material was prepared and equilibrated from the original stock by resuspending the contents of the entire bottle and then transferring 10 mL into a 50 mL conical and centrifuging at 4000 g for 3 minutes. The supernatant was discarded and the pellet was resuspended in 20 mL buffer Q-bind (100 mM Tris/HCl, pH 7.5, 10% sucrose, 10 mM CaCl₂, 0.5 mM EDTA). The mixture was centrifuged at 4000 g for 3 minutes and supernatant was removed. This was repeated two times, and after the final spin the pellet was resuspended in 10 mL buffer Q-bind.

[0565] To purify the periplasmic prep with Q-Sepharose, 1 mL of the equilibrated Q-Sepharose was centrifuged in a 1.5 mL Eppendorf tube in a microcentrifuge for 2 minutes at full speed. The supernatant was carefully removed. 25 μl 2 M NaCl and 10 μl 1 M CaCl₂ was added to 1 mL periplasmic prep. The 1 mL of perimplasmic prep was used to resuspend the Q-Sepharose, and the mixture was incubated on ice for 10 minutes with occasional mixing. The mixture was centrifuged in a microcentrifuge for 3 minutes at full speed, and the supernatant was transferred to a new tube and saved as “Q-FT 1.” The pellet was resuspended in 1 mL buffer Q bind, and the mixture was centrifuged in a microcentrifuge for 3 minutes at full speed. The supernatant was transferred to a new tube and saved as “Q-FT2.” The pellet was resuspended in 1 mL buffer Q bind, and the mixture was centrifuged in a microcentrifuge for 3 minutes at full speed. The supernatant was transferred to a new tube and saved as “Q-FT3.” The pellet was resuspended in 1 mL buffer Q Elute (100 mM Tris/HCl pH 7.5, 10% sucrose, 10 mM CaCl₂, 1 M NaCl, 0.5 mM EDTA) and the mixture was centrifuged in a microcentrifuge for 3 minutes at full speed. The supernatant was transferred to a new tube and saved as “Q-ET.”

[0566] The eluted supernatant was concentrated using an Amicon 30K spin filter (Millipore). The Amicon 30K filter was rinsed with 1 mL Q-bind buffer, and centrifuged at 3000 g in an SW rotor for 5 minutes at room temperature. The buffer was removed from both compartments. 800 μl of the Q-FT1 was added to the filter, and the filter was centrifuged at 3000 g in an SW rotor for 5 minutes at room temperature. The retentate (about 250 μl) was collected.

[0567] The various preparations and fractions were analyzed on SDS-PAGE for purity. The activities also were tested following activation by adding 4 μl of lysate, purified Q-FT1, or purified and concentrated Q-FT1 to 96 μl APMA in TCNB. The reaction mixture was incubated for 2 hours at 37° C. or 25° C., followed by the addition of 10 μM fluorescent peptide substrate and incubation for 4 hours at 37° C. or 25° C. In one experiment for the tested proteins (wildtype, D179N, and D156T/D179N), the results show that each of the proteins exhibited activity whether the lysate, purified protein or purified concentrated protein was tested. For wildtype and D179N, the activity of each was substantially the same whether the lysate, purified protein, or purified concentrated protein was tested. For the D156T/D179N double mutant, the activity of the lysate preparation was about half of the activity exhibited by the purified and concentrated preparation. For the Q-Sepharose purified and concentrated preparations, the activity of the D179N mutant and D156T/D179N double mutant at 25° C. was similar to wildtype with an RFU value of about 10,000.00 observed for each condition. The activity of the wildtype was similar at 37° C. or 25° C. In contrast, under all purification conditions tested, the D179N and D156T/D179N mutants exhibited greater activity at 25° C. (about 10,000.00 RFU) than at 37° C. (about 1000 RFU or less), thereby exhibiting greater than 40-fold activity at 25° C. compared to 37° C. Similar results were obtained for other tested mutants (D179N/I240S, G159V, S208K/G159V, V227E, D105N, R150P, D156K, D156T, E180T), with greater activity observed when the tested protein was Q-Sepharose purified compared to when the tested protein was a lysate preparation for many of the proteins tested. Thus, the results show that purification with Q-sepharose in the presence of 10 mM CaCl₂ retain the activities and temperature sensitive phenotype of the mutants.

[0568] Purification with Q-Sepharose FF was in the presence of 10 mM CaCl₂. There is no addition of ZnCl₂ in the purification process. If the purification is performed in the absence of 10 mM CaCl₂, the activity of the mutants was reduced.

### Example 12

### Bacterial Expression and Ni-NTA Purification

[0569] DNA encoding wildtype hMMP-1 or variants as described in Example 1 were cloned into vector pET-26b containing a C-terminal 6×-His tag (Catalog No. 69862-3, Novagen; SEQ ID NO:3548) at restriction sites NdeI and XhoI. The respective pET26b-hMMP1 vector was transformed into competent BL21(DE3) cells using standard molecular biology techniques and transformants were plated on Kan-LB-agar plates. Two colonies were picked and grown overnight in 50 mL LB media with Kanamycin (50 μg/mL, final concentration) at 37° C. overnight with shaking (200 rpm). For each overnight culture, 20-22 mL of culture was used to inoculate 800 mL of LB media in a 2 L flask (2 baffeled flasks per colony) containing 0.1% glucose, 0.0005% antifoam and 50 μg/mL Kanamycin. The culture was grown at 37° C. with shaking (200 rpm), and the OD₆₀₀ measured. When the OD₆₀₀ reached 0.8-1.3 (about 4.5 hours), the temperature was reduced to 25° C. and IPTG was added to a final concentration of 0.4 mM. Growth was continued overnight (about 12-15 hours) at 25° C. with shaking. Cells were harvested by centrifugation at 4000 g using a JA-5.3 rotor, at 4° C. for 20 minutes for generation of the periplasmic fraction as described below. To confirm protein induction, 1 mL of the culture was centrifuged and resuspended in 200 μl PBS and sonicated to lyse the bacteria. 6×SDS sample buffer containing β-mercaptoethanol (BME) was added to the lysed bacteria, boiled for 10 minutes, and 20 μl was loaded onto a 4-20% TG PAGE Gel. The gel was stained with Simply Blue (Invitrogen) to visualize protein and to determine the degree of protein induction.

[0570] For generation of the periplasmic fraction, the harvested cell pellet was re-suspended in 5 mL/gram of lysis buffer (0.5M NaCl, 50 mM Tris-HCL pH 7.9, 10 mM Imidazole, 10% glycerol). To every 40 mL of cell suspension, 1 mM EDTA, 0.5 mg/mL lysozyme, and 50 μl DNase I from a 1 mg/mL stock was added and the suspension was shaken at room temperature for one hour to lyse the bacteria. The cell debris was pelleted by centrifugation at 6000×g at 4° C. for 30 minutes. The supernatant was collected and transferred to new tubes for purification. The pellet was frozen at −80° C. for extraction/solubilization and re-folding of insoluble protein, if desired.

[0571] To purify the protein from the supernatant, 5 mL Ni-NTA SuperFlow resin (Qiagen, Cat. No. 30430; 60% slurry) was added to the clarified periplasmic fraction and stirred for 1 hour at 4° C. The mixture was passed through an Econo-column (Biorad) to retain beads and the flow through (FT) and 3 mL bed volume of Ni-NTA resin was collected. The Ni-NTA resin was washed in the column with 3×50 mL of 0.5 M NaCl, 20 mM Tris-HCl pH 7.9, and 10 mM Imidazole. The washes were saved and collected for SDS-PAGE analysis. The MMP-1 was eluted with sequential steps of elution from the column by washing with 6×3 ml of 0.3 M imidazole, 0.5 M NaCl, 20 mM Tris-HCL at pH7.9, and then 4×3 mL of 1 M imidazole, 0.5 M NaCl, 20 mM Tris-HCl at pH 7.9. The resin was incubated for 5 minutes with each elution step before spinning down the resin. The supernatants after each wash were collected and saved. About 32 μl of each supernatant fraction was run on 4-20% TG PAGE gel as described above to analyze purification efficiency and yield. Also, the proteins were transferred to PVDF membrane using iBlot® (Invitrogen), and Western Blot was performed using goat anti-hMMP1 antibody (R & D Systems, 0.5 μg/mL) and HRP-anti-goat 1 gG μg/mL).

[0572] Based on the overall yield and purity determined by SDS-PAGE analysis, 300 mM imidazole eluents were combined into two pools (typically #2 and 3 and #4-6). Each sample was dialyzed using a 30-KDa Molecular weight cut-off (MWCO) slide-a-lyzer cassette against TCNB buffer in 2 L with one change (2×2 L) at 4° C. overnight. The collected and dialyzed material was stored at 4° C. or −80° C. for longer term storage. The protein concentration was determined by Bradford. For wildtype hMMP-1, typically, about 9-10 mg of protein was purified at about 80% purity obtained from 3.2 L culture.

### Example 13

### Effect of Zinc

### Biochemical and Activity Analysis of Enriched MMP-1 Variants

[0573] Periplasmic preparations of wildtype hMMP-1 and variants were generated by hypotonic lysis as described in Example 1 with the addition of 3 freeze/thaw/probe sonication steps prior to bacterial debris removal by centrifugation. The clarified bacterial lysate produced with the additional free/thaw sonication steps was further purified using Q-Sepharose Fast Flow Resin as described in Example 11. The resulting proteins were further enriched using Mimetic Green 1 ligand affinity purification bead columns (ProMetic™ Biosciences; Cat. No. A6XL). MMP-1 proteins were eluted from the green mimetic affinity resin, in the presence or absence of 1 mM Zinc, by increasing the NaCl concentration in step elution buffers. Protein was resolved on a 4-20% TG PAGE Gel, and visualized using Simply Blue and by Western Blot.

[0574] Activity of the variant MMP-1's purified in the presence of 1 mM Zinc was assessed using a kinetic assay as described in Example 9. Vmax units per second values at the 500 sec time point were used as end points for sample comparisons. The results are set forth in Table 30. The results show that there is no temperature sensitivity displayed by the variants when purified in the presence of zinc.

TABLE 30

Vmax per second

| | 25° C. | 37° C. |
|---|---|---|
| Ananspec | 4.450 | 5.387 |
| wildtype | 1.744 | 1.989 |
| D179N | 3.688 | 3.723 |
| D156T/D179N | 3.996 | 3.972 |
| V227E | 2.332 | 2.216 |

[0575] To restore activity, zinc was removed from variants purified in the presence of 1 mM Zinc by chelation with EDTA. P-30 gel filtration spin columns (exclusion 40,000 molecular weight; BioRad) were equilibrated by 4 washes with 0.5 mL 50 mM Tris pH 7.5, 150 mM NaCl, 10 mM CaCl₂ and 0.05% Brij35. 0.1 mL of each enriched MMP-1 (purified in the presence of Zn) was mixed with 0.002 mL 500 mM EDTA, pH 8.0 and then loaded onto a buffer-equilibrated spin column. The column was centrifuged for 10-15 seconds at 2000×g and the flow-thru was assayed for MMP-1 activity. By the chelation, the zinc was removed and the NaCl was lowered from 1 M to 150 mM.

[0576] To assess activity, 0.01 mL of the flow-thru was added to 0.19 mL TNBC in the presence or absence of 1 mM APMA to activate the protein, and incubated at room temperature (20° C. to 25° C.) for 2 hours. The mixture was split into two with 0.1 mL of the sample removed to a new tube and incubated at 37° C. for 2 hours, with the remaining mixture remaining at room temperature. Then, 0.045 mL TNCB in the presence or absence of 1 mM APMA was added to wells of a 96-well black plate. 0.05 mL of activated/pre-incubated MMP-1 samples at the respective temperature was added to corresponding wells of the assay plate. 0.005 mL of fluorogenic peptide 1× substrate was added to each well to initiate the assay. Vmax units per second values at the 30 minute time point (1200 sec) were used as end points for sample comparisons. The results are set forth in Table 31. The results show that after EDTA and spin column treatment to chelate zinc, the temperature-sensitivity phenotype was restored.

TABLE 31

| Vmax per second | | Ratio: |
|---|---|---|
| 25° C. | 37° C. | 25° C./37° C. |

| | | | |
|---|---|---|---|
| wildtype | 5.401 | 5.115 | 1.05 |
| G159V | 1.309 | −0.003 | 1.3 |
| R150P | 1.514 | 0.171 | 8.8 |
| V227E | 3.268 | 0.773 | 4.2 |
| D179N | 5.569 | 0.143 | 38.9 |
| D156T/D179N | 1.706 | 0.011 | 155.4 |

### Example 14

### Effects of Metals on the Activity of Mutants

[0577] In this example, the activity of wild-type MMP-1 and various mutants was tested in the presence of varying concentrations of ZnCl₂, CaCl₂, MgCl₂, and NaCl₂, and the optimal concentration of each for activity determined.

[0578] The effect of ZnCl₂ and CaCl₂ was assessed by testing the activity of wild-type MMP-1 and various mutants (D179N, G159V, D156T/D179N) after activating the enzyme by incubation with APMA for 2 hours at 20° C., 25° C. or 37° C. Specifically, 4 μl of periplasmic extract as described in Example 1 was added to 96 μl of APMA in the following solutions: 1) TCNB (50 mM Tris, 10 mM CaCl₂, 150 mM NaCl, 0.05% Brij 3 at pH7.5); 2) TCNB with 1 mM ZnCl₂; 3) TNB (50 mM Tris, 150 mM NaCl, 0.05% Brij 35 at pH 7.5); or TNB with 1 mM ZnCl₂. After 2 hours, 10 μM fluorogenic peptide IX substrate was added to the reaction mixture and incubated for 4 hours at 20° C., 25° C. or 37° C. Fluorescence was detected by measuring fluorescence in a fluorescent plate reader at 320 nm exitation/405 nm emission. Relative fluorescence units (RFU) were determined. The results show that calcium was required for activity of all of the enzymes, with little to no activity observed under conditions where activation and substrate reaction occurred in TNB buffer. For wild-type MMP-1, the presence of ZnCl₂ slightly reduced activity, suggesting that there was residual zinc present in the periplasmic extracts and/or reaction buffer. For the temperature-sensitive mutants, the presence of 1 mM ZnCl₂ affected the temperature-sensitive phenotypes of the mutants. In the presence of 1 mM ZnCl₂, the ratio of activity at 20° C./37° C. or 25° C./37° C. was dramatically reduced, approaching wild-type levels of about 1.0.

[0579] To assess the optimal concentration of ZnCl₂ necessary to retain a temperature-sensitive phenotype, a titration experiment was performed for wild-type MMP-1 and mutant D179N in the presence of 0.001 mM, 0.01 mM, 0.1 mM or 1 mM ZnCl₂ Activity was assessed by adding 4 μl of periplasmic extract to 96 μl APMA in TCNB in the presence or absence of the indicated concentrations of ZnCl₂. The reaction mixture was incubated at 25° C. or 37° C. for 2 hours. After 2 hours, 10 μM fluorogenic peptide IX substrate was added to the reaction mixture and incubated for 4 hours at 25° C. or. Fluorescence was detected by measuring fluorescence in a fluorescent plate reader at 320 nm exitation/405 nm emission, and RFU determined. For wild-type, the results show that activity was substantially the same under all of the tested conditions, with slightly less activity observed at 37° C. than 25° C. Also, at 37° C., activity was slightly lower at 0.1 or 1 mM ZnCl₂ compared to lower concentrations. For the mutant D179N, the activity detected at 25° C. was greatest in the presence of zinc than if zinc was absent (about 9000 RFU in the presence of zinc, compared to about 4000 RFU in the absence of zinc). This activity of the mutant D179N at 25° C. was comparable to wild-type at 25° C., and also was the same in the presence of 0.001 mM, 0.01 mM, or 0.1 mM zinc. The activity of mutant D179N was reduced to about 6000 RFU in the presence of 1 mM zinc. The greatest temperature-sensitive phenotype was observed at 0.001 mM ZnCl₂ (about 13-fold 25° C./37° C. ratio of activity), with decreasing temperature sensitivity detected with increasing concentrations of zinc. In the presence of 0.1 mM and 1 mM ZnCl₂, the D179N exhibited no temperature sensitive phenotype (ratio 25° C./37° C. of about 1.0). Thus, the optimal ZnCl₂ concentration was observed to be at or about 0.001 mM.

[0580] A similar experiment was performed to determine the optimal concentration of CaCl₂ necessary to retain activity and a temperature-sensitive phenotype. Activity was assessed by adding 4 μl of periplasmic extract to 96 μl APMA in TCNB in the presence or absence of the indicated concentrations of CaCl₂. The reaction mixture was incubated at 25° C. or 37° C. for 2 hours. After 2 hours, 10 μM fluorogenic peptide IX substrate was added to the reaction mixture and incubated for 4 hours at 25° C. or. Fluorescence was detected by measuring fluorescence in a fluorescent plate reader at 320 nm exitation/405 nm emission, and RFU determined. For wild-type MMP-1. little activity was observed at calcium levels less than 1 mM. Activity was observed at 1 mM CaCl₂, but the activity was greatest at 10 mM CaCl₂ (9000-10,000 RFU). For the D179N MMP-1 variant, activity was only observed in the presence of 10 mM CaCl₂ The activity observed was less than for wild-type, although the sample that was tested was subjected to repeated freezing/thawing, which might affect the activity of the mutant lysate. Thus, the optimal CaCl₂ concentration was observed to be at or about 10 mM or greater than 10 mM.

[0581] Similar experiments as above also were performed in the presence or absence of MgCl2 (0, 0.01 mM, 0.2 mM, 0.2 mM, 1 mM and 10 mM) or NaCl (0, 0.0625 M, 0.125 M, 0.25 M and 0.5M). The results showed that the tested concentrations had no effect on the activities or temperature sensitive phenotypes of the mutants.

[0582] Since modifications will be apparent to those of skill in this art, it is intended that this invention be limited only by the scope of the appended claims.

The application's sequence listing, which the Patent Office published only in electronic form, follows.

SEQUENCE LISTING (3549 sequences)

SEQ ID NO: 1 - protein, 469 aa, Homo sapiens
  MMP-1
MHSFPPLLLLLFWGVVSHSFPATLETQEQDVDLVQKYLEKYYNLKNDGRQVEKRRNSGPVVEKLKQMQEFFGLKVTGKPDAETLKVMKQPRCGVPDVAQFVLTEGNPRWEQTHLTYRIENYTPDLPRADVDHAIEKAFQLWSNVTPLTFTKVSEGQADIMISFVRGDHRDNSPFDGPGGNLAHAFQPGPGIGGDAHFDEDERWTNNFREYNLHRVAAHELGHSLGLSHSTDIGALMYPSYTFSGDVQLAQDDIDGIQAIYGRSQNPVQPIGPQTPKACDSKLTFDAITTIRGEVMFFKDRFYMRTNPFYPEVELNFISVFWPQLPNGLEAAYEFADRDEVRFFKGNKYWAVQGQNVLHGYPKDIYSSFGFPRTVKHIDAALSEENTGKTYFFVANKYWRYDEYKRSMDPGYPKMIAHDFPGIGHKVDAVFMKDGFFYFFHGTRQYKFDPKTKRILTLQKANSWFNCRKN

SEQ ID NO: 2 - protein, 450 aa, Homo sapiens
  Mature MMP-1 with prodomain
FPATLETQEQDVDLVQKYLEKYYNLKNDGRQVEKRRNSGPVVEKLKQMQEFFGLKVTGKPDAETLKVMKQPRCGVPDVAQFVLTEGNPRWEQTHLTYRIENYTPDLPRADVDHAIEKAFQLWSNVTPLTFTKVSEGQADIMISFVRGDHRDNSPFDGPGGNLAHAFQPGPGIGGDAHFDEDERWTNNFREYNLHRVAAHELGHSLGLSHSTDIGALMYPSYTFSGDVQLAQDDIDGIQAIYGRSQNPVQPIGPQTPKACDSKLTFDAITTIRGEVMFFKDRFYMRTNPFYPEVELNFISVFWPQLPNGLEAAYEFADRDEVRFFKGNKYWAVQGQNVLHGYPKDIYSSFGFPRTVKHIDAALSEENTGKTYFFVANKYWRYDEYKRSMDPGYPKMIAHDFPGIGHKVDAVFMKDGFFYFFHGTRQYKFDPKTKRILTLQKANSWFNCRKN

SEQ ID NO: 3 - protein, 450 aa, Artificial Sequence
  MMP-1 variant L95D
FPATLETQEQDVDLVQKYLEKYYNLKNDGRQVEKRRNSGPVVEKLKQMQEFFGLKVTGKPDAETLKVMKQPRCGVPDVAQFVLTEGNPRWEQTHDTYRIENYTPDLPRADVDHAIEKAFQLWSNVTPLTFTKVSEGQADIMISFVRGDHRDNSPFDGPGGNLAHAFQPGPGIGGDAHFDEDERWTNNFREYNLHRVAAHELGHSLGLSHSTDIGALMYPSYTFSGDVQLAQDDIDGIQAIYGRSQNPVQPIGPQTPKACDSKLTFDAITTIRGEVMFFKDRFYMRTNPFYPEVELNFISVFWPQLPNGLEAAYEFADRDEVRFFKGNKYWAVQGQNVLHGYPKDIYSSFGFPRTVKHIDAALSEENTGKTYFFVANKYWRYDEYKRSMDPGYPKMIAHDFPGIGHKVDAVFMKDGFFYFFHGTRQYKFDPKTKRILTLQKANSWFNCRKN

SEQ ID NO: 4 - protein, 450 aa, Artificial Sequence
  MMP-1 variant L95E
FPATLETQEQDVDLVQKYLEKYYNLKNDGRQVEKRRNSGPVVEKLKQMQEFFGLKVTGKPDAETLKVMKQPRCGVPDVAQFVLTEGNPRWEQTHETYRIENYTPDLPRADVDHAIEKAFQLWSNVTPLTFTKVSEGQADIMISFVRGDHRDNSPFDGPGGNLAHAFQPGPGIGGDAHFDEDERWTNNFREYNLHRVAAHELGHSLGLSHSTDIGALMYPSYTFSGDVQLAQDDIDGIQAIYGRSQNPVQPIGPQTPKACDSKLTFDAITTIRGEVMFFKDRFYMRTNPFYPEVELNFISVFWPQLPNGLEAAYEFADRDEVRFFKGNKYWAVQGQNVLHGYPKDIYSSFGFPRTVKHIDAALSEENTGKTYFFVANKYWRYDEYKRSMDPGYPKMIAHDFPGIGHKVDAVFMKDGFFYFFHGTRQYKFDPKTKRILTLQKANSWFNCRKN

SEQ ID NO: 5 - protein, 450 aa, Artificial Sequence
  MMP-1 variant L95H
FPATLETQEQDVDLVQKYLEKYYNLKNDGRQVEKRRNSGPVVEKLKQMQEFFGLKVTGKPDAETLKVMKQPRCGVPDVAQFVLTEGNPRWEQTHHTYRIENYTPDLPRADVDHAIEKAFQLWSNVTPLTFTKVSEGQADIMISFVRGDHRDNSPFDGPGGNLAHAFQPGPGIGGDAHFDEDERWTNNFREYNLHRVAAHELGHSLGLSHSTDIGALMYPSYTFSGDVQLAQDDIDGIQAIYGRSQNPVQPIGPQTPKACDSKLTFDAITTIRGEVMFFKDRFYMRTNPFYPEVELNFISVFWPQLPNGLEAAYEFADRDEVRFFKGNKYWAVQGQNVLHGYPKDIYSSFGFPRTVKHIDAALSEENTGKTYFFVANKYWRYDEYKRSMDPGYPKMIAHDFPGIGHKVDAVFMKDGFFYFFHGTRQYKFDPKTKRILTLQKANSWFNCRKN

SEQ ID NO: 6 - protein, 450 aa, Artificial Sequence
  MMP-1 variant L95K
FPATLETQEQDVDLVQKYLEKYYNLKNDGRQVEKRRNSGPVVEKLKQMQEFFGLKVTGKPDAETLKVMKQPRCGVPDVAQFVLTEGNPRWEQTHKTYRIENYTPDLPRADVDHAIEKAFQLWSNVTPLTFTKVSEGQADIMISFVRGDHRDNSPFDGPGGNLAHAFQPGPGIGGDAHFDEDERWTNNFREYNLHRVAAHELGHSLGLSHSTDIGALMYPSYTFSGDVQLAQDDIDGIQAIYGRSQNPVQPIGPQTPKACDSKLTFDAITTIRGEVMFFKDRFYMRTNPFYPEVELNFISVFWPQLPNGLEAAYEFADRDEVRFFKGNKYWAVQGQNVLHGYPKDIYSSFGFPRTVKHIDAALSEENTGKTYFFVANKYWRYDEYKRSMDPGYPKMIAHDFPGIGHKVDAVFMKDGFFYFFHGTRQYKFDPKTKRILTLQKANSWFNCRKN

SEQ ID NO: 7 - protein, 450 aa, Artificial Sequence
  MMP-1 variant L95R
FPATLETQEQDVDLVQKYLEKYYNLKNDGRQVEKRRNSGPVVEKLKQMQEFFGLKVTGKPDAETLKVMKQPRCGVPDVAQFVLTEGNPRWEQTHRTYRIENYTPDLPRADVDHAIEKAFQLWSNVTPLTFTKVSEGQADIMISFVRGDHRDNSPFDGPGGNLAHAFQPGPGIGGDAHFDEDERWTNNFREYNLHRVAAHELGHSLGLSHSTDIGALMYPSYTFSGDVQLAQDDIDGIQAIYGRSQNPVQPIGPQTPKACDSKLTFDAITTIRGEVMFFKDRFYMRTNPFYPEVELNFISVFWPQLPNGLEAAYEFADRDEVRFFKGNKYWAVQGQNVLHGYPKDIYSSFGFPRTVKHIDAALSEENTGKTYFFVANKYWRYDEYKRSMDPGYPKMIAHDFPGIGHKVDAVFMKDGFFYFFHGTRQYKFDPKTKRILTLQKANSWFNCRKN

SEQ ID NO: 8 - protein, 450 aa, Artificial Sequence
  MMP-1 variant L95C
FPATLETQEQDVDLVQKYLEKYYNLKNDGRQVEKRRNSGPVVEKLKQMQEFFGLKVTGKPDAETLKVMKQPRCGVPDVAQFVLTEGNPRWEQTHCTYRIENYTPDLPRADVDHAIEKAFQLWSNVTPLTFTKVSEGQADIMISFVRGDHRDNSPFDGPGGNLAHAFQPGPGIGGDAHFDEDERWTNNFREYNLHRVAAHELGHSLGLSHSTDIGALMYPSYTFSGDVQLAQDDIDGIQAIYGRSQNPVQPIGPQTPKACDSKLTFDAITTIRGEVMFFKDRFYMRTNPFYPEVELNFISVFWPQLPNGLEAAYEFADRDEVRFFKGNKYWAVQGQNVLHGYPKDIYSSFGFPRTVKHIDAALSEENTGKTYFFVANKYWRYDEYKRSMDPGYPKMIAHDFPGIGHKVDAVFMKDGFFYFFHGTRQYKFDPKTKRILTLQKANSWFNCRKN

SEQ ID NO: 9 - protein, 450 aa, Artificial Sequence
  MMP-1 variant L95N
FPATLETQEQDVDLVQKYLEKYYNLKNDGRQVEKRRNSGPVVEKLKQMQEFFGLKVTGKPDAETLKVMKQPRCGVPDVAQFVLTEGNPRWEQTHNTYRIENYTPDLPRADVDHAIEKAFQLWSNVTPLTFTKVSEGQADIMISFVRGDHRDNSPFDGPGGNLAHAFQPGPGIGGDAHFDEDERWTNNFREYNLHRVAAHELGHSLGLSHSTDIGALMYPSYTFSGDVQLAQDDIDGIQAIYGRSQNPVQPIGPQTPKACDSKLTFDAITTIRGEVMFFKDRFYMRTNPFYPEVELNFISVFWPQLPNGLEAAYEFADRDEVRFFKGNKYWAVQGQNVLHGYPKDIYSSFGFPRTVKHIDAALSEENTGKTYFFVANKYWRYDEYKRSMDPGYPKMIAHDFPGIGHKVDAVFMKDGFFYFFHGTRQYKFDPKTKRILTLQKANSWFNCRKN

SEQ ID NO: 10 - protein, 450 aa, Artificial Sequence
  MMP-1 variant L95Q
FPATLETQEQDVDLVQKYLEKYYNLKNDGRQVEKRRNSGPVVEKLKQMQEFFGLKVTGKPDAETLKVMKQPRCGVPDVAQFVLTEGNPRWEQTHQTYRIENYTPDLPRADVDHAIEKAFQLWSNVTPLTFTKVSEGQADIMISFVRGDHRDNSPFDGPGGNLAHAFQPGPGIGGDAHFDEDERWTNNFREYNLHRVAAHELGHSLGLSHSTDIGALMYPSYTFSGDVQLAQDDIDGIQAIYGRSQNPVQPIGPQTPKACDSKLTFDAITTIRGEVMFFKDRFYMRTNPFYPEVELNFISVFWPQLPNGLEAAYEFADRDEVRFFKGNKYWAVQGQNVLHGYPKDIYSSFGFPRTVKHIDAALSEENTGKTYFFVANKYWRYDEYKRSMDPGYPKMIAHDFPGIGHKVDAVFMKDGFFYFFHGTRQYKFDPKTKRILTLQKANSWFNCRKN

SEQ ID NO: 11 - protein, 450 aa, Artificial Sequence
  MMP-1 variant L95T
FPATLETQEQDVDLVQKYLEKYYNLKNDGRQVEKRRNSGPVVEKLKQMQEFFGLKVTGKPDAETLKVMKQPRCGVPDVAQFVLTEGNPRWEQTHTTYRIENYTPDLPRADVDHAIEKAFQLWSNVTPLTFTKVSEGQADIMISFVRGDHRDNSPFDGPGGNLAHAFQPGPGIGGDAHFDEDERWTNNFREYNLHRVAAHELGHSLGLSHSTDIGALMYPSYTFSGDVQLAQDDIDGIQAIYGRSQNPVQPIGPQTPKACDSKLTFDAITTIRGEVMFFKDRFYMRTNPFYPEVELNFISVFWPQLPNGLEAAYEFADRDEVRFFKGNKYWAVQGQNVLHGYPKDIYSSFGFPRTVKHIDAALSEENTGKTYFFVANKYWRYDEYKRSMDPGYPKMIAHDFPGIGHKVDAVFMKDGFFYFFHGTRQYKFDPKTKRILTLQKANSWFNCRKN

SEQ ID NO: 12 - protein, 450 aa, Artificial Sequence
  MMP-1 variant L95Y
FPATLETQEQDVDLVQKYLEKYYNLKNDGRQVEKRRNSGPVVEKLKQMQEFFGLKVTGKPDAETLKVMKQPRCGVPDVAQFVLTEGNPRWEQTHYTYRIENYTPDLPRADVDHAIEKAFQLWSNVTPLTFTKVSEGQADIMISFVRGDHRDNSPFDGPGGNLAHAFQPGPGIGGDAHFDEDERWTNNFREYNLHRVAAHELGHSLGLSHSTDIGALMYPSYTFSGDVQLAQDDIDGIQAIYGRSQNPVQPIGPQTPKACDSKLTFDAITTIRGEVMFFKDRFYMRTNPFYPEVELNFISVFWPQLPNGLEAAYEFADRDEVRFFKGNKYWAVQGQNVLHGYPKDIYSSFGFPRTVKHIDAALSEENTGKTYFFVANKYWRYDEYKRSMDPGYPKMIAHDFPGIGHKVDAVFMKDGFFYFFHGTRQYKFDPKTKRILTLQKANSWFNCRKN

SEQ ID NO: 13 - protein, 450 aa, Artificial Sequence
  MMP-1 variant L95S
FPATLETQEQDVDLVQKYLEKYYNLKNDGRQVEKRRNSGPVVEKLKQMQEFFGLKVTGKPDAETLKVMKQPRCGVPDVAQFVLTEGNPRWEQTHSTYRIENYTPDLPRADVDHAIEKAFQLWSNVTPLTFTKVSEGQADIMISFVRGDHRDNSPFDGPGGNLAHAFQPGPGIGGDAHFDEDERWTNNFREYNLHRVAAHELGHSLGLSHSTDIGALMYPSYTFSGDVQLAQDDIDGIQAIYGRSQNPVQPIGPQTPKACDSKLTFDAITTIRGEVMFFKDRFYMRTNPFYPEVELNFISVFWPQLPNGLEAAYEFADRDEVRFFKGNKYWAVQGQNVLHGYPKDIYSSFGFPRTVKHIDAALSEENTGKTYFFVANKYWRYDEYKRSMDPGYPKMIAHDFPGIGHKVDAVFMKDGFFYFFHGTRQYKFDPKTKRILTLQKANSWFNCRKN

SEQ ID NO: 14 - protein, 450 aa, Artificial Sequence
  MMP-1 variant L95G
FPATLETQEQDVDLVQKYLEKYYNLKNDGRQVEKRRNSGPVVEKLKQMQEFFGLKVTGKPDAETLKVMKQPRCGVPDVAQFVLTEGNPRWEQTHGTYRIENYTPDLPRADVDHAIEKAFQLWSNVTPLTFTKVSEGQADIMISFVRGDHRDNSPFDGPGGNLAHAFQPGPGIGGDAHFDEDERWTNNFREYNLHRVAAHELGHSLGLSHSTDIGALMYPSYTFSGDVQLAQDDIDGIQAIYGRSQNPVQPIGPQTPKACDSKLTFDAITTIRGEVMFFKDRFYMRTNPFYPEVELNFISVFWPQLPNGLEAAYEFADRDEVRFFKGNKYWAVQGQNVLHGYPKDIYSSFGFPRTVKHIDAALSEENTGKTYFFVANKYWRYDEYKRSMDPGYPKMIAHDFPGIGHKVDAVFMKDGFFYFFHGTRQYKFDPKTKRILTLQKANSWFNCRKN

SEQ ID NO: 15 - protein, 450 aa, Artificial Sequence
  MMP-1 variant L95F
FPATLETQEQDVDLVQKYLEKYYNLKNDGRQVEKRRNSGPVVEKLKQMQEFFGLKVTGKPDAETLKVMKQPRCGVPDVAQFVLTEGNPRWEQTHFTYRIENYTPDLPRADVDHAIEKAFQLWSNVTPLTFTKVSEGQADIMISFVRGDHRDNSPFDGPGGNLAHAFQPGPGIGGDAHFDEDERWTNNFREYNLHRVAAHELGHSLGLSHSTDIGALMYPSYTFSGDVQLAQDDIDGIQAIYGRSQNPVQPIGPQTPKACDSKLTFDAITTIRGEVMFFKDRFYMRTNPFYPEVELNFISVFWPQLPNGLEAAYEFADRDEVRFFKGNKYWAVQGQNVLHGYPKDIYSSFGFPRTVKHIDAALSEENTGKTYFFVANKYWRYDEYKRSMDPGYPKMIAHDFPGIGHKVDAVFMKDGFFYFFHGTRQYKFDPKTKRILTLQKANSWFNCRKN

SEQ ID NO: 16 - protein, 450 aa, Artificial Sequence
  MMP-1 variant L95M
FPATLETQEQDVDLVQKYLEKYYNLKNDGRQVEKRRNSGPVVEKLKQMQEFFGLKVTGKPDAETLKVMKQPRCGVPDVAQFVLTEGNPRWEQTHMTYRIENYTPDLPRADVDHAIEKAFQLWSNVTPLTFTKVSEGQADIMISFVRGDHRDNSPFDGPGGNLAHAFQPGPGIGGDAHFDEDERWTNNFREYNLHRVAAHELGHSLGLSHSTDIGALMYPSYTFSGDVQLAQDDIDGIQAIYGRSQNPVQPIGPQTPKACDSKLTFDAITTIRGEVMFFKDRFYMRTNPFYPEVELNFISVFWPQLPNGLEAAYEFADRDEVRFFKGNKYWAVQGQNVLHGYPKDIYSSFGFPRTVKHIDAALSEENTGKTYFFVANKYWRYDEYKRSMDPGYPKMIAHDFPGIGHKVDAVFMKDGFFYFFHGTRQYKFDPKTKRILTLQKANSWFNCRKN

SEQ ID NO: 17 - protein, 450 aa, Artificial Sequence
  MMP-1 variant L95W
FPATLETQEQDVDLVQKYLEKYYNLKNDGRQVEKRRNSGPVVEKLKQMQEFFGLKVTGKPDAETLKVMKQPRCGVPDVAQFVLTEGNPRWEQTHWTYRIENYTPDLPRADVDHAIEKAFQLWSNVTPLTFTKVSEGQADIMISFVRGDHRDNSPFDGPGGNLAHAFQPGPGIGGDAHFDEDERWTNNFREYNLHRVAAHELGHSLGLSHSTDIGALMYPSYTFSGDVQLAQDDIDGIQAIYGRSQNPVQPIGPQTPKACDSKLTFDAITTIRGEVMFFKDRFYMRTNPFYPEVELNFISVFWPQLPNGLEAAYEFADRDEVRFFKGNKYWAVQGQNVLHGYPKDIYSSFGFPRTVKHIDAALSEENTGKTYFFVANKYWRYDEYKRSMDPGYPKMIAHDFPGIGHKVDAVFMKDGFFYFFHGTRQYKFDPKTKRILTLQKANSWFNCRKN

SEQ ID NO: 18 - protein, 450 aa, Artificial Sequence
  MMP-1 variant L95I
FPATLETQEQDVDLVQKYLEKYYNLKNDGRQVEKRRNSGPVVEKLKQMQEFFGLKVTGKPDAETLKVMKQPRCGVPDVAQFVLTEGNPRWEQTHITYRIENYTPDLPRADVDHAIEKAFQLWSNVTPLTFTKVSEGQADIMISFVRGDHRDNSPFDGPGGNLAHAFQPGPGIGGDAHFDEDERWTNNFREYNLHRVAAHELGHSLGLSHSTDIGALMYPSYTFSGDVQLAQDDIDGIQAIYGRSQNPVQPIGPQTPKACDSKLTFDAITTIRGEVMFFKDRFYMRTNPFYPEVELNFISVFWPQLPNGLEAAYEFADRDEVRFFKGNKYWAVQGQNVLHGYPKDIYSSFGFPRTVKHIDAALSEENTGKTYFFVANKYWRYDEYKRSMDPGYPKMIAHDFPGIGHKVDAVFMKDGFFYFFHGTRQYKFDPKTKRILTLQKANSWFNCRKN

SEQ ID NO: 19 - protein, 450 aa, Artificial Sequence
  MMP-1 variant L95V
FPATLETQEQDVDLVQKYLEKYYNLKNDGRQVEKRRNSGPVVEKLKQMQEFFGLKVTGKPDAETLKVMKQPRCGVPDVAQFVLTEGNPRWEQTHVTYRIENYTPDLPRADVDHAIEKAFQLWSNVTPLTFTKVSEGQADIMISFVRGDHRDNSPFDGPGGNLAHAFQPGPGIGGDAHFDEDERWTNNFREYNLHRVAAHELGHSLGLSHSTDIGALMYPSYTFSGDVQLAQDDIDGIQAIYGRSQNPVQPIGPQTPKACDSKLTFDAITTIRGEVMFFKDRFYMRTNPFYPEVELNFISVFWPQLPNGLEAAYEFADRDEVRFFKGNKYWAVQGQNVLHGYPKDIYSSFGFPRTVKHIDAALSEENTGKTYFFVANKYWRYDEYKRSMDPGYPKMIAHDFPGIGHKVDAVFMKDGFFYFFHGTRQYKFDPKTKRILTLQKANSWFNCRKN

SEQ ID NO: 20 - protein, 450 aa, Artificial Sequence
  MMP-1 variant L95A
FPATLETQEQDVDLVQKYLEKYYNLKNDGRQVEKRRNSGPVVEKLKQMQEFFGLKVTGKPDAETLKVMKQPRCGVPDVAQFVLTEGNPRWEQTHATYRIENYTPDLPRADVDHAIEKAFQLWSNVTPLTFTKVSEGQADIMISFVRGDHRDNSPFDGPGGNLAHAFQPGPGIGGDAHFDEDERWTNNFREYNLHRVAAHELGHSLGLSHSTDIGALMYPSYTFSGDVQLAQDDIDGIQAIYGRSQNPVQPIGPQTPKACDSKLTFDAITTIRGEVMFFKDRFYMRTNPFYPEVELNFISVFWPQLPNGLEAAYEFADRDEVRFFKGNKYWAVQGQNVLHGYPKDIYSSFGFPRTVKHIDAALSEENTGKTYFFVANKYWRYDEYKRSMDPGYPKMIAHDFPGIGHKVDAVFMKDGFFYFFHGTRQYKFDPKTKRILTLQKANSWFNCRKN

SEQ ID NO: 21 - protein, 450 aa, Artificial Sequence
  MMP-1 variant L95P
FPATLETQEQDVDLVQKYLEKYYNLKNDGRQVEKRRNSGPVVEKLKQMQEFFGLKVTGKPDAETLKVMKQPRCGVPDVAQFVLTEGNPRWEQTHPTYRIENYTPDLPRADVDHAIEKAFQLWSNVTPLTFTKVSEGQADIMISFVRGDHRDNSPFDGPGGNLAHAFQPGPGIGGDAHFDEDERWTNNFREYNLHRVAAHELGHSLGLSHSTDIGALMYPSYTFSGDVQLAQDDIDGIQAIYGRSQNPVQPIGPQTPKACDSKLTFDAITTIRGEVMFFKDRFYMRTNPFYPEVELNFISVFWPQLPNGLEAAYEFADRDEVRFFKGNKYWAVQGQNVLHGYPKDIYSSFGFPRTVKHIDAALSEENTGKTYFFVANKYWRYDEYKRSMDPGYPKMIAHDFPGIGHKVDAVFMKDGFFYFFHGTRQYKFDPKTKRILTLQKANSWFNCRKN

SEQ ID NO: 22 - protein, 450 aa, Artificial Sequence
  MMP-1 variant D105E
FPATLETQEQDVDLVQKYLEKYYNLKNDGRQVEKRRNSGPVVEKLKQMQEFFGLKVTGKPDAETLKVMKQPRCGVPDVAQFVLTEGNPRWEQTHLTYRIENYTPELPRADVDHAIEKAFQLWSNVTPLTFTKVSEGQADIMISFVRGDHRDNSPFDGPGGNLAHAFQPGPGIGGDAHFDEDERWTNNFREYNLHRVAAHELGHSLGLSHSTDIGALMYPSYTFSGDVQLAQDDIDGIQAIYGRSQNPVQPIGPQTPKACDSKLTFDAITTIRGEVMFFKDRFYMRTNPFYPEVELNFISVFWPQLPNGLEAAYEFADRDEVRFFKGNKYWAVQGQNVLHGYPKDIYSSFGFPRTVKHIDAALSEENTGKTYFFVANKYWRYDEYKRSMDPGYPKMIAHDFPGIGHKVDAVFMKDGFFYFFHGTRQYKFDPKTKRILTLQKANSWFNCRKN

SEQ ID NO: 23 - protein, 450 aa, Artificial Sequence
  MMP-1 variant D105H
FPATLETQEQDVDLVQKYLEKYYNLKNDGRQVEKRRNSGPVVEKLKQMQEFFGLKVTGKPDAETLKVMKQPRCGVPDVAQFVLTEGNPRWEQTHLTYRIENYTPHLPRADVDHAIEKAFQLWSNVTPLTFTKVSEGQADIMISFVRGDHRDNSPFDGPGGNLAHAFQPGPGIGGDAHFDEDERWTNNFREYNLHRVAAHELGHSLGLSHSTDIGALMYPSYTFSGDVQLAQDDIDGIQAIYGRSQNPVQPIGPQTPKACDSKLTFDAITTIRGEVMFFKDRFYMRTNPFYPEVELNFISVFWPQLPNGLEAAYEFADRDEVRFFKGNKYWAVQGQNVLHGYPKDIYSSFGFPRTVKHIDAALSEENTGKTYFFVANKYWRYDEYKRSMDPGYPKMIAHDFPGIGHKVDAVFMKDGFFYFFHGTRQYKFDPKTKRILTLQKANSWFNCRKN

SEQ ID NO: 24 - protein, 450 aa, Artificial Sequence
  MMP-1 variant D105K
FPATLETQEQDVDLVQKYLEKYYNLKNDGRQVEKRRNSGPVVEKLKQMQEFFGLKVTGKPDAETLKVMKQPRCGVPDVAQFVLTEGNPRWEQTHLTYRIENYTPKLPRADVDHAIEKAFQLWSNVTPLTFTKVSEGQADIMISFVRGDHRDNSPFDGPGGNLAHAFQPGPGIGGDAHFDEDERWTNNFREYNLHRVAAHELGHSLGLSHSTDIGALMYPSYTFSGDVQLAQDDIDGIQAIYGRSQNPVQPIGPQTPKACDSKLTFDAITTIRGEVMFFKDRFYMRTNPFYPEVELNFISVFWPQLPNGLEAAYEFADRDEVRFFKGNKYWAVQGQNVLHGYPKDIYSSFGFPRTVKHIDAALSEENTGKTYFFVANKYWRYDEYKRSMDPGYPKMIAHDFPGIGHKVDAVFMKDGFFYFFHGTRQYKFDPKTKRILTLQKANSWFNCRKN

SEQ ID NO: 25 - protein, 450 aa, Artificial Sequence
  MMP-1 variant D105R
FPATLETQEQDVDLVQKYLEKYYNLKNDGRQVEKRRNSGPVVEKLKQMQEFFGLKVTGKPDAETLKVMKQPRCGVPDVAQFVLTEGNPRWEQTHLTYRIENYTPRLPRADVDHAIEKAFQLWSNVTPLTFTKVSEGQADIMISFVRGDHRDNSPFDGPGGNLAHAFQPGPGIGGDAHFDEDERWTNNFREYNLHRVAAHELGHSLGLSHSTDIGALMYPSYTFSGDVQLAQDDIDGIQAIYGRSQNPVQPIGPQTPKACDSKLTFDAITTIRGEVMFFKDRFYMRTNPFYPEVELNFISVFWPQLPNGLEAAYEFADRDEVRFFKGNKYWAVQGQNVLHGYPKDIYSSFGFPRTVKHIDAALSEENTGKTYFFVANKYWRYDEYKRSMDPGYPKMIAHDFPGIGHKVDAVFMKDGFFYFFHGTRQYKFDPKTKRILTLQKANSWFNCRKN

SEQ ID NO: 26 - protein, 450 aa, Artificial Sequence
  MMP-1 variant D105C
FPATLETQEQDVDLVQKYLEKYYNLKNDGRQVEKRRNSGPVVEKLKQMQEFFGLKVTGKPDAETLKVMKQPRCGVPDVAQFVLTEGNPRWEQTHLTYRIENYTPCLPRADVDHAIEKAFQLWSNVTPLTFTKVSEGQADIMISFVRGDHRDNSPFDGPGGNLAHAFQPGPGIGGDAHFDEDERWTNNFREYNLHRVAAHELGHSLGLSHSTDIGALMYPSYTFSGDVQLAQDDIDGIQAIYGRSQNPVQPIGPQTPKACDSKLTFDAITTIRGEVMFFKDRFYMRTNPFYPEVELNFISVFWPQLPNGLEAAYEFADRDEVRFFKGNKYWAVQGQNVLHGYPKDIYSSFGFPRTVKHIDAALSEENTGKTYFFVANKYWRYDEYKRSMDPGYPKMIAHDFPGIGHKVDAVFMKDGFFYFFHGTRQYKFDPKTKRILTLQKANSWFNCRKN

SEQ ID NO: 27 - protein, 450 aa, Artificial Sequence
  MMP-1 variant D105N
FPATLETQEQDVDLVQKYLEKYYNLKNDGRQVEKRRNSGPVVEKLKQMQEFFGLKVTGKPDAETLKVMKQPRCGVPDVAQFVLTEGNPRWEQTHLTYRIENYTPNLPRADVDHAIEKAFQLWSNVTPLTFTKVSEGQADIMISFVRGDHRDNSPFDGPGGNLAHAFQPGPGIGGDAHFDEDERWTNNFREYNLHRVAAHELGHSLGLSHSTDIGALMYPSYTFSGDVQLAQDDIDGIQAIYGRSQNPVQPIGPQTPKACDSKLTFDAITTIRGEVMFFKDRFYMRTNPFYPEVELNFISVFWPQLPNGLEAAYEFADRDEVRFFKGNKYWAVQGQNVLHGYPKDIYSSFGFPRTVKHIDAALSEENTGKTYFFVANKYWRYDEYKRSMDPGYPKMIAHDFPGIGHKVDAVFMKDGFFYFFHGTRQYKFDPKTKRILTLQKANSWFNCRKN

SEQ ID NO: 28 - protein, 450 aa, Artificial Sequence
  MMP-1 variant D105Q
FPATLETQEQDVDLVQKYLEKYYNLKNDGRQVEKRRNSGPVVEKLKQMQEFFGLKVTGKPDAETLKVMKQPRCGVPDVAQFVLTEGNPRWEQTHLTYRIENYTPQLPRADVDHAIEKAFQLWSNVTPLTFTKVSEGQADIMISFVRGDHRDNSPFDGPGGNLAHAFQPGPGIGGDAHFDEDERWTNNFREYNLHRVAAHELGHSLGLSHSTDIGALMYPSYTFSGDVQLAQDDIDGIQAIYGRSQNPVQPIGPQTPKACDSKLTFDAITTIRGEVMFFKDRFYMRTNPFYPEVELNFISVFWPQLPNGLEAAYEFADRDEVRFFKGNKYWAVQGQNVLHGYPKDIYSSFGFPRTVKHIDAALSEENTGKTYFFVANKYWRYDEYKRSMDPGYPKMIAHDFPGIGHKVDAVFMKDGFFYFFHGTRQYKFDPKTKRILTLQKANSWFNCRKN

SEQ ID NO: 29 - protein, 450 aa, Artificial Sequence
  MMP-1 variant D105T
FPATLETQEQDVDLVQKYLEKYYNLKNDGRQVEKRRNSGPVVEKLKQMQEFFGLKVTGKPDAETLKVMKQPRCGVPDVAQFVLTEGNPRWEQTHLTYRIENYTPTLPRADVDHAIEKAFQLWSNVTPLTFTKVSEGQADIMISFVRGDHRDNSPFDGPGGNLAHAFQPGPGIGGDAHFDEDERWTNNFREYNLHRVAAHELGHSLGLSHSTDIGALMYPSYTFSGDVQLAQDDIDGIQAIYGRSQNPVQPIGPQTPKACDSKLTFDAITTIRGEVMFFKDRFYMRTNPFYPEVELNFISVFWPQLPNGLEAAYEFADRDEVRFFKGNKYWAVQGQNVLHGYPKDIYSSFGFPRTVKHIDAALSEENTGKTYFFVANKYWRYDEYKRSMDPGYPKMIAHDFPGIGHKVDAVFMKDGFFYFFHGTRQYKFDPKTKRILTLQKANSWFNCRKN

SEQ ID NO: 30 - protein, 450 aa, Artificial Sequence
  MMP-1 variant D105Y
FPATLETQEQDVDLVQKYLEKYYNLKNDGRQVEKRRNSGPVVEKLKQMQEFFGLKVTGKPDAETLKVMKQPRCGVPDVAQFVLTEGNPRWEQTHLTYRIENYTPYLPRADVDHAIEKAFQLWSNVTPLTFTKVSEGQADIMISFVRGDHRDNSPFDGPGGNLAHAFQPGPGIGGDAHFDEDERWTNNFREYNLHRVAAHELGHSLGLSHSTDIGALMYPSYTFSGDVQLAQDDIDGIQAIYGRSQNPVQPIGPQTPKACDSKLTFDAITTIRGEVMFFKDRFYMRTNPFYPEVELNFISVFWPQLPNGLEAAYEFADRDEVRFFKGNKYWAVQGQNVLHGYPKDIYSSFGFPRTVKHIDAALSEENTGKTYFFVANKYWRYDEYKRSMDPGYPKMIAHDFPGIGHKVDAVFMKDGFFYFFHGTRQYKFDPKTKRILTLQKANSWFNCRKN

SEQ ID NO: 31 - protein, 450 aa, Artificial Sequence
  MMP-1 variant D105S
FPATLETQEQDVDLVQKYLEKYYNLKNDGRQVEKRRNSGPVVEKLKQMQEFFGLKVTGKPDAETLKVMKQPRCGVPDVAQFVLTEGNPRWEQTHLTYRIENYTPSLPRADVDHAIEKAFQLWSNVTPLTFTKVSEGQADIMISFVRGDHRDNSPFDGPGGNLAHAFQPGPGIGGDAHFDEDERWTNNFREYNLHRVAAHELGHSLGLSHSTDIGALMYPSYTFSGDVQLAQDDIDGIQAIYGRSQNPVQPIGPQTPKACDSKLTFDAITTIRGEVMFFKDRFYMRTNPFYPEVELNFISVFWPQLPNGLEAAYEFADRDEVRFFKGNKYWAVQGQNVLHGYPKDIYSSFGFPRTVKHIDAALSEENTGKTYFFVANKYWRYDEYKRSMDPGYPKMIAHDFPGIGHKVDAVFMKDGFFYFFHGTRQYKFDPKTKRILTLQKANSWFNCRKN

SEQ ID NO: 32 - protein, 450 aa, Artificial Sequence
  MMP-1 variant D105G
FPATLETQEQDVDLVQKYLEKYYNLKNDGRQVEKRRNSGPVVEKLKQMQEFFGLKVTGKPDAETLKVMKQPRCGVPDVAQFVLTEGNPRWEQTHLTYRIENYTPGLPRADVDHAIEKAFQLWSNVTPLTFTKVSEGQADIMISFVRGDHRDNSPFDGPGGNLAHAFQPGPGIGGDAHFDEDERWTNNFREYNLHRVAAHELGHSLGLSHSTDIGALMYPSYTFSGDVQLAQDDIDGIQAIYGRSQNPVQPIGPQTPKACDSKLTFDAITTIRGEVMFFKDRFYMRTNPFYPEVELNFISVFWPQLPNGLEAAYEFADRDEVRFFKGNKYWAVQGQNVLHGYPKDIYSSFGFPRTVKHIDAALSEENTGKTYFFVANKYWRYDEYKRSMDPGYPKMIAHDFPGIGHKVDAVFMKDGFFYFFHGTRQYKFDPKTKRILTLQKANSWFNCRKN

SEQ ID NO: 33 - protein, 450 aa, Artificial Sequence
  MMP-1 variant D105F
FPATLETQEQDVDLVQKYLEKYYNLKNDGRQVEKRRNSGPVVEKLKQMQEFFGLKVTGKPDAETLKVMKQPRCGVPDVAQFVLTEGNPRWEQTHLTYRIENYTPFLPRADVDHAIEKAFQLWSNVTPLTFTKVSEGQADIMISFVRGDHRDNSPFDGPGGNLAHAFQPGPGIGGDAHFDEDERWTNNFREYNLHRVAAHELGHSLGLSHSTDIGALMYPSYTFSGDVQLAQDDIDGIQAIYGRSQNPVQPIGPQTPKACDSKLTFDAITTIRGEVMFFKDRFYMRTNPFYPEVELNFISVFWPQLPNGLEAAYEFADRDEVRFFKGNKYWAVQGQNVLHGYPKDIYSSFGFPRTVKHIDAALSEENTGKTYFFVANKYWRYDEYKRSMDPGYPKMIAHDFPGIGHKVDAVFMKDGFFYFFHGTRQYKFDPKTKRILTLQKANSWFNCRKN

SEQ ID NO: 34 - protein, 450 aa, Artificial Sequence
  MMP-1 variant D105M
FPATLETQEQDVDLVQKYLEKYYNLKNDGRQVEKRRNSGPVVEKLKQMQEFFGLKVTGKPDAETLKVMKQPRCGVPDVAQFVLTEGNPRWEQTHLTYRIENYTPMLPRADVDHAIEKAFQLWSNVTPLTFTKVSEGQADIMISFVRGDHRDNSPFDGPGGNLAHAFQPGPGIGGDAHFDEDERWTNNFREYNLHRVAAHELGHSLGLSHSTDIGALMYPSYTFSGDVQLAQDDIDGIQAIYGRSQNPVQPIGPQTPKACDSKLTFDAITTIRGEVMFFKDRFYMRTNPFYPEVELNFISVFWPQLPNGLEAAYEFADRDEVRFFKGNKYWAVQGQNVLHGYPKDIYSSFGFPRTVKHIDAALSEENTGKTYFFVANKYWRYDEYKRSMDPGYPKMIAHDFPGIGHKVDAVFMKDGFFYFFHGTRQYKFDPKTKRILTLQKANSWFNCRKN

SEQ ID NO: 35 - protein, 450 aa, Artificial Sequence
  MMP-1 variant D105W
FPATLETQEQDVDLVQKYLEKYYNLKNDGRQVEKRRNSGPVVEKLKQMQEFFGLKVTGKPDAETLKVMKQPRCGVPDVAQFVLTEGNPRWEQTHLTYRIENYTPWLPRADVDHAIEKAFQLWSNVTPLTFTKVSEGQADIMISFVRGDHRDNSPFDGPGGNLAHAFQPGPGIGGDAHFDEDERWTNNFREYNLHRVAAHELGHSLGLSHSTDIGALMYPSYTFSGDVQLAQDDIDGIQAIYGRSQNPVQPIGPQTPKACDSKLTFDAITTIRGEVMFFKDRFYMRTNPFYPEVELNFISVFWPQLPNGLEAAYEFADRDEVRFFKGNKYWAVQGQNVLHGYPKDIYSSFGFPRTVKHIDAALSEENTGKTYFFVANKYWRYDEYKRSMDPGYPKMIAHDFPGIGHKVDAVFMKDGFFYFFHGTRQYKFDPKTKRILTLQKANSWFNCRKN

SEQ ID NO: 36 - protein, 450 aa, Artificial Sequence
  MMP-1 variant D105I
FPATLETQEQDVDLVQKYLEKYYNLKNDGRQVEKRRNSGPVVEKLKQMQEFFGLKVTGKPDAETLKVMKQPRCGVPDVAQFVLTEGNPRWEQTHLTYRIENYTPILPRADVDHAIEKAFQLWSNVTPLTFTKVSEGQADIMISFVRGDHRDNSPFDGPGGNLAHAFQPGPGIGGDAHFDEDERWTNNFREYNLHRVAAHELGHSLGLSHSTDIGALMYPSYTFSGDVQLAQDDIDGIQAIYGRSQNPVQPIGPQTPKACDSKLTFDAITTIRGEVMFFKDRFYMRTNPFYPEVELNFISVFWPQLPNGLEAAYEFADRDEVRFFKGNKYWAVQGQNVLHGYPKDIYSSFGFPRTVKHIDAALSEENTGKTYFFVANKYWRYDEYKRSMDPGYPKMIAHDFPGIGHKVDAVFMKDGFFYFFHGTRQYKFDPKTKRILTLQKANSWFNCRKN

SEQ ID NO: 37 - protein, 450 aa, Artificial Sequence
  MMP-1 variant D105V
FPATLETQEQDVDLVQKYLEKYYNLKNDGRQVEKRRNSGPVVEKLKQMQEFFGLKVTGKPDAETLKVMKQPRCGVPDVAQFVLTEGNPRWEQTHLTYRIENYTPVLPRADVDHAIEKAFQLWSNVTPLTFTKVSEGQADIMISFVRGDHRDNSPFDGPGGNLAHAFQPGPGIGGDAHFDEDERWTNNFREYNLHRVAAHELGHSLGLSHSTDIGALMYPSYTFSGDVQLAQDDIDGIQAIYGRSQNPVQPIGPQTPKACDSKLTFDAITTIRGEVMFFKDRFYMRTNPFYPEVELNFISVFWPQLPNGLEAAYEFADRDEVRFFKGNKYWAVQGQNVLHGYPKDIYSSFGFPRTVKHIDAALSEENTGKTYFFVANKYWRYDEYKRSMDPGYPKMIAHDFPGIGHKVDAVFMKDGFFYFFHGTRQYKFDPKTKRILTLQKANSWFNCRKN

SEQ ID NO: 38 - protein, 450 aa, Artificial Sequence
  MMP-1 variant D105L
FPATLETQEQDVDLVQKYLEKYYNLKNDGRQVEKRRNSGPVVEKLKQMQEFFGLKVTGKPDAETLKVMKQPRCGVPDVAQFVLTEGNPRWEQTHLTYRIENYTPLLPRADVDHAIEKAFQLWSNVTPLTFTKVSEGQADIMISFVRGDHRDNSPFDGPGGNLAHAFQPGPGIGGDAHFDEDERWTNNFREYNLHRVAAHELGHSLGLSHSTDIGALMYPSYTFSGDVQLAQDDIDGIQAIYGRSQNPVQPIGPQTPKACDSKLTFDAITTIRGEVMFFKDRFYMRTNPFYPEVELNFISVFWPQLPNGLEAAYEFADRDEVRFFKGNKYWAVQGQNVLHGYPKDIYSSFGFPRTVKHIDAALSEENTGKTYFFVANKYWRYDEYKRSMDPGYPKMIAHDFPGIGHKVDAVFMKDGFFYFFHGTRQYKFDPKTKRILTLQKANSWFNCRKN

SEQ ID NO: 39 - protein, 450 aa, Artificial Sequence
  MMP-1 variant D105A
FPATLETQEQDVDLVQKYLEKYYNLKNDGRQVEKRRNSGPVVEKLKQMQEFFGLKVTGKPDAETLKVMKQPRCGVPDVAQFVLTEGNPRWEQTHLTYRIENYTPALPRADVDHAIEKAFQLWSNVTPLTFTKVSEGQADIMISFVRGDHRDNSPFDGPGGNLAHAFQPGPGIGGDAHFDEDERWTNNFREYNLHRVAAHELGHSLGLSHSTDIGALMYPSYTFSGDVQLAQDDIDGIQAIYGRSQNPVQPIGPQTPKACDSKLTFDAITTIRGEVMFFKDRFYMRTNPFYPEVELNFISVFWPQLPNGLEAAYEFADRDEVRFFKGNKYWAVQGQNVLHGYPKDIYSSFGFPRTVKHIDAALSEENTGKTYFFVANKYWRYDEYKRSMDPGYPKMIAHDFPGIGHKVDAVFMKDGFFYFFHGTRQYKFDPKTKRILTLQKANSWFNCRKN

SEQ ID NO: 40 - protein, 450 aa, Artificial Sequence
  MMP-1 variant D105P
FPATLETQEQDVDLVQKYLEKYYNLKNDGRQVEKRRNSGPVVEKLKQMQEFFGLKVTGKPDAETLKVMKQPRCGVPDVAQFVLTEGNPRWEQTHLTYRIENYTPPLPRADVDHAIEKAFQLWSNVTPLTFTKVSEGQADIMISFVRGDHRDNSPFDGPGGNLAHAFQPGPGIGGDAHFDEDERWTNNFREYNLHRVAAHELGHSLGLSHSTDIGALMYPSYTFSGDVQLAQDDIDGIQAIYGRSQNPVQPIGPQTPKACDSKLTFDAITTIRGEVMFFKDRFYMRTNPFYPEVELNFISVFWPQLPNGLEAAYEFADRDEVRFFKGNKYWAVQGQNVLHGYPKDIYSSFGFPRTVKHIDAALSEENTGKTYFFVANKYWRYDEYKRSMDPGYPKMIAHDFPGIGHKVDAVFMKDGFFYFFHGTRQYKFDPKTKRILTLQKANSWFNCRKN

SEQ ID NO: 41 - protein, 450 aa, Artificial Sequence
  MMP-1 variant R150D
FPATLETQEQDVDLVQKYLEKYYNLKNDGRQVEKRRNSGPVVEKLKQMQEFFGLKVTGKPDAETLKVMKQPRCGVPDVAQFVLTEGNPRWEQTHLTYRIENYTPDLPRADVDHAIEKAFQLWSNVTPLTFTKVSEGQADIMISFVRGDHDDNSPFDGPGGNLAHAFQPGPGIGGDAHFDEDERWTNNFREYNLHRVAAHELGHSLGLSHSTDIGALMYPSYTFSGDVQLAQDDIDGIQAIYGRSQNPVQPIGPQTPKACDSKLTFDAITTIRGEVMFFKDRFYMRTNPFYPEVELNFISVFWPQLPNGLEAAYEFADRDEVRFFKGNKYWAVQGQNVLHGYPKDIYSSFGFPRTVKHIDAALSEENTGKTYFFVANKYWRYDEYKRSMDPGYPKMIAHDFPGIGHKVDAVFMKDGFFYFFHGTRQYKFDPKTKRILTLQKANSWFNCRKN

SEQ ID NO: 42 - protein, 450 aa, Artificial Sequence
  MMP-1 variant R150E
FPATLETQEQDVDLVQKYLEKYYNLKNDGRQVEKRRNSGPVVEKLKQMQEFFGLKVTGKPDAETLKVMKQPRCGVPDVAQFVLTEGNPRWEQTHLTYRIENYTPDLPRADVDHAIEKAFQLWSNVTPLTFTKVSEGQADIMISFVRGDHEDNSPFDGPGGNLAHAFQPGPGIGGDAHFDEDERWTNNFREYNLHRVAAHELGHSLGLSHSTDIGALMYPSYTFSGDVQLAQDDIDGIQAIYGRSQNPVQPIGPQTPKACDSKLTFDAITTIRGEVMFFKDRFYMRTNPFYPEVELNFISVFWPQLPNGLEAAYEFADRDEVRFFKGNKYWAVQGQNVLHGYPKDIYSSFGFPRTVKHIDAALSEENTGKTYFFVANKYWRYDEYKRSMDPGYPKMIAHDFPGIGHKVDAVFMKDGFFYFFHGTRQYKFDPKTKRILTLQKANSWFNCRKN

SEQ ID NO: 43 - protein, 450 aa, Artificial Sequence
  MMP-1 variant R150H
FPATLETQEQDVDLVQKYLEKYYNLKNDGRQVEKRRNSGPVVEKLKQMQEFFGLKVTGKPDAETLKVMKQPRCGVPDVAQFVLTEGNPRWEQTHLTYRIENYTPDLPRADVDHAIEKAFQLWSNVTPLTFTKVSEGQADIMISFVRGDHHDNSPFDGPGGNLAHAFQPGPGIGGDAHFDEDERWTNNFREYNLHRVAAHELGHSLGLSHSTDIGALMYPSYTFSGDVQLAQDDIDGIQAIYGRSQNPVQPIGPQTPKACDSKLTFDAITTIRGEVMFFKDRFYMRTNPFYPEVELNFISVFWPQLPNGLEAAYEFADRDEVRFFKGNKYWAVQGQNVLHGYPKDIYSSFGFPRTVKHIDAALSEENTGKTYFFVANKYWRYDEYKRSMDPGYPKMIAHDFPGIGHKVDAVFMKDGFFYFFHGTRQYKFDPKTKRILTLQKANSWFNCRKN

SEQ ID NO: 44 - protein, 450 aa, Artificial Sequence
  MMP-1 variant R150K
FPATLETQEQDVDLVQKYLEKYYNLKNDGRQVEKRRNSGPVVEKLKQMQEFFGLKVTGKPDAETLKVMKQPRCGVPDVAQFVLTEGNPRWEQTHLTYRIENYTPDLPRADVDHAIEKAFQLWSNVTPLTFTKVSEGQADIMISFVRGDHKDNSPFDGPGGNLAHAFQPGPGIGGDAHFDEDERWTNNFREYNLHRVAAHELGHSLGLSHSTDIGALMYPSYTFSGDVQLAQDDIDGIQAIYGRSQNPVQPIGPQTPKACDSKLTFDAITTIRGEVMFFKDRFYMRTNPFYPEVELNFISVFWPQLPNGLEAAYEFADRDEVRFFKGNKYWAVQGQNVLHGYPKDIYSSFGFPRTVKHIDAALSEENTGKTYFFVANKYWRYDEYKRSMDPGYPKMIAHDFPGIGHKVDAVFMKDGFFYFFHGTRQYKFDPKTKRILTLQKANSWFNCRKN

SEQ ID NO: 45 - protein, 450 aa, Artificial Sequence
  MMP-1 variant R150C
FPATLETQEQDVDLVQKYLEKYYNLKNDGRQVEKRRNSGPVVEKLKQMQEFFGLKVTGKPDAETLKVMKQPRCGVPDVAQFVLTEGNPRWEQTHLTYRIENYTPDLPRADVDHAIEKAFQLWSNVTPLTFTKVSEGQADIMISFVRGDHCDNSPFDGPGGNLAHAFQPGPGIGGDAHFDEDERWTNNFREYNLHRVAAHELGHSLGLSHSTDIGALMYPSYTFSGDVQLAQDDIDGIQAIYGRSQNPVQPIGPQTPKACDSKLTFDAITTIRGEVMFFKDRFYMRTNPFYPEVELNFISVFWPQLPNGLEAAYEFADRDEVRFFKGNKYWAVQGQNVLHGYPKDIYSSFGFPRTVKHIDAALSEENTGKTYFFVANKYWRYDEYKRSMDPGYPKMIAHDFPGIGHKVDAVFMKDGFFYFFHGTRQYKFDPKTKRILTLQKANSWFNCRKN

SEQ ID NO: 46 - protein, 450 aa, Artificial Sequence
  MMP-1 variant R150N
FPATLETQEQDVDLVQKYLEKYYNLKNDGRQVEKRRNSGPVVEKLKQMQEFFGLKVTGKPDAETLKVMKQPRCGVPDVAQFVLTEGNPRWEQTHLTYRIENYTPDLPRADVDHAIEKAFQLWSNVTPLTFTKVSEGQADIMISFVRGDHNDNSPFDGPGGNLAHAFQPGPGIGGDAHFDEDERWTNNFREYNLHRVAAHELGHSLGLSHSTDIGALMYPSYTFSGDVQLAQDDIDGIQAIYGRSQNPVQPIGPQTPKACDSKLTFDAITTIRGEVMFFKDRFYMRTNPFYPEVELNFISVFWPQLPNGLEAAYEFADRDEVRFFKGNKYWAVQGQNVLHGYPKDIYSSFGFPRTVKHIDAALSEENTGKTYFFVANKYWRYDEYKRSMDPGYPKMIAHDFPGIGHKVDAVFMKDGFFYFFHGTRQYKFDPKTKRILTLQKANSWFNCRKN

SEQ ID NO: 47 - protein, 450 aa, Artificial Sequence
  MMP-1 variant R150Q
FPATLETQEQDVDLVQKYLEKYYNLKNDGRQVEKRRNSGPVVEKLKQMQEFFGLKVTGKPDAETLKVMKQPRCGVPDVAQFVLTEGNPRWEQTHLTYRIENYTPDLPRADVDHAIEKAFQLWSNVTPLTFTKVSEGQADIMISFVRGDHQDNSPFDGPGGNLAHAFQPGPGIGGDAHFDEDERWTNNFREYNLHRVAAHELGHSLGLSHSTDIGALMYPSYTFSGDVQLAQDDIDGIQAIYGRSQNPVQPIGPQTPKACDSKLTFDAITTIRGEVMFFKDRFYMRTNPFYPEVELNFISVFWPQLPNGLEAAYEFADRDEVRFFKGNKYWAVQGQNVLHGYPKDIYSSFGFPRTVKHIDAALSEENTGKTYFFVANKYWRYDEYKRSMDPGYPKMIAHDFPGIGHKVDAVFMKDGFFYFFHGTRQYKFDPKTKRILTLQKANSWFNCRKN

SEQ ID NO: 48 - protein, 450 aa, Artificial Sequence
  MMP-1 variant R150T
FPATLETQEQDVDLVQKYLEKYYNLKNDGRQVEKRRNSGPVVEKLKQMQEFFGLKVTGKPDAETLKVMKQPRCGVPDVAQFVLTEGNPRWEQTHLTYRIENYTPDLPRADVDHAIEKAFQLWSNVTPLTFTKVSEGQADIMISFVRGDHTDNSPFDGPGGNLAHAFQPGPGIGGDAHFDEDERWTNNFREYNLHRVAAHELGHSLGLSHSTDIGALMYPSYTFSGDVQLAQDDIDGIQAIYGRSQNPVQPIGPQTPKACDSKLTFDAITTIRGEVMFFKDRFYMRTNPFYPEVELNFISVFWPQLPNGLEAAYEFADRDEVRFFKGNKYWAVQGQNVLHGYPKDIYSSFGFPRTVKHIDAALSEENTGKTYFFVANKYWRYDEYKRSMDPGYPKMIAHDFPGIGHKVDAVFMKDGFFYFFHGTRQYKFDPKTKRILTLQKANSWFNCRKN

SEQ ID NO: 49 - protein, 450 aa, Artificial Sequence
  MMP-1 variant R150Y
FPATLETQEQDVDLVQKYLEKYYNLKNDGRQVEKRRNSGPVVEKLKQMQEFFGLKVTGKPDAETLKVMKQPRCGVPDVAQFVLTEGNPRWEQTHLTYRIENYTPDLPRADVDHAIEKAFQLWSNVTPLTFTKVSEGQADIMISFVRGDHYDNSPFDGPGGNLAHAFQPGPGIGGDAHFDEDERWTNNFREYNLHRVAAHELGHSLGLSHSTDIGALMYPSYTFSGDVQLAQDDIDGIQAIYGRSQNPVQPIGPQTPKACDSKLTFDAITTIRGEVMFFKDRFYMRTNPFYPEVELNFISVFWPQLPNGLEAAYEFADRDEVRFFKGNKYWAVQGQNVLHGYPKDIYSSFGFPRTVKHIDAALSEENTGKTYFFVANKYWRYDEYKRSMDPGYPKMIAHDFPGIGHKVDAVFMKDGFFYFFHGTRQYKFDPKTKRILTLQKANSWFNCRKN

SEQ ID NO: 50 - protein, 450 aa, Artificial Sequence
  MMP-1 variant R150S
FPATLETQEQDVDLVQKYLEKYYNLKNDGRQVEKRRNSGPVVEKLKQMQEFFGLKVTGKPDAETLKVMKQPRCGVPDVAQFVLTEGNPRWEQTHLTYRIENYTPDLPRADVDHAIEKAFQLWSNVTPLTFTKVSEGQADIMISFVRGDHSDNSPFDGPGGNLAHAFQPGPGIGGDAHFDEDERWTNNFREYNLHRVAAHELGHSLGLSHSTDIGALMYPSYTFSGDVQLAQDDIDGIQAIYGRSQNPVQPIGPQTPKACDSKLTFDAITTIRGEVMFFKDRFYMRTNPFYPEVELNFISVFWPQLPNGLEAAYEFADRDEVRFFKGNKYWAVQGQNVLHGYPKDIYSSFGFPRTVKHIDAALSEENTGKTYFFVANKYWRYDEYKRSMDPGYPKMIAHDFPGIGHKVDAVFMKDGFFYFFHGTRQYKFDPKTKRILTLQKANSWFNCRKN

SEQ ID NO: 51 - protein, 450 aa, Artificial Sequence
  MMP-1 variant R150G
FPATLETQEQDVDLVQKYLEKYYNLKNDGRQVEKRRNSGPVVEKLKQMQEFFGLKVTGKPDAETLKVMKQPRCGVPDVAQFVLTEGNPRWEQTHLTYRIENYTPDLPRADVDHAIEKAFQLWSNVTPLTFTKVSEGQADIMISFVRGDHGDNSPFDGPGGNLAHAFQPGPGIGGDAHFDEDERWTNNFREYNLHRVAAHELGHSLGLSHSTDIGALMYPSYTFSGDVQLAQDDIDGIQAIYGRSQNPVQPIGPQTPKACDSKLTFDAITTIRGEVMFFKDRFYMRTNPFYPEVELNFISVFWPQLPNGLEAAYEFADRDEVRFFKGNKYWAVQGQNVLHGYPKDIYSSFGFPRTVKHIDAALSEENTGKTYFFVANKYWRYDEYKRSMDPGYPKMIAHDFPGIGHKVDAVFMKDGFFYFFHGTRQYKFDPKTKRILTLQKANSWFNCRKN

SEQ ID NO: 52 - protein, 450 aa, Artificial Sequence
  MMP-1 variant R150F
FPATLETQEQDVDLVQKYLEKYYNLKNDGRQVEKRRNSGPVVEKLKQMQEFFGLKVTGKPDAETLKVMKQPRCGVPDVAQFVLTEGNPRWEQTHLTYRIENYTPDLPRADVDHAIEKAFQLWSNVTPLTFTKVSEGQADIMISFVRGDHFDNSPFDGPGGNLAHAFQPGPGIGGDAHFDEDERWTNNFREYNLHRVAAHELGHSLGLSHSTDIGALMYPSYTFSGDVQLAQDDIDGIQAIYGRSQNPVQPIGPQTPKACDSKLTFDAITTIRGEVMFFKDRFYMRTNPFYPEVELNFISVFWPQLPNGLEAAYEFADRDEVRFFKGNKYWAVQGQNVLHGYPKDIYSSFGFPRTVKHIDAALSEENTGKTYFFVANKYWRYDEYKRSMDPGYPKMIAHDFPGIGHKVDAVFMKDGFFYFFHGTRQYKFDPKTKRILTLQKANSWFNCRKN

SEQ ID NO: 53 - protein, 450 aa, Artificial Sequence
  MMP-1 variant R150M
FPATLETQEQDVDLVQKYLEKYYNLKNDGRQVEKRRNSGPVVEKLKQMQEFFGLKVTGKPDAETLKVMKQPRCGVPDVAQFVLTEGNPRWEQTHLTYRIENYTPDLPRADVDHAIEKAFQLWSNVTPLTFTKVSEGQADIMISFVRGDHMDNSPFDGPGGNLAHAFQPGPGIGGDAHFDEDERWTNNFREYNLHRVAAHELGHSLGLSHSTDIGALMYPSYTFSGDVQLAQDDIDGIQAIYGRSQNPVQPIGPQTPKACDSKLTFDAITTIRGEVMFFKDRFYMRTNPFYPEVELNFISVFWPQLPNGLEAAYEFADRDEVRFFKGNKYWAVQGQNVLHGYPKDIYSSFGFPRTVKHIDAALSEENTGKTYFFVANKYWRYDEYKRSMDPGYPKMIAHDFPGIGHKVDAVFMKDGFFYFFHGTRQYKFDPKTKRILTLQKANSWFNCRKN

SEQ ID NO: 54 - protein, 450 aa, Artificial Sequence
  MMP-1 variant R150W
FPATLETQEQDVDLVQKYLEKYYNLKNDGRQVEKRRNSGPVVEKLKQMQEFFGLKVTGKPDAETLKVMKQPRCGVPDVAQFVLTEGNPRWEQTHLTYRIENYTPDLPRADVDHAIEKAFQLWSNVTPLTFTKVSEGQADIMISFVRGDHWDNSPFDGPGGNLAHAFQPGPGIGGDAHFDEDERWTNNFREYNLHRVAAHELGHSLGLSHSTDIGALMYPSYTFSGDVQLAQDDIDGIQAIYGRSQNPVQPIGPQTPKACDSKLTFDAITTIRGEVMFFKDRFYMRTNPFYPEVELNFISVFWPQLPNGLEAAYEFADRDEVRFFKGNKYWAVQGQNVLHGYPKDIYSSFGFPRTVKHIDAALSEENTGKTYFFVANKYWRYDEYKRSMDPGYPKMIAHDFPGIGHKVDAVFMKDGFFYFFHGTRQYKFDPKTKRILTLQKANSWFNCRKN

SEQ ID NO: 55 - protein, 450 aa, Artificial Sequence
  MMP-1 variant R150I
FPATLETQEQDVDLVQKYLEKYYNLKNDGRQVEKRRNSGPVVEKLKQMQEFFGLKVTGKPDAETLKVMKQPRCGVPDVAQFVLTEGNPRWEQTHLTYRIENYTPDLPRADVDHAIEKAFQLWSNVTPLTFTKVSEGQADIMISFVRGDHIDNSPFDGPGGNLAHAFQPGPGIGGDAHFDEDERWTNNFREYNLHRVAAHELGHSLGLSHSTDIGALMYPSYTFSGDVQLAQDDIDGIQAIYGRSQNPVQPIGPQTPKACDSKLTFDAITTIRGEVMFFKDRFYMRTNPFYPEVELNFISVFWPQLPNGLEAAYEFADRDEVRFFKGNKYWAVQGQNVLHGYPKDIYSSFGFPRTVKHIDAALSEENTGKTYFFVANKYWRYDEYKRSMDPGYPKMIAHDFPGIGHKVDAVFMKDGFFYFFHGTRQYKFDPKTKRILTLQKANSWFNCRKN

SEQ ID NO: 56 - protein, 450 aa, Artificial Sequence
  MMP-1 variant R150V
FPATLETQEQDVDLVQKYLEKYYNLKNDGRQVEKRRNSGPVVEKLKQMQEFFGLKVTGKPDAETLKVMKQPRCGVPDVAQFVLTEGNPRWEQTHLTYRIENYTPDLPRADVDHAIEKAFQLWSNVTPLTFTKVSEGQADIMISFVRGDHVDNSPFDGPGGNLAHAFQPGPGIGGDAHFDEDERWTNNFREYNLHRVAAHELGHSLGLSHSTDIGALMYPSYTFSGDVQLAQDDIDGIQAIYGRSQNPVQPIGPQTPKACDSKLTFDAITTIRGEVMFFKDRFYMRTNPFYPEVELNFISVFWPQLPNGLEAAYEFADRDEVRFFKGNKYWAVQGQNVLHGYPKDIYSSFGFPRTVKHIDAALSEENTGKTYFFVANKYWRYDEYKRSMDPGYPKMIAHDFPGIGHKVDAVFMKDGFFYFFHGTRQYKFDPKTKRILTLQKANSWFNCRKN

SEQ ID NO: 57 - protein, 450 aa, Artificial Sequence
  MMP-1 variant R150L
FPATLETQEQDVDLVQKYLEKYYNLKNDGRQVEKRRNSGPVVEKLKQMQEFFGLKVTGKPDAETLKVMKQPRCGVPDVAQFVLTEGNPRWEQTHLTYRIENYTPDLPRADVDHAIEKAFQLWSNVTPLTFTKVSEGQADIMISFVRGDHLDNSPFDGPGGNLAHAFQPGPGIGGDAHFDEDERWTNNFREYNLHRVAAHELGHSLGLSHSTDIGALMYPSYTFSGDVQLAQDDIDGIQAIYGRSQNPVQPIGPQTPKACDSKLTFDAITTIRGEVMFFKDRFYMRTNPFYPEVELNFISVFWPQLPNGLEAAYEFADRDEVRFFKGNKYWAVQGQNVLHGYPKDIYSSFGFPRTVKHIDAALSEENTGKTYFFVANKYWRYDEYKRSMDPGYPKMIAHDFPGIGHKVDAVFMKDGFFYFFHGTRQYKFDPKTKRILTLQKANSWFNCRKN

SEQ ID NO: 58 - protein, 450 aa, Artificial Sequence
  MMP-1 variant R150A
FPATLETQEQDVDLVQKYLEKYYNLKNDGRQVEKRRNSGPVVEKLKQMQEFFGLKVTGKPDAETLKVMKQPRCGVPDVAQFVLTEGNPRWEQTHLTYRIENYTPDLPRADVDHAIEKAFQLWSNVTPLTFTKVSEGQADIMISFVRGDHADNSPFDGPGGNLAHAFQPGPGIGGDAHFDEDERWTNNFREYNLHRVAAHELGHSLGLSHSTDIGALMYPSYTFSGDVQLAQDDIDGIQAIYGRSQNPVQPIGPQTPKACDSKLTFDAITTIRGEVMFFKDRFYMRTNPFYPEVELNFISVFWPQLPNGLEAAYEFADRDEVRFFKGNKYWAVQGQNVLHGYPKDIYSSFGFPRTVKHIDAALSEENTGKTYFFVANKYWRYDEYKRSMDPGYPKMIAHDFPGIGHKVDAVFMKDGFFYFFHGTRQYKFDPKTKRILTLQKANSWFNCRKN

SEQ ID NO: 59 - protein, 450 aa, Artificial Sequence
  MMP-1 variant R150P
FPATLETQEQDVDLVQKYLEKYYNLKNDGRQVEKRRNSGPVVEKLKQMQEFFGLKVTGKPDAETLKVMKQPRCGVPDVAQFVLTEGNPRWEQTHLTYRIENYTPDLPRADVDHAIEKAFQLWSNVTPLTFTKVSEGQADIMISFVRGDHPDNSPFDGPGGNLAHAFQPGPGIGGDAHFDEDERWTNNFREYNLHRVAAHELGHSLGLSHSTDIGALMYPSYTFSGDVQLAQDDIDGIQAIYGRSQNPVQPIGPQTPKACDSKLTFDAITTIRGEVMFFKDRFYMRTNPFYPEVELNFISVFWPQLPNGLEAAYEFADRDEVRFFKGNKYWAVQGQNVLHGYPKDIYSSFGFPRTVKHIDAALSEENTGKTYFFVANKYWRYDEYKRSMDPGYPKMIAHDFPGIGHKVDAVFMKDGFFYFFHGTRQYKFDPKTKRILTLQKANSWFNCRKN

SEQ ID NO: 60 - protein, 450 aa, Artificial Sequence
  MMP-1 variant D151E
FPATLETQEQDVDLVQKYLEKYYNLKNDGRQVEKRRNSGPVVEKLKQMQEFFGLKVTGKPDAETLKVMKQPRCGVPDVAQFVLTEGNPRWEQTHLTYRIENYTPDLPRADVDHAIEKAFQLWSNVTPLTFTKVSEGQADIMISFVRGDHRENSPFDGPGGNLAHAFQPGPGIGGDAHFDEDERWTNNFREYNLHRVAAHELGHSLGLSHSTDIGALMYPSYTFSGDVQLAQDDIDGIQAIYGRSQNPVQPIGPQTPKACDSKLTFDAITTIRGEVMFFKDRFYMRTNPFYPEVELNFISVFWPQLPNGLEAAYEFADRDEVRFFKGNKYWAVQGQNVLHGYPKDIYSSFGFPRTVKHIDAALSEENTGKTYFFVANKYWRYDEYKRSMDPGYPKMIAHDFPGIGHKVDAVFMKDGFFYFFHGTRQYKFDPKTKRILTLQKANSWFNCRKN

SEQ ID NO: 61 - protein, 450 aa, Artificial Sequence
  MMP-1 variant D151H
FPATLETQEQDVDLVQKYLEKYYNLKNDGRQVEKRRNSGPVVEKLKQMQEFFGLKVTGKPDAETLKVMKQPRCGVPDVAQFVLTEGNPRWEQTHLTYRIENYTPDLPRADVDHAIEKAFQLWSNVTPLTFTKVSEGQADIMISFVRGDHRHNSPFDGPGGNLAHAFQPGPGIGGDAHFDEDERWTNNFREYNLHRVAAHELGHSLGLSHSTDIGALMYPSYTFSGDVQLAQDDIDGIQAIYGRSQNPVQPIGPQTPKACDSKLTFDAITTIRGEVMFFKDRFYMRTNPFYPEVELNFISVFWPQLPNGLEAAYEFADRDEVRFFKGNKYWAVQGQNVLHGYPKDIYSSFGFPRTVKHIDAALSEENTGKTYFFVANKYWRYDEYKRSMDPGYPKMIAHDFPGIGHKVDAVFMKDGFFYFFHGTRQYKFDPKTKRILTLQKANSWFNCRKN

SEQ ID NO: 62 - protein, 450 aa, Artificial Sequence
  MMP-1 variant D151K
FPATLETQEQDVDLVQKYLEKYYNLKNDGRQVEKRRNSGPVVEKLKQMQEFFGLKVTGKPDAETLKVMKQPRCGVPDVAQFVLTEGNPRWEQTHLTYRIENYTPDLPRADVDHAIEKAFQLWSNVTPLTFTKVSEGQADIMISFVRGDHRKNSPFDGPGGNLAHAFQPGPGIGGDAHFDEDERWTNNFREYNLHRVAAHELGHSLGLSHSTDIGALMYPSYTFSGDVQLAQDDIDGIQAIYGRSQNPVQPIGPQTPKACDSKLTFDAITTIRGEVMFFKDRFYMRTNPFYPEVELNFISVFWPQLPNGLEAAYEFADRDEVRFFKGNKYWAVQGQNVLHGYPKDIYSSFGFPRTVKHIDAALSEENTGKTYFFVANKYWRYDEYKRSMDPGYPKMIAHDFPGIGHKVDAVFMKDGFFYFFHGTRQYKFDPKTKRILTLQKANSWFNCRKN

SEQ ID NO: 63 - protein, 450 aa, Artificial Sequence
  MMP-1 variant D151R
FPATLETQEQDVDLVQKYLEKYYNLKNDGRQVEKRRNSGPVVEKLKQMQEFFGLKVTGKPDAETLKVMKQPRCGVPDVAQFVLTEGNPRWEQTHLTYRIENYTPDLPRADVDHAIEKAFQLWSNVTPLTFTKVSEGQADIMISFVRGDHRRNSPFDGPGGNLAHAFQPGPGIGGDAHFDEDERWTNNFREYNLHRVAAHELGHSLGLSHSTDIGALMYPSYTFSGDVQLAQDDIDGIQAIYGRSQNPVQPIGPQTPKACDSKLTFDAITTIRGEVMFFKDRFYMRTNPFYPEVELNFISVFWPQLPNGLEAAYEFADRDEVRFFKGNKYWAVQGQNVLHGYPKDIYSSFGFPRTVKHIDAALSEENTGKTYFFVANKYWRYDEYKRSMDPGYPKMIAHDFPGIGHKVDAVFMKDGFFYFFHGTRQYKFDPKTKRILTLQKANSWFNCRKN

SEQ ID NO: 64 - protein, 450 aa, Artificial Sequence
  MMP-1 variant D151C
FPATLETQEQDVDLVQKYLEKYYNLKNDGRQVEKRRNSGPVVEKLKQMQEFFGLKVTGKPDAETLKVMKQPRCGVPDVAQFVLTEGNPRWEQTHLTYRIENYTPDLPRADVDHAIEKAFQLWSNVTPLTFTKVSEGQADIMISFVRGDHRCNSPFDGPGGNLAHAFQPGPGIGGDAHFDEDERWTNNFREYNLHRVAAHELGHSLGLSHSTDIGALMYPSYTFSGDVQLAQDDIDGIQAIYGRSQNPVQPIGPQTPKACDSKLTFDAITTIRGEVMFFKDRFYMRTNPFYPEVELNFISVFWPQLPNGLEAAYEFADRDEVRFFKGNKYWAVQGQNVLHGYPKDIYSSFGFPRTVKHIDAALSEENTGKTYFFVANKYWRYDEYKRSMDPGYPKMIAHDFPGIGHKVDAVFMKDGFFYFFHGTRQYKFDPKTKRILTLQKANSWFNCRKN

SEQ ID NO: 65 - protein, 499 aa, Artificial Sequence
  MMP-1 variant D151N
FPATLETQEQDVDLVQKYLEKYYNLKNDGRQVEKRRNSGPVVEKLKQMQEFFGLKVTGKPDAETLKVMKQPRCGVPDVAQFVLTEGNPRWEQTHLTYRIENYTPDLPRADVDHAIEKAFQLWSNVTPLTFTKVSEGQADIMISFVRGDHRNNSPFDGPGGNLAHAFQPGPGIGGDAHFDEDERWTNNFREYNLHRVAAHELGHSLGLSHSTDIGALMYPSYTFSGDVQLAQDDIDGIQAIYGRSQNPVQPIGPQTPKACDSKLTFDAITTIRGEVMFFKDRFYMRTNPFYPEVELNFISVFWPQLPNGLEAAYEFADRDEVRFFKGNKYWAVQGQNVLHGYPKDIYSSFGFPRTVKHIDAALSEENTGKTYFFVANKYWRYDEYKRSMDPGYPKMIAHDFPGIGHKVDAVFMKDGFFYFFHGTRQYKFDPKTKRILTLQKANSWFNCRKNGIGHKVDAVFMKDGFFYFFHGTRQYKFDPKTKRILTLQKANSWFNCRKN

SEQ ID NO: 66 - protein, 450 aa, Artificial Sequence
  MMP-1 variant D151Q
FPATLETQEQDVDLVQKYLEKYYNLKNDGRQVEKRRNSGPVVEKLKQMQEFFGLKVTGKPDAETLKVMKQPRCGVPDVAQFVLTEGNPRWEQTHLTYRIENYTPDLPRADVDHAIEKAFQLWSNVTPLTFTKVSEGQADIMISFVRGDHRQNSPFDGPGGNLAHAFQPGPGIGGDAHFDEDERWTNNFREYNLHRVAAHELGHSLGLSHSTDIGALMYPSYTFSGDVQLAQDDIDGIQAIYGRSQNPVQPIGPQTPKACDSKLTFDAITTIRGEVMFFKDRFYMRTNPFYPEVELNFISVFWPQLPNGLEAAYEFADRDEVRFFKGNKYWAVQGQNVLHGYPKDIYSSFGFPRTVKHIDAALSEENTGKTYFFVANKYWRYDEYKRSMDPGYPKMIAHDFPGIGHKVDAVFMKDGFFYFFHGTRQYKFDPKTKRILTLQKANSWFNCRKN

SEQ ID NO: 67 - protein, 450 aa, Artificial Sequence
  MMP-1 variant D151T
FPATLETQEQDVDLVQKYLEKYYNLKNDGRQVEKRRNSGPVVEKLKQMQEFFGLKVTGKPDAETLKVMKQPRCGVPDVAQFVLTEGNPRWEQTHLTYRIENYTPDLPRADVDHAIEKAFQLWSNVTPLTFTKVSEGQADIMISFVRGDHRTNSPFDGPGGNLAHAFQPGPGIGGDAHFDEDERWTNNFREYNLHRVAAHELGHSLGLSHSTDIGALMYPSYTFSGDVQLAQDDIDGIQAIYGRSQNPVQPIGPQTPKACDSKLTFDAITTIRGEVMFFKDRFYMRTNPFYPEVELNFISVFWPQLPNGLEAAYEFADRDEVRFFKGNKYWAVQGQNVLHGYPKDIYSSFGFPRTVKHIDAALSEENTGKTYFFVANKYWRYDEYKRSMDPGYPKMIAHDFPGIGHKVDAVFMKDGFFYFFHGTRQYKFDPKTKRILTLQKANSWFNCRKN

SEQ ID NO: 68 - protein, 450 aa, Artificial Sequence
  MMP-1 variant D151Y
FPATLETQEQDVDLVQKYLEKYYNLKNDGRQVEKRRNSGPVVEKLKQMQEFFGLKVTGKPDAETLKVMKQPRCGVPDVAQFVLTEGNPRWEQTHLTYRIENYTPDLPRADVDHAIEKAFQLWSNVTPLTFTKVSEGQADIMISFVRGDHRYNSPFDGPGGNLAHAFQPGPGIGGDAHFDEDERWTNNFREYNLHRVAAHELGHSLGLSHSTDIGALMYPSYTFSGDVQLAQDDIDGIQAIYGRSQNPVQPIGPQTPKACDSKLTFDAITTIRGEVMFFKDRFYMRTNPFYPEVELNFISVFWPQLPNGLEAAYEFADRDEVRFFKGNKYWAVQGQNVLHGYPKDIYSSFGFPRTVKHIDAALSEENTGKTYFFVANKYWRYDEYKRSMDPGYPKMIAHDFPGIGHKVDAVFMKDGFFYFFHGTRQYKFDPKTKRILTLQKANSWFNCRKN

SEQ ID NO: 69 - protein, 450 aa, Artificial Sequence
  MMP-1 variant D151S
FPATLETQEQDVDLVQKYLEKYYNLKNDGRQVEKRRNSGPVVEKLKQMQEFFGLKVTGKPDAETLKVMKQPRCGVPDVAQFVLTEGNPRWEQTHLTYRIENYTPDLPRADVDHAIEKAFQLWSNVTPLTFTKVSEGQADIMISFVRGDHRSNSPFDGPGGNLAHAFQPGPGIGGDAHFDEDERWTNNFREYNLHRVAAHELGHSLGLSHSTDIGALMYPSYTFSGDVQLAQDDIDGIQAIYGRSQNPVQPIGPQTPKACDSKLTFDAITTIRGEVMFFKDRFYMRTNPFYPEVELNFISVFWPQLPNGLEAAYEFADRDEVRFFKGNKYWAVQGQNVLHGYPKDIYSSFGFPRTVKHIDAALSEENTGKTYFFVANKYWRYDEYKRSMDPGYPKMIAHDFPGIGHKVDAVFMKDGFFYFFHGTRQYKFDPKTKRILTLQKANSWFNCRKN

SEQ ID NO: 70 - protein, 450 aa, Artificial Sequence
  MMP-1 variant D151G
FPATLETQEQDVDLVQKYLEKYYNLKNDGRQVEKRRNSGPVVEKLKQMQEFFGLKVTGKPDAETLKVMKQPRCGVPDVAQFVLTEGNPRWEQTHLTYRIENYTPDLPRADVDHAIEKAFQLWSNVTPLTFTKVSEGQADIMISFVRGDHRGNSPFDGPGGNLAHAFQPGPGIGGDAHFDEDERWTNNFREYNLHRVAAHELGHSLGLSHSTDIGALMYPSYTFSGDVQLAQDDIDGIQAIYGRSQNPVQPIGPQTPKACDSKLTFDAITTIRGEVMFFKDRFYMRTNPFYPEVELNFISVFWPQLPNGLEAAYEFADRDEVRFFKGNKYWAVQGQNVLHGYPKDIYSSFGFPRTVKHIDAALSEENTGKTYFFVANKYWRYDEYKRSMDPGYPKMIAHDFPGIGHKVDAVFMKDGFFYFFHGTRQYKFDPKTKRILTLQKANSWFNCRKN

SEQ ID NO: 71 - protein, 450 aa, Artificial Sequence
  MMP-1 variant D151F
FPATLETQEQDVDLVQKYLEKYYNLKNDGRQVEKRRNSGPVVEKLKQMQEFFGLKVTGKPDAETLKVMKQPRCGVPDVAQFVLTEGNPRWEQTHLTYRIENYTPDLPRADVDHAIEKAFQLWSNVTPLTFTKVSEGQADIMISFVRGDHRFNSPFDGPGGNLAHAFQPGPGIGGDAHFDEDERWTNNFREYNLHRVAAHELGHSLGLSHSTDIGALMYPSYTFSGDVQLAQDDIDGIQAIYGRSQNPVQPIGPQTPKACDSKLTFDAITTIRGEVMFFKDRFYMRTNPFYPEVELNFISVFWPQLPNGLEAAYEFADRDEVRFFKGNKYWAVQGQNVLHGYPKDIYSSFGFPRTVKHIDAALSEENTGKTYFFVANKYWRYDEYKRSMDPGYPKMIAHDFPGIGHKVDAVFMKDGFFYFFHGTRQYKFDPKTKRILTLQKANSWFNCRKN

SEQ ID NO: 72 - protein, 450 aa, Artificial Sequence
  MMP-1 variant D151M
FPATLETQEQDVDLVQKYLEKYYNLKNDGRQVEKRRNSGPVVEKLKQMQEFFGLKVTGKPDAETLKVMKQPRCGVPDVAQFVLTEGNPRWEQTHLTYRIENYTPDLPRADVDHAIEKAFQLWSNVTPLTFTKVSEGQADIMISFVRGDHRMNSPFDGPGGNLAHAFQPGPGIGGDAHFDEDERWTNNFREYNLHRVAAHELGHSLGLSHSTDIGALMYPSYTFSGDVQLAQDDIDGIQAIYGRSQNPVQPIGPQTPKACDSKLTFDAITTIRGEVMFFKDRFYMRTNPFYPEVELNFISVFWPQLPNGLEAAYEFADRDEVRFFKGNKYWAVQGQNVLHGYPKDIYSSFGFPRTVKHIDAALSEENTGKTYFFVANKYWRYDEYKRSMDPGYPKMIAHDFPGIGHKVDAVFMKDGFFYFFHGTRQYKFDPKTKRILTLQKANSWFNCRKN

SEQ ID NO: 73 - protein, 450 aa, Artificial Sequence
  MMP-1 variant D151W
FPATLETQEQDVDLVQKYLEKYYNLKNDGRQVEKRRNSGPVVEKLKQMQEFFGLKVTGKPDAETLKVMKQPRCGVPDVAQFVLTEGNPRWEQTHLTYRIENYTPDLPRADVDHAIEKAFQLWSNVTPLTFTKVSEGQADIMISFVRGDHRWNSPFDGPGGNLAHAFQPGPGIGGDAHFDEDERWTNNFREYNLHRVAAHELGHSLGLSHSTDIGALMYPSYTFSGDVQLAQDDIDGIQAIYGRSQNPVQPIGPQTPKACDSKLTFDAITTIRGEVMFFKDRFYMRTNPFYPEVELNFISVFWPQLPNGLEAAYEFADRDEVRFFKGNKYWAVQGQNVLHGYPKDIYSSFGFPRTVKHIDAALSEENTGKTYFFVANKYWRYDEYKRSMDPGYPKMIAHDFPGIGHKVDAVFMKDGFFYFFHGTRQYKFDPKTKRILTLQKANSWFNCRKN

SEQ ID NO: 74 - protein, 450 aa, Artificial Sequence
  MMP-1 variant D151I
FPATLETQEQDVDLVQKYLEKYYNLKNDGRQVEKRRNSGPVVEKLKQMQEFFGLKVTGKPDAETLKVMKQPRCGVPDVAQFVLTEGNPRWEQTHLTYRIENYTPDLPRADVDHAIEKAFQLWSNVTPLTFTKVSEGQADIMISFVRGDHRINSPFDGPGGNLAHAFQPGPGIGGDAHFDEDERWTNNFREYNLHRVAAHELGHSLGLSHSTDIGALMYPSYTFSGDVQLAQDDIDGIQAIYGRSQNPVQPIGPQTPKACDSKLTFDAITTIRGEVMFFKDRFYMRTNPFYPEVELNFISVFWPQLPNGLEAAYEFADRDEVRFFKGNKYWAVQGQNVLHGYPKDIYSSFGFPRTVKHIDAALSEENTGKTYFFVANKYWRYDEYKRSMDPGYPKMIAHDFPGIGHKVDAVFMKDGFFYFFHGTRQYKFDPKTKRILTLQKANSWFNCRKN

SEQ ID NO: 75 - protein, 450 aa, Artificial Sequence
  MMP-1 variant D151V
FPATLETQEQDVDLVQKYLEKYYNLKNDGRQVEKRRNSGPVVEKLKQMQEFFGLKVTGKPDAETLKVMKQPRCGVPDVAQFVLTEGNPRWEQTHLTYRIENYTPDLPRADVDHAIEKAFQLWSNVTPLTFTKVSEGQADIMISFVRGDHRVNSPFDGPGGNLAHAFQPGPGIGGDAHFDEDERWTNNFREYNLHRVAAHELGHSLGLSHSTDIGALMYPSYTFSGDVQLAQDDIDGIQAIYGRSQNPVQPIGPQTPKACDSKLTFDAITTIRGEVMFFKDRFYMRTNPFYPEVELNFISVFWPQLPNGLEAAYEFADRDEVRFFKGNKYWAVQGQNVLHGYPKDIYSSFGFPRTVKHIDAALSEENTGKTYFFVANKYWRYDEYKRSMDPGYPKMIAHDFPGIGHKVDAVFMKDGFFYFFHGTRQYKFDPKTKRILTLQKANSWFNCRKN

SEQ ID NO: 76 - protein, 450 aa, Artificial Sequence
  MMP-1 variant D151L
FPATLETQEQDVDLVQKYLEKYYNLKNDGRQVEKRRNSGPVVEKLKQMQEFFGLKVTGKPDAETLKVMKQPRCGVPDVAQFVLTEGNPRWEQTHLTYRIENYTPDLPRADVDHAIEKAFQLWSNVTPLTFTKVSEGQADIMISFVRGDHRLNSPFDGPGGNLAHAFQPGPGIGGDAHFDEDERWTNNFREYNLHRVAAHELGHSLGLSHSTDIGALMYPSYTFSGDVQLAQDDIDGIQAIYGRSQNPVQPIGPQTPKACDSKLTFDAITTIRGEVMFFKDRFYMRTNPFYPEVELNFISVFWPQLPNGLEAAYEFADRDEVRFFKGNKYWAVQGQNVLHGYPKDIYSSFGFPRTVKHIDAALSEENTGKTYFFVANKYWRYDEYKRSMDPGYPKMIAHDFPGIGHKVDAVFMKDGFFYFFHGTRQYKFDPKTKRILTLQKANSWFNCRKN

SEQ ID NO: 77 - protein, 450 aa, Artificial Sequence
  MMP-1 variant D151A
FPATLETQEQDVDLVQKYLEKYYNLKNDGRQVEKRRNSGPVVEKLKQMQEFFGLKVTGKPDAETLKVMKQPRCGVPDVAQFVLTEGNPRWEQTHLTYRIENYTPDLPRADVDHAIEKAFQLWSNVTPLTFTKVSEGQADIMISFVRGDHRANSPFDGPGGNLAHAFQPGPGIGGDAHFDEDERWTNNFREYNLHRVAAHELGHSLGLSHSTDIGALMYPSYTFSGDVQLAQDDIDGIQAIYGRSQNPVQPIGPQTPKACDSKLTFDAITTIRGEVMFFKDRFYMRTNPFYPEVELNFISVFWPQLPNGLEAAYEFADRDEVRFFKGNKYWAVQGQNVLHGYPKDIYSSFGFPRTVKHIDAALSEENTGKTYFFVANKYWRYDEYKRSMDPGYPKMIAHDFPGIGHKVDAVFMKDGFFYFFHGTRQYKFDPKTKRILTLQKANSWFNCRKN

SEQ ID NO: 78 - protein, 450 aa, Artificial Sequence
  MMP-1 variant D151P
FPATLETQEQDVDLVQKYLEKYYNLKNDGRQVEKRRNSGPVVEKLKQMQEFFGLKVTGKPDAETLKVMKQPRCGVPDVAQFVLTEGNPRWEQTHLTYRIENYTPDLPRADVDHAIEKAFQLWSNVTPLTFTKVSEGQADIMISFVRGDHRPNSPFDGPGGNLAHAFQPGPGIGGDAHFDEDERWTNNFREYNLHRVAAHELGHSLGLSHSTDIGALMYPSYTFSGDVQLAQDDIDGIQAIYGRSQNPVQPIGPQTPKACDSKLTFDAITTIRGEVMFFKDRFYMRTNPFYPEVELNFISVFWPQLPNGLEAAYEFADRDEVRFFKGNKYWAVQGQNVLHGYPKDIYSSFGFPRTVKHIDAALSEENTGKTYFFVANKYWRYDEYKRSMDPGYPKMIAHDFPGIGHKVDAVFMKDGFFYFFHGTRQYKFDPKTKRILTLQKANSWFNCRKN

SEQ ID NO: 79 - protein, 450 aa, Artificial Sequence
  MMP-1 variant F155D
FPATLETQEQDVDLVQKYLEKYYNLKNDGRQVEKRRNSGPVVEKLKQMQEFFGLKVTGKPDAETLKVMKQPRCGVPDVAQFVLTEGNPRWEQTHLTYRIENYTPDLPRADVDHAIEKAFQLWSNVTPLTFTKVSEGQADIMISFVRGDHRDNSPDDGPGGNLAHAFQPGPGIGGDAHFDEDERWTNNFREYNLHRVAAHELGHSLGLSHSTDIGALMYPSYTFSGDVQLAQDDIDGIQAIYGRSQNPVQPIGPQTPKACDSKLTFDAITTIRGEVMFFKDRFYMRTNPFYPEVELNFISVFWPQLPNGLEAAYEFADRDEVRFFKGNKYWAVQGQNVLHGYPKDIYSSFGFPRTVKHIDAALSEENTGKTYFFVANKYWRYDEYKRSMDPGYPKMIAHDFPGIGHKVDAVFMKDGFFYFFHGTRQYKFDPKTKRILTLQKANSWFNCRKN

SEQ ID NO: 80 - protein, 450 aa, Artificial Sequence
  MMP-1 variant F155E
FPATLETQEQDVDLVQKYLEKYYNLKNDGRQVEKRRNSGPVVEKLKQMQEFFGLKVTGKPDAETLKVMKQPRCGVPDVAQFVLTEGNPRWEQTHLTYRIENYTPDLPRADVDHAIEKAFQLWSNVTPLTFTKVSEGQADIMISFVRGDHRDNSPEDGPGGNLAHAFQPGPGIGGDAHFDEDERWTNNFREYNLHRVAAHELGHSLGLSHSTDIGALMYPSYTFSGDVQLAQDDIDGIQAIYGRSQNPVQPIGPQTPKACDSKLTFDAITTIRGEVMFFKDRFYMRTNPFYPEVELNFISVFWPQLPNGLEAAYEFADRDEVRFFKGNKYWAVQGQNVLHGYPKDIYSSFGFPRTVKHIDAALSEENTGKTYFFVANKYWRYDEYKRSMDPGYPKMIAHDFPGIGHKVDAVFMKDGFFYFFHGTRQYKFDPKTKRILTLQKANSWFNCRKN

SEQ ID NO: 81 - protein, 450 aa, Artificial Sequence
  MMP-1 variant F155H
FPATLETQEQDVDLVQKYLEKYYNLKNDGRQVEKRRNSGPVVEKLKQMQEFFGLKVTGKPDAETLKVMKQPRCGVPDVAQFVLTEGNPRWEQTHLTYRIENYTPDLPRADVDHAIEKAFQLWSNVTPLTFTKVSEGQADIMISFVRGDHRDNSPHDGPGGNLAHAFQPGPGIGGDAHFDEDERWTNNFREYNLHRVAAHELGHSLGLSHSTDIGALMYPSYTFSGDVQLAQDDIDGIQAIYGRSQNPVQPIGPQTPKACDSKLTFDAITTIRGEVMFFKDRFYMRTNPFYPEVELNFISVFWPQLPNGLEAAYEFADRDEVRFFKGNKYWAVQGQNVLHGYPKDIYSSFGFPRTVKHIDAALSEENTGKTYFFVANKYWRYDEYKRSMDPGYPKMIAHDFPGIGHKVDAVFMKDGFFYFFHGTRQYKFDPKTKRILTLQKANSWFNCRKN

SEQ ID NO: 82 - protein, 450 aa, Artificial Sequence
  MMP-1 variant F155K
FPATLETQEQDVDLVQKYLEKYYNLKNDGRQVEKRRNSGPVVEKLKQMQEFFGLKVTGKPDAETLKVMKQPRCGVPDVAQFVLTEGNPRWEQTHLTYRIENYTPDLPRADVDHAIEKAFQLWSNVTPLTFTKVSEGQADIMISFVRGDHRDNSPKDGPGGNLAHAFQPGPGIGGDAHFDEDERWTNNFREYNLHRVAAHELGHSLGLSHSTDIGALMYPSYTFSGDVQLAQDDIDGIQAIYGRSQNPVQPIGPQTPKACDSKLTFDAITTIRGEVMFFKDRFYMRTNPFYPEVELNFISVFWPQLPNGLEAAYEFADRDEVRFFKGNKYWAVQGQNVLHGYPKDIYSSFGFPRTVKHIDAALSEENTGKTYFFVANKYWRYDEYKRSMDPGYPKMIAHDFPGIGHKVDAVFMKDGFFYFFHGTRQYKFDPKTKRILTLQKANSWFNCRKN

SEQ ID NO: 83 - protein, 450 aa, Artificial Sequence
  MMP-1 variant F155R
FPATLETQEQDVDLVQKYLEKYYNLKNDGRQVEKRRNSGPVVEKLKQMQEFFGLKVTGKPDAETLKVMKQPRCGVPDVAQFVLTEGNPRWEQTHLTYRIENYTPDLPRADVDHAIEKAFQLWSNVTPLTFTKVSEGQADIMISFVRGDHRDNSPRDGPGGNLAHAFQPGPGIGGDAHFDEDERWTNNFREYNLHRVAAHELGHSLGLSHSTDIGALMYPSYTFSGDVQLAQDDIDGIQAIYGRSQNPVQPIGPQTPKACDSKLTFDAITTIRGEVMFFKDRFYMRTNPFYPEVELNFISVFWPQLPNGLEAAYEFADRDEVRFFKGNKYWAVQGQNVLHGYPKDIYSSFGFPRTVKHIDAALSEENTGKTYFFVANKYWRYDEYKRSMDPGYPKMIAHDFPGIGHKVDAVFMKDGFFYFFHGTRQYKFDPKTKRILTLQKANSWFNCRKN

SEQ ID NO: 84 - protein, 450 aa, Artificial Sequence
  MMP-1 variant F155C
FPATLETQEQDVDLVQKYLEKYYNLKNDGRQVEKRRNSGPVVEKLKQMQEFFGLKVTGKPDAETLKVMKQPRCGVPDVAQFVLTEGNPRWEQTHLTYRIENYTPDLPRADVDHAIEKAFQLWSNVTPLTFTKVSEGQADIMISFVRGDHRDNSPCDGPGGNLAHAFQPGPGIGGDAHFDEDERWTNNFREYNLHRVAAHELGHSLGLSHSTDIGALMYPSYTFSGDVQLAQDDIDGIQAIYGRSQNPVQPIGPQTPKACDSKLTFDAITTIRGEVMFFKDRFYMRTNPFYPEVELNFISVFWPQLPNGLEAAYEFADRDEVRFFKGNKYWAVQGQNVLHGYPKDIYSSFGFPRTVKHIDAALSEENTGKTYFFVANKYWRYDEYKRSMDPGYPKMIAHDFPGIGHKVDAVFMKDGFFYFFHGTRQYKFDPKTKRILTLQKANSWFNCRKN

SEQ ID NO: 85 - protein, 450 aa, Artificial Sequence
  MMP-1 variant F155N
FPATLETQEQDVDLVQKYLEKYYNLKNDGRQVEKRRNSGPVVEKLKQMQEFFGLKVTGKPDAETLKVMKQPRCGVPDVAQFVLTEGNPRWEQTHLTYRIENYTPDLPRADVDHAIEKAFQLWSNVTPLTFTKVSEGQADIMISFVRGDHRDNSPNDGPGGNLAHAFQPGPGIGGDAHFDEDERWTNNFREYNLHRVAAHELGHSLGLSHSTDIGALMYPSYTFSGDVQLAQDDIDGIQAIYGRSQNPVQPIGPQTPKACDSKLTFDAITTIRGEVMFFKDRFYMRTNPFYPEVELNFISVFWPQLPNGLEAAYEFADRDEVRFFKGNKYWAVQGQNVLHGYPKDIYSSFGFPRTVKHIDAALSEENTGKTYFFVANKYWRYDEYKRSMDPGYPKMIAHDFPGIGHKVDAVFMKDGFFYFFHGTRQYKFDPKTKRILTLQKANSWFNCRKN

SEQ ID NO: 86 - protein, 450 aa, Artificial Sequence
  MMP-1 variant F155Q
FPATLETQEQDVDLVQKYLEKYYNLKNDGRQVEKRRNSGPVVEKLKQMQEFFGLKVTGKPDAETLKVMKQPRCGVPDVAQFVLTEGNPRWEQTHLTYRIENYTPDLPRADVDHAIEKAFQLWSNVTPLTFTKVSEGQADIMISFVRGDHRDNSPQDGPGGNLAHAFQPGPGIGGDAHFDEDERWTNNFREYNLHRVAAHELGHSLGLSHSTDIGALMYPSYTFSGDVQLAQDDIDGIQAIYGRSQNPVQPIGPQTPKACDSKLTFDAITTIRGEVMFFKDRFYMRTNPFYPEVELNFISVFWPQLPNGLEAAYEFADRDEVRFFKGNKYWAVQGQNVLHGYPKDIYSSFGFPRTVKHIDAALSEENTGKTYFFVANKYWRYDEYKRSMDPGYPKMIAHDFPGIGHKVDAVFMKDGFFYFFHGTRQYKFDPKTKRILTLQKANSWFNCRKN

SEQ ID NO: 87 - protein, 450 aa, Artificial Sequence
  MMP-1 variant F155T
FPATLETQEQDVDLVQKYLEKYYNLKNDGRQVEKRRNSGPVVEKLKQMQEFFGLKVTGKPDAETLKVMKQPRCGVPDVAQFVLTEGNPRWEQTHLTYRIENYTPDLPRADVDHAIEKAFQLWSNVTPLTFTKVSEGQADIMISFVRGDHRDNSPTDGPGGNLAHAFQPGPGIGGDAHFDEDERWTNNFREYNLHRVAAHELGHSLGLSHSTDIGALMYPSYTFSGDVQLAQDDIDGIQAIYGRSQNPVQPIGPQTPKACDSKLTFDAITTIRGEVMFFKDRFYMRTNPFYPEVELNFISVFWPQLPNGLEAAYEFADRDEVRFFKGNKYWAVQGQNVLHGYPKDIYSSFGFPRTVKHIDAALSEENTGKTYFFVANKYWRYDEYKRSMDPGYPKMIAHDFPGIGHKVDAVFMKDGFFYFFHGTRQYKFDPKTKRILTLQKANSWFNCRKN

SEQ ID NO: 88 - protein, 450 aa, Artificial Sequence
  MMP-1 variant F155Y
FPATLETQEQDVDLVQKYLEKYYNLKNDGRQVEKRRNSGPVVEKLKQMQEFFGLKVTGKPDAETLKVMKQPRCGVPDVAQFVLTEGNPRWEQTHLTYRIENYTPDLPRADVDHAIEKAFQLWSNVTPLTFTKVSEGQADIMISFVRGDHRDNSPYDGPGGNLAHAFQPGPGIGGDAHFDEDERWTNNFREYNLHRVAAHELGHSLGLSHSTDIGALMYPSYTFSGDVQLAQDDIDGIQAIYGRSQNPVQPIGPQTPKACDSKLTFDAITTIRGEVMFFKDRFYMRTNPFYPEVELNFISVFWPQLPNGLEAAYEFADRDEVRFFKGNKYWAVQGQNVLHGYPKDIYSSFGFPRTVKHIDAALSEENTGKTYFFVANKYWRYDEYKRSMDPGYPKMIAHDFPGIGHKVDAVFMKDGFFYFFHGTRQYKFDPKTKRILTLQKANSWFNCRKN

SEQ ID NO: 89 - protein, 450 aa, Artificial Sequence
  MMP-1 variant F155S
FPATLETQEQDVDLVQKYLEKYYNLKNDGRQVEKRRNSGPVVEKLKQMQEFFGLKVTGKPDAETLKVMKQPRCGVPDVAQFVLTEGNPRWEQTHLTYRIENYTPDLPRADVDHAIEKAFQLWSNVTPLTFTKVSEGQADIMISFVRGDHRDNSPSDGPGGNLAHAFQPGPGIGGDAHFDEDERWTNNFREYNLHRVAAHELGHSLGLSHSTDIGALMYPSYTFSGDVQLAQDDIDGIQAIYGRSQNPVQPIGPQTPKACDSKLTFDAITTIRGEVMFFKDRFYMRTNPFYPEVELNFISVFWPQLPNGLEAAYEFADRDEVRFFKGNKYWAVQGQNVLHGYPKDIYSSFGFPRTVKHIDAALSEENTGKTYFFVANKYWRYDEYKRSMDPGYPKMIAHDFPGIGHKVDAVFMKDGFFYFFHGTRQYKFDPKTKRILTLQKANSWFNCRKN

SEQ ID NO: 90 - protein, 450 aa, Artificial Sequence
  MMP-1 variant F155G
FPATLETQEQDVDLVQKYLEKYYNLKNDGRQVEKRRNSGPVVEKLKQMQEFFGLKVTGKPDAETLKVMKQPRCGVPDVAQFVLTEGNPRWEQTHLTYRIENYTPDLPRADVDHAIEKAFQLWSNVTPLTFTKVSEGQADIMISFVRGDHRDNSPGDGPGGNLAHAFQPGPGIGGDAHFDEDERWTNNFREYNLHRVAAHELGHSLGLSHSTDIGALMYPSYTFSGDVQLAQDDIDGIQAIYGRSQNPVQPIGPQTPKACDSKLTFDAITTIRGEVMFFKDRFYMRTNPFYPEVELNFISVFWPQLPNGLEAAYEFADRDEVRFFKGNKYWAVQGQNVLHGYPKDIYSSFGFPRTVKHIDAALSEENTGKTYFFVANKYWRYDEYKRSMDPGYPKMIAHDFPGIGHKVDAVFMKDGFFYFFHGTRQYKFDPKTKRILTLQKANSWFNCRKN

SEQ ID NO: 91 - protein, 450 aa, Artificial Sequence
  MMP-1 variant F155M
FPATLETQEQDVDLVQKYLEKYYNLKNDGRQVEKRRNSGPVVEKLKQMQEFFGLKVTGKPDAETLKVMKQPRCGVPDVAQFVLTEGNPRWEQTHLTYRIENYTPDLPRADVDHAIEKAFQLWSNVTPLTFTKVSEGQADIMISFVRGDHRDNSPMDGPGGNLAHAFQPGPGIGGDAHFDEDERWTNNFREYNLHRVAAHELGHSLGLSHSTDIGALMYPSYTFSGDVQLAQDDIDGIQAIYGRSQNPVQPIGPQTPKACDSKLTFDAITTIRGEVMFFKDRFYMRTNPFYPEVELNFISVFWPQLPNGLEAAYEFADRDEVRFFKGNKYWAVQGQNVLHGYPKDIYSSFGFPRTVKHIDAALSEENTGKTYFFVANKYWRYDEYKRSMDPGYPKMIAHDFPGIGHKVDAVFMKDGFFYFFHGTRQYKFDPKTKRILTLQKANSWFNCRKN

SEQ ID NO: 92 - protein, 450 aa, Artificial Sequence
  MMP-1 variant F155W
FPATLETQEQDVDLVQKYLEKYYNLKNDGRQVEKRRNSGPVVEKLKQMQEFFGLKVTGKPDAETLKVMKQPRCGVPDVAQFVLTEGNPRWEQTHLTYRIENYTPDLPRADVDHAIEKAFQLWSNVTPLTFTKVSEGQADIMISFVRGDHRDNSPWDGPGGNLAHAFQPGPGIGGDAHFDEDERWTNNFREYNLHRVAAHELGHSLGLSHSTDIGALMYPSYTFSGDVQLAQDDIDGIQAIYGRSQNPVQPIGPQTPKACDSKLTFDAITTIRGEVMFFKDRFYMRTNPFYPEVELNFISVFWPQLPNGLEAAYEFADRDEVRFFKGNKYWAVQGQNVLHGYPKDIYSSFGFPRTVKHIDAALSEENTGKTYFFVANKYWRYDEYKRSMDPGYPKMIAHDFPGIGHKVDAVFMKDGFFYFFHGTRQYKFDPKTKRILTLQKANSWFNCRKN

SEQ ID NO: 93 - protein, 450 aa, Artificial Sequence
  MMP-1 variant F155I
FPATLETQEQDVDLVQKYLEKYYNLKNDGRQVEKRRNSGPVVEKLKQMQEFFGLKVTGKPDAETLKVMKQPRCGVPDVAQFVLTEGNPRWEQTHLTYRIENYTPDLPRADVDHAIEKAFQLWSNVTPLTFTKVSEGQADIMISFVRGDHRDNSPIDGPGGNLAHAFQPGPGIGGDAHFDEDERWTNNFREYNLHRVAAHELGHSLGLSHSTDIGALMYPSYTFSGDVQLAQDDIDGIQAIYGRSQNPVQPIGPQTPKACDSKLTFDAITTIRGEVMFFKDRFYMRTNPFYPEVELNFISVFWPQLPNGLEAAYEFADRDEVRFFKGNKYWAVQGQNVLHGYPKDIYSSFGFPRTVKHIDAALSEENTGKTYFFVANKYWRYDEYKRSMDPGYPKMIAHDFPGIGHKVDAVFMKDGFFYFFHGTRQYKFDPKTKRILTLQKANSWFNCRKN

SEQ ID NO: 94 - protein, 450 aa, Artificial Sequence
  MMP-1 variant F155V
FPATLETQEQDVDLVQKYLEKYYNLKNDGRQVEKRRNSGPVVEKLKQMQEFFGLKVTGKPDAETLKVMKQPRCGVPDVAQFVLTEGNPRWEQTHLTYRIENYTPDLPRADVDHAIEKAFQLWSNVTPLTFTKVSEGQADIMISFVRGDHRDNSPVDGPGGNLAHAFQPGPGIGGDAHFDEDERWTNNFREYNLHRVAAHELGHSLGLSHSTDIGALMYPSYTFSGDVQLAQDDIDGIQAIYGRSQNPVQPIGPQTPKACDSKLTFDAITTIRGEVMFFKDRFYMRTNPFYPEVELNFISVFWPQLPNGLEAAYEFADRDEVRFFKGNKYWAVQGQNVLHGYPKDIYSSFGFPRTVKHIDAALSEENTGKTYFFVANKYWRYDEYKRSMDPGYPKMIAHDFPGIGHKVDAVFMKDGFFYFFHGTRQYKFDPKTKRILTLQKANSWFNCRKN

SEQ ID NO: 95 - protein, 450 aa, Artificial Sequence
  MMP-1 variant F155L
FPATLETQEQDVDLVQKYLEKYYNLKNDGRQVEKRRNSGPVVEKLKQMQEFFGLKVTGKPDAETLKVMKQPRCGVPDVAQFVLTEGNPRWEQTHLTYRIENYTPDLPRADVDHAIEKAFQLWSNVTPLTFTKVSEGQADIMISFVRGDHRDNSPLDGPGGNLAHAFQPGPGIGGDAHFDEDERWTNNFREYNLHRVAAHELGHSLGLSHSTDIGALMYPSYTFSGDVQLAQDDIDGIQAIYGRSQNPVQPIGPQTPKACDSKLTFDAITTIRGEVMFFKDRFYMRTNPFYPEVELNFISVFWPQLPNGLEAAYEFADRDEVRFFKGNKYWAVQGQNVLHGYPKDIYSSFGFPRTVKHIDAALSEENTGKTYFFVANKYWRYDEYKRSMDPGYPKMIAHDFPGIGHKVDAVFMKDGFFYFFHGTRQYKFDPKTKRILTLQKANSWFNCRKN

SEQ ID NO: 96 - protein, 450 aa, Artificial Sequence
  MMP-1 variant F155A
FPATLETQEQDVDLVQKYLEKYYNLKNDGRQVEKRRNSGPVVEKLKQMQEFFGLKVTGKPDAETLKVMKQPRCGVPDVAQFVLTEGNPRWEQTHLTYRIENYTPDLPRADVDHAIEKAFQLWSNVTPLTFTKVSEGQADIMISFVRGDHRDNSPADGPGGNLAHAFQPGPGIGGDAHFDEDERWTNNFREYNLHRVAAHELGHSLGLSHSTDIGALMYPSYTFSGDVQLAQDDIDGIQAIYGRSQNPVQPIGPQTPKACDSKLTFDAITTIRGEVMFFKDRFYMRTNPFYPEVELNFISVFWPQLPNGLEAAYEFADRDEVRFFKGNKYWAVQGQNVLHGYPKDIYSSFGFPRTVKHIDAALSEENTGKTYFFVANKYWRYDEYKRSMDPGYPKMIAHDFPGIGHKVDAVFMKDGFFYFFHGTRQYKFDPKTKRILTLQKANSWFNCRKN

SEQ ID NO: 97 - protein, 450 aa, Artificial Sequence
  MMP-1 variant F155P
FPATLETQEQDVDLVQKYLEKYYNLKNDGRQVEKRRNSGPVVEKLKQMQEFFGLKVTGKPDAETLKVMKQPRCGVPDVAQFVLTEGNPRWEQTHLTYRIENYTPDLPRADVDHAIEKAFQLWSNVTPLTFTKVSEGQADIMISFVRGDHRDNSPPDGPGGNLAHAFQPGPGIGGDAHFDEDERWTNNFREYNLHRVAAHELGHSLGLSHSTDIGALMYPSYTFSGDVQLAQDDIDGIQAIYGRSQNPVQPIGPQTPKACDSKLTFDAITTIRGEVMFFKDRFYMRTNPFYPEVELNFISVFWPQLPNGLEAAYEFADRDEVRFFKGNKYWAVQGQNVLHGYPKDIYSSFGFPRTVKHIDAALSEENTGKTYFFVANKYWRYDEYKRSMDPGYPKMIAHDFPGIGHKVDAVFMKDGFFYFFHGTRQYKFDPKTKRILTLQKANSWFNCRKN

SEQ ID NO: 98 - protein, 450 aa, Artificial Sequence
  MMP-1 variant D156E
FPATLETQEQDVDLVQKYLEKYYNLKNDGRQVEKRRNSGPVVEKLKQMQEFFGLKVTGKPDAETLKVMKQPRCGVPDVAQFVLTEGNPRWEQTHLTYRIENYTPDLPRADVDHAIEKAFQLWSNVTPLTFTKVSEGQADIMISFVRGDHRDNSPFEGPGGNLAHAFQPGPGIGGDAHFDEDERWTNNFREYNLHRVAAHELGHSLGLSHSTDIGALMYPSYTFSGDVQLAQDDIDGIQAIYGRSQNPVQPIGPQTPKACDSKLTFDAITTIRGEVMFFKDRFYMRTNPFYPEVELNFISVFWPQLPNGLEAAYEFADRDEVRFFKGNKYWAVQGQNVLHGYPKDIYSSFGFPRTVKHIDAALSEENTGKTYFFVANKYWRYDEYKRSMDPGYPKMIAHDFPGIGHKVDAVFMKDGFFYFFHGTRQYKFDPKTKRILTLQKANSWFNCRKN

SEQ ID NO: 99 - protein, 450 aa, Artificial Sequence
  MMP-1 variant D156H
FPATLETQEQDVDLVQKYLEKYYNLKNDGRQVEKRRNSGPVVEKLKQMQEFFGLKVTGKPDAETLKVMKQPRCGVPDVAQFVLTEGNPRWEQTHLTYRIENYTPDLPRADVDHAIEKAFQLWSNVTPLTFTKVSEGQADIMISFVRGDHRDNSPFHGPGGNLAHAFQPGPGIGGDAHFDEDERWTNNFREYNLHRVAAHELGHSLGLSHSTDIGALMYPSYTFSGDVQLAQDDIDGIQAIYGRSQNPVQPIGPQTPKACDSKLTFDAITTIRGEVMFFKDRFYMRTNPFYPEVELNFISVFWPQLPNGLEAAYEFADRDEVRFFKGNKYWAVQGQNVLHGYPKDIYSSFGFPRTVKHIDAALSEENTGKTYFFVANKYWRYDEYKRSMDPGYPKMIAHDFPGIGHKVDAVFMKDGFFYFFHGTRQYKFDPKTKRILTLQKANSWFNCRKN

SEQ ID NO: 100 - protein, 450 aa, Artificial Sequence
  MMP-1 variant D156K
FPATLETQEQDVDLVQKYLEKYYNLKNDGRQVEKRRNSGPVVEKLKQMQEFFGLKVTGKPDAETLKVMKQPRCGVPDVAQFVLTEGNPRWEQTHLTYRIENYTPDLPRADVDHAIEKAFQLWSNVTPLTFTKVSEGQADIMISFVRGDHRDNSPFKGPGGNLAHAFQPGPGIGGDAHFDEDERWTNNFREYNLHRVAAHELGHSLGLSHSTDIGALMYPSYTFSGDVQLAQDDIDGIQAIYGRSQNPVQPIGPQTPKACDSKLTFDAITTIRGEVMFFKDRFYMRTNPFYPEVELNFISVFWPQLPNGLEAAYEFADRDEVRFFKGNKYWAVQGQNVLHGYPKDIYSSFGFPRTVKHIDAALSEENTGKTYFFVANKYWRYDEYKRSMDPGYPKMIAHDFPGIGHKVDAVFMKDGFFYFFHGTRQYKFDPKTKRILTLQKANSWFNCRKN

SEQ ID NO: 101 - protein, 450 aa, Artificial Sequence
  MMP-1 variant D156R
FPATLETQEQDVDLVQKYLEKYYNLKNDGRQVEKRRNSGPVVEKLKQMQEFFGLKVTGKPDAETLKVMKQPRCGVPDVAQFVLTEGNPRWEQTHLTYRIENYTPDLPRADVDHAIEKAFQLWSNVTPLTFTKVSEGQADIMISFVRGDHRDNSPFRGPGGNLAHAFQPGPGIGGDAHFDEDERWTNNFREYNLHRVAAHELGHSLGLSHSTDIGALMYPSYTFSGDVQLAQDDIDGIQAIYGRSQNPVQPIGPQTPKACDSKLTFDAITTIRGEVMFFKDRFYMRTNPFYPEVELNFISVFWPQLPNGLEAAYEFADRDEVRFFKGNKYWAVQGQNVLHGYPKDIYSSFGFPRTVKHIDAALSEENTGKTYFFVANKYWRYDEYKRSMDPGYPKMIAHDFPGIGHKVDAVFMKDGFFYFFHGTRQYKFDPKTKRILTLQKANSWFNCRKN

SEQ ID NO: 102 - protein, 450 aa, Artificial Sequence
  MMP-1 variant D156C
FPATLETQEQDVDLVQKYLEKYYNLKNDGRQVEKRRNSGPVVEKLKQMQEFFGLKVTGKPDAETLKVMKQPRCGVPDVAQFVLTEGNPRWEQTHLTYRIENYTPDLPRADVDHAIEKAFQLWSNVTPLTFTKVSEGQADIMISFVRGDHRDNSPFCGPGGNLAHAFQPGPGIGGDAHFDEDERWTNNFREYNLHRVAAHELGHSLGLSHSTDIGALMYPSYTFSGDVQLAQDDIDGIQAIYGRSQNPVQPIGPQTPKACDSKLTFDAITTIRGEVMFFKDRFYMRTNPFYPEVELNFISVFWPQLPNGLEAAYEFADRDEVRFFKGNKYWAVQGQNVLHGYPKDIYSSFGFPRTVKHIDAALSEENTGKTYFFVANKYWRYDEYKRSMDPGYPKMIAHDFPGIGHKVDAVFMKDGFFYFFHGTRQYKFDPKTKRILTLQKANSWFNCRKN

SEQ ID NO: 103 - protein, 450 aa, Artificial Sequence
  MMP-1 variant D156N
FPATLETQEQDVDLVQKYLEKYYNLKNDGRQVEKRRNSGPVVEKLKQMQEFFGLKVTGKPDAETLKVMKQPRCGVPDVAQFVLTEGNPRWEQTHLTYRIENYTPDLPRADVDHAIEKAFQLWSNVTPLTFTKVSEGQADIMISFVRGDHRDNSPFNGPGGNLAHAFQPGPGIGGDAHFDEDERWTNNFREYNLHRVAAHELGHSLGLSHSTDIGALMYPSYTFSGDVQLAQDDIDGIQAIYGRSQNPVQPIGPQTPKACDSKLTFDAITTIRGEVMFFKDRFYMRTNPFYPEVELNFISVFWPQLPNGLEAAYEFADRDEVRFFKGNKYWAVQGQNVLHGYPKDIYSSFGFPRTVKHIDAALSEENTGKTYFFVANKYWRYDEYKRSMDPGYPKMIAHDFPGIGHKVDAVFMKDGFFYFFHGTRQYKFDPKTKRILTLQKANSWFNCRKN

SEQ ID NO: 104 - protein, 450 aa, Artificial Sequence
  MMP-1 variant D156Q
FPATLETQEQDVDLVQKYLEKYYNLKNDGRQVEKRRNSGPVVEKLKQMQEFFGLKVTGKPDAETLKVMKQPRCGVPDVAQFVLTEGNPRWEQTHLTYRIENYTPDLPRADVDHAIEKAFQLWSNVTPLTFTKVSEGQADIMISFVRGDHRDNSPFQGPGGNLAHAFQPGPGIGGDAHFDEDERWTNNFREYNLHRVAAHELGHSLGLSHSTDIGALMYPSYTFSGDVQLAQDDIDGIQAIYGRSQNPVQPIGPQTPKACDSKLTFDAITTIRGEVMFFKDRFYMRTNPFYPEVELNFISVFWPQLPNGLEAAYEFADRDEVRFFKGNKYWAVQGQNVLHGYPKDIYSSFGFPRTVKHIDAALSEENTGKTYFFVANKYWRYDEYKRSMDPGYPKMIAHDFPGIGHKVDAVFMKDGFFYFFHGTRQYKFDPKTKRILTLQKANSWFNCRKN

SEQ ID NO: 105 - protein, 450 aa, Artificial Sequence
  MMP-1 variant D156T
FPATLETQEQDVDLVQKYLEKYYNLKNDGRQVEKRRNSGPVVEKLKQMQEFFGLKVTGKPDAETLKVMKQPRCGVPDVAQFVLTEGNPRWEQTHLTYRIENYTPDLPRADVDHAIEKAFQLWSNVTPLTFTKVSEGQADIMISFVRGDHRDNSPFTGPGGNLAHAFQPGPGIGGDAHFDEDERWTNNFREYNLHRVAAHELGHSLGLSHSTDIGALMYPSYTFSGDVQLAQDDIDGIQAIYGRSQNPVQPIGPQTPKACDSKLTFDAITTIRGEVMFFKDRFYMRTNPFYPEVELNFISVFWPQLPNGLEAAYEFADRDEVRFFKGNKYWAVQGQNVLHGYPKDIYSSFGFPRTVKHIDAALSEENTGKTYFFVANKYWRYDEYKRSMDPGYPKMIAHDFPGIGHKVDAVFMKDGFFYFFHGTRQYKFDPKTKRILTLQKANSWFNCRKN

SEQ ID NO: 106 - protein, 450 aa, Artificial Sequence
  MMP-1 variant D156Y
FPATLETQEQDVDLVQKYLEKYYNLKNDGRQVEKRRNSGPVVEKLKQMQEFFGLKVTGKPDAETLKVMKQPRCGVPDVAQFVLTEGNPRWEQTHLTYRIENYTPDLPRADVDHAIEKAFQLWSNVTPLTFTKVSEGQADIMISFVRGDHRDNSPFYGPGGNLAHAFQPGPGIGGDAHFDEDERWTNNFREYNLHRVAAHELGHSLGLSHSTDIGALMYPSYTFSGDVQLAQDDIDGIQAIYGRSQNPVQPIGPQTPKACDSKLTFDAITTIRGEVMFFKDRFYMRTNPFYPEVELNFISVFWPQLPNGLEAAYEFADRDEVRFFKGNKYWAVQGQNVLHGYPKDIYSSFGFPRTVKHIDAALSEENTGKTYFFVANKYWRYDEYKRSMDPGYPKMIAHDFPGIGHKVDAVFMKDGFFYFFHGTRQYKFDPKTKRILTLQKANSWFNCRKN

SEQ ID NO: 107 - protein, 450 aa, Artificial Sequence
  MMP-1 variant D156S
FPATLETQEQDVDLVQKYLEKYYNLKNDGRQVEKRRNSGPVVEKLKQMQEFFGLKVTGKPDAETLKVMKQPRCGVPDVAQFVLTEGNPRWEQTHLTYRIENYTPDLPRADVDHAIEKAFQLWSNVTPLTFTKVSEGQADIMISFVRGDHRDNSPFSGPGGNLAHAFQPGPGIGGDAHFDEDERWTNNFREYNLHRVAAHELGHSLGLSHSTDIGALMYPSYTFSGDVQLAQDDIDGIQAIYGRSQNPVQPIGPQTPKACDSKLTFDAITTIRGEVMFFKDRFYMRTNPFYPEVELNFISVFWPQLPNGLEAAYEFADRDEVRFFKGNKYWAVQGQNVLHGYPKDIYSSFGFPRTVKHIDAALSEENTGKTYFFVANKYWRYDEYKRSMDPGYPKMIAHDFPGIGHKVDAVFMKDGFFYFFHGTRQYKFDPKTKRILTLQKANSWFNCRKN

SEQ ID NO: 108 - protein, 450 aa, Artificial Sequence
  MMP-1 variant D156G
FPATLETQEQDVDLVQKYLEKYYNLKNDGRQVEKRRNSGPVVEKLKQMQEFFGLKVTGKPDAETLKVMKQPRCGVPDVAQFVLTEGNPRWEQTHLTYRIENYTPDLPRADVDHAIEKAFQLWSNVTPLTFTKVSEGQADIMISFVRGDHRDNSPFGGPGGNLAHAFQPGPGIGGDAHFDEDERWTNNFREYNLHRVAAHELGHSLGLSHSTDIGALMYPSYTFSGDVQLAQDDIDGIQAIYGRSQNPVQPIGPQTPKACDSKLTFDAITTIRGEVMFFKDRFYMRTNPFYPEVELNFISVFWPQLPNGLEAAYEFADRDEVRFFKGNKYWAVQGQNVLHGYPKDIYSSFGFPRTVKHIDAALSEENTGKTYFFVANKYWRYDEYKRSMDPGYPKMIAHDFPGIGHKVDAVFMKDGFFYFFHGTRQYKFDPKTKRILTLQKANSWFNCRKN

SEQ ID NO: 109 - protein, 450 aa, Artificial Sequence
  MMP-1 variant D156F
FPATLETQEQDVDLVQKYLEKYYNLKNDGRQVEKRRNSGPVVEKLKQMQEFFGLKVTGKPDAETLKVMKQPRCGVPDVAQFVLTEGNPRWEQTHLTYRIENYTPDLPRADVDHAIEKAFQLWSNVTPLTFTKVSEGQADIMISFVRGDHRDNSPFFGPGGNLAHAFQPGPGIGGDAHFDEDERWTNNFREYNLHRVAAHELGHSLGLSHSTDIGALMYPSYTFSGDVQLAQDDIDGIQAIYGRSQNPVQPIGPQTPKACDSKLTFDAITTIRGEVMFFKDRFYMRTNPFYPEVELNFISVFWPQLPNGLEAAYEFADRDEVRFFKGNKYWAVQGQNVLHGYPKDIYSSFGFPRTVKHIDAALSEENTGKTYFFVANKYWRYDEYKRSMDPGYPKMIAHDFPGIGHKVDAVFMKDGFFYFFHGTRQYKFDPKTKRILTLQKANSWFNCRKN

SEQ ID NO: 110 - protein, 450 aa, Artificial Sequence
  MMP-1 variant D156M
FPATLETQEQDVDLVQKYLEKYYNLKNDGRQVEKRRNSGPVVEKLKQMQEFFGLKVTGKPDAETLKVMKQPRCGVPDVAQFVLTEGNPRWEQTHLTYRIENYTPDLPRADVDHAIEKAFQLWSNVTPLTFTKVSEGQADIMISFVRGDHRDNSPFMGPGGNLAHAFQPGPGIGGDAHFDEDERWTNNFREYNLHRVAAHELGHSLGLSHSTDIGALMYPSYTFSGDVQLAQDDIDGIQAIYGRSQNPVQPIGPQTPKACDSKLTFDAITTIRGEVMFFKDRFYMRTNPFYPEVELNFISVFWPQLPNGLEAAYEFADRDEVRFFKGNKYWAVQGQNVLHGYPKDIYSSFGFPRTVKHIDAALSEENTGKTYFFVANKYWRYDEYKRSMDPGYPKMIAHDFPGIGHKVDAVFMKDGFFYFFHGTRQYKFDPKTKRILTLQKANSWFNCRKN

SEQ ID NO: 111 - protein, 450 aa, Artificial Sequence
  MMP-1 variant D156W
FPATLETQEQDVDLVQKYLEKYYNLKNDGRQVEKRRNSGPVVEKLKQMQEFFGLKVTGKPDAETLKVMKQPRCGVPDVAQFVLTEGNPRWEQTHLTYRIENYTPDLPRADVDHAIEKAFQLWSNVTPLTFTKVSEGQADIMISFVRGDHRDNSPFWGPGGNLAHAFQPGPGIGGDAHFDEDERWTNNFREYNLHRVAAHELGHSLGLSHSTDIGALMYPSYTFSGDVQLAQDDIDGIQAIYGRSQNPVQPIGPQTPKACDSKLTFDAITTIRGEVMFFKDRFYMRTNPFYPEVELNFISVFWPQLPNGLEAAYEFADRDEVRFFKGNKYWAVQGQNVLHGYPKDIYSSFGFPRTVKHIDAALSEENTGKTYFFVANKYWRYDEYKRSMDPGYPKMIAHDFPGIGHKVDAVFMKDGFFYFFHGTRQYKFDPKTKRILTLQKANSWFNCRKN

SEQ ID NO: 112 - protein, 450 aa, Artificial Sequence
  MMP-1 variant D156I
FPATLETQEQDVDLVQKYLEKYYNLKNDGRQVEKRRNSGPVVEKLKQMQEFFGLKVTGKPDAETLKVMKQPRCGVPDVAQFVLTEGNPRWEQTHLTYRIENYTPDLPRADVDHAIEKAFQLWSNVTPLTFTKVSEGQADIMISFVRGDHRDNSPFIGPGGNLAHAFQPGPGIGGDAHFDEDERWTNNFREYNLHRVAAHELGHSLGLSHSTDIGALMYPSYTFSGDVQLAQDDIDGIQAIYGRSQNPVQPIGPQTPKACDSKLTFDAITTIRGEVMFFKDRFYMRTNPFYPEVELNFISVFWPQLPNGLEAAYEFADRDEVRFFKGNKYWAVQGQNVLHGYPKDIYSSFGFPRTVKHIDAALSEENTGKTYFFVANKYWRYDEYKRSMDPGYPKMIAHDFPGIGHKVDAVFMKDGFFYFFHGTRQYKFDPKTKRILTLQKANSWFNCRKN

SEQ ID NO: 113 - protein, 450 aa, Artificial Sequence
  MMP-1 variant D156V
FPATLETQEQDVDLVQKYLEKYYNLKNDGRQVEKRRNSGPVVEKLKQMQEFFGLKVTGKPDAETLKVMKQPRCGVPDVAQFVLTEGNPRWEQTHLTYRIENYTPDLPRADVDHAIEKAFQLWSNVTPLTFTKVSEGQADIMISFVRGDHRDNSPFVGPGGNLAHAFQPGPGIGGDAHFDEDERWTNNFREYNLHRVAAHELGHSLGLSHSTDIGALMYPSYTFSGDVQLAQDDIDGIQAIYGRSQNPVQPIGPQTPKACDSKLTFDAITTIRGEVMFFKDRFYMRTNPFYPEVELNFISVFWPQLPNGLEAAYEFADRDEVRFFKGNKYWAVQGQNVLHGYPKDIYSSFGFPRTVKHIDAALSEENTGKTYFFVANKYWRYDEYKRSMDPGYPKMIAHDFPGIGHKVDAVFMKDGFFYFFHGTRQYKFDPKTKRILTLQKANSWFNCRKN

SEQ ID NO: 114 - protein, 450 aa, Artificial Sequence
  MMP-1 variant D156L
FPATLETQEQDVDLVQKYLEKYYNLKNDGRQVEKRRNSGPVVEKLKQMQEFFGLKVTGKPDAETLKVMKQPRCGVPDVAQFVLTEGNPRWEQTHLTYRIENYTPDLPRADVDHAIEKAFQLWSNVTPLTFTKVSEGQADIMISFVRGDHRDNSPFLGPGGNLAHAFQPGPGIGGDAHFDEDERWTNNFREYNLHRVAAHELGHSLGLSHSTDIGALMYPSYTFSGDVQLAQDDIDGIQAIYGRSQNPVQPIGPQTPKACDSKLTFDAITTIRGEVMFFKDRFYMRTNPFYPEVELNFISVFWPQLPNGLEAAYEFADRDEVRFFKGNKYWAVQGQNVLHGYPKDIYSSFGFPRTVKHIDAALSEENTGKTYFFVANKYWRYDEYKRSMDPGYPKMIAHDFPGIGHKVDAVFMKDGFFYFFHGTRQYKFDPKTKRILTLQKANSWFNCRKN

SEQ ID NO: 115 - protein, 450 aa, Artificial Sequence
  MMP-1 variant D156A
FPATLETQEQDVDLVQKYLEKYYNLKNDGRQVEKRRNSGPVVEKLKQMQEFFGLKVTGKPDAETLKVMKQPRCGVPDVAQFVLTEGNPRWEQTHLTYRIENYTPDLPRADVDHAIEKAFQLWSNVTPLTFTKVSEGQADIMISFVRGDHRDNSPFAGPGGNLAHAFQPGPGIGGDAHFDEDERWTNNFREYNLHRVAAHELGHSLGLSHSTDIGALMYPSYTFSGDVQLAQDDIDGIQAIYGRSQNPVQPIGPQTPKACDSKLTFDAITTIRGEVMFFKDRFYMRTNPFYPEVELNFISVFWPQLPNGLEAAYEFADRDEVRFFKGNKYWAVQGQNVLHGYPKDIYSSFGFPRTVKHIDAALSEENTGKTYFFVANKYWRYDEYKRSMDPGYPKMIAHDFPGIGHKVDAVFMKDGFFYFFHGTRQYKFDPKTKRILTLQKANSWFNCRKN

SEQ ID NO: 116 - protein, 450 aa, Artificial Sequence
  MMP-1 variant D156P
FPATLETQEQDVDLVQKYLEKYYNLKNDGRQVEKRRNSGPVVEKLKQMQEFFGLKVTGKPDAETLKVMKQPRCGVPDVAQFVLTEGNPRWEQTHLTYRIENYTPDLPRADVDHAIEKAFQLWSNVTPLTFTKVSEGQADIMISFVRGDHRDNSPFPGPGGNLAHAFQPGPGIGGDAHFDEDERWTNNFREYNLHRVAAHELGHSLGLSHSTDIGALMYPSYTFSGDVQLAQDDIDGIQAIYGRSQNPVQPIGPQTPKACDSKLTFDAITTIRGEVMFFKDRFYMRTNPFYPEVELNFISVFWPQLPNGLEAAYEFADRDEVRFFKGNKYWAVQGQNVLHGYPKDIYSSFGFPRTVKHIDAALSEENTGKTYFFVANKYWRYDEYKRSMDPGYPKMIAHDFPGIGHKVDAVFMKDGFFYFFHGTRQYKFDPKTKRILTLQKANSWFNCRKN

SEQ ID NO: 117 - protein, 450 aa, Artificial Sequence
  MMP-1 variant G159D
FPATLETQEQDVDLVQKYLEKYYNLKNDGRQVEKRRNSGPVVEKLKQMQEFFGLKVTGKPDAETLKVMKQPRCGVPDVAQFVLTEGNPRWEQTHLTYRIENYTPDLPRADVDHAIEKAFQLWSNVTPLTFTKVSEGQADIMISFVRGDHRDNSPFDGPDGNLAHAFQPGPGIGGDAHFDEDERWTNNFREYNLHRVAAHELGHSLGLSHSTDIGALMYPSYTFSGDVQLAQDDIDGIQAIYGRSQNPVQPIGPQTPKACDSKLTFDAITTIRGEVMFFKDRFYMRTNPFYPEVELNFISVFWPQLPNGLEAAYEFADRDEVRFFKGNKYWAVQGQNVLHGYPKDIYSSFGFPRTVKHIDAALSEENTGKTYFFVANKYWRYDEYKRSMDPGYPKMIAHDFPGIGHKVDAVFMKDGFFYFFHGTRQYKFDPKTKRILTLQKANSWFNCRKN

SEQ ID NO: 118 - protein, 450 aa, Artificial Sequence
  MMP-1 variant G159E
FPATLETQEQDVDLVQKYLEKYYNLKNDGRQVEKRRNSGPVVEKLKQMQEFFGLKVTGKPDAETLKVMKQPRCGVPDVAQFVLTEGNPRWEQTHLTYRIENYTPDLPRADVDHAIEKAFQLWSNVTPLTFTKVSEGQADIMISFVRGDHRDNSPFDGPEGNLAHAFQPGPGIGGDAHFDEDERWTNNFREYNLHRVAAHELGHSLGLSHSTDIGALMYPSYTFSGDVQLAQDDIDGIQAIYGRSQNPVQPIGPQTPKACDSKLTFDAITTIRGEVMFFKDRFYMRTNPFYPEVELNFISVFWPQLPNGLEAAYEFADRDEVRFFKGNKYWAVQGQNVLHGYPKDIYSSFGFPRTVKHIDAALSEENTGKTYFFVANKYWRYDEYKRSMDPGYPKMIAHDFPGIGHKVDAVFMKDGFFYFFHGTRQYKFDPKTKRILTLQKANSWFNCRKN

SEQ ID NO: 119 - protein, 450 aa, Artificial Sequence
  MMP-1 variant G159H
FPATLETQEQDVDLVQKYLEKYYNLKNDGRQVEKRRNSGPVVEKLKQMQEFFGLKVTGKPDAETLKVMKQPRCGVPDVAQFVLTEGNPRWEQTHLTYRIENYTPDLPRADVDHAIEKAFQLWSNVTPLTFTKVSEGQADIMISFVRGDHRDNSPFDGPHGNLAHAFQPGPGIGGDAHFDEDERWTNNFREYNLHRVAAHELGHSLGLSHSTDIGALMYPSYTFSGDVQLAQDDIDGIQAIYGRSQNPVQPIGPQTPKACDSKLTFDAITTIRGEVMFFKDRFYMRTNPFYPEVELNFISVFWPQLPNGLEAAYEFADRDEVRFFKGNKYWAVQGQNVLHGYPKDIYSSFGFPRTVKHIDAALSEENTGKTYFFVANKYWRYDEYKRSMDPGYPKMIAHDFPGIGHKVDAVFMKDGFFYFFHGTRQYKFDPKTKRILTLQKANSWFNCRKN

SEQ ID NO: 120 - protein, 450 aa, Artificial Sequence
  MMP-1 variant G159K
FPATLETQEQDVDLVQKYLEKYYNLKNDGRQVEKRRNSGPVVEKLKQMQEFFGLKVTGKPDAETLKVMKQPRCGVPDVAQFVLTEGNPRWEQTHLTYRIENYTPDLPRADVDHAIEKAFQLWSNVTPLTFTKVSEGQADIMISFVRGDHRDNSPFDGPKGNLAHAFQPGPGIGGDAHFDEDERWTNNFREYNLHRVAAHELGHSLGLSHSTDIGALMYPSYTFSGDVQLAQDDIDGIQAIYGRSQNPVQPIGPQTPKACDSKLTFDAITTIRGEVMFFKDRFYMRTNPFYPEVELNFISVFWPQLPNGLEAAYEFADRDEVRFFKGNKYWAVQGQNVLHGYPKDIYSSFGFPRTVKHIDAALSEENTGKTYFFVANKYWRYDEYKRSMDPGYPKMIAHDFPGIGHKVDAVFMKDGFFYFFHGTRQYKFDPKTKRILTLQKANSWFNCRKN

SEQ ID NO: 121 - protein, 450 aa, Artificial Sequence
  MMP-1 variant G159R
FPATLETQEQDVDLVQKYLEKYYNLKNDGRQVEKRRNSGPVVEKLKQMQEFFGLKVTGKPDAETLKVMKQPRCGVPDVAQFVLTEGNPRWEQTHLTYRIENYTPDLPRADVDHAIEKAFQLWSNVTPLTFTKVSEGQADIMISFVRGDHRDNSPFDGPRGNLAHAFQPGPGIGGDAHFDEDERWTNNFREYNLHRVAAHELGHSLGLSHSTDIGALMYPSYTFSGDVQLAQDDIDGIQAIYGRSQNPVQPIGPQTPKACDSKLTFDAITTIRGEVMFFKDRFYMRTNPFYPEVELNFISVFWPQLPNGLEAAYEFADRDEVRFFKGNKYWAVQGQNVLHGYPKDIYSSFGFPRTVKHIDAALSEENTGKTYFFVANKYWRYDEYKRSMDPGYPKMIAHDFPGIGHKVDAVFMKDGFFYFFHGTRQYKFDPKTKRILTLQKANSWFNCRKN

SEQ ID NO: 122 - protein, 450 aa, Artificial Sequence
  MMP-1 variant G159C
FPATLETQEQDVDLVQKYLEKYYNLKNDGRQVEKRRNSGPVVEKLKQMQEFFGLKVTGKPDAETLKVMKQPRCGVPDVAQFVLTEGNPRWEQTHLTYRIENYTPDLPRADVDHAIEKAFQLWSNVTPLTFTKVSEGQADIMISFVRGDHRDNSPFDGPCGNLAHAFQPGPGIGGDAHFDEDERWTNNFREYNLHRVAAHELGHSLGLSHSTDIGALMYPSYTFSGDVQLAQDDIDGIQAIYGRSQNPVQPIGPQTPKACDSKLTFDAITTIRGEVMFFKDRFYMRTNPFYPEVELNFISVFWPQLPNGLEAAYEFADRDEVRFFKGNKYWAVQGQNVLHGYPKDIYSSFGFPRTVKHIDAALSEENTGKTYFFVANKYWRYDEYKRSMDPGYPKMIAHDFPGIGHKVDAVFMKDGFFYFFHGTRQYKFDPKTKRILTLQKANSWFNCRKN

SEQ ID NO: 123 - protein, 450 aa, Artificial Sequence
  MMP-1 variant G159N
FPATLETQEQDVDLVQKYLEKYYNLKNDGRQVEKRRNSGPVVEKLKQMQEFFGLKVTGKPDAETLKVMKQPRCGVPDVAQFVLTEGNPRWEQTHLTYRIENYTPDLPRADVDHAIEKAFQLWSNVTPLTFTKVSEGQADIMISFVRGDHRDNSPFDGPNGNLAHAFQPGPGIGGDAHFDEDERWTNNFREYNLHRVAAHELGHSLGLSHSTDIGALMYPSYTFSGDVQLAQDDIDGIQAIYGRSQNPVQPIGPQTPKACDSKLTFDAITTIRGEVMFFKDRFYMRTNPFYPEVELNFISVFWPQLPNGLEAAYEFADRDEVRFFKGNKYWAVQGQNVLHGYPKDIYSSFGFPRTVKHIDAALSEENTGKTYFFVANKYWRYDEYKRSMDPGYPKMIAHDFPGIGHKVDAVFMKDGFFYFFHGTRQYKFDPKTKRILTLQKANSWFNCRKN

SEQ ID NO: 124 - protein, 450 aa, Artificial Sequence
  MMP-1 variant G159Q
FPATLETQEQDVDLVQKYLEKYYNLKNDGRQVEKRRNSGPVVEKLKQMQEFFGLKVTGKPDAETLKVMKQPRCGVPDVAQFVLTEGNPRWEQTHLTYRIENYTPDLPRADVDHAIEKAFQLWSNVTPLTFTKVSEGQADIMISFVRGDHRDNSPFDGPQGNLAHAFQPGPGIGGDAHFDEDERWTNNFREYNLHRVAAHELGHSLGLSHSTDIGALMYPSYTFSGDVQLAQDDIDGIQAIYGRSQNPVQPIGPQTPKACDSKLTFDAITTIRGEVMFFKDRFYMRTNPFYPEVELNFISVFWPQLPNGLEAAYEFADRDEVRFFKGNKYWAVQGQNVLHGYPKDIYSSFGFPRTVKHIDAALSEENTGKTYFFVANKYWRYDEYKRSMDPGYPKMIAHDFPGIGHKVDAVFMKDGFFYFFHGTRQYKFDPKTKRILTLQKANSWFNCRKN

SEQ ID NO: 125 - protein, 450 aa, Artificial Sequence
  MMP-1 variant G159T
FPATLETQEQDVDLVQKYLEKYYNLKNDGRQVEKRRNSGPVVEKLKQMQEFFGLKVTGKPDAETLKVMKQPRCGVPDVAQFVLTEGNPRWEQTHLTYRIENYTPDLPRADVDHAIEKAFQLWSNVTPLTFTKVSEGQADIMISFVRGDHRDNSPFDGPTGNLAHAFQPGPGIGGDAHFDEDERWTNNFREYNLHRVAAHELGHSLGLSHSTDIGALMYPSYTFSGDVQLAQDDIDGIQAIYGRSQNPVQPIGPQTPKACDSKLTFDAITTIRGEVMFFKDRFYMRTNPFYPEVELNFISVFWPQLPNGLEAAYEFADRDEVRFFKGNKYWAVQGQNVLHGYPKDIYSSFGFPRTVKHIDAALSEENTGKTYFFVANKYWRYDEYKRSMDPGYPKMIAHDFPGIGHKVDAVFMKDGFFYFFHGTRQYKFDPKTKRILTLQKANSWFNCRKN

SEQ ID NO: 126 - protein, 450 aa, Artificial Sequence
  MMP-1 variant G159Y
FPATLETQEQDVDLVQKYLEKYYNLKNDGRQVEKRRNSGPVVEKLKQMQEFFGLKVTGKPDAETLKVMKQPRCGVPDVAQFVLTEGNPRWEQTHLTYRIENYTPDLPRADVDHAIEKAFQLWSNVTPLTFTKVSEGQADIMISFVRGDHRDNSPFDGPYGNLAHAFQPGPGIGGDAHFDEDERWTNNFREYNLHRVAAHELGHSLGLSHSTDIGALMYPSYTFSGDVQLAQDDIDGIQAIYGRSQNPVQPIGPQTPKACDSKLTFDAITTIRGEVMFFKDRFYMRTNPFYPEVELNFISVFWPQLPNGLEAAYEFADRDEVRFFKGNKYWAVQGQNVLHGYPKDIYSSFGFPRTVKHIDAALSEENTGKTYFFVANKYWRYDEYKRSMDPGYPKMIAHDFPGIGHKVDAVFMKDGFFYFFHGTRQYKFDPKTKRILTLQKANSWFNCRKN

SEQ ID NO: 127 - protein, 450 aa, Artificial Sequence
  MMP-1 variant G159S
FPATLETQEQDVDLVQKYLEKYYNLKNDGRQVEKRRNSGPVVEKLKQMQEFFGLKVTGKPDAETLKVMKQPRCGVPDVAQFVLTEGNPRWEQTHLTYRIENYTPDLPRADVDHAIEKAFQLWSNVTPLTFTKVSEGQADIMISFVRGDHRDNSPFDGPSGNLAHAFQPGPGIGGDAHFDEDERWTNNFREYNLHRVAAHELGHSLGLSHSTDIGALMYPSYTFSGDVQLAQDDIDGIQAIYGRSQNPVQPIGPQTPKACDSKLTFDAITTIRGEVMFFKDRFYMRTNPFYPEVELNFISVFWPQLPNGLEAAYEFADRDEVRFFKGNKYWAVQGQNVLHGYPKDIYSSFGFPRTVKHIDAALSEENTGKTYFFVANKYWRYDEYKRSMDPGYPKMIAHDFPGIGHKVDAVFMKDGFFYFFHGTRQYKFDPKTKRILTLQKANSWFNCRKN

SEQ ID NO: 128 - protein, 450 aa, Artificial Sequence
  MMP-1 variant G159F
FPATLETQEQDVDLVQKYLEKYYNLKNDGRQVEKRRNSGPVVEKLKQMQEFFGLKVTGKPDAETLKVMKQPRCGVPDVAQFVLTEGNPRWEQTHLTYRIENYTPDLPRADVDHAIEKAFQLWSNVTPLTFTKVSEGQADIMISFVRGDHRDNSPFDGPFGNLAHAFQPGPGIGGDAHFDEDERWTNNFREYNLHRVAAHELGHSLGLSHSTDIGALMYPSYTFSGDVQLAQDDIDGIQAIYGRSQNPVQPIGPQTPKACDSKLTFDAITTIRGEVMFFKDRFYMRTNPFYPEVELNFISVFWPQLPNGLEAAYEFADRDEVRFFKGNKYWAVQGQNVLHGYPKDIYSSFGFPRTVKHIDAALSEENTGKTYFFVANKYWRYDEYKRSMDPGYPKMIAHDFPGIGHKVDAVFMKDGFFYFFHGTRQYKFDPKTKRILTLQKANSWFNCRKN

SEQ ID NO: 129 - protein, 450 aa, Artificial Sequence
  MMP-1 variant G159M
FPATLETQEQDVDLVQKYLEKYYNLKNDGRQVEKRRNSGPVVEKLKQMQEFFGLKVTGKPDAETLKVMKQPRCGVPDVAQFVLTEGNPRWEQTHLTYRIENYTPDLPRADVDHAIEKAFQLWSNVTPLTFTKVSEGQADIMISFVRGDHRDNSPFDGPMGNLAHAFQPGPGIGGDAHFDEDERWTNNFREYNLHRVAAHELGHSLGLSHSTDIGALMYPSYTFSGDVQLAQDDIDGIQAIYGRSQNPVQPIGPQTPKACDSKLTFDAITTIRGEVMFFKDRFYMRTNPFYPEVELNFISVFWPQLPNGLEAAYEFADRDEVRFFKGNKYWAVQGQNVLHGYPKDIYSSFGFPRTVKHIDAALSEENTGKTYFFVANKYWRYDEYKRSMDPGYPKMIAHDFPGIGHKVDAVFMKDGFFYFFHGTRQYKFDPKTKRILTLQKANSWFNCRKN

SEQ ID NO: 130 - protein, 450 aa, Artificial Sequence
  MMP-1 variant G159W
FPATLETQEQDVDLVQKYLEKYYNLKNDGRQVEKRRNSGPVVEKLKQMQEFFGLKVTGKPDAETLKVMKQPRCGVPDVAQFVLTEGNPRWEQTHLTYRIENYTPDLPRADVDHAIEKAFQLWSNVTPLTFTKVSEGQADIMISFVRGDHRDNSPFDGPWGNLAHAFQPGPGIGGDAHFDEDERWTNNFREYNLHRVAAHELGHSLGLSHSTDIGALMYPSYTFSGDVQLAQDDIDGIQAIYGRSQNPVQPIGPQTPKACDSKLTFDAITTIRGEVMFFKDRFYMRTNPFYPEVELNFISVFWPQLPNGLEAAYEFADRDEVRFFKGNKYWAVQGQNVLHGYPKDIYSSFGFPRTVKHIDAALSEENTGKTYFFVANKYWRYDEYKRSMDPGYPKMIAHDFPGIGHKVDAVFMKDGFFYFFHGTRQYKFDPKTKRILTLQKANSWFNCRKN

SEQ ID NO: 131 - protein, 450 aa, Artificial Sequence
  MMP-1 variant G159I
FPATLETQEQDVDLVQKYLEKYYNLKNDGRQVEKRRNSGPVVEKLKQMQEFFGLKVTGKPDAETLKVMKQPRCGVPDVAQFVLTEGNPRWEQTHLTYRIENYTPDLPRADVDHAIEKAFQLWSNVTPLTFTKVSEGQADIMISFVRGDHRDNSPFDGPIGNLAHAFQPGPGIGGDAHFDEDERWTNNFREYNLHRVAAHELGHSLGLSHSTDIGALMYPSYTFSGDVQLAQDDIDGIQAIYGRSQNPVQPIGPQTPKACDSKLTFDAITTIRGEVMFFKDRFYMRTNPFYPEVELNFISVFWPQLPNGLEAAYEFADRDEVRFFKGNKYWAVQGQNVLHGYPKDIYSSFGFPRTVKHIDAALSEENTGKTYFFVANKYWRYDEYKRSMDPGYPKMIAHDFPGIGHKVDAVFMKDGFFYFFHGTRQYKFDPKTKRILTLQKANSWFNCRKN

SEQ ID NO: 132 - protein, 450 aa, Artificial Sequence
  MMP-1 variant G159V
FPATLETQEQDVDLVQKYLEKYYNLKNDGRQVEKRRNSGPVVEKLKQMQEFFGLKVTGKPDAETLKVMKQPRCGVPDVAQFVLTEGNPRWEQTHLTYRIENYTPDLPRADVDHAIEKAFQLWSNVTPLTFTKVSEGQADIMISFVRGDHRDNSPFDGPVGNLAHAFQPGPGIGGDAHFDEDERWTNNFREYNLHRVAAHELGHSLGLSHSTDIGALMYPSYTFSGDVQLAQDDIDGIQAIYGRSQNPVQPIGPQTPKACDSKLTFDAITTIRGEVMFFKDRFYMRTNPFYPEVELNFISVFWPQLPNGLEAAYEFADRDEVRFFKGNKYWAVQGQNVLHGYPKDIYSSFGFPRTVKHIDAALSEENTGKTYFFVANKYWRYDEYKRSMDPGYPKMIAHDFPGIGHKVDAVFMKDGFFYFFHGTRQYKFDPKTKRILTLQKANSWFNCRKN

SEQ ID NO: 133 - protein, 450 aa, Artificial Sequence
  MMP-1 variant G159L
FPATLETQEQDVDLVQKYLEKYYNLKNDGRQVEKRRNSGPVVEKLKQMQEFFGLKVTGKPDAETLKVMKQPRCGVPDVAQFVLTEGNPRWEQTHLTYRIENYTPDLPRADVDHAIEKAFQLWSNVTPLTFTKVSEGQADIMISFVRGDHRDNSPFDGPLGNLAHAFQPGPGIGGDAHFDEDERWTNNFREYNLHRVAAHELGHSLGLSHSTDIGALMYPSYTFSGDVQLAQDDIDGIQAIYGRSQNPVQPIGPQTPKACDSKLTFDAITTIRGEVMFFKDRFYMRTNPFYPEVELNFISVFWPQLPNGLEAAYEFADRDEVRFFKGNKYWAVQGQNVLHGYPKDIYSSFGFPRTVKHIDAALSEENTGKTYFFVANKYWRYDEYKRSMDPGYPKMIAHDFPGIGHKVDAVFMKDGFFYFFHGTRQYKFDPKTKRILTLQKANSWFNCRKN

SEQ ID NO: 134 - protein, 450 aa, Artificial Sequence
  MMP-1 variant G159A
FPATLETQEQDVDLVQKYLEKYYNLKNDGRQVEKRRNSGPVVEKLKQMQEFFGLKVTGKPDAETLKVMKQPRCGVPDVAQFVLTEGNPRWEQTHLTYRIENYTPDLPRADVDHAIEKAFQLWSNVTPLTFTKVSEGQADIMISFVRGDHRDNSPFDGPAGNLAHAFQPGPGIGGDAHFDEDERWTNNFREYNLHRVAAHELGHSLGLSHSTDIGALMYPSYTFSGDVQLAQDDIDGIQAIYGRSQNPVQPIGPQTPKACDSKLTFDAITTIRGEVMFFKDRFYMRTNPFYPEVELNFISVFWPQLPNGLEAAYEFADRDEVRFFKGNKYWAVQGQNVLHGYPKDIYSSFGFPRTVKHIDAALSEENTGKTYFFVANKYWRYDEYKRSMDPGYPKMIAHDFPGIGHKVDAVFMKDGFFYFFHGTRQYKFDPKTKRILTLQKANSWFNCRKN

SEQ ID NO: 135 - protein, 450 aa, Artificial Sequence
  MMP-1 variant G159P
FPATLETQEQDVDLVQKYLEKYYNLKNDGRQVEKRRNSGPVVEKLKQMQEFFGLKVTGKPDAETLKVMKQPRCGVPDVAQFVLTEGNPRWEQTHLTYRIENYTPDLPRADVDHAIEKAFQLWSNVTPLTFTKVSEGQADIMISFVRGDHRDNSPFDGPPGNLAHAFQPGPGIGGDAHFDEDERWTNNFREYNLHRVAAHELGHSLGLSHSTDIGALMYPSYTFSGDVQLAQDDIDGIQAIYGRSQNPVQPIGPQTPKACDSKLTFDAITTIRGEVMFFKDRFYMRTNPFYPEVELNFISVFWPQLPNGLEAAYEFADRDEVRFFKGNKYWAVQGQNVLHGYPKDIYSSFGFPRTVKHIDAALSEENTGKTYFFVANKYWRYDEYKRSMDPGYPKMIAHDFPGIGHKVDAVFMKDGFFYFFHGTRQYKFDPKTKRILTLQKANSWFNCRKN

SEQ ID NO: 136 - protein, 450 aa, Artificial Sequence
  MMP-1 variant A176D
FPATLETQEQDVDLVQKYLEKYYNLKNDGRQVEKRRNSGPVVEKLKQMQEFFGLKVTGKPDAETLKVMKQPRCGVPDVAQFVLTEGNPRWEQTHLTYRIENYTPDLPRADVDHAIEKAFQLWSNVTPLTFTKVSEGQADIMISFVRGDHRDNSPFDGPGGNLAHAFQPGPGIGGDDHFDEDERWTNNFREYNLHRVAAHELGHSLGLSHSTDIGALMYPSYTFSGDVQLAQDDIDGIQAIYGRSQNPVQPIGPQTPKACDSKLTFDAITTIRGEVMFFKDRFYMRTNPFYPEVELNFISVFWPQLPNGLEAAYEFADRDEVRFFKGNKYWAVQGQNVLHGYPKDIYSSFGFPRTVKHIDAALSEENTGKTYFFVANKYWRYDEYKRSMDPGYPKMIAHDFPGIGHKVDAVFMKDGFFYFFHGTRQYKFDPKTKRILTLQKANSWFNCRKN

SEQ ID NO: 137 - protein, 450 aa, Artificial Sequence
  MMP-1 variant A176E
FPATLETQEQDVDLVQKYLEKYYNLKNDGRQVEKRRNSGPVVEKLKQMQEFFGLKVTGKPDAETLKVMKQPRCGVPDVAQFVLTEGNPRWEQTHLTYRIENYTPDLPRADVDHAIEKAFQLWSNVTPLTFTKVSEGQADIMISFVRGDHRDNSPFDGPGGNLAHAFQPGPGIGGDEHFDEDERWTNNFREYNLHRVAAHELGHSLGLSHSTDIGALMYPSYTFSGDVQLAQDDIDGIQAIYGRSQNPVQPIGPQTPKACDSKLTFDAITTIRGEVMFFKDRFYMRTNPFYPEVELNFISVFWPQLPNGLEAAYEFADRDEVRFFKGNKYWAVQGQNVLHGYPKDIYSSFGFPRTVKHIDAALSEENTGKTYFFVANKYWRYDEYKRSMDPGYPKMIAHDFPGIGHKVDAVFMKDGFFYFFHGTRQYKFDPKTKRILTLQKANSWFNCRKN

SEQ ID NO: 138 - protein, 450 aa, Artificial Sequence
  MMP-1 variant A176H
FPATLETQEQDVDLVQKYLEKYYNLKNDGRQVEKRRNSGPVVEKLKQMQEFFGLKVTGKPDAETLKVMKQPRCGVPDVAQFVLTEGNPRWEQTHLTYRIENYTPDLPRADVDHAIEKAFQLWSNVTPLTFTKVSEGQADIMISFVRGDHRDNSPFDGPGGNLAHAFQPGPGIGGDHHFDEDERWTNNFREYNLHRVAAHELGHSLGLSHSTDIGALMYPSYTFSGDVQLAQDDIDGIQAIYGRSQNPVQPIGPQTPKACDSKLTFDAITTIRGEVMFFKDRFYMRTNPFYPEVELNFISVFWPQLPNGLEAAYEFADRDEVRFFKGNKYWAVQGQNVLHGYPKDIYSSFGFPRTVKHIDAALSEENTGKTYFFVANKYWRYDEYKRSMDPGYPKMIAHDFPGIGHKVDAVFMKDGFFYFFHGTRQYKFDPKTKRILTLQKANSWFNCRKN

SEQ ID NO: 139 - protein, 450 aa, Artificial Sequence
  MMP-1 variant A176K
FPATLETQEQDVDLVQKYLEKYYNLKNDGRQVEKRRNSGPVVEKLKQMQEFFGLKVTGKPDAETLKVMKQPRCGVPDVAQFVLTEGNPRWEQTHLTYRIENYTPDLPRADVDHAIEKAFQLWSNVTPLTFTKVSEGQADIMISFVRGDHRDNSPFDGPGGNLAHAFQPGPGIGGDKHFDEDERWTNNFREYNLHRVAAHELGHSLGLSHSTDIGALMYPSYTFSGDVQLAQDDIDGIQAIYGRSQNPVQPIGPQTPKACDSKLTFDAITTIRGEVMFFKDRFYMRTNPFYPEVELNFISVFWPQLPNGLEAAYEFADRDEVRFFKGNKYWAVQGQNVLHGYPKDIYSSFGFPRTVKHIDAALSEENTGKTYFFVANKYWRYDEYKRSMDPGYPKMIAHDFPGIGHKVDAVFMKDGFFYFFHGTRQYKFDPKTKRILTLQKANSWFNCRKN

SEQ ID NO: 140 - protein, 450 aa, Artificial Sequence
  MMP-1 variant A176R
FPATLETQEQDVDLVQKYLEKYYNLKNDGRQVEKRRNSGPVVEKLKQMQEFFGLKVTGKPDAETLKVMKQPRCGVPDVAQFVLTEGNPRWEQTHLTYRIENYTPDLPRADVDHAIEKAFQLWSNVTPLTFTKVSEGQADIMISFVRGDHRDNSPFDGPGGNLAHAFQPGPGIGGDRHFDEDERWTNNFREYNLHRVAAHELGHSLGLSHSTDIGALMYPSYTFSGDVQLAQDDIDGIQAIYGRSQNPVQPIGPQTPKACDSKLTFDAITTIRGEVMFFKDRFYMRTNPFYPEVELNFISVFWPQLPNGLEAAYEFADRDEVRFFKGNKYWAVQGQNVLHGYPKDIYSSFGFPRTVKHIDAALSEENTGKTYFFVANKYWRYDEYKRSMDPGYPKMIAHDFPGIGHKVDAVFMKDGFFYFFHGTRQYKFDPKTKRILTLQKANSWFNCRKN

SEQ ID NO: 141 - protein, 450 aa, Artificial Sequence
  MMP-1 variant A176C
FPATLETQEQDVDLVQKYLEKYYNLKNDGRQVEKRRNSGPVVEKLKQMQEFFGLKVTGKPDAETLKVMKQPRCGVPDVAQFVLTEGNPRWEQTHLTYRIENYTPDLPRADVDHAIEKAFQLWSNVTPLTFTKVSEGQADIMISFVRGDHRDNSPFDGPGGNLAHAFQPGPGIGGDCHFDEDERWTNNFREYNLHRVAAHELGHSLGLSHSTDIGALMYPSYTFSGDVQLAQDDIDGIQAIYGRSQNPVQPIGPQTPKACDSKLTFDAITTIRGEVMFFKDRFYMRTNPFYPEVELNFISVFWPQLPNGLEAAYEFADRDEVRFFKGNKYWAVQGQNVLHGYPKDIYSSFGFPRTVKHIDAALSEENTGKTYFFVANKYWRYDEYKRSMDPGYPKMIAHDFPGIGHKVDAVFMKDGFFYFFHGTRQYKFDPKTKRILTLQKANSWFNCRKN

SEQ ID NO: 142 - protein, 450 aa, Artificial Sequence
  MMP-1 variant A176N
FPATLETQEQDVDLVQKYLEKYYNLKNDGRQVEKRRNSGPVVEKLKQMQEFFGLKVTGKPDAETLKVMKQPRCGVPDVAQFVLTEGNPRWEQTHLTYRIENYTPDLPRADVDHAIEKAFQLWSNVTPLTFTKVSEGQADIMISFVRGDHRDNSPFDGPGGNLAHAFQPGPGIGGDNHFDEDERWTNNFREYNLHRVAAHELGHSLGLSHSTDIGALMYPSYTFSGDVQLAQDDIDGIQAIYGRSQNPVQPIGPQTPKACDSKLTFDAITTIRGEVMFFKDRFYMRTNPFYPEVELNFISVFWPQLPNGLEAAYEFADRDEVRFFKGNKYWAVQGQNVLHGYPKDIYSSFGFPRTVKHIDAALSEENTGKTYFFVANKYWRYDEYKRSMDPGYPKMIAHDFPGIGHKVDAVFMKDGFFYFFHGTRQYKFDPKTKRILTLQKANSWFNCRKN

SEQ ID NO: 143 - protein, 450 aa, Artificial Sequence
  MMP-1 variant A176Q
FPATLETQEQDVDLVQKYLEKYYNLKNDGRQVEKRRNSGPVVEKLKQMQEFFGLKVTGKPDAETLKVMKQPRCGVPDVAQFVLTEGNPRWEQTHLTYRIENYTPDLPRADVDHAIEKAFQLWSNVTPLTFTKVSEGQADIMISFVRGDHRDNSPFDGPGGNLAHAFQPGPGIGGDQHFDEDERWTNNFREYNLHRVAAHELGHSLGLSHSTDIGALMYPSYTFSGDVQLAQDDIDGIQAIYGRSQNPVQPIGPQTPKACDSKLTFDAITTIRGEVMFFKDRFYMRTNPFYPEVELNFISVFWPQLPNGLEAAYEFADRDEVRFFKGNKYWAVQGQNVLHGYPKDIYSSFGFPRTVKHIDAALSEENTGKTYFFVANKYWRYDEYKRSMDPGYPKMIAHDFPGIGHKVDAVFMKDGFFYFFHGTRQYKFDPKTKRILTLQKANSWFNCRKN

SEQ ID NO: 144 - protein, 450 aa, Artificial Sequence
  MMP-1 variant A176T
FPATLETQEQDVDLVQKYLEKYYNLKNDGRQVEKRRNSGPVVEKLKQMQEFFGLKVTGKPDAETLKVMKQPRCGVPDVAQFVLTEGNPRWEQTHLTYRIENYTPDLPRADVDHAIEKAFQLWSNVTPLTFTKVSEGQADIMISFVRGDHRDNSPFDGPGGNLAHAFQPGPGIGGDTHFDEDERWTNNFREYNLHRVAAHELGHSLGLSHSTDIGALMYPSYTFSGDVQLAQDDIDGIQAIYGRSQNPVQPIGPQTPKACDSKLTFDAITTIRGEVMFFKDRFYMRTNPFYPEVELNFISVFWPQLPNGLEAAYEFADRDEVRFFKGNKYWAVQGQNVLHGYPKDIYSSFGFPRTVKHIDAALSEENTGKTYFFVANKYWRYDEYKRSMDPGYPKMIAHDFPGIGHKVDAVFMKDGFFYFFHGTRQYKFDPKTKRILTLQKANSWFNCRKN

SEQ ID NO: 145 - protein, 450 aa, Artificial Sequence
  MMP-1 variant A176Y
FPATLETQEQDVDLVQKYLEKYYNLKNDGRQVEKRRNSGPVVEKLKQMQEFFGLKVTGKPDAETLKVMKQPRCGVPDVAQFVLTEGNPRWEQTHLTYRIENYTPDLPRADVDHAIEKAFQLWSNVTPLTFTKVSEGQADIMISFVRGDHRDNSPFDGPGGNLAHAFQPGPGIGGDYHFDEDERWTNNFREYNLHRVAAHELGHSLGLSHSTDIGALMYPSYTFSGDVQLAQDDIDGIQAIYGRSQNPVQPIGPQTPKACDSKLTFDAITTIRGEVMFFKDRFYMRTNPFYPEVELNFISVFWPQLPNGLEAAYEFADRDEVRFFKGNKYWAVQGQNVLHGYPKDIYSSFGFPRTVKHIDAALSEENTGKTYFFVANKYWRYDEYKRSMDPGYPKMIAHDFPGIGHKVDAVFMKDGFFYFFHGTRQYKFDPKTKRILTLQKANSWFNCRKN

SEQ ID NO: 146 - protein, 450 aa, Artificial Sequence
  MMP-1 variant A176S
FPATLETQEQDVDLVQKYLEKYYNLKNDGRQVEKRRNSGPVVEKLKQMQEFFGLKVTGKPDAETLKVMKQPRCGVPDVAQFVLTEGNPRWEQTHLTYRIENYTPDLPRADVDHAIEKAFQLWSNVTPLTFTKVSEGQADIMISFVRGDHRDNSPFDGPGGNLAHAFQPGPGIGGDSHFDEDERWTNNFREYNLHRVAAHELGHSLGLSHSTDIGALMYPSYTFSGDVQLAQDDIDGIQAIYGRSQNPVQPIGPQTPKACDSKLTFDAITTIRGEVMFFKDRFYMRTNPFYPEVELNFISVFWPQLPNGLEAAYEFADRDEVRFFKGNKYWAVQGQNVLHGYPKDIYSSFGFPRTVKHIDAALSEENTGKTYFFVANKYWRYDEYKRSMDPGYPKMIAHDFPGIGHKVDAVFMKDGFFYFFHGTRQYKFDPKTKRILTLQKANSWFNCRKN

SEQ ID NO: 147 - protein, 450 aa, Artificial Sequence
  MMP-1 variant A176G
FPATLETQEQDVDLVQKYLEKYYNLKNDGRQVEKRRNSGPVVEKLKQMQEFFGLKVTGKPDAETLKVMKQPRCGVPDVAQFVLTEGNPRWEQTHLTYRIENYTPDLPRADVDHAIEKAFQLWSNVTPLTFTKVSEGQADIMISFVRGDHRDNSPFDGPGGNLAHAFQPGPGIGGDGHFDEDERWTNNFREYNLHRVAAHELGHSLGLSHSTDIGALMYPSYTFSGDVQLAQDDIDGIQAIYGRSQNPVQPIGPQTPKACDSKLTFDAITTIRGEVMFFKDRFYMRTNPFYPEVELNFISVFWPQLPNGLEAAYEFADRDEVRFFKGNKYWAVQGQNVLHGYPKDIYSSFGFPRTVKHIDAALSEENTGKTYFFVANKYWRYDEYKRSMDPGYPKMIAHDFPGIGHKVDAVFMKDGFFYFFHGTRQYKFDPKTKRILTLQKANSWFNCRKN

SEQ ID NO: 148 - protein, 450 aa, Artificial Sequence
  MMP-1 variant A176F
FPATLETQEQDVDLVQKYLEKYYNLKNDGRQVEKRRNSGPVVEKLKQMQEFFGLKVTGKPDAETLKVMKQPRCGVPDVAQFVLTEGNPRWEQTHLTYRIENYTPDLPRADVDHAIEKAFQLWSNVTPLTFTKVSEGQADIMISFVRGDHRDNSPFDGPGGNLAHAFQPGPGIGGDFHFDEDERWTNNFREYNLHRVAAHELGHSLGLSHSTDIGALMYPSYTFSGDVQLAQDDIDGIQAIYGRSQNPVQPIGPQTPKACDSKLTFDAITTIRGEVMFFKDRFYMRTNPFYPEVELNFISVFWPQLPNGLEAAYEFADRDEVRFFKGNKYWAVQGQNVLHGYPKDIYSSFGFPRTVKHIDAALSEENTGKTYFFVANKYWRYDEYKRSMDPGYPKMIAHDFPGIGHKVDAVFMKDGFFYFFHGTRQYKFDPKTKRILTLQKANSWFNCRKN

SEQ ID NO: 149 - protein, 450 aa, Artificial Sequence
  MMP-1 variant A176M
FPATLETQEQDVDLVQKYLEKYYNLKNDGRQVEKRRNSGPVVEKLKQMQEFFGLKVTGKPDAETLKVMKQPRCGVPDVAQFVLTEGNPRWEQTHLTYRIENYTPDLPRADVDHAIEKAFQLWSNVTPLTFTKVSEGQADIMISFVRGDHRDNSPFDGPGGNLAHAFQPGPGIGGDMHFDEDERWTNNFREYNLHRVAAHELGHSLGLSHSTDIGALMYPSYTFSGDVQLAQDDIDGIQAIYGRSQNPVQPIGPQTPKACDSKLTFDAITTIRGEVMFFKDRFYMRTNPFYPEVELNFISVFWPQLPNGLEAAYEFADRDEVRFFKGNKYWAVQGQNVLHGYPKDIYSSFGFPRTVKHIDAALSEENTGKTYFFVANKYWRYDEYKRSMDPGYPKMIAHDFPGIGHKVDAVFMKDGFFYFFHGTRQYKFDPKTKRILTLQKANSWFNCRKN

SEQ ID NO: 150 - protein, 450 aa, Artificial Sequence
  MMP-1 variant A176W
FPATLETQEQDVDLVQKYLEKYYNLKNDGRQVEKRRNSGPVVEKLKQMQEFFGLKVTGKPDAETLKVMKQPRCGVPDVAQFVLTEGNPRWEQTHLTYRIENYTPDLPRADVDHAIEKAFQLWSNVTPLTFTKVSEGQADIMISFVRGDHRDNSPFDGPGGNLAHAFQPGPGIGGDWHFDEDERWTNNFREYNLHRVAAHELGHSLGLSHSTDIGALMYPSYTFSGDVQLAQDDIDGIQAIYGRSQNPVQPIGPQTPKACDSKLTFDAITTIRGEVMFFKDRFYMRTNPFYPEVELNFISVFWPQLPNGLEAAYEFADRDEVRFFKGNKYWAVQGQNVLHGYPKDIYSSFGFPRTVKHIDAALSEENTGKTYFFVANKYWRYDEYKRSMDPGYPKMIAHDFPGIGHKVDAVFMKDGFFYFFHGTRQYKFDPKTKRILTLQKANSWFNCRKN

SEQ ID NO: 151 - protein, 450 aa, Artificial Sequence
  MMP-1 variant A176I
FPATLETQEQDVDLVQKYLEKYYNLKNDGRQVEKRRNSGPVVEKLKQMQEFFGLKVTGKPDAETLKVMKQPRCGVPDVAQFVLTEGNPRWEQTHLTYRIENYTPDLPRADVDHAIEKAFQLWSNVTPLTFTKVSEGQADIMISFVRGDHRDNSPFDGPGGNLAHAFQPGPGIGGDIHFDEDERWTNNFREYNLHRVAAHELGHSLGLSHSTDIGALMYPSYTFSGDVQLAQDDIDGIQAIYGRSQNPVQPIGPQTPKACDSKLTFDAITTIRGEVMFFKDRFYMRTNPFYPEVELNFISVFWPQLPNGLEAAYEFADRDEVRFFKGNKYWAVQGQNVLHGYPKDIYSSFGFPRTVKHIDAALSEENTGKTYFFVANKYWRYDEYKRSMDPGYPKMIAHDFPGIGHKVDAVFMKDGFFYFFHGTRQYKFDPKTKRILTLQKANSWFNCRKN

SEQ ID NO: 152 - protein, 450 aa, Artificial Sequence
  MMP-1 variant A176V
FPATLETQEQDVDLVQKYLEKYYNLKNDGRQVEKRRNSGPVVEKLKQMQEFFGLKVTGKPDAETLKVMKQPRCGVPDVAQFVLTEGNPRWEQTHLTYRIENYTPDLPRADVDHAIEKAFQLWSNVTPLTFTKVSEGQADIMISFVRGDHRDNSPFDGPGGNLAHAFQPGPGIGGDVHFDEDERWTNNFREYNLHRVAAHELGHSLGLSHSTDIGALMYPSYTFSGDVQLAQDDIDGIQAIYGRSQNPVQPIGPQTPKACDSKLTFDAITTIRGEVMFFKDRFYMRTNPFYPEVELNFISVFWPQLPNGLEAAYEFADRDEVRFFKGNKYWAVQGQNVLHGYPKDIYSSFGFPRTVKHIDAALSEENTGKTYFFVANKYWRYDEYKRSMDPGYPKMIAHDFPGIGHKVDAVFMKDGFFYFFHGTRQYKFDPKTKRILTLQKANSWFNCRKN

SEQ ID NO: 153 - protein, 450 aa, Artificial Sequence
  MMP-1 variant A176L
FPATLETQEQDVDLVQKYLEKYYNLKNDGRQVEKRRNSGPVVEKLKQMQEFFGLKVTGKPDAETLKVMKQPRCGVPDVAQFVLTEGNPRWEQTHLTYRIENYTPDLPRADVDHAIEKAFQLWSNVTPLTFTKVSEGQADIMISFVRGDHRDNSPFDGPGGNLAHAFQPGPGIGGDLHFDEDERWTNNFREYNLHRVAAHELGHSLGLSHSTDIGALMYPSYTFSGDVQLAQDDIDGIQAIYGRSQNPVQPIGPQTPKACDSKLTFDAITTIRGEVMFFKDRFYMRTNPFYPEVELNFISVFWPQLPNGLEAAYEFADRDEVRFFKGNKYWAVQGQNVLHGYPKDIYSSFGFPRTVKHIDAALSEENTGKTYFFVANKYWRYDEYKRSMDPGYPKMIAHDFPGIGHKVDAVFMKDGFFYFFHGTRQYKFDPKTKRILTLQKANSWFNCRKN

SEQ ID NO: 154 - protein, 450 aa, Artificial Sequence
  MMP-1 variant A176P
FPATLETQEQDVDLVQKYLEKYYNLKNDGRQVEKRRNSGPVVEKLKQMQEFFGLKVTGKPDAETLKVMKQPRCGVPDVAQFVLTEGNPRWEQTHLTYRIENYTPDLPRADVDHAIEKAFQLWSNVTPLTFTKVSEGQADIMISFVRGDHRDNSPFDGPGGNLAHAFQPGPGIGGDPHFDEDERWTNNFREYNLHRVAAHELGHSLGLSHSTDIGALMYPSYTFSGDVQLAQDDIDGIQAIYGRSQNPVQPIGPQTPKACDSKLTFDAITTIRGEVMFFKDRFYMRTNPFYPEVELNFISVFWPQLPNGLEAAYEFADRDEVRFFKGNKYWAVQGQNVLHGYPKDIYSSFGFPRTVKHIDAALSEENTGKTYFFVANKYWRYDEYKRSMDPGYPKMIAHDFPGIGHKVDAVFMKDGFFYFFHGTRQYKFDPKTKRILTLQKANSWFNCRKN

SEQ ID NO: 155 - protein, 450 aa, Artificial Sequence
  MMP-1 variant D179E
FPATLETQEQDVDLVQKYLEKYYNLKNDGRQVEKRRNSGPVVEKLKQMQEFFGLKVTGKPDAETLKVMKQPRCGVPDVAQFVLTEGNPRWEQTHLTYRIENYTPDLPRADVDHAIEKAFQLWSNVTPLTFTKVSEGQADIMISFVRGDHRDNSPFDGPGGNLAHAFQPGPGIGGDAHFEEDERWTNNFREYNLHRVAAHELGHSLGLSHSTDIGALMYPSYTFSGDVQLAQDDIDGIQAIYGRSQNPVQPIGPQTPKACDSKLTFDAITTIRGEVMFFKDRFYMRTNPFYPEVELNFISVFWPQLPNGLEAAYEFADRDEVRFFKGNKYWAVQGQNVLHGYPKDIYSSFGFPRTVKHIDAALSEENTGKTYFFVANKYWRYDEYKRSMDPGYPKMIAHDFPGIGHKVDAVFMKDGFFYFFHGTRQYKFDPKTKRILTLQKANSWFNCRKN

SEQ ID NO: 156 - protein, 450 aa, Artificial Sequence
  MMP-1 variant D179H
FPATLETQEQDVDLVQKYLEKYYNLKNDGRQVEKRRNSGPVVEKLKQMQEFFGLKVTGKPDAETLKVMKQPRCGVPDVAQFVLTEGNPRWEQTHLTYRIENYTPDLPRADVDHAIEKAFQLWSNVTPLTFTKVSEGQADIMISFVRGDHRDNSPFDGPGGNLAHAFQPGPGIGGDAHFHEDERWTNNFREYNLHRVAAHELGHSLGLSHSTDIGALMYPSYTFSGDVQLAQDDIDGIQAIYGRSQNPVQPIGPQTPKACDSKLTFDAITTIRGEVMFFKDRFYMRTNPFYPEVELNFISVFWPQLPNGLEAAYEFADRDEVRFFKGNKYWAVQGQNVLHGYPKDIYSSFGFPRTVKHIDAALSEENTGKTYFFVANKYWRYDEYKRSMDPGYPKMIAHDFPGIGHKVDAVFMKDGFFYFFHGTRQYKFDPKTKRILTLQKANSWFNCRKN

SEQ ID NO: 157 - protein, 450 aa, Artificial Sequence
  MMP-1 variant D179K
FPATLETQEQDVDLVQKYLEKYYNLKNDGRQVEKRRNSGPVVEKLKQMQEFFGLKVTGKPDAETLKVMKQPRCGVPDVAQFVLTEGNPRWEQTHLTYRIENYTPDLPRADVDHAIEKAFQLWSNVTPLTFTKVSEGQADIMISFVRGDHRDNSPFDGPGGNLAHAFQPGPGIGGDAHFKEDERWTNNFREYNLHRVAAHELGHSLGLSHSTDIGALMYPSYTFSGDVQLAQDDIDGIQAIYGRSQNPVQPIGPQTPKACDSKLTFDAITTIRGEVMFFKDRFYMRTNPFYPEVELNFISVFWPQLPNGLEAAYEFADRDEVRFFKGNKYWAVQGQNVLHGYPKDIYSSFGFPRTVKHIDAALSEENTGKTYFFVANKYWRYDEYKRSMDPGYPKMIAHDFPGIGHKVDAVFMKDGFFYFFHGTRQYKFDPKTKRILTLQKANSWFNCRKN

SEQ ID NO: 158 - protein, 450 aa, Artificial Sequence
  MMP-1 variant D179R
FPATLETQEQDVDLVQKYLEKYYNLKNDGRQVEKRRNSGPVVEKLKQMQEFFGLKVTGKPDAETLKVMKQPRCGVPDVAQFVLTEGNPRWEQTHLTYRIENYTPDLPRADVDHAIEKAFQLWSNVTPLTFTKVSEGQADIMISFVRGDHRDNSPFDGPGGNLAHAFQPGPGIGGDAHFREDERWTNNFREYNLHRVAAHELGHSLGLSHSTDIGALMYPSYTFSGDVQLAQDDIDGIQAIYGRSQNPVQPIGPQTPKACDSKLTFDAITTIRGEVMFFKDRFYMRTNPFYPEVELNFISVFWPQLPNGLEAAYEFADRDEVRFFKGNKYWAVQGQNVLHGYPKDIYSSFGFPRTVKHIDAALSEENTGKTYFFVANKYWRYDEYKRSMDPGYPKMIAHDFPGIGHKVDAVFMKDGFFYFFHGTRQYKFDPKTKRILTLQKANSWFNCRKN

SEQ ID NO: 159 - protein, 450 aa, Artificial Sequence
  MMP-1 variant D179C
FPATLETQEQDVDLVQKYLEKYYNLKNDGRQVEKRRNSGPVVEKLKQMQEFFGLKVTGKPDAETLKVMKQPRCGVPDVAQFVLTEGNPRWEQTHLTYRIENYTPDLPRADVDHAIEKAFQLWSNVTPLTFTKVSEGQADIMISFVRGDHRDNSPFDGPGGNLAHAFQPGPGIGGDAHFCEDERWTNNFREYNLHRVAAHELGHSLGLSHSTDIGALMYPSYTFSGDVQLAQDDIDGIQAIYGRSQNPVQPIGPQTPKACDSKLTFDAITTIRGEVMFFKDRFYMRTNPFYPEVELNFISVFWPQLPNGLEAAYEFADRDEVRFFKGNKYWAVQGQNVLHGYPKDIYSSFGFPRTVKHIDAALSEENTGKTYFFVANKYWRYDEYKRSMDPGYPKMIAHDFPGIGHKVDAVFMKDGFFYFFHGTRQYKFDPKTKRILTLQKANSWFNCRKN

SEQ ID NO: 160 - protein, 450 aa, Artificial Sequence
  MMP-1 variant D179N
FPATLETQEQDVDLVQKYLEKYYNLKNDGRQVEKRRNSGPVVEKLKQMQEFFGLKVTGKPDAETLKVMKQPRCGVPDVAQFVLTEGNPRWEQTHLTYRIENYTPDLPRADVDHAIEKAFQLWSNVTPLTFTKVSEGQADIMISFVRGDHRDNSPFDGPGGNLAHAFQPGPGIGGDAHFNEDERWTNNFREYNLHRVAAHELGHSLGLSHSTDIGALMYPSYTFSGDVQLAQDDIDGIQAIYGRSQNPVQPIGPQTPKACDSKLTFDAITTIRGEVMFFKDRFYMRTNPFYPEVELNFISVFWPQLPNGLEAAYEFADRDEVRFFKGNKYWAVQGQNVLHGYPKDIYSSFGFPRTVKHIDAALSEENTGKTYFFVANKYWRYDEYKRSMDPGYPKMIAHDFPGIGHKVDAVFMKDGFFYFFHGTRQYKFDPKTKRILTLQKANSWFNCRKN

SEQ ID NO: 161 - protein, 450 aa, Artificial Sequence
  MMP-1 variant D179Q
FPATLETQEQDVDLVQKYLEKYYNLKNDGRQVEKRRNSGPVVEKLKQMQEFFGLKVTGKPDAETLKVMKQPRCGVPDVAQFVLTEGNPRWEQTHLTYRIENYTPDLPRADVDHAIEKAFQLWSNVTPLTFTKVSEGQADIMISFVRGDHRDNSPFDGPGGNLAHAFQPGPGIGGDAHFQEDERWTNNFREYNLHRVAAHELGHSLGLSHSTDIGALMYPSYTFSGDVQLAQDDIDGIQAIYGRSQNPVQPIGPQTPKACDSKLTFDAITTIRGEVMFFKDRFYMRTNPFYPEVELNFISVFWPQLPNGLEAAYEFADRDEVRFFKGNKYWAVQGQNVLHGYPKDIYSSFGFPRTVKHIDAALSEENTGKTYFFVANKYWRYDEYKRSMDPGYPKMIAHDFPGIGHKVDAVFMKDGFFYFFHGTRQYKFDPKTKRILTLQKANSWFNCRKN

SEQ ID NO: 162 - protein, 450 aa, Artificial Sequence
  MMP-1 variant D179T
FPATLETQEQDVDLVQKYLEKYYNLKNDGRQVEKRRNSGPVVEKLKQMQEFFGLKVTGKPDAETLKVMKQPRCGVPDVAQFVLTEGNPRWEQTHLTYRIENYTPDLPRADVDHAIEKAFQLWSNVTPLTFTKVSEGQADIMISFVRGDHRDNSPFDGPGGNLAHAFQPGPGIGGDAHFTEDERWTNNFREYNLHRVAAHELGHSLGLSHSTDIGALMYPSYTFSGDVQLAQDDIDGIQAIYGRSQNPVQPIGPQTPKACDSKLTFDAITTIRGEVMFFKDRFYMRTNPFYPEVELNFISVFWPQLPNGLEAAYEFADRDEVRFFKGNKYWAVQGQNVLHGYPKDIYSSFGFPRTVKHIDAALSEENTGKTYFFVANKYWRYDEYKRSMDPGYPKMIAHDFPGIGHKVDAVFMKDGFFYFFHGTRQYKFDPKTKRILTLQKANSWFNCRKN

SEQ ID NO: 163 - protein, 450 aa, Artificial Sequence
  MMP-1 variant D179Y
FPATLETQEQDVDLVQKYLEKYYNLKNDGRQVEKRRNSGPVVEKLKQMQEFFGLKVTGKPDAETLKVMKQPRCGVPDVAQFVLTEGNPRWEQTHLTYRIENYTPDLPRADVDHAIEKAFQLWSNVTPLTFTKVSEGQADIMISFVRGDHRDNSPFDGPGGNLAHAFQPGPGIGGDAHFYEDERWTNNFREYNLHRVAAHELGHSLGLSHSTDIGALMYPSYTFSGDVQLAQDDIDGIQAIYGRSQNPVQPIGPQTPKACDSKLTFDAITTIRGEVMFFKDRFYMRTNPFYPEVELNFISVFWPQLPNGLEAAYEFADRDEVRFFKGNKYWAVQGQNVLHGYPKDIYSSFGFPRTVKHIDAALSEENTGKTYFFVANKYWRYDEYKRSMDPGYPKMIAHDFPGIGHKVDAVFMKDGFFYFFHGTRQYKFDPKTKRILTLQKANSWFNCRKN

SEQ ID NO: 164 - protein, 450 aa, Artificial Sequence
  MMP-1 variant D179S
FPATLETQEQDVDLVQKYLEKYYNLKNDGRQVEKRRNSGPVVEKLKQMQEFFGLKVTGKPDAETLKVMKQPRCGVPDVAQFVLTEGNPRWEQTHLTYRIENYTPDLPRADVDHAIEKAFQLWSNVTPLTFTKVSEGQADIMISFVRGDHRDNSPFDGPGGNLAHAFQPGPGIGGDAHFSEDERWTNNFREYNLHRVAAHELGHSLGLSHSTDIGALMYPSYTFSGDVQLAQDDIDGIQAIYGRSQNPVQPIGPQTPKACDSKLTFDAITTIRGEVMFFKDRFYMRTNPFYPEVELNFISVFWPQLPNGLEAAYEFADRDEVRFFKGNKYWAVQGQNVLHGYPKDIYSSFGFPRTVKHIDAALSEENTGKTYFFVANKYWRYDEYKRSMDPGYPKMIAHDFPGIGHKVDAVFMKDGFFYFFHGTRQYKFDPKTKRILTLQKANSWFNCRKN

SEQ ID NO: 165 - protein, 450 aa, Artificial Sequence
  MMP-1 variant D179G
FPATLETQEQDVDLVQKYLEKYYNLKNDGRQVEKRRNSGPVVEKLKQMQEFFGLKVTGKPDAETLKVMKQPRCGVPDVAQFVLTEGNPRWEQTHLTYRIENYTPDLPRADVDHAIEKAFQLWSNVTPLTFTKVSEGQADIMISFVRGDHRDNSPFDGPGGNLAHAFQPGPGIGGDAHFGEDERWTNNFREYNLHRVAAHELGHSLGLSHSTDIGALMYPSYTFSGDVQLAQDDIDGIQAIYGRSQNPVQPIGPQTPKACDSKLTFDAITTIRGEVMFFKDRFYMRTNPFYPEVELNFISVFWPQLPNGLEAAYEFADRDEVRFFKGNKYWAVQGQNVLHGYPKDIYSSFGFPRTVKHIDAALSEENTGKTYFFVANKYWRYDEYKRSMDPGYPKMIAHDFPGIGHKVDAVFMKDGFFYFFHGTRQYKFDPKTKRILTLQKANSWFNCRKN

SEQ ID NO: 166 - protein, 450 aa, Artificial Sequence
  MMP-1 variant D179F
FPATLETQEQDVDLVQKYLEKYYNLKNDGRQVEKRRNSGPVVEKLKQMQEFFGLKVTGKPDAETLKVMKQPRCGVPDVAQFVLTEGNPRWEQTHLTYRIENYTPDLPRADVDHAIEKAFQLWSNVTPLTFTKVSEGQADIMISFVRGDHRDNSPFDGPGGNLAHAFQPGPGIGGDAHFFEDERWTNNFREYNLHRVAAHELGHSLGLSHSTDIGALMYPSYTFSGDVQLAQDDIDGIQAIYGRSQNPVQPIGPQTPKACDSKLTFDAITTIRGEVMFFKDRFYMRTNPFYPEVELNFISVFWPQLPNGLEAAYEFADRDEVRFFKGNKYWAVQGQNVLHGYPKDIYSSFGFPRTVKHIDAALSEENTGKTYFFVANKYWRYDEYKRSMDPGYPKMIAHDFPGIGHKVDAVFMKDGFFYFFHGTRQYKFDPKTKRILTLQKANSWFNCRKN

SEQ ID NO: 167 - protein, 450 aa, Artificial Sequence
  MMP-1 variant D179M
FPATLETQEQDVDLVQKYLEKYYNLKNDGRQVEKRRNSGPVVEKLKQMQEFFGLKVTGKPDAETLKVMKQPRCGVPDVAQFVLTEGNPRWEQTHLTYRIENYTPDLPRADVDHAIEKAFQLWSNVTPLTFTKVSEGQADIMISFVRGDHRDNSPFDGPGGNLAHAFQPGPGIGGDAHFMEDERWTNNFREYNLHRVAAHELGHSLGLSHSTDIGALMYPSYTFSGDVQLAQDDIDGIQAIYGRSQNPVQPIGPQTPKACDSKLTFDAITTIRGEVMFFKDRFYMRTNPFYPEVELNFISVFWPQLPNGLEAAYEFADRDEVRFFKGNKYWAVQGQNVLHGYPKDIYSSFGFPRTVKHIDAALSEENTGKTYFFVANKYWRYDEYKRSMDPGYPKMIAHDFPGIGHKVDAVFMKDGFFYFFHGTRQYKFDPKTKRILTLQKANSWFNCRKN

SEQ ID NO: 168 - protein, 450 aa, Artificial Sequence
  MMP-1 variant D179W
FPATLETQEQDVDLVQKYLEKYYNLKNDGRQVEKRRNSGPVVEKLKQMQEFFGLKVTGKPDAETLKVMKQPRCGVPDVAQFVLTEGNPRWEQTHLTYRIENYTPDLPRADVDHAIEKAFQLWSNVTPLTFTKVSEGQADIMISFVRGDHRDNSPFDGPGGNLAHAFQPGPGIGGDAHFWEDERWTNNFREYNLHRVAAHELGHSLGLSHSTDIGALMYPSYTFSGDVQLAQDDIDGIQAIYGRSQNPVQPIGPQTPKACDSKLTFDAITTIRGEVMFFKDRFYMRTNPFYPEVELNFISVFWPQLPNGLEAAYEFADRDEVRFFKGNKYWAVQGQNVLHGYPKDIYSSFGFPRTVKHIDAALSEENTGKTYFFVANKYWRYDEYKRSMDPGYPKMIAHDFPGIGHKVDAVFMKDGFFYFFHGTRQYKFDPKTKRILTLQKANSWFNCRKN

SEQ ID NO: 169 - protein, 450 aa, Artificial Sequence
  MMP-1 variant D179I
FPATLETQEQDVDLVQKYLEKYYNLKNDGRQVEKRRNSGPVVEKLKQMQEFFGLKVTGKPDAETLKVMKQPRCGVPDVAQFVLTEGNPRWEQTHLTYRIENYTPDLPRADVDHAIEKAFQLWSNVTPLTFTKVSEGQADIMISFVRGDHRDNSPFDGPGGNLAHAFQPGPGIGGDAHFIEDERWTNNFREYNLHRVAAHELGHSLGLSHSTDIGALMYPSYTFSGDVQLAQDDIDGIQAIYGRSQNPVQPIGPQTPKACDSKLTFDAITTIRGEVMFFKDRFYMRTNPFYPEVELNFISVFWPQLPNGLEAAYEFADRDEVRFFKGNKYWAVQGQNVLHGYPKDIYSSFGFPRTVKHIDAALSEENTGKTYFFVANKYWRYDEYKRSMDPGYPKMIAHDFPGIGHKVDAVFMKDGFFYFFHGTRQYKFDPKTKRILTLQKANSWFNCRKN

SEQ ID NO: 170 - protein, 450 aa, Artificial Sequence
  MMP-1 variant D179V
FPATLETQEQDVDLVQKYLEKYYNLKNDGRQVEKRRNSGPVVEKLKQMQEFFGLKVTGKPDAETLKVMKQPRCGVPDVAQFVLTEGNPRWEQTHLTYRIENYTPDLPRADVDHAIEKAFQLWSNVTPLTFTKVSEGQADIMISFVRGDHRDNSPFDGPGGNLAHAFQPGPGIGGDAHFVEDERWTNNFREYNLHRVAAHELGHSLGLSHSTDIGALMYPSYTFSGDVQLAQDDIDGIQAIYGRSQNPVQPIGPQTPKACDSKLTFDAITTIRGEVMFFKDRFYMRTNPFYPEVELNFISVFWPQLPNGLEAAYEFADRDEVRFFKGNKYWAVQGQNVLHGYPKDIYSSFGFPRTVKHIDAALSEENTGKTYFFVANKYWRYDEYKRSMDPGYPKMIAHDFPGIGHKVDAVFMKDGFFYFFHGTRQYKFDPKTKRILTLQKANSWFNCRKN

SEQ ID NO: 171 - protein, 450 aa, Artificial Sequence
  MMP-1 variant D179L
FPATLETQEQDVDLVQKYLEKYYNLKNDGRQVEKRRNSGPVVEKLKQMQEFFGLKVTGKPDAETLKVMKQPRCGVPDVAQFVLTEGNPRWEQTHLTYRIENYTPDLPRADVDHAIEKAFQLWSNVTPLTFTKVSEGQADIMISFVRGDHRDNSPFDGPGGNLAHAFQPGPGIGGDAHFLEDERWTNNFREYNLHRVAAHELGHSLGLSHSTDIGALMYPSYTFSGDVQLAQDDIDGIQAIYGRSQNPVQPIGPQTPKACDSKLTFDAITTIRGEVMFFKDRFYMRTNPFYPEVELNFISVFWPQLPNGLEAAYEFADRDEVRFFKGNKYWAVQGQNVLHGYPKDIYSSFGFPRTVKHIDAALSEENTGKTYFFVANKYWRYDEYKRSMDPGYPKMIAHDFPGIGHKVDAVFMKDGFFYFFHGTRQYKFDPKTKRILTLQKANSWFNCRKN

SEQ ID NO: 172 - protein, 450 aa, Artificial Sequence
  MMP-1 variant D179A
FPATLETQEQDVDLVQKYLEKYYNLKNDGRQVEKRRNSGPVVEKLKQMQEFFGLKVTGKPDAETLKVMKQPRCGVPDVAQFVLTEGNPRWEQTHLTYRIENYTPDLPRADVDHAIEKAFQLWSNVTPLTFTKVSEGQADIMISFVRGDHRDNSPFDGPGGNLAHAFQPGPGIGGDAHFAEDERWTNNFREYNLHRVAAHELGHSLGLSHSTDIGALMYPSYTFSGDVQLAQDDIDGIQAIYGRSQNPVQPIGPQTPKACDSKLTFDAITTIRGEVMFFKDRFYMRTNPFYPEVELNFISVFWPQLPNGLEAAYEFADRDEVRFFKGNKYWAVQGQNVLHGYPKDIYSSFGFPRTVKHIDAALSEENTGKTYFFVANKYWRYDEYKRSMDPGYPKMIAHDFPGIGHKVDAVFMKDGFFYFFHGTRQYKFDPKTKRILTLQKANSWFNCRKN

SEQ ID NO: 173 - protein, 450 aa, Artificial Sequence
  MMP-1 variant D179P
FPATLETQEQDVDLVQKYLEKYYNLKNDGRQVEKRRNSGPVVEKLKQMQEFFGLKVTGKPDAETLKVMKQPRCGVPDVAQFVLTEGNPRWEQTHLTYRIENYTPDLPRADVDHAIEKAFQLWSNVTPLTFTKVSEGQADIMISFVRGDHRDNSPFDGPGGNLAHAFQPGPGIGGDAHFPEDERWTNNFREYNLHRVAAHELGHSLGLSHSTDIGALMYPSYTFSGDVQLAQDDIDGIQAIYGRSQNPVQPIGPQTPKACDSKLTFDAITTIRGEVMFFKDRFYMRTNPFYPEVELNFISVFWPQLPNGLEAAYEFADRDEVRFFKGNKYWAVQGQNVLHGYPKDIYSSFGFPRTVKHIDAALSEENTGKTYFFVANKYWRYDEYKRSMDPGYPKMIAHDFPGIGHKVDAVFMKDGFFYFFHGTRQYKFDPKTKRILTLQKANSWFNCRKN

SEQ ID NO: 174 - protein, 450 aa, Artificial Sequence
  MMP-1 variant E180D
FPATLETQEQDVDLVQKYLEKYYNLKNDGRQVEKRRNSGPVVEKLKQMQEFFGLKVTGKPDAETLKVMKQPRCGVPDVAQFVLTEGNPRWEQTHLTYRIENYTPDLPRADVDHAIEKAFQLWSNVTPLTFTKVSEGQADIMISFVRGDHRDNSPFDGPGGNLAHAFQPGPGIGGDAHFDDDERWTNNFREYNLHRVAAHELGHSLGLSHSTDIGALMYPSYTFSGDVQLAQDDIDGIQAIYGRSQNPVQPIGPQTPKACDSKLTFDAITTIRGEVMFFKDRFYMRTNPFYPEVELNFISVFWPQLPNGLEAAYEFADRDEVRFFKGNKYWAVQGQNVLHGYPKDIYSSFGFPRTVKHIDAALSEENTGKTYFFVANKYWRYDEYKRSMDPGYPKMIAHDFPGIGHKVDAVFMKDGFFYFFHGTRQYKFDPKTKRILTLQKANSWFNCRKN

SEQ ID NO: 175 - protein, 450 aa, Artificial Sequence
  MMP-1 variant E180H
FPATLETQEQDVDLVQKYLEKYYNLKNDGRQVEKRRNSGPVVEKLKQMQEFFGLKVTGKPDAETLKVMKQPRCGVPDVAQFVLTEGNPRWEQTHLTYRIENYTPDLPRADVDHAIEKAFQLWSNVTPLTFTKVSEGQADIMISFVRGDHRDNSPFDGPGGNLAHAFQPGPGIGGDAHFDHDERWTNNFREYNLHRVAAHELGHSLGLSHSTDIGALMYPSYTFSGDVQLAQDDIDGIQAIYGRSQNPVQPIGPQTPKACDSKLTFDAITTIRGEVMFFKDRFYMRTNPFYPEVELNFISVFWPQLPNGLEAAYEFADRDEVRFFKGNKYWAVQGQNVLHGYPKDIYSSFGFPRTVKHIDAALSEENTGKTYFFVANKYWRYDEYKRSMDPGYPKMIAHDFPGIGHKVDAVFMKDGFFYFFHGTRQYKFDPKTKRILTLQKANSWFNCRKN

SEQ ID NO: 176 - protein, 450 aa, Artificial Sequence
  MMP-1 variant E180K
FPATLETQEQDVDLVQKYLEKYYNLKNDGRQVEKRRNSGPVVEKLKQMQEFFGLKVTGKPDAETLKVMKQPRCGVPDVAQFVLTEGNPRWEQTHLTYRIENYTPDLPRADVDHAIEKAFQLWSNVTPLTFTKVSEGQADIMISFVRGDHRDNSPFDGPGGNLAHAFQPGPGIGGDAHFDKDERWTNNFREYNLHRVAAHELGHSLGLSHSTDIGALMYPSYTFSGDVQLAQDDIDGIQAIYGRSQNPVQPIGPQTPKACDSKLTFDAITTIRGEVMFFKDRFYMRTNPFYPEVELNFISVFWPQLPNGLEAAYEFADRDEVRFFKGNKYWAVQGQNVLHGYPKDIYSSFGFPRTVKHIDAALSEENTGKTYFFVANKYWRYDEYKRSMDPGYPKMIAHDFPGIGHKVDAVFMKDGFFYFFHGTRQYKFDPKTKRILTLQKANSWFNCRKN

SEQ ID NO: 177 - protein, 450 aa, Artificial Sequence
  MMP-1 variant E180R
FPATLETQEQDVDLVQKYLEKYYNLKNDGRQVEKRRNSGPVVEKLKQMQEFFGLKVTGKPDAETLKVMKQPRCGVPDVAQFVLTEGNPRWEQTHLTYRIENYTPDLPRADVDHAIEKAFQLWSNVTPLTFTKVSEGQADIMISFVRGDHRDNSPFDGPGGNLAHAFQPGPGIGGDAHFDRDERWTNNFREYNLHRVAAHELGHSLGLSHSTDIGALMYPSYTFSGDVQLAQDDIDGIQAIYGRSQNPVQPIGPQTPKACDSKLTFDAITTIRGEVMFFKDRFYMRTNPFYPEVELNFISVFWPQLPNGLEAAYEFADRDEVRFFKGNKYWAVQGQNVLHGYPKDIYSSFGFPRTVKHIDAALSEENTGKTYFFVANKYWRYDEYKRSMDPGYPKMIAHDFPGIGHKVDAVFMKDGFFYFFHGTRQYKFDPKTKRILTLQKANSWFNCRKN

SEQ ID NO: 178 - protein, 450 aa, Artificial Sequence
  MMP-1 variant E180C
FPATLETQEQDVDLVQKYLEKYYNLKNDGRQVEKRRNSGPVVEKLKQMQEFFGLKVTGKPDAETLKVMKQPRCGVPDVAQFVLTEGNPRWEQTHLTYRIENYTPDLPRADVDHAIEKAFQLWSNVTPLTFTKVSEGQADIMISFVRGDHRDNSPFDGPGGNLAHAFQPGPGIGGDAHFDCDERWTNNFREYNLHRVAAHELGHSLGLSHSTDIGALMYPSYTFSGDVQLAQDDIDGIQAIYGRSQNPVQPIGPQTPKACDSKLTFDAITTIRGEVMFFKDRFYMRTNPFYPEVELNFISVFWPQLPNGLEAAYEFADRDEVRFFKGNKYWAVQGQNVLHGYPKDIYSSFGFPRTVKHIDAALSEENTGKTYFFVANKYWRYDEYKRSMDPGYPKMIAHDFPGIGHKVDAVFMKDGFFYFFHGTRQYKFDPKTKRILTLQKANSWFNCRKN

SEQ ID NO: 179 - protein, 450 aa, Artificial Sequence
  MMP-1 variant E180N
FPATLETQEQDVDLVQKYLEKYYNLKNDGRQVEKRRNSGPVVEKLKQMQEFFGLKVTGKPDAETLKVMKQPRCGVPDVAQFVLTEGNPRWEQTHLTYRIENYTPDLPRADVDHAIEKAFQLWSNVTPLTFTKVSEGQADIMISFVRGDHRDNSPFDGPGGNLAHAFQPGPGIGGDAHFDNDERWTNNFREYNLHRVAAHELGHSLGLSHSTDIGALMYPSYTFSGDVQLAQDDIDGIQAIYGRSQNPVQPIGPQTPKACDSKLTFDAITTIRGEVMFFKDRFYMRTNPFYPEVELNFISVFWPQLPNGLEAAYEFADRDEVRFFKGNKYWAVQGQNVLHGYPKDIYSSFGFPRTVKHIDAALSEENTGKTYFFVANKYWRYDEYKRSMDPGYPKMIAHDFPGIGHKVDAVFMKDGFFYFFHGTRQYKFDPKTKRILTLQKANSWFNCRKN

SEQ ID NO: 180 - protein, 450 aa, Artificial Sequence
  MMP-1 variant E180Q
FPATLETQEQDVDLVQKYLEKYYNLKNDGRQVEKRRNSGPVVEKLKQMQEFFGLKVTGKPDAETLKVMKQPRCGVPDVAQFVLTEGNPRWEQTHLTYRIENYTPDLPRADVDHAIEKAFQLWSNVTPLTFTKVSEGQADIMISFVRGDHRDNSPFDGPGGNLAHAFQPGPGIGGDAHFDQDERWTNNFREYNLHRVAAHELGHSLGLSHSTDIGALMYPSYTFSGDVQLAQDDIDGIQAIYGRSQNPVQPIGPQTPKACDSKLTFDAITTIRGEVMFFKDRFYMRTNPFYPEVELNFISVFWPQLPNGLEAAYEFADRDEVRFFKGNKYWAVQGQNVLHGYPKDIYSSFGFPRTVKHIDAALSEENTGKTYFFVANKYWRYDEYKRSMDPGYPKMIAHDFPGIGHKVDAVFMKDGFFYFFHGTRQYKFDPKTKRILTLQKANSWFNCRKN

SEQ ID NO: 181 - protein, 450 aa, Artificial Sequence
  MMP-1 variant E180T
FPATLETQEQDVDLVQKYLEKYYNLKNDGRQVEKRRNSGPVVEKLKQMQEFFGLKVTGKPDAETLKVMKQPRCGVPDVAQFVLTEGNPRWEQTHLTYRIENYTPDLPRADVDHAIEKAFQLWSNVTPLTFTKVSEGQADIMISFVRGDHRDNSPFDGPGGNLAHAFQPGPGIGGDAHFDTDERWTNNFREYNLHRVAAHELGHSLGLSHSTDIGALMYPSYTFSGDVQLAQDDIDGIQAIYGRSQNPVQPIGPQTPKACDSKLTFDAITTIRGEVMFFKDRFYMRTNPFYPEVELNFISVFWPQLPNGLEAAYEFADRDEVRFFKGNKYWAVQGQNVLHGYPKDIYSSFGFPRTVKHIDAALSEENTGKTYFFVANKYWRYDEYKRSMDPGYPKMIAHDFPGIGHKVDAVFMKDGFFYFFHGTRQYKFDPKTKRILTLQKANSWFNCRKN

SEQ ID NO: 182 - protein, 450 aa, Artificial Sequence
  MMP-1 variant E180Y
FPATLETQEQDVDLVQKYLEKYYNLKNDGRQVEKRRNSGPVVEKLKQMQEFFGLKVTGKPDAETLKVMKQPRCGVPDVAQFVLTEGNPRWEQTHLTYRIENYTPDLPRADVDHAIEKAFQLWSNVTPLTFTKVSEGQADIMISFVRGDHRDNSPFDGPGGNLAHAFQPGPGIGGDAHFDYDERWTNNFREYNLHRVAAHELGHSLGLSHSTDIGALMYPSYTFSGDVQLAQDDIDGIQAIYGRSQNPVQPIGPQTPKACDSKLTFDAITTIRGEVMFFKDRFYMRTNPFYPEVELNFISVFWPQLPNGLEAAYEFADRDEVRFFKGNKYWAVQGQNVLHGYPKDIYSSFGFPRTVKHIDAALSEENTGKTYFFVANKYWRYDEYKRSMDPGYPKMIAHDFPGIGHKVDAVFMKDGFFYFFHGTRQYKFDPKTKRILTLQKANSWFNCRKN

SEQ ID NO: 183 - protein, 450 aa, Artificial Sequence
  MMP-1 variant E180S
FPATLETQEQDVDLVQKYLEKYYNLKNDGRQVEKRRNSGPVVEKLKQMQEFFGLKVTGKPDAETLKVMKQPRCGVPDVAQFVLTEGNPRWEQTHLTYRIENYTPDLPRADVDHAIEKAFQLWSNVTPLTFTKVSEGQADIMISFVRGDHRDNSPFDGPGGNLAHAFQPGPGIGGDAHFDSDERWTNNFREYNLHRVAAHELGHSLGLSHSTDIGALMYPSYTFSGDVQLAQDDIDGIQAIYGRSQNPVQPIGPQTPKACDSKLTFDAITTIRGEVMFFKDRFYMRTNPFYPEVELNFISVFWPQLPNGLEAAYEFADRDEVRFFKGNKYWAVQGQNVLHGYPKDIYSSFGFPRTVKHIDAALSEENTGKTYFFVANKYWRYDEYKRSMDPGYPKMIAHDFPGIGHKVDAVFMKDGFFYFFHGTRQYKFDPKTKRILTLQKANSWFNCRKN

SEQ ID NO: 184 - protein, 450 aa, Artificial Sequence
  MMP-1 variant E180G
FPATLETQEQDVDLVQKYLEKYYNLKNDGRQVEKRRNSGPVVEKLKQMQEFFGLKVTGKPDAETLKVMKQPRCGVPDVAQFVLTEGNPRWEQTHLTYRIENYTPDLPRADVDHAIEKAFQLWSNVTPLTFTKVSEGQADIMISFVRGDHRDNSPFDGPGGNLAHAFQPGPGIGGDAHFDGDERWTNNFREYNLHRVAAHELGHSLGLSHSTDIGALMYPSYTFSGDVQLAQDDIDGIQAIYGRSQNPVQPIGPQTPKACDSKLTFDAITTIRGEVMFFKDRFYMRTNPFYPEVELNFISVFWPQLPNGLEAAYEFADRDEVRFFKGNKYWAVQGQNVLHGYPKDIYSSFGFPRTVKHIDAALSEENTGKTYFFVANKYWRYDEYKRSMDPGYPKMIAHDFPGIGHKVDAVFMKDGFFYFFHGTRQYKFDPKTKRILTLQKANSWFNCRKN

SEQ ID NO: 185 - protein, 450 aa, Artificial Sequence
  MMP-1 variant E180F
FPATLETQEQDVDLVQKYLEKYYNLKNDGRQVEKRRNSGPVVEKLKQMQEFFGLKVTGKPDAETLKVMKQPRCGVPDVAQFVLTEGNPRWEQTHLTYRIENYTPDLPRADVDHAIEKAFQLWSNVTPLTFTKVSEGQADIMISFVRGDHRDNSPFDGPGGNLAHAFQPGPGIGGDAHFDFDERWTNNFREYNLHRVAAHELGHSLGLSHSTDIGALMYPSYTFSGDVQLAQDDIDGIQAIYGRSQNPVQPIGPQTPKACDSKLTFDAITTIRGEVMFFKDRFYMRTNPFYPEVELNFISVFWPQLPNGLEAAYEFADRDEVRFFKGNKYWAVQGQNVLHGYPKDIYSSFGFPRTVKHIDAALSEENTGKTYFFVANKYWRYDEYKRSMDPGYPKMIAHDFPGIGHKVDAVFMKDGFFYFFHGTRQYKFDPKTKRILTLQKANSWFNCRKN

SEQ ID NO: 186 - protein, 450 aa, Artificial Sequence
  MMP-1 variant E180M
FPATLETQEQDVDLVQKYLEKYYNLKNDGRQVEKRRNSGPVVEKLKQMQEFFGLKVTGKPDAETLKVMKQPRCGVPDVAQFVLTEGNPRWEQTHLTYRIENYTPDLPRADVDHAIEKAFQLWSNVTPLTFTKVSEGQADIMISFVRGDHRDNSPFDGPGGNLAHAFQPGPGIGGDAHFDMDERWTNNFREYNLHRVAAHELGHSLGLSHSTDIGALMYPSYTFSGDVQLAQDDIDGIQAIYGRSQNPVQPIGPQTPKACDSKLTFDAITTIRGEVMFFKDRFYMRTNPFYPEVELNFISVFWPQLPNGLEAAYEFADRDEVRFFKGNKYWAVQGQNVLHGYPKDIYSSFGFPRTVKHIDAALSEENTGKTYFFVANKYWRYDEYKRSMDPGYPKMIAHDFPGIGHKVDAVFMKDGFFYFFHGTRQYKFDPKTKRILTLQKANSWFNCRKN

SEQ ID NO: 187 - protein, 450 aa, Artificial Sequence
  MMP-1 variant E180W
FPATLETQEQDVDLVQKYLEKYYNLKNDGRQVEKRRNSGPVVEKLKQMQEFFGLKVTGKPDAETLKVMKQPRCGVPDVAQFVLTEGNPRWEQTHLTYRIENYTPDLPRADVDHAIEKAFQLWSNVTPLTFTKVSEGQADIMISFVRGDHRDNSPFDGPGGNLAHAFQPGPGIGGDAHFDWDERWTNNFREYNLHRVAAHELGHSLGLSHSTDIGALMYPSYTFSGDVQLAQDDIDGIQAIYGRSQNPVQPIGPQTPKACDSKLTFDAITTIRGEVMFFKDRFYMRTNPFYPEVELNFISVFWPQLPNGLEAAYEFADRDEVRFFKGNKYWAVQGQNVLHGYPKDIYSSFGFPRTVKHIDAALSEENTGKTYFFVANKYWRYDEYKRSMDPGYPKMIAHDFPGIGHKVDAVFMKDGFFYFFHGTRQYKFDPKTKRILTLQKANSWFNCRKN

SEQ ID NO: 188 - protein, 450 aa, Artificial Sequence; identical to SEQ ID NO: 182
  MMP-1 variant E180I

SEQ ID NO: 189 - protein, 450 aa, Artificial Sequence
  MMP-1 variant E180V
FPATLETQEQDVDLVQKYLEKYYNLKNDGRQVEKRRNSGPVVEKLKQMQEFFGLKVTGKPDAETLKVMKQPRCGVPDVAQFVLTEGNPRWEQTHLTYRIENYTPDLPRADVDHAIEKAFQLWSNVTPLTFTKVSEGQADIMISFVRGDHRDNSPFDGPGGNLAHAFQPGPGIGGDAHFDVDERWTNNFREYNLHRVAAHELGHSLGLSHSTDIGALMYPSYTFSGDVQLAQDDIDGIQAIYGRSQNPVQPIGPQTPKACDSKLTFDAITTIRGEVMFFKDRFYMRTNPFYPEVELNFISVFWPQLPNGLEAAYEFADRDEVRFFKGNKYWAVQGQNVLHGYPKDIYSSFGFPRTVKHIDAALSEENTGKTYFFVANKYWRYDEYKRSMDPGYPKMIAHDFPGIGHKVDAVFMKDGFFYFFHGTRQYKFDPKTKRILTLQKANSWFNCRKN

SEQ ID NO: 190 - protein, 450 aa, Artificial Sequence
  MMP-1 variant E180L
FPATLETQEQDVDLVQKYLEKYYNLKNDGRQVEKRRNSGPVVEKLKQMQEFFGLKVTGKPDAETLKVMKQPRCGVPDVAQFVLTEGNPRWEQTHLTYRIENYTPDLPRADVDHAIEKAFQLWSNVTPLTFTKVSEGQADIMISFVRGDHRDNSPFDGPGGNLAHAFQPGPGIGGDAHFDLDERWTNNFREYNLHRVAAHELGHSLGLSHSTDIGALMYPSYTFSGDVQLAQDDIDGIQAIYGRSQNPVQPIGPQTPKACDSKLTFDAITTIRGEVMFFKDRFYMRTNPFYPEVELNFISVFWPQLPNGLEAAYEFADRDEVRFFKGNKYWAVQGQNVLHGYPKDIYSSFGFPRTVKHIDAALSEENTGKTYFFVANKYWRYDEYKRSMDPGYPKMIAHDFPGIGHKVDAVFMKDGFFYFFHGTRQYKFDPKTKRILTLQKANSWFNCRKN

SEQ ID NO: 191 - protein, 450 aa, Artificial Sequence
  MMP-1 variant E180A
FPATLETQEQDVDLVQKYLEKYYNLKNDGRQVEKRRNSGPVVEKLKQMQEFFGLKVTGKPDAETLKVMKQPRCGVPDVAQFVLTEGNPRWEQTHLTYRIENYTPDLPRADVDHAIEKAFQLWSNVTPLTFTKVSEGQADIMISFVRGDHRDNSPFDGPGGNLAHAFQPGPGIGGDAHFDADERWTNNFREYNLHRVAAHELGHSLGLSHSTDIGALMYPSYTFSGDVQLAQDDIDGIQAIYGRSQNPVQPIGPQTPKACDSKLTFDAITTIRGEVMFFKDRFYMRTNPFYPEVELNFISVFWPQLPNGLEAAYEFADRDEVRFFKGNKYWAVQGQNVLHGYPKDIYSSFGFPRTVKHIDAALSEENTGKTYFFVANKYWRYDEYKRSMDPGYPKMIAHDFPGIGHKVDAVFMKDGFFYFFHGTRQYKFDPKTKRILTLQKANSWFNCRKN

SEQ ID NO: 192 - protein, 450 aa, Artificial Sequence
  MMP-1 variant E180P
FPATLETQEQDVDLVQKYLEKYYNLKNDGRQVEKRRNSGPVVEKLKQMQEFFGLKVTGKPDAETLKVMKQPRCGVPDVAQFVLTEGNPRWEQTHLTYRIENYTPDLPRADVDHAIEKAFQLWSNVTPLTFTKVSEGQADIMISFVRGDHRDNSPFDGPGGNLAHAFQPGPGIGGDAHFDPDERWTNNFREYNLHRVAAHELGHSLGLSHSTDIGALMYPSYTFSGDVQLAQDDIDGIQAIYGRSQNPVQPIGPQTPKACDSKLTFDAITTIRGEVMFFKDRFYMRTNPFYPEVELNFISVFWPQLPNGLEAAYEFADRDEVRFFKGNKYWAVQGQNVLHGYPKDIYSSFGFPRTVKHIDAALSEENTGKTYFFVANKYWRYDEYKRSMDPGYPKMIAHDFPGIGHKVDAVFMKDGFFYFFHGTRQYKFDPKTKRILTLQKANSWFNCRKN

SEQ ID NO: 193 - protein, 450 aa, Artificial Sequence
  MMP-1 variant D181E
FPATLETQEQDVDLVQKYLEKYYNLKNDGRQVEKRRNSGPVVEKLKQMQEFFGLKVTGKPDAETLKVMKQPRCGVPDVAQFVLTEGNPRWEQTHLTYRIENYTPDLPRADVDHAIEKAFQLWSNVTPLTFTKVSEGQADIMISFVRGDHRDNSPFDGPGGNLAHAFQPGPGIGGDAHFDEEERWTNNFREYNLHRVAAHELGHSLGLSHSTDIGALMYPSYTFSGDVQLAQDDIDGIQAIYGRSQNPVQPIGPQTPKACDSKLTFDAITTIRGEVMFFKDRFYMRTNPFYPEVELNFISVFWPQLPNGLEAAYEFADRDEVRFFKGNKYWAVQGQNVLHGYPKDIYSSFGFPRTVKHIDAALSEENTGKTYFFVANKYWRYDEYKRSMDPGYPKMIAHDFPGIGHKVDAVFMKDGFFYFFHGTRQYKFDPKTKRILTLQKANSWFNCRKN

SEQ ID NO: 194 - protein, 450 aa, Artificial Sequence
  MMP-1 variant D181H
FPATLETQEQDVDLVQKYLEKYYNLKNDGRQVEKRRNSGPVVEKLKQMQEFFGLKVTGKPDAETLKVMKQPRCGVPDVAQFVLTEGNPRWEQTHLTYRIENYTPDLPRADVDHAIEKAFQLWSNVTPLTFTKVSEGQADIMISFVRGDHRDNSPFDGPGGNLAHAFQPGPGIGGDAHFDEHERWTNNFREYNLHRVAAHELGHSLGLSHSTDIGALMYPSYTFSGDVQLAQDDIDGIQAIYGRSQNPVQPIGPQTPKACDSKLTFDAITTIRGEVMFFKDRFYMRTNPFYPEVELNFISVFWPQLPNGLEAAYEFADRDEVRFFKGNKYWAVQGQNVLHGYPKDIYSSFGFPRTVKHIDAALSEENTGKTYFFVANKYWRYDEYKRSMDPGYPKMIAHDFPGIGHKVDAVFMKDGFFYFFHGTRQYKFDPKTKRILTLQKANSWFNCRKN

SEQ ID NO: 195 - protein, 450 aa, Artificial Sequence
  MMP-1 variant D181K
FPATLETQEQDVDLVQKYLEKYYNLKNDGRQVEKRRNSGPVVEKLKQMQEFFGLKVTGKPDAETLKVMKQPRCGVPDVAQFVLTEGNPRWEQTHLTYRIENYTPDLPRADVDHAIEKAFQLWSNVTPLTFTKVSEGQADIMISFVRGDHRDNSPFDGPGGNLAHAFQPGPGIGGDAHFDEKERWTNNFREYNLHRVAAHELGHSLGLSHSTDIGALMYPSYTFSGDVQLAQDDIDGIQAIYGRSQNPVQPIGPQTPKACDSKLTFDAITTIRGEVMFFKDRFYMRTNPFYPEVELNFISVFWPQLPNGLEAAYEFADRDEVRFFKGNKYWAVQGQNVLHGYPKDIYSSFGFPRTVKHIDAALSEENTGKTYFFVANKYWRYDEYKRSMDPGYPKMIAHDFPGIGHKVDAVFMKDGFFYFFHGTRQYKFDPKTKRILTLQKANSWFNCRKN

SEQ ID NO: 196 - protein, 450 aa, Artificial Sequence
  MMP-1 variant D181R
FPATLETQEQDVDLVQKYLEKYYNLKNDGRQVEKRRNSGPVVEKLKQMQEFFGLKVTGKPDAETLKVMKQPRCGVPDVAQFVLTEGNPRWEQTHLTYRIENYTPDLPRADVDHAIEKAFQLWSNVTPLTFTKVSEGQADIMISFVRGDHRDNSPFDGPGGNLAHAFQPGPGIGGDAHFDERERWTNNFREYNLHRVAAHELGHSLGLSHSTDIGALMYPSYTFSGDVQLAQDDIDGIQAIYGRSQNPVQPIGPQTPKACDSKLTFDAITTIRGEVMFFKDRFYMRTNPFYPEVELNFISVFWPQLPNGLEAAYEFADRDEVRFFKGNKYWAVQGQNVLHGYPKDIYSSFGFPRTVKHIDAALSEENTGKTYFFVANKYWRYDEYKRSMDPGYPKMIAHDFPGIGHKVDAVFMKDGFFYFFHGTRQYKFDPKTKRILTLQKANSWFNCRKN

SEQ ID NO: 197 - protein, 450 aa, Artificial Sequence
  MMP-1 variant D181C
FPATLETQEQDVDLVQKYLEKYYNLKNDGRQVEKRRNSGPVVEKLKQMQEFFGLKVTGKPDAETLKVMKQPRCGVPDVAQFVLTEGNPRWEQTHLTYRIENYTPDLPRADVDHAIEKAFQLWSNVTPLTFTKVSEGQADIMISFVRGDHRDNSPFDGPGGNLAHAFQPGPGIGGDAHFDECERWTNNFREYNLHRVAAHELGHSLGLSHSTDIGALMYPSYTFSGDVQLAQDDIDGIQAIYGRSQNPVQPIGPQTPKACDSKLTFDAITTIRGEVMFFKDRFYMRTNPFYPEVELNFISVFWPQLPNGLEAAYEFADRDEVRFFKGNKYWAVQGQNVLHGYPKDIYSSFGFPRTVKHIDAALSEENTGKTYFFVANKYWRYDEYKRSMDPGYPKMIAHDFPGIGHKVDAVFMKDGFFYFFHGTRQYKFDPKTKRILTLQKANSWFNCRKN

SEQ ID NO: 198 - protein, 450 aa, Artificial Sequence
  MMP-1 variant D181N
FPATLETQEQDVDLVQKYLEKYYNLKNDGRQVEKRRNSGPVVEKLKQMQEFFGLKVTGKPDAETLKVMKQPRCGVPDVAQFVLTEGNPRWEQTHLTYRIENYTPDLPRADVDHAIEKAFQLWSNVTPLTFTKVSEGQADIMISFVRGDHRDNSPFDGPGGNLAHAFQPGPGIGGDAHFDENERWTNNFREYNLHRVAAHELGHSLGLSHSTDIGALMYPSYTFSGDVQLAQDDIDGIQAIYGRSQNPVQPIGPQTPKACDSKLTFDAITTIRGEVMFFKDRFYMRTNPFYPEVELNFISVFWPQLPNGLEAAYEFADRDEVRFFKGNKYWAVQGQNVLHGYPKDIYSSFGFPRTVKHIDAALSEENTGKTYFFVANKYWRYDEYKRSMDPGYPKMIAHDFPGIGHKVDAVFMKDGFFYFFHGTRQYKFDPKTKRILTLQKANSWFNCRKN

SEQ ID NO: 199 - protein, 450 aa, Artificial Sequence
  MMP-1 variant D181Q
FPATLETQEQDVDLVQKYLEKYYNLKNDGRQVEKRRNSGPVVEKLKQMQEFFGLKVTGKPDAETLKVMKQPRCGVPDVAQFVLTEGNPRWEQTHLTYRIENYTPDLPRADVDHAIEKAFQLWSNVTPLTFTKVSEGQADIMISFVRGDHRDNSPFDGPGGNLAHAFQPGPGIGGDAHFDEQERWTNNFREYNLHRVAAHELGHSLGLSHSTDIGALMYPSYTFSGDVQLAQDDIDGIQAIYGRSQNPVQPIGPQTPKACDSKLTFDAITTIRGEVMFFKDRFYMRTNPFYPEVELNFISVFWPQLPNGLEAAYEFADRDEVRFFKGNKYWAVQGQNVLHGYPKDIYSSFGFPRTVKHIDAALSEENTGKTYFFVANKYWRYDEYKRSMDPGYPKMIAHDFPGIGHKVDAVFMKDGFFYFFHGTRQYKFDPKTKRILTLQKANSWFNCRKN

SEQ ID NO: 200 - protein, 450 aa, Artificial Sequence
  MMP-1 variant D181T
FPATLETQEQDVDLVQKYLEKYYNLKNDGRQVEKRRNSGPVVEKLKQMQEFFGLKVTGKPDAETLKVMKQPRCGVPDVAQFVLTEGNPRWEQTHLTYRIENYTPDLPRADVDHAIEKAFQLWSNVTPLTFTKVSEGQADIMISFVRGDHRDNSPFDGPGGNLAHAFQPGPGIGGDAHFDETERWTNNFREYNLHRVAAHELGHSLGLSHSTDIGALMYPSYTFSGDVQLAQDDIDGIQAIYGRSQNPVQPIGPQTPKACDSKLTFDAITTIRGEVMFFKDRFYMRTNPFYPEVELNFISVFWPQLPNGLEAAYEFADRDEVRFFKGNKYWAVQGQNVLHGYPKDIYSSFGFPRTVKHIDAALSEENTGKTYFFVANKYWRYDEYKRSMDPGYPKMIAHDFPGIGHKVDAVFMKDGFFYFFHGTRQYKFDPKTKRILTLQKANSWFNCRKN

SEQ ID NO: 201 - protein, 450 aa, Artificial Sequence
  MMP-1 variant D181Y
FPATLETQEQDVDLVQKYLEKYYNLKNDGRQVEKRRNSGPVVEKLKQMQEFFGLKVTGKPDAETLKVMKQPRCGVPDVAQFVLTEGNPRWEQTHLTYRIENYTPDLPRADVDHAIEKAFQLWSNVTPLTFTKVSEGQADIMISFVRGDHRDNSPFDGPGGNLAHAFQPGPGIGGDAHFDEYERWTNNFREYNLHRVAAHELGHSLGLSHSTDIGALMYPSYTFSGDVQLAQDDIDGIQAIYGRSQNPVQPIGPQTPKACDSKLTFDAITTIRGEVMFFKDRFYMRTNPFYPEVELNFISVFWPQLPNGLEAAYEFADRDEVRFFKGNKYWAVQGQNVLHGYPKDIYSSFGFPRTVKHIDAALSEENTGKTYFFVANKYWRYDEYKRSMDPGYPKMIAHDFPGIGHKVDAVFMKDGFFYFFHGTRQYKFDPKTKRILTLQKANSWFNCRKN

SEQ ID NO: 202 - protein, 450 aa, Artificial Sequence
  MMP-1 variant D181S
FPATLETQEQDVDLVQKYLEKYYNLKNDGRQVEKRRNSGPVVEKLKQMQEFFGLKVTGKPDAETLKVMKQPRCGVPDVAQFVLTEGNPRWEQTHLTYRIENYTPDLPRADVDHAIEKAFQLWSNVTPLTFTKVSEGQADIMISFVRGDHRDNSPFDGPGGNLAHAFQPGPGIGGDAHFDESERWTNNFREYNLHRVAAHELGHSLGLSHSTDIGALMYPSYTFSGDVQLAQDDIDGIQAIYGRSQNPVQPIGPQTPKACDSKLTFDAITTIRGEVMFFKDRFYMRTNPFYPEVELNFISVFWPQLPNGLEAAYEFADRDEVRFFKGNKYWAVQGQNVLHGYPKDIYSSFGFPRTVKHIDAALSEENTGKTYFFVANKYWRYDEYKRSMDPGYPKMIAHDFPGIGHKVDAVFMKDGFFYFFHGTRQYKFDPKTKRILTLQKANSWFNCRKN

SEQ ID NO: 203 - protein, 450 aa, Artificial Sequence
  MMP-1 variant D181G
FPATLETQEQDVDLVQKYLEKYYNLKNDGRQVEKRRNSGPVVEKLKQMQEFFGLKVTGKPDAETLKVMKQPRCGVPDVAQFVLTEGNPRWEQTHLTYRIENYTPDLPRADVDHAIEKAFQLWSNVTPLTFTKVSEGQADIMISFVRGDHRDNSPFDGPGGNLAHAFQPGPGIGGDAHFDEGERWTNNFREYNLHRVAAHELGHSLGLSHSTDIGALMYPSYTFSGDVQLAQDDIDGIQAIYGRSQNPVQPIGPQTPKACDSKLTFDAITTIRGEVMFFKDRFYMRTNPFYPEVELNFISVFWPQLPNGLEAAYEFADRDEVRFFKGNKYWAVQGQNVLHGYPKDIYSSFGFPRTVKHIDAALSEENTGKTYFFVANKYWRYDEYKRSMDPGYPKMIAHDFPGIGHKVDAVFMKDGFFYFFHGTRQYKFDPKTKRILTLQKANSWFNCRKN

SEQ ID NO: 204 - protein, 450 aa, Artificial Sequence
  MMP-1 variant D181F
FPATLETQEQDVDLVQKYLEKYYNLKNDGRQVEKRRNSGPVVEKLKQMQEFFGLKVTGKPDAETLKVMKQPRCGVPDVAQFVLTEGNPRWEQTHLTYRIENYTPDLPRADVDHAIEKAFQLWSNVTPLTFTKVSEGQADIMISFVRGDHRDNSPFDGPGGNLAHAFQPGPGIGGDAHFDEWERWTNNFREYNLHRVAAHELGHSLGLSHSTDIGALMYPSYTFSGDVQLAQDDIDGIQAIYGRSQNPVQPIGPQTPKACDSKLTFDAITTIRGEVMFFKDRFYMRTNPFYPEVELNFISVFWPQLPNGLEAAYEFADRDEVRFFKGNKYWAVQGQNVLHGYPKDIYSSFGFPRTVKHIDAALSEENTGKTYFFVANKYWRYDEYKRSMDPGYPKMIAHDFPGIGHKVDAVFMKDGFFYFFHGTRQYKFDPKTKRILTLQKANSWFNCRKN

SEQ ID NO: 205 - protein, 450 aa, Artificial Sequence
  MMP-1 variant D181M
FPATLETQEQDVDLVQKYLEKYYNLKNDGRQVEKRRNSGPVVEKLKQMQEFFGLKVTGKPDAETLKVMKQPRCGVPDVAQFVLTEGNPRWEQTHLTYRIENYTPDLPRADVDHAIEKAFQLWSNVTPLTFTKVSEGQADIMISFVRGDHRDNSPFDGPGGNLAHAFQPGPGIGGDAHFDEMERWTNNFREYNLHRVAAHELGHSLGLSHSTDIGALMYPSYTFSGDVQLAQDDIDGIQAIYGRSQNPVQPIGPQTPKACDSKLTFDAITTIRGEVMFFKDRFYMRTNPFYPEVELNFISVFWPQLPNGLEAAYEFADRDEVRFFKGNKYWAVQGQNVLHGYPKDIYSSFGFPRTVKHIDAALSEENTGKTYFFVANKYWRYDEYKRSMDPGYPKMIAHDFPGIGHKVDAVFMKDGFFYFFHGTRQYKFDPKTKRILTLQKANSWFNCRKN

SEQ ID NO: 206 - protein, 450 aa, Artificial Sequence; identical to SEQ ID NO: 204
  MMP-1 variant D181W

SEQ ID NO: 207 - protein, 450 aa, Artificial Sequence
  MMP-1 variant D181I
FPATLETQEQDVDLVQKYLEKYYNLKNDGRQVEKRRNSGPVVEKLKQMQEFFGLKVTGKPDAETLKVMKQPRCGVPDVAQFVLTEGNPRWEQTHLTYRIENYTPDLPRADVDHAIEKAFQLWSNVTPLTFTKVSEGQADIMISFVRGDHRDNSPFDGPGGNLAHAFQPGPGIGGDAHFDEIERWTNNFREYNLHRVAAHELGHSLGLSHSTDIGALMYPSYTFSGDVQLAQDDIDGIQAIYGRSQNPVQPIGPQTPKACDSKLTFDAITTIRGEVMFFKDRFYMRTNPFYPEVELNFISVFWPQLPNGLEAAYEFADRDEVRFFKGNKYWAVQGQNVLHGYPKDIYSSFGFPRTVKHIDAALSEENTGKTYFFVANKYWRYDEYKRSMDPGYPKMIAHDFPGIGHKVDAVFMKDGFFYFFHGTRQYKFDPKTKRILTLQKANSWFNCRKN

SEQ ID NO: 208 - protein, 450 aa, Artificial Sequence
  MMP-1 variant D181V
FPATLETQEQDVDLVQKYLEKYYNLKNDGRQVEKRRNSGPVVEKLKQMQEFFGLKVTGKPDAETLKVMKQPRCGVPDVAQFVLTEGNPRWEQTHLTYRIENYTPDLPRADVDHAIEKAFQLWSNVTPLTFTKVSEGQADIMISFVRGDHRDNSPFDGPGGNLAHAFQPGPGIGGDAHFDEVERWTNNFREYNLHRVAAHELGHSLGLSHSTDIGALMYPSYTFSGDVQLAQDDIDGIQAIYGRSQNPVQPIGPQTPKACDSKLTFDAITTIRGEVMFFKDRFYMRTNPFYPEVELNFISVFWPQLPNGLEAAYEFADRDEVRFFKGNKYWAVQGQNVLHGYPKDIYSSFGFPRTVKHIDAALSEENTGKTYFFVANKYWRYDEYKRSMDPGYPKMIAHDFPGIGHKVDAVFMKDGFFYFFHGTRQYKFDPKTKRILTLQKANSWFNCRKN

SEQ ID NO: 209 - protein, 450 aa, Artificial Sequence
  MMP-1 variant D181L
FPATLETQEQDVDLVQKYLEKYYNLKNDGRQVEKRRNSGPVVEKLKQMQEFFGLKVTGKPDAETLKVMKQPRCGVPDVAQFVLTEGNPRWEQTHLTYRIENYTPDLPRADVDHAIEKAFQLWSNVTPLTFTKVSEGQADIMISFVRGDHRDNSPFDGPGGNLAHAFQPGPGIGGDAHFDELERWTNNFREYNLHRVAAHELGHSLGLSHSTDIGALMYPSYTFSGDVQLAQDDIDGIQAIYGRSQNPVQPIGPQTPKACDSKLTFDAITTIRGEVMFFKDRFYMRTNPFYPEVELNFISVFWPQLPNGLEAAYEFADRDEVRFFKGNKYWAVQGQNVLHGYPKDIYSSFGFPRTVKHIDAALSEENTGKTYFFVANKYWRYDEYKRSMDPGYPKMIAHDFPGIGHKVDAVFMKDGFFYFFHGTRQYKFDPKTKRILTLQKANSWFNCRKN

SEQ ID NO: 210 - protein, 450 aa, Artificial Sequence
  MMP-1 variant D181A
FPATLETQEQDVDLVQKYLEKYYNLKNDGRQVEKRRNSGPVVEKLKQMQEFFGLKVTGKPDAETLKVMKQPRCGVPDVAQFVLTEGNPRWEQTHLTYRIENYTPDLPRADVDHAIEKAFQLWSNVTPLTFTKVSEGQADIMISFVRGDHRDNSPFDGPGGNLAHAFQPGPGIGGDAHFDEAERWTNNFREYNLHRVAAHELGHSLGLSHSTDIGALMYPSYTFSGDVQLAQDDIDGIQAIYGRSQNPVQPIGPQTPKACDSKLTFDAITTIRGEVMFFKDRFYMRTNPFYPEVELNFISVFWPQLPNGLEAAYEFADRDEVRFFKGNKYWAVQGQNVLHGYPKDIYSSFGFPRTVKHIDAALSEENTGKTYFFVANKYWRYDEYKRSMDPGYPKMIAHDFPGIGHKVDAVFMKDGFFYFFHGTRQYKFDPKTKRILTLQKANSWFNCRKN

SEQ ID NO: 211 - protein, 450 aa, Artificial Sequence
  MMP-1 variant D181P
FPATLETQEQDVDLVQKYLEKYYNLKNDGRQVEKRRNSGPVVEKLKQMQEFFGLKVTGKPDAETLKVMKQPRCGVPDVAQFVLTEGNPRWEQTHLTYRIENYTPDLPRADVDHAIEKAFQLWSNVTPLTFTKVSEGQADIMISFVRGDHRDNSPFDGPGGNLAHAFQPGPGIGGDAHFDEPERWTNNFREYNLHRVAAHELGHSLGLSHSTDIGALMYPSYTFSGDVQLAQDDIDGIQAIYGRSQNPVQPIGPQTPKACDSKLTFDAITTIRGEVMFFKDRFYMRTNPFYPEVELNFISVFWPQLPNGLEAAYEFADRDEVRFFKGNKYWAVQGQNVLHGYPKDIYSSFGFPRTVKHIDAALSEENTGKTYFFVANKYWRYDEYKRSMDPGYPKMIAHDFPGIGHKVDAVFMKDGFFYFFHGTRQYKFDPKTKRILTLQKANSWFNCRKN

SEQ ID NO: 212 - protein, 450 aa, Artificial Sequence
  MMP-1 variant E182D
FPATLETQEQDVDLVQKYLEKYYNLKNDGRQVEKRRNSGPVVEKLKQMQEFFGLKVTGKPDAETLKVMKQPRCGVPDVAQFVLTEGNPRWEQTHLTYRIENYTPDLPRADVDHAIEKAFQLWSNVTPLTFTKVSEGQADIMISFVRGDHRDNSPFDGPGGNLAHAFQPGPGIGGDAHFDEDDRWTNNFREYNLHRVAAHELGHSLGLSHSTDIGALMYPSYTFSGDVQLAQDDIDGIQAIYGRSQNPVQPIGPQTPKACDSKLTFDAITTIRGEVMFFKDRFYMRTNPFYPEVELNFISVFWPQLPNGLEAAYEFADRDEVRFFKGNKYWAVQGQNVLHGYPKDIYSSFGFPRTVKHIDAALSEENTGKTYFFVANKYWRYDEYKRSMDPGYPKMIAHDFPGIGHKVDAVFMKDGFFYFFHGTRQYKFDPKTKRILTLQKANSWFNCRKN

SEQ ID NO: 213 - protein, 450 aa, Artificial Sequence
  MMP-1 variant E182H
FPATLETQEQDVDLVQKYLEKYYNLKNDGRQVEKRRNSGPVVEKLKQMQEFFGLKVTGKPDAETLKVMKQPRCGVPDVAQFVLTEGNPRWEQTHLTYRIENYTPDLPRADVDHAIEKAFQLWSNVTPLTFTKVSEGQADIMISFVRGDHRDNSPFDGPGGNLAHAFQPGPGIGGDAHFDEDHRWTNNFREYNLHRVAAHELGHSLGLSHSTDIGALMYPSYTFSGDVQLAQDDIDGIQAIYGRSQNPVQPIGPQTPKACDSKLTFDAITTIRGEVMFFKDRFYMRTNPFYPEVELNFISVFWPQLPNGLEAAYEFADRDEVRFFKGNKYWAVQGQNVLHGYPKDIYSSFGFPRTVKHIDAALSEENTGKTYFFVANKYWRYDEYKRSMDPGYPKMIAHDFPGIGHKVDAVFMKDGFFYFFHGTRQYKFDPKTKRILTLQKANSWFNCRKN

SEQ ID NO: 214 - protein, 450 aa, Artificial Sequence
  MMP-1 variant E182K
FPATLETQEQDVDLVQKYLEKYYNLKNDGRQVEKRRNSGPVVEKLKQMQEFFGLKVTGKPDAETLKVMKQPRCGVPDVAQFVLTEGNPRWEQTHLTYRIENYTPDLPRADVDHAIEKAFQLWSNVTPLTFTKVSEGQADIMISFVRGDHRDNSPFDGPGGNLAHAFQPGPGIGGDAHFDEDKRWTNNFREYNLHRVAAHELGHSLGLSHSTDIGALMYPSYTFSGDVQLAQDDIDGIQAIYGRSQNPVQPIGPQTPKACDSKLTFDAITTIRGEVMFFKDRFYMRTNPFYPEVELNFISVFWPQLPNGLEAAYEFADRDEVRFFKGNKYWAVQGQNVLHGYPKDIYSSFGFPRTVKHIDAALSEENTGKTYFFVANKYWRYDEYKRSMDPGYPKMIAHDFPGIGHKVDAVFMKDGFFYFFHGTRQYKFDPKTKRILTLQKANSWFNCRKN

SEQ ID NO: 215 - protein, 450 aa, Artificial Sequence
  MMP-1 variant E182R
FPATLETQEQDVDLVQKYLEKYYNLKNDGRQVEKRRNSGPVVEKLKQMQEFFGLKVTGKPDAETLKVMKQPRCGVPDVAQFVLTEGNPRWEQTHLTYRIENYTPDLPRADVDHAIEKAFQLWSNVTPLTFTKVSEGQADIMISFVRGDHRDNSPFDGPGGNLAHAFQPGPGIGGDAHFDEDRRWTNNFREYNLHRVAAHELGHSLGLSHSTDIGALMYPSYTFSGDVQLAQDDIDGIQAIYGRSQNPVQPIGPQTPKACDSKLTFDAITTIRGEVMFFKDRFYMRTNPFYPEVELNFISVFWPQLPNGLEAAYEFADRDEVRFFKGNKYWAVQGQNVLHGYPKDIYSSFGFPRTVKHIDAALSEENTGKTYFFVANKYWRYDEYKRSMDPGYPKMIAHDFPGIGHKVDAVFMKDGFFYFFHGTRQYKFDPKTKRILTLQKANSWFNCRKN

SEQ ID NO: 216 - protein, 450 aa, Artificial Sequence
  MMP-1 variant E182C
FPATLETQEQDVDLVQKYLEKYYNLKNDGRQVEKRRNSGPVVEKLKQMQEFFGLKVTGKPDAETLKVMKQPRCGVPDVAQFVLTEGNPRWEQTHLTYRIENYTPDLPRADVDHAIEKAFQLWSNVTPLTFTKVSEGQADIMISFVRGDHRDNSPFDGPGGNLAHAFQPGPGIGGDAHFDEDCRWTNNFREYNLHRVAAHELGHSLGLSHSTDIGALMYPSYTFSGDVQLAQDDIDGIQAIYGRSQNPVQPIGPQTPKACDSKLTFDAITTIRGEVMFFKDRFYMRTNPFYPEVELNFISVFWPQLPNGLEAAYEFADRDEVRFFKGNKYWAVQGQNVLHGYPKDIYSSFGFPRTVKHIDAALSEENTGKTYFFVANKYWRYDEYKRSMDPGYPKMIAHDFPGIGHKVDAVFMKDGFFYFFHGTRQYKFDPKTKRILTLQKANSWFNCRKN

SEQ ID NO: 217 - protein, 450 aa, Artificial Sequence
  MMP-1 variant E182N
FPATLETQEQDVDLVQKYLEKYYNLKNDGRQVEKRRNSGPVVEKLKQMQEFFGLKVTGKPDAETLKVMKQPRCGVPDVAQFVLTEGNPRWEQTHLTYRIENYTPDLPRADVDHAIEKAFQLWSNVTPLTFTKVSEGQADIMISFVRGDHRDNSPFDGPGGNLAHAFQPGPGIGGDAHFDEDNRWTNNFREYNLHRVAAHELGHSLGLSHSTDIGALMYPSYTFSGDVQLAQDDIDGIQAIYGRSQNPVQPIGPQTPKACDSKLTFDAITTIRGEVMFFKDRFYMRTNPFYPEVELNFISVFWPQLPNGLEAAYEFADRDEVRFFKGNKYWAVQGQNVLHGYPKDIYSSFGFPRTVKHIDAALSEENTGKTYFFVANKYWRYDEYKRSMDPGYPKMIAHDFPGIGHKVDAVFMKDGFFYFFHGTRQYKFDPKTKRILTLQKANSWFNCRKN

SEQ ID NO: 218 - protein, 450 aa, Artificial Sequence
  MMP-1 variant E182Q
FPATLETQEQDVDLVQKYLEKYYNLKNDGRQVEKRRNSGPVVEKLKQMQEFFGLKVTGKPDAETLKVMKQPRCGVPDVAQFVLTEGNPRWEQTHLTYRIENYTPDLPRADVDHAIEKAFQLWSNVTPLTFTKVSEGQADIMISFVRGDHRDNSPFDGPGGNLAHAFQPGPGIGGDAHFDEDQRWTNNFREYNLHRVAAHELGHSLGLSHSTDIGALMYPSYTFSGDVQLAQDDIDGIQAIYGRSQNPVQPIGPQTPKACDSKLTFDAITTIRGEVMFFKDRFYMRTNPFYPEVELNFISVFWPQLPNGLEAAYEFADRDEVRFFKGNKYWAVQGQNVLHGYPKDIYSSFGFPRTVKHIDAALSEENTGKTYFFVANKYWRYDEYKRSMDPGYPKMIAHDFPGIGHKVDAVFMKDGFFYFFHGTRQYKFDPKTKRILTLQKANSWFNCRKN

SEQ ID NO: 219 - protein, 450 aa, Artificial Sequence
  MMP-1 variant E182T
FPATLETQEQDVDLVQKYLEKYYNLKNDGRQVEKRRNSGPVVEKLKQMQEFFGLKVTGKPDAETLKVMKQPRCGVPDVAQFVLTEGNPRWEQTHLTYRIENYTPDLPRADVDHAIEKAFQLWSNVTPLTFTKVSEGQADIMISFVRGDHRDNSPFDGPGGNLAHAFQPGPGIGGDAHFDEDYRWTNNFREYNLHRVAAHELGHSLGLSHSTDIGALMYPSYTFSGDVQLAQDDIDGIQAIYGRSQNPVQPIGPQTPKACDSKLTFDAITTIRGEVMFFKDRFYMRTNPFYPEVELNFISVFWPQLPNGLEAAYEFADRDEVRFFKGNKYWAVQGQNVLHGYPKDIYSSFGFPRTVKHIDAALSEENTGKTYFFVANKYWRYDEYKRSMDPGYPKMIAHDFPGIGHKVDAVFMKDGFFYFFHGTRQYKFDPKTKRILTLQKANSWFNCRKN

SEQ ID NO: 220 - protein, 450 aa, Artificial Sequence; identical to SEQ ID NO: 219
  MMP-1 variant E182Y

SEQ ID NO: 221 - protein, 450 aa, Artificial Sequence
  MMP-1 variant E182S
FPATLETQEQDVDLVQKYLEKYYNLKNDGRQVEKRRNSGPVVEKLKQMQEFFGLKVTGKPDAETLKVMKQPRCGVPDVAQFVLTEGNPRWEQTHLTYRIENYTPDLPRADVDHAIEKAFQLWSNVTPLTFTKVSEGQADIMISFVRGDHRDNSPFDGPGGNLAHAFQPGPGIGGDAHFDEDSRWTNNFREYNLHRVAAHELGHSLGLSHSTDIGALMYPSYTFSGDVQLAQDDIDGIQAIYGRSQNPVQPIGPQTPKACDSKLTFDAITTIRGEVMFFKDRFYMRTNPFYPEVELNFISVFWPQLPNGLEAAYEFADRDEVRFFKGNKYWAVQGQNVLHGYPKDIYSSFGFPRTVKHIDAALSEENTGKTYFFVANKYWRYDEYKRSMDPGYPKMIAHDFPGIGHKVDAVFMKDGFFYFFHGTRQYKFDPKTKRILTLQKANSWFNCRKN

SEQ ID NO: 222 - protein, 450 aa, Artificial Sequence
  MMP-1 variant E182G
FPATLETQEQDVDLVQKYLEKYYNLKNDGRQVEKRRNSGPVVEKLKQMQEFFGLKVTGKPDAETLKVMKQPRCGVPDVAQFVLTEGNPRWEQTHLTYRIENYTPDLPRADVDHAIEKAFQLWSNVTPLTFTKVSEGQADIMISFVRGDHRDNSPFDGPGGNLAHAFQPGPGIGGDAHFDEDGRWTNNFREYNLHRVAAHELGHSLGLSHSTDIGALMYPSYTFSGDVQLAQDDIDGIQAIYGRSQNPVQPIGPQTPKACDSKLTFDAITTIRGEVMFFKDRFYMRTNPFYPEVELNFISVFWPQLPNGLEAAYEFADRDEVRFFKGNKYWAVQGQNVLHGYPKDIYSSFGFPRTVKHIDAALSEENTGKTYFFVANKYWRYDEYKRSMDPGYPKMIAHDFPGIGHKVDAVFMKDGFFYFFHGTRQYKFDPKTKRILTLQKANSWFNCRKN

SEQ ID NO: 223 - protein, 450 aa, Artificial Sequence
  MMP-1 variant E182F
FPATLETQEQDVDLVQKYLEKYYNLKNDGRQVEKRRNSGPVVEKLKQMQEFFGLKVTGKPDAETLKVMKQPRCGVPDVAQFVLTEGNPRWEQTHLTYRIENYTPDLPRADVDHAIEKAFQLWSNVTPLTFTKVSEGQADIMISFVRGDHRDNSPFDGPGGNLAHAFQPGPGIGGDAHFDEDFRWTNNFREYNLHRVAAHELGHSLGLSHSTDIGALMYPSYTFSGDVQLAQDDIDGIQAIYGRSQNPVQPIGPQTPKACDSKLTFDAITTIRGEVMFFKDRFYMRTNPFYPEVELNFISVFWPQLPNGLEAAYEFADRDEVRFFKGNKYWAVQGQNVLHGYPKDIYSSFGFPRTVKHIDAALSEENTGKTYFFVANKYWRYDEYKRSMDPGYPKMIAHDFPGIGHKVDAVFMKDGFFYFFHGTRQYKFDPKTKRILTLQKANSWFNCRKN

SEQ ID NO: 224 - protein, 450 aa, Artificial Sequence
  MMP-1 variant E182M
FPATLETQEQDVDLVQKYLEKYYNLKNDGRQVEKRRNSGPVVEKLKQMQEFFGLKVTGKPDAETLKVMKQPRCGVPDVAQFVLTEGNPRWEQTHLTYRIENYTPDLPRADVDHAIEKAFQLWSNVTPLTFTKVSEGQADIMISFVRGDHRDNSPFDGPGGNLAHAFQPGPGIGGDAHFDEDMRWTNNFREYNLHRVAAHELGHSLGLSHSTDIGALMYPSYTFSGDVQLAQDDIDGIQAIYGRSQNPVQPIGPQTPKACDSKLTFDAITTIRGEVMFFKDRFYMRTNPFYPEVELNFISVFWPQLPNGLEAAYEFADRDEVRFFKGNKYWAVQGQNVLHGYPKDIYSSFGFPRTVKHIDAALSEENTGKTYFFVANKYWRYDEYKRSMDPGYPKMIAHDFPGIGHKVDAVFMKDGFFYFFHGTRQYKFDPKTKRILTLQKANSWFNCRKN

SEQ ID NO: 225 - protein, 450 aa, Artificial Sequence
  MMP-1 variant E182W
FPATLETQEQDVDLVQKYLEKYYNLKNDGRQVEKRRNSGPVVEKLKQMQEFFGLKVTGKPDAETLKVMKQPRCGVPDVAQFVLTEGNPRWEQTHLTYRIENYTPDLPRADVDHAIEKAFQLWSNVTPLTFTKVSEGQADIMISFVRGDHRDNSPFDGPGGNLAHAFQPGPGIGGDAHFDEDWRWTNNFREYNLHRVAAHELGHSLGLSHSTDIGALMYPSYTFSGDVQLAQDDIDGIQAIYGRSQNPVQPIGPQTPKACDSKLTFDAITTIRGEVMFFKDRFYMRTNPFYPEVELNFISVFWPQLPNGLEAAYEFADRDEVRFFKGNKYWAVQGQNVLHGYPKDIYSSFGFPRTVKHIDAALSEENTGKTYFFVANKYWRYDEYKRSMDPGYPKMIAHDFPGIGHKVDAVFMKDGFFYFFHGTRQYKFDPKTKRILTLQKANSWFNCRKN

SEQ ID NO: 226 - protein, 450 aa, Artificial Sequence
  MMP-1 variant E182I
FPATLETQEQDVDLVQKYLEKYYNLKNDGRQVEKRRNSGPVVEKLKQMQEFFGLKVTGKPDAETLKVMKQPRCGVPDVAQFVLTEGNPRWEQTHLTYRIENYTPDLPRADVDHAIEKAFQLWSNVTPLTFTKVSEGQADIMISFVRGDHRDNSPFDGPGGNLAHAFQPGPGIGGDAHFDEDIRWTNNFREYNLHRVAAHELGHSLGLSHSTDIGALMYPSYTFSGDVQLAQDDIDGIQAIYGRSQNPVQPIGPQTPKACDSKLTFDAITTIRGEVMFFKDRFYMRTNPFYPEVELNFISVFWPQLPNGLEAAYEFADRDEVRFFKGNKYWAVQGQNVLHGYPKDIYSSFGFPRTVKHIDAALSEENTGKTYFFVANKYWRYDEYKRSMDPGYPKMIAHDFPGIGHKVDAVFMKDGFFYFFHGTRQYKFDPKTKRILTLQKANSWFNCRKN

SEQ ID NO: 227 - protein, 450 aa, Artificial Sequence
  MMP-1 variant E182V
FPATLETQEQDVDLVQKYLEKYYNLKNDGRQVEKRRNSGPVVEKLKQMQEFFGLKVTGKPDAETLKVMKQPRCGVPDVAQFVLTEGNPRWEQTHLTYRIENYTPDLPRADVDHAIEKAFQLWSNVTPLTFTKVSEGQADIMISFVRGDHRDNSPFDGPGGNLAHAFQPGPGIGGDAHFDEDVRWTNNFREYNLHRVAAHELGHSLGLSHSTDIGALMYPSYTFSGDVQLAQDDIDGIQAIYGRSQNPVQPIGPQTPKACDSKLTFDAITTIRGEVMFFKDRFYMRTNPFYPEVELNFISVFWPQLPNGLEAAYEFADRDEVRFFKGNKYWAVQGQNVLHGYPKDIYSSFGFPRTVKHIDAALSEENTGKTYFFVANKYWRYDEYKRSMDPGYPKMIAHDFPGIGHKVDAVFMKDGFFYFFHGTRQYKFDPKTKRILTLQKANSWFNCRKN

SEQ ID NO: 228 - protein, 450 aa, Artificial Sequence
  MMP-1 variant E182L
FPATLETQEQDVDLVQKYLEKYYNLKNDGRQVEKRRNSGPVVEKLKQMQEFFGLKVTGKPDAETLKVMKQPRCGVPDVAQFVLTEGNPRWEQTHLTYRIENYTPDLPRADVDHAIEKAFQLWSNVTPLTFTKVSEGQADIMISFVRGDHRDNSPFDGPGGNLAHAFQPGPGIGGDAHFDEDLRWTNNFREYNLHRVAAHELGHSLGLSHSTDIGALMYPSYTFSGDVQLAQDDIDGIQAIYGRSQNPVQPIGPQTPKACDSKLTFDAITTIRGEVMFFKDRFYMRTNPFYPEVELNFISVFWPQLPNGLEAAYEFADRDEVRFFKGNKYWAVQGQNVLHGYPKDIYSSFGFPRTVKHIDAALSEENTGKTYFFVANKYWRYDEYKRSMDPGYPKMIAHDFPGIGHKVDAVFMKDGFFYFFHGTRQYKFDPKTKRILTLQKANSWFNCRKN

SEQ ID NO: 229 - protein, 450 aa, Artificial Sequence
  MMP-1 variant E182A
FPATLETQEQDVDLVQKYLEKYYNLKNDGRQVEKRRNSGPVVEKLKQMQEFFGLKVTGKPDAETLKVMKQPRCGVPDVAQFVLTEGNPRWEQTHLTYRIENYTPDLPRADVDHAIEKAFQLWSNVTPLTFTKVSEGQADIMISFVRGDHRDNSPFDGPGGNLAHAFQPGPGIGGDAHFDEDARWTNNFREYNLHRVAAHELGHSLGLSHSTDIGALMYPSYTFSGDVQLAQDDIDGIQAIYGRSQNPVQPIGPQTPKACDSKLTFDAITTIRGEVMFFKDRFYMRTNPFYPEVELNFISVFWPQLPNGLEAAYEFADRDEVRFFKGNKYWAVQGQNVLHGYPKDIYSSFGFPRTVKHIDAALSEENTGKTYFFVANKYWRYDEYKRSMDPGYPKMIAHDFPGIGHKVDAVFMKDGFFYFFHGTRQYKFDPKTKRILTLQKANSWFNCRKN

SEQ ID NO: 230 - protein, 450 aa, Artificial Sequence
  MMP-1 variant E182P
FPATLETQEQDVDLVQKYLEKYYNLKNDGRQVEKRRNSGPVVEKLKQMQEFFGLKVTGKPDAETLKVMKQPRCGVPDVAQFVLTEGNPRWEQTHLTYRIENYTPDLPRADVDHAIEKAFQLWSNVTPLTFTKVSEGQADIMISFVRGDHRDNSPFDGPGGNLAHAFQPGPGIGGDAHFDEDPRWTNNFREYNLHRVAAHELGHSLGLSHSTDIGALMYPSYTFSGDVQLAQDDIDGIQAIYGRSQNPVQPIGPQTPKACDSKLTFDAITTIRGEVMFFKDRFYMRTNPFYPEVELNFISVFWPQLPNGLEAAYEFADRDEVRFFKGNKYWAVQGQNVLHGYPKDIYSSFGFPRTVKHIDAALSEENTGKTYFFVANKYWRYDEYKRSMDPGYPKMIAHDFPGIGHKVDAVFMKDGFFYFFHGTRQYKFDPKTKRILTLQKANSWFNCRKN

SEQ ID NO: 231 - protein, 450 aa, Artificial Sequence
  MMP-1 variant T185D
FPATLETQEQDVDLVQKYLEKYYNLKNDGRQVEKRRNSGPVVEKLKQMQEFFGLKVTGKPDAETLKVMKQPRCGVPDVAQFVLTEGNPRWEQTHLTYRIENYTPDLPRADVDHAIEKAFQLWSNVTPLTFTKVSEGQADIMISFVRGDHRDNSPFDGPGGNLAHAFQPGPGIGGDAHFDEDERWDNNFREYNLHRVAAHELGHSLGLSHSTDIGALMYPSYTFSGDVQLAQDDIDGIQAIYGRSQNPVQPIGPQTPKACDSKLTFDAITTIRGEVMFFKDRFYMRTNPFYPEVELNFISVFWPQLPNGLEAAYEFADRDEVRFFKGNKYWAVQGQNVLHGYPKDIYSSFGFPRTVKHIDAALSEENTGKTYFFVANKYWRYDEYKRSMDPGYPKMIAHDFPGIGHKVDAVFMKDGFFYFFHGTRQYKFDPKTKRILTLQKANSWFNCRKN

SEQ ID NO: 232 - protein, 450 aa, Artificial Sequence
  MMP-1 variant T185E
FPATLETQEQDVDLVQKYLEKYYNLKNDGRQVEKRRNSGPVVEKLKQMQEFFGLKVTGKPDAETLKVMKQPRCGVPDVAQFVLTEGNPRWEQTHLTYRIENYTPDLPRADVDHAIEKAFQLWSNVTPLTFTKVSEGQADIMISFVRGDHRDNSPFDGPGGNLAHAFQPGPGIGGDAHFDEDERWENNFREYNLHRVAAHELGHSLGLSHSTDIGALMYPSYTFSGDVQLAQDDIDGIQAIYGRSQNPVQPIGPQTPKACDSKLTFDAITTIRGEVMFFKDRFYMRTNPFYPEVELNFISVFWPQLPNGLEAAYEFADRDEVRFFKGNKYWAVQGQNVLHGYPKDIYSSFGFPRTVKHIDAALSEENTGKTYFFVANKYWRYDEYKRSMDPGYPKMIAHDFPGIGHKVDAVFMKDGFFYFFHGTRQYKFDPKTKRILTLQKANSWFNCRKN

SEQ ID NO: 233 - protein, 450 aa, Artificial Sequence
  MMP-1 variant T185H
FPATLETQEQDVDLVQKYLEKYYNLKNDGRQVEKRRNSGPVVEKLKQMQEFFGLKVTGKPDAETLKVMKQPRCGVPDVAQFVLTEGNPRWEQTHLTYRIENYTPDLPRADVDHAIEKAFQLWSNVTPLTFTKVSEGQADIMISFVRGDHRDNSPFDGPGGNLAHAFQPGPGIGGDAHFDEDERWHNNFREYNLHRVAAHELGHSLGLSHSTDIGALMYPSYTFSGDVQLAQDDIDGIQAIYGRSQNPVQPIGPQTPKACDSKLTFDAITTIRGEVMFFKDRFYMRTNPFYPEVELNFISVFWPQLPNGLEAAYEFADRDEVRFFKGNKYWAVQGQNVLHGYPKDIYSSFGFPRTVKHIDAALSEENTGKTYFFVANKYWRYDEYKRSMDPGYPKMIAHDFPGIGHKVDAVFMKDGFFYFFHGTRQYKFDPKTKRILTLQKANSWFNCRKN

SEQ ID NO: 234 - protein, 450 aa, Artificial Sequence
  MMP-1 variant T185K
FPATLETQEQDVDLVQKYLEKYYNLKNDGRQVEKRRNSGPVVEKLKQMQEFFGLKVTGKPDAETLKVMKQPRCGVPDVAQFVLTEGNPRWEQTHLTYRIENYTPDLPRADVDHAIEKAFQLWSNVTPLTFTKVSEGQADIMISFVRGDHRDNSPFDGPGGNLAHAFQPGPGIGGDAHFDEDERWKNNFREYNLHRVAAHELGHSLGLSHSTDIGALMYPSYTFSGDVQLAQDDIDGIQAIYGRSQNPVQPIGPQTPKACDSKLTFDAITTIRGEVMFFKDRFYMRTNPFYPEVELNFISVFWPQLPNGLEAAYEFADRDEVRFFKGNKYWAVQGQNVLHGYPKDIYSSFGFPRTVKHIDAALSEENTGKTYFFVANKYWRYDEYKRSMDPGYPKMIAHDFPGIGHKVDAVFMKDGFFYFFHGTRQYKFDPKTKRILTLQKANSWFNCRKN

SEQ ID NO: 235 - protein, 450 aa, Artificial Sequence
  MMP-1 variant T185R
FPATLETQEQDVDLVQKYLEKYYNLKNDGRQVEKRRNSGPVVEKLKQMQEFFGLKVTGKPDAETLKVMKQPRCGVPDVAQFVLTEGNPRWEQTHLTYRIENYTPDLPRADVDHAIEKAFQLWSNVTPLTFTKVSEGQADIMISFVRGDHRDNSPFDGPGGNLAHAFQPGPGIGGDAHFDEDERWRNNFREYNLHRVAAHELGHSLGLSHSTDIGALMYPSYTFSGDVQLAQDDIDGIQAIYGRSQNPVQPIGPQTPKACDSKLTFDAITTIRGEVMFFKDRFYMRTNPFYPEVELNFISVFWPQLPNGLEAAYEFADRDEVRFFKGNKYWAVQGQNVLHGYPKDIYSSFGFPRTVKHIDAALSEENTGKTYFFVANKYWRYDEYKRSMDPGYPKMIAHDFPGIGHKVDAVFMKDGFFYFFHGTRQYKFDPKTKRILTLQKANSWFNCRKN

SEQ ID NO: 236 - protein, 450 aa, Artificial Sequence
  MMP-1 variant T185C
FPATLETQEQDVDLVQKYLEKYYNLKNDGRQVEKRRNSGPVVEKLKQMQEFFGLKVTGKPDAETLKVMKQPRCGVPDVAQFVLTEGNPRWEQTHLTYRIENYTPDLPRADVDHAIEKAFQLWSNVTPLTFTKVSEGQADIMISFVRGDHRDNSPFDGPGGNLAHAFQPGPGIGGDAHFDEDERWCNNFREYNLHRVAAHELGHSLGLSHSTDIGALMYPSYTFSGDVQLAQDDIDGIQAIYGRSQNPVQPIGPQTPKACDSKLTFDAITTIRGEVMFFKDRFYMRTNPFYPEVELNFISVFWPQLPNGLEAAYEFADRDEVRFFKGNKYWAVQGQNVLHGYPKDIYSSFGFPRTVKHIDAALSEENTGKTYFFVANKYWRYDEYKRSMDPGYPKMIAHDFPGIGHKVDAVFMKDGFFYFFHGTRQYKFDPKTKRILTLQKANSWFNCRKN

SEQ ID NO: 237 - protein, 450 aa, Artificial Sequence
  MMP-1 variant T185N
FPATLETQEQDVDLVQKYLEKYYNLKNDGRQVEKRRNSGPVVEKLKQMQEFFGLKVTGKPDAETLKVMKQPRCGVPDVAQFVLTEGNPRWEQTHLTYRIENYTPDLPRADVDHAIEKAFQLWSNVTPLTFTKVSEGQADIMISFVRGDHRDNSPFDGPGGNLAHAFQPGPGIGGDAHFDEDERWNNNFREYNLHRVAAHELGHSLGLSHSTDIGALMYPSYTFSGDVQLAQDDIDGIQAIYGRSQNPVQPIGPQTPKACDSKLTFDAITTIRGEVMFFKDRFYMRTNPFYPEVELNFISVFWPQLPNGLEAAYEFADRDEVRFFKGNKYWAVQGQNVLHGYPKDIYSSFGFPRTVKHIDAALSEENTGKTYFFVANKYWRYDEYKRSMDPGYPKMIAHDFPGIGHKVDAVFMKDGFFYFFHGTRQYKFDPKTKRILTLQKANSWFNCRKN

SEQ ID NO: 238 - protein, 450 aa, Artificial Sequence
  MMP-1 variant T185Q
FPATLETQEQDVDLVQKYLEKYYNLKNDGRQVEKRRNSGPVVEKLKQMQEFFGLKVTGKPDAETLKVMKQPRCGVPDVAQFVLTEGNPRWEQTHLTYRIENYTPDLPRADVDHAIEKAFQLWSNVTPLTFTKVSEGQADIMISFVRGDHRDNSPFDGPGGNLAHAFQPGPGIGGDAHFDEDERWQNNFREYNLHRVAAHELGHSLGLSHSTDIGALMYPSYTFSGDVQLAQDDIDGIQAIYGRSQNPVQPIGPQTPKACDSKLTFDAITTIRGEVMFFKDRFYMRTNPFYPEVELNFISVFWPQLPNGLEAAYEFADRDEVRFFKGNKYWAVQGQNVLHGYPKDIYSSFGFPRTVKHIDAALSEENTGKTYFFVANKYWRYDEYKRSMDPGYPKMIAHDFPGIGHKVDAVFMKDGFFYFFHGTRQYKFDPKTKRILTLQKANSWFNCRKN

SEQ ID NO: 239 - protein, 450 aa, Artificial Sequence
  MMP-1 variant T185Y
FPATLETQEQDVDLVQKYLEKYYNLKNDGRQVEKRRNSGPVVEKLKQMQEFFGLKVTGKPDAETLKVMKQPRCGVPDVAQFVLTEGNPRWEQTHLTYRIENYTPDLPRADVDHAIEKAFQLWSNVTPLTFTKVSEGQADIMISFVRGDHRDNSPFDGPGGNLAHAFQPGPGIGGDAHFDEDERWYNNFREYNLHRVAAHELGHSLGLSHSTDIGALMYPSYTFSGDVQLAQDDIDGIQAIYGRSQNPVQPIGPQTPKACDSKLTFDAITTIRGEVMFFKDRFYMRTNPFYPEVELNFISVFWPQLPNGLEAAYEFADRDEVRFFKGNKYWAVQGQNVLHGYPKDIYSSFGFPRTVKHIDAALSEENTGKTYFFVANKYWRYDEYKRSMDPGYPKMIAHDFPGIGHKVDAVFMKDGFFYFFHGTRQYKFDPKTKRILTLQKANSWFNCRKN

SEQ ID NO: 240 - protein, 450 aa, Artificial Sequence
  MMP-1 variant T185S
FPATLETQEQDVDLVQKYLEKYYNLKNDGRQVEKRRNSGPVVEKLKQMQEFFGLKVTGKPDAETLKVMKQPRCGVPDVAQFVLTEGNPRWEQTHLTYRIENYTPDLPRADVDHAIEKAFQLWSNVTPLTFTKVSEGQADIMISFVRGDHRDNSPFDGPGGNLAHAFQPGPGIGGDAHFDEDERWSNNFREYNLHRVAAHELGHSLGLSHSTDIGALMYPSYTFSGDVQLAQDDIDGIQAIYGRSQNPVQPIGPQTPKACDSKLTFDAITTIRGEVMFFKDRFYMRTNPFYPEVELNFISVFWPQLPNGLEAAYEFADRDEVRFFKGNKYWAVQGQNVLHGYPKDIYSSFGFPRTVKHIDAALSEENTGKTYFFVANKYWRYDEYKRSMDPGYPKMIAHDFPGIGHKVDAVFMKDGFFYFFHGTRQYKFDPKTKRILTLQKANSWFNCRKN

SEQ ID NO: 241 - protein, 450 aa, Artificial Sequence
  MMP-1 variant T185G
FPATLETQEQDVDLVQKYLEKYYNLKNDGRQVEKRRNSGPVVEKLKQMQEFFGLKVTGKPDAETLKVMKQPRCGVPDVAQFVLTEGNPRWEQTHLTYRIENYTPDLPRADVDHAIEKAFQLWSNVTPLTFTKVSEGQADIMISFVRGDHRDNSPFDGPGGNLAHAFQPGPGIGGDAHFDEDERWGNNFREYNLHRVAAHELGHSLGLSHSTDIGALMYPSYTFSGDVQLAQDDIDGIQAIYGRSQNPVQPIGPQTPKACDSKLTFDAITTIRGEVMFFKDRFYMRTNPFYPEVELNFISVFWPQLPNGLEAAYEFADRDEVRFFKGNKYWAVQGQNVLHGYPKDIYSSFGFPRTVKHIDAALSEENTGKTYFFVANKYWRYDEYKRSMDPGYPKMIAHDFPGIGHKVDAVFMKDGFFYFFHGTRQYKFDPKTKRILTLQKANSWFNCRKN

SEQ ID NO: 242 - protein, 450 aa, Artificial Sequence
  MMP-1 variant T185F
FPATLETQEQDVDLVQKYLEKYYNLKNDGRQVEKRRNSGPVVEKLKQMQEFFGLKVTGKPDAETLKVMKQPRCGVPDVAQFVLTEGNPRWEQTHLTYRIENYTPDLPRADVDHAIEKAFQLWSNVTPLTFTKVSEGQADIMISFVRGDHRDNSPFDGPGGNLAHAFQPGPGIGGDAHFDEDERWFNNFREYNLHRVAAHELGHSLGLSHSTDIGALMYPSYTFSGDVQLAQDDIDGIQAIYGRSQNPVQPIGPQTPKACDSKLTFDAITTIRGEVMFFKDRFYMRTNPFYPEVELNFISVFWPQLPNGLEAAYEFADRDEVRFFKGNKYWAVQGQNVLHGYPKDIYSSFGFPRTVKHIDAALSEENTGKTYFFVANKYWRYDEYKRSMDPGYPKMIAHDFPGIGHKVDAVFMKDGFFYFFHGTRQYKFDPKTKRILTLQKANSWFNCRKN

SEQ ID NO: 243 - protein, 450 aa, Artificial Sequence
  MMP-1 variant T185M
FPATLETQEQDVDLVQKYLEKYYNLKNDGRQVEKRRNSGPVVEKLKQMQEFFGLKVTGKPDAETLKVMKQPRCGVPDVAQFVLTEGNPRWEQTHLTYRIENYTPDLPRADVDHAIEKAFQLWSNVTPLTFTKVSEGQADIMISFVRGDHRDNSPFDGPGGNLAHAFQPGPGIGGDAHFDEDERWMNNFREYNLHRVAAHELGHSLGLSHSTDIGALMYPSYTFSGDVQLAQDDIDGIQAIYGRSQNPVQPIGPQTPKACDSKLTFDAITTIRGEVMFFKDRFYMRTNPFYPEVELNFISVFWPQLPNGLEAAYEFADRDEVRFFKGNKYWAVQGQNVLHGYPKDIYSSFGFPRTVKHIDAALSEENTGKTYFFVANKYWRYDEYKRSMDPGYPKMIAHDFPGIGHKVDAVFMKDGFFYFFHGTRQYKFDPKTKRILTLQKANSWFNCRKN

SEQ ID NO: 244 - protein, 450 aa, Artificial Sequence
  MMP-1 variant T185W
FPATLETQEQDVDLVQKYLEKYYNLKNDGRQVEKRRNSGPVVEKLKQMQEFFGLKVTGKPDAETLKVMKQPRCGVPDVAQFVLTEGNPRWEQTHLTYRIENYTPDLPRADVDHAIEKAFQLWSNVTPLTFTKVSEGQADIMISFVRGDHRDNSPFDGPGGNLAHAFQPGPGIGGDAHFDEDERWWNNFREYNLHRVAAHELGHSLGLSHSTDIGALMYPSYTFSGDVQLAQDDIDGIQAIYGRSQNPVQPIGPQTPKACDSKLTFDAITTIRGEVMFFKDRFYMRTNPFYPEVELNFISVFWPQLPNGLEAAYEFADRDEVRFFKGNKYWAVQGQNVLHGYPKDIYSSFGFPRTVKHIDAALSEENTGKTYFFVANKYWRYDEYKRSMDPGYPKMIAHDFPGIGHKVDAVFMKDGFFYFFHGTRQYKFDPKTKRILTLQKANSWFNCRKN

SEQ ID NO: 245 - protein, 450 aa, Artificial Sequence
  MMP-1 variant T185I
FPATLETQEQDVDLVQKYLEKYYNLKNDGRQVEKRRNSGPVVEKLKQMQEFFGLKVTGKPDAETLKVMKQPRCGVPDVAQFVLTEGNPRWEQTHLTYRIENYTPDLPRADVDHAIEKAFQLWSNVTPLTFTKVSEGQADIMISFVRGDHRDNSPFDGPGGNLAHAFQPGPGIGGDAHFDEDERWINNFREYNLHRVAAHELGHSLGLSHSTDIGALMYPSYTFSGDVQLAQDDIDGIQAIYGRSQNPVQPIGPQTPKACDSKLTFDAITTIRGEVMFFKDRFYMRTNPFYPEVELNFISVFWPQLPNGLEAAYEFADRDEVRFFKGNKYWAVQGQNVLHGYPKDIYSSFGFPRTVKHIDAALSEENTGKTYFFVANKYWRYDEYKRSMDPGYPKMIAHDFPGIGHKVDAVFMKDGFFYFFHGTRQYKFDPKTKRILTLQKANSWFNCRKN

SEQ ID NO: 246 - protein, 450 aa, Artificial Sequence; identical to SEQ ID NO: 2
  MMP-1 variant T185V

SEQ ID NO: 247 - protein, 450 aa, Artificial Sequence
  MMP-1 variant T185L
FPATLETQEQDVDLVQKYLEKYYNLKNDGRQVEKRRNSGPVVEKLKQMQEFFGLKVTGKPDAETLKVMKQPRCGVPDVAQFVLTEGNPRWEQTHLTYRIENYTPDLPRADVDHAIEKAFQLWSNVTPLTFTKVSEGQADIMISFVRGDHRDNSPFDGPGGNLAHAFQPGPGIGGDAHFDEDERWLNNFREYNLHRVAAHELGHSLGLSHSTDIGALMYPSYTFSGDVQLAQDDIDGIQAIYGRSQNPVQPIGPQTPKACDSKLTFDAITTIRGEVMFFKDRFYMRTNPFYPEVELNFISVFWPQLPNGLEAAYEFADRDEVRFFKGNKYWAVQGQNVLHGYPKDIYSSFGFPRTVKHIDAALSEENTGKTYFFVANKYWRYDEYKRSMDPGYPKMIAHDFPGIGHKVDAVFMKDGFFYFFHGTRQYKFDPKTKRILTLQKANSWFNCRKN

SEQ ID NO: 248 - protein, 450 aa, Artificial Sequence
  MMP-1 variant T185A
FPATLETQEQDVDLVQKYLEKYYNLKNDGRQVEKRRNSGPVVEKLKQMQEFFGLKVTGKPDAETLKVMKQPRCGVPDVAQFVLTEGNPRWEQTHLTYRIENYTPDLPRADVDHAIEKAFQLWSNVTPLTFTKVSEGQADIMISFVRGDHRDNSPFDGPGGNLAHAFQPGPGIGGDAHFDEDERWANNFREYNLHRVAAHELGHSLGLSHSTDIGALMYPSYTFSGDVQLAQDDIDGIQAIYGRSQNPVQPIGPQTPKACDSKLTFDAITTIRGEVMFFKDRFYMRTNPFYPEVELNFISVFWPQLPNGLEAAYEFADRDEVRFFKGNKYWAVQGQNVLHGYPKDIYSSFGFPRTVKHIDAALSEENTGKTYFFVANKYWRYDEYKRSMDPGYPKMIAHDFPGIGHKVDAVFMKDGFFYFFHGTRQYKFDPKTKRILTLQKANSWFNCRKN

SEQ ID NO: 249 - protein, 450 aa, Artificial Sequence
  MMP-1 variant T185P
FPATLETQEQDVDLVQKYLEKYYNLKNDGRQVEKRRNSGPVVEKLKQMQEFFGLKVTGKPDAETLKVMKQPRCGVPDVAQFVLTEGNPRWEQTHLTYRIENYTPDLPRADVDHAIEKAFQLWSNVTPLTFTKVSEGQADIMISFVRGDHRDNSPFDGPGGNLAHAFQPGPGIGGDAHFDEDERWPNNFREYNLHRVAAHELGHSLGLSHSTDIGALMYPSYTFSGDVQLAQDDIDGIQAIYGRSQNPVQPIGPQTPKACDSKLTFDAITTIRGEVMFFKDRFYMRTNPFYPEVELNFISVFWPQLPNGLEAAYEFADRDEVRFFKGNKYWAVQGQNVLHGYPKDIYSSFGFPRTVKHIDAALSEENTGKTYFFVANKYWRYDEYKRSMDPGYPKMIAHDFPGIGHKVDAVFMKDGFFYFFHGTRQYKFDPKTKRILTLQKANSWFNCRKN

SEQ ID NO: 250 - protein, 450 aa, Artificial Sequence
  MMP-1 variant N187D
FPATLETQEQDVDLVQKYLEKYYNLKNDGRQVEKRRNSGPVVEKLKQMQEFFGLKVTGKPDAETLKVMKQPRCGVPDVAQFVLTEGNPRWEQTHLTYRIENYTPDLPRADVDHAIEKAFQLWSNVTPLTFTKVSEGQADIMISFVRGDHRDNSPFDGPGGNLAHAFQPGPGIGGDAHFDEDERWTNDFREYNLHRVAAHELGHSLGLSHSTDIGALMYPSYTFSGDVQLAQDDIDGIQAIYGRSQNPVQPIGPQTPKACDSKLTFDAITTIRGEVMFFKDRFYMRTNPFYPEVELNFISVFWPQLPNGLEAAYEFADRDEVRFFKGNKYWAVQGQNVLHGYPKDIYSSFGFPRTVKHIDAALSEENTGKTYFFVANKYWRYDEYKRSMDPGYPKMIAHDFPGIGHKVDAVFMKDGFFYFFHGTRQYKFDPKTKRILTLQKANSWFNCRKN

SEQ ID NO: 251 - protein, 450 aa, Artificial Sequence
  MMP-1 variant N187E
FPATLETQEQDVDLVQKYLEKYYNLKNDGRQVEKRRNSGPVVEKLKQMQEFFGLKVTGKPDAETLKVMKQPRCGVPDVAQFVLTEGNPRWEQTHLTYRIENYTPDLPRADVDHAIEKAFQLWSNVTPLTFTKVSEGQADIMISFVRGDHRDNSPFDGPGGNLAHAFQPGPGIGGDAHFDEDERWTNEFREYNLHRVAAHELGHSLGLSHSTDIGALMYPSYTFSGDVQLAQDDIDGIQAIYGRSQNPVQPIGPQTPKACDSKLTFDAITTIRGEVMFFKDRFYMRTNPFYPEVELNFISVFWPQLPNGLEAAYEFADRDEVRFFKGNKYWAVQGQNVLHGYPKDIYSSFGFPRTVKHIDAALSEENTGKTYFFVANKYWRYDEYKRSMDPGYPKMIAHDFPGIGHKVDAVFMKDGFFYFFHGTRQYKFDPKTKRILTLQKANSWFNCRKN

SEQ ID NO: 252 - protein, 450 aa, Artificial Sequence
  MMP-1 variant N187H
FPATLETQEQDVDLVQKYLEKYYNLKNDGRQVEKRRNSGPVVEKLKQMQEFFGLKVTGKPDAETLKVMKQPRCGVPDVAQFVLTEGNPRWEQTHLTYRIENYTPDLPRADVDHAIEKAFQLWSNVTPLTFTKVSEGQADIMISFVRGDHRDNSPFDGPGGNLAHAFQPGPGIGGDAHFDEDERWTNHFREYNLHRVAAHELGHSLGLSHSTDIGALMYPSYTFSGDVQLAQDDIDGIQAIYGRSQNPVQPIGPQTPKACDSKLTFDAITTIRGEVMFFKDRFYMRTNPFYPEVELNFISVFWPQLPNGLEAAYEFADRDEVRFFKGNKYWAVQGQNVLHGYPKDIYSSFGFPRTVKHIDAALSEENTGKTYFFVANKYWRYDEYKRSMDPGYPKMIAHDFPGIGHKVDAVFMKDGFFYFFHGTRQYKFDPKTKRILTLQKANSWFNCRKN

SEQ ID NO: 253 - protein, 450 aa, Artificial Sequence
  MMP-1 variant N187K
FPATLETQEQDVDLVQKYLEKYYNLKNDGRQVEKRRNSGPVVEKLKQMQEFFGLKVTGKPDAETLKVMKQPRCGVPDVAQFVLTEGNPRWEQTHLTYRIENYTPDLPRADVDHAIEKAFQLWSNVTPLTFTKVSEGQADIMISFVRGDHRDNSPFDGPGGNLAHAFQPGPGIGGDAHFDEDERWTNKFREYNLHRVAAHELGHSLGLSHSTDIGALMYPSYTFSGDVQLAQDDIDGIQAIYGRSQNPVQPIGPQTPKACDSKLTFDAITTIRGEVMFFKDRFYMRTNPFYPEVELNFISVFWPQLPNGLEAAYEFADRDEVRFFKGNKYWAVQGQNVLHGYPKDIYSSFGFPRTVKHIDAALSEENTGKTYFFVANKYWRYDEYKRSMDPGYPKMIAHDFPGIGHKVDAVFMKDGFFYFFHGTRQYKFDPKTKRILTLQKANSWFNCRKN

SEQ ID NO: 254 - protein, 450 aa, Artificial Sequence
  MMP-1 variant N187R
FPATLETQEQDVDLVQKYLEKYYNLKNDGRQVEKRRNSGPVVEKLKQMQEFFGLKVTGKPDAETLKVMKQPRCGVPDVAQFVLTEGNPRWEQTHLTYRIENYTPDLPRADVDHAIEKAFQLWSNVTPLTFTKVSEGQADIMISFVRGDHRDNSPFDGPGGNLAHAFQPGPGIGGDAHFDEDERWTNRFREYNLHRVAAHELGHSLGLSHSTDIGALMYPSYTFSGDVQLAQDDIDGIQAIYGRSQNPVQPIGPQTPKACDSKLTFDAITTIRGEVMFFKDRFYMRTNPFYPEVELNFISVFWPQLPNGLEAAYEFADRDEVRFFKGNKYWAVQGQNVLHGYPKDIYSSFGFPRTVKHIDAALSEENTGKTYFFVANKYWRYDEYKRSMDPGYPKMIAHDFPGIGHKVDAVFMKDGFFYFFHGTRQYKFDPKTKRILTLQKANSWFNCRKN

SEQ ID NO: 255 - protein, 450 aa, Artificial Sequence
  MMP-1 variant N187C
FPATLETQEQDVDLVQKYLEKYYNLKNDGRQVEKRRNSGPVVEKLKQMQEFFGLKVTGKPDAETLKVMKQPRCGVPDVAQFVLTEGNPRWEQTHLTYRIENYTPDLPRADVDHAIEKAFQLWSNVTPLTFTKVSEGQADIMISFVRGDHRDNSPFDGPGGNLAHAFQPGPGIGGDAHFDEDERWTNCFREYNLHRVAAHELGHSLGLSHSTDIGALMYPSYTFSGDVQLAQDDIDGIQAIYGRSQNPVQPIGPQTPKACDSKLTFDAITTIRGEVMFFKDRFYMRTNPFYPEVELNFISVFWPQLPNGLEAAYEFADRDEVRFFKGNKYWAVQGQNVLHGYPKDIYSSFGFPRTVKHIDAALSEENTGKTYFFVANKYWRYDEYKRSMDPGYPKMIAHDFPGIGHKVDAVFMKDGFFYFFHGTRQYKFDPKTKRILTLQKANSWFNCRKN

SEQ ID NO: 256 - protein, 450 aa, Artificial Sequence
  MMP-1 variant N187Q
FPATLETQEQDVDLVQKYLEKYYNLKNDGRQVEKRRNSGPVVEKLKQMQEFFGLKVTGKPDAETLKVMKQPRCGVPDVAQFVLTEGNPRWEQTHLTYRIENYTPDLPRADVDHAIEKAFQLWSNVTPLTFTKVSEGQADIMISFVRGDHRDNSPFDGPGGNLAHAFQPGPGIGGDAHFDEDERWTNQFREYNLHRVAAHELGHSLGLSHSTDIGALMYPSYTFSGDVQLAQDDIDGIQAIYGRSQNPVQPIGPQTPKACDSKLTFDAITTIRGEVMFFKDRFYMRTNPFYPEVELNFISVFWPQLPNGLEAAYEFADRDEVRFFKGNKYWAVQGQNVLHGYPKDIYSSFGFPRTVKHIDAALSEENTGKTYFFVANKYWRYDEYKRSMDPGYPKMIAHDFPGIGHKVDAVFMKDGFFYFFHGTRQYKFDPKTKRILTLQKANSWFNCRKN

SEQ ID NO: 257 - protein, 450 aa, Artificial Sequence
  MMP-1 variant N187T
FPATLETQEQDVDLVQKYLEKYYNLKNDGRQVEKRRNSGPVVEKLKQMQEFFGLKVTGKPDAETLKVMKQPRCGVPDVAQFVLTEGNPRWEQTHLTYRIENYTPDLPRADVDHAIEKAFQLWSNVTPLTFTKVSEGQADIMISFVRGDHRDNSPFDGPGGNLAHAFQPGPGIGGDAHFDEDERWTNTFREYNLHRVAAHELGHSLGLSHSTDIGALMYPSYTFSGDVQLAQDDIDGIQAIYGRSQNPVQPIGPQTPKACDSKLTFDAITTIRGEVMFFKDRFYMRTNPFYPEVELNFISVFWPQLPNGLEAAYEFADRDEVRFFKGNKYWAVQGQNVLHGYPKDIYSSFGFPRTVKHIDAALSEENTGKTYFFVANKYWRYDEYKRSMDPGYPKMIAHDFPGIGHKVDAVFMKDGFFYFFHGTRQYKFDPKTKRILTLQKANSWFNCRKN

SEQ ID NO: 258 - protein, 450 aa, Artificial Sequence
  MMP-1 variant N187Y
FPATLETQEQDVDLVQKYLEKYYNLKNDGRQVEKRRNSGPVVEKLKQMQEFFGLKVTGKPDAETLKVMKQPRCGVPDVAQFVLTEGNPRWEQTHLTYRIENYTPDLPRADVDHAIEKAFQLWSNVTPLTFTKVSEGQADIMISFVRGDHRDNSPFDGPGGNLAHAFQPGPGIGGDAHFDEDERWTNYFREYNLHRVAAHELGHSLGLSHSTDIGALMYPSYTFSGDVQLAQDDIDGIQAIYGRSQNPVQPIGPQTPKACDSKLTFDAITTIRGEVMFFKDRFYMRTNPFYPEVELNFISVFWPQLPNGLEAAYEFADRDEVRFFKGNKYWAVQGQNVLHGYPKDIYSSFGFPRTVKHIDAALSEENTGKTYFFVANKYWRYDEYKRSMDPGYPKMIAHDFPGIGHKVDAVFMKDGFFYFFHGTRQYKFDPKTKRILTLQKANSWFNCRKN

SEQ ID NO: 259 - protein, 450 aa, Artificial Sequence
  MMP-1 variant N187S
FPATLETQEQDVDLVQKYLEKYYNLKNDGRQVEKRRNSGPVVEKLKQMQEFFGLKVTGKPDAETLKVMKQPRCGVPDVAQFVLTEGNPRWEQTHLTYRIENYTPDLPRADVDHAIEKAFQLWSNVTPLTFTKVSEGQADIMISFVRGDHRDNSPFDGPGGNLAHAFQPGPGIGGDAHFDEDERWTNSFREYNLHRVAAHELGHSLGLSHSTDIGALMYPSYTFSGDVQLAQDDIDGIQAIYGRSQNPVQPIGPQTPKACDSKLTFDAITTIRGEVMFFKDRFYMRTNPFYPEVELNFISVFWPQLPNGLEAAYEFADRDEVRFFKGNKYWAVQGQNVLHGYPKDIYSSFGFPRTVKHIDAALSEENTGKTYFFVANKYWRYDEYKRSMDPGYPKMIAHDFPGIGHKVDAVFMKDGFFYFFHGTRQYKFDPKTKRILTLQKANSWFNCRKN

SEQ ID NO: 260 - protein, 450 aa, Artificial Sequence
  MMP-1 variant N187G
FPATLETQEQDVDLVQKYLEKYYNLKNDGRQVEKRRNSGPVVEKLKQMQEFFGLKVTGKPDAETLKVMKQPRCGVPDVAQFVLTEGNPRWEQTHLTYRIENYTPDLPRADVDHAIEKAFQLWSNVTPLTFTKVSEGQADIMISFVRGDHRDNSPFDGPGGNLAHAFQPGPGIGGDAHFDEDERWTNGFREYNLHRVAAHELGHSLGLSHSTDIGALMYPSYTFSGDVQLAQDDIDGIQAIYGRSQNPVQPIGPQTPKACDSKLTFDAITTIRGEVMFFKDRFYMRTNPFYPEVELNFISVFWPQLPNGLEAAYEFADRDEVRFFKGNKYWAVQGQNVLHGYPKDIYSSFGFPRTVKHIDAALSEENTGKTYFFVANKYWRYDEYKRSMDPGYPKMIAHDFPGIGHKVDAVFMKDGFFYFFHGTRQYKFDPKTKRILTLQKANSWFNCRKN

SEQ ID NO: 261 - protein, 450 aa, Artificial Sequence
  MMP-1 variant N187F
FPATLETQEQDVDLVQKYLEKYYNLKNDGRQVEKRRNSGPVVEKLKQMQEFFGLKVTGKPDAETLKVMKQPRCGVPDVAQFVLTEGNPRWEQTHLTYRIENYTPDLPRADVDHAIEKAFQLWSNVTPLTFTKVSEGQADIMISFVRGDHRDNSPFDGPGGNLAHAFQPGPGIGGDAHFDEDERWTNFFREYNLHRVAAHELGHSLGLSHSTDIGALMYPSYTFSGDVQLAQDDIDGIQAIYGRSQNPVQPIGPQTPKACDSKLTFDAITTIRGEVMFFKDRFYMRTNPFYPEVELNFISVFWPQLPNGLEAAYEFADRDEVRFFKGNKYWAVQGQNVLHGYPKDIYSSFGFPRTVKHIDAALSEENTGKTYFFVANKYWRYDEYKRSMDPGYPKMIAHDFPGIGHKVDAVFMKDGFFYFFHGTRQYKFDPKTKRILTLQKANSWFNCRKN

SEQ ID NO: 262 - protein, 450 aa, Artificial Sequence
  MMP-1 variant N187M
FPATLETQEQDVDLVQKYLEKYYNLKNDGRQVEKRRNSGPVVEKLKQMQEFFGLKVTGKPDAETLKVMKQPRCGVPDVAQFVLTEGNPRWEQTHLTYRIENYTPDLPRADVDHAIEKAFQLWSNVTPLTFTKVSEGQADIMISFVRGDHRDNSPFDGPGGNLAHAFQPGPGIGGDAHFDEDERWTNMFREYNLHRVAAHELGHSLGLSHSTDIGALMYPSYTFSGDVQLAQDDIDGIQAIYGRSQNPVQPIGPQTPKACDSKLTFDAITTIRGEVMFFKDRFYMRTNPFYPEVELNFISVFWPQLPNGLEAAYEFADRDEVRFFKGNKYWAVQGQNVLHGYPKDIYSSFGFPRTVKHIDAALSEENTGKTYFFVANKYWRYDEYKRSMDPGYPKMIAHDFPGIGHKVDAVFMKDGFFYFFHGTRQYKFDPKTKRILTLQKANSWFNCRKN

SEQ ID NO: 263 - protein, 450 aa, Artificial Sequence
  MMP-1 variant N187W
FPATLETQEQDVDLVQKYLEKYYNLKNDGRQVEKRRNSGPVVEKLKQMQEFFGLKVTGKPDAETLKVMKQPRCGVPDVAQFVLTEGNPRWEQTHLTYRIENYTPDLPRADVDHAIEKAFQLWSNVTPLTFTKVSEGQADIMISFVRGDHRDNSPFDGPGGNLAHAFQPGPGIGGDAHFDEDERWTNWFREYNLHRVAAHELGHSLGLSHSTDIGALMYPSYTFSGDVQLAQDDIDGIQAIYGRSQNPVQPIGPQTPKACDSKLTFDAITTIRGEVMFFKDRFYMRTNPFYPEVELNFISVFWPQLPNGLEAAYEFADRDEVRFFKGNKYWAVQGQNVLHGYPKDIYSSFGFPRTVKHIDAALSEENTGKTYFFVANKYWRYDEYKRSMDPGYPKMIAHDFPGIGHKVDAVFMKDGFFYFFHGTRQYKFDPKTKRILTLQKANSWFNCRKN

SEQ ID NO: 264 - protein, 450 aa, Artificial Sequence
  MMP-1 variant N187I
FPATLETQEQDVDLVQKYLEKYYNLKNDGRQVEKRRNSGPVVEKLKQMQEFFGLKVTGKPDAETLKVMKQPRCGVPDVAQFVLTEGNPRWEQTHLTYRIENYTPDLPRADVDHAIEKAFQLWSNVTPLTFTKVSEGQADIMISFVRGDHRDNSPFDGPGGNLAHAFQPGPGIGGDAHFDEDERWTNIFREYNLHRVAAHELGHSLGLSHSTDIGALMYPSYTFSGDVQLAQDDIDGIQAIYGRSQNPVQPIGPQTPKACDSKLTFDAITTIRGEVMFFKDRFYMRTNPFYPEVELNFISVFWPQLPNGLEAAYEFADRDEVRFFKGNKYWAVQGQNVLHGYPKDIYSSFGFPRTVKHIDAALSEENTGKTYFFVANKYWRYDEYKRSMDPGYPKMIAHDFPGIGHKVDAVFMKDGFFYFFHGTRQYKFDPKTKRILTLQKANSWFNCRKN

SEQ ID NO: 265 - protein, 450 aa, Artificial Sequence
  MMP-1 variant N187V
FPATLETQEQDVDLVQKYLEKYYNLKNDGRQVEKRRNSGPVVEKLKQMQEFFGLKVTGKPDAETLKVMKQPRCGVPDVAQFVLTEGNPRWEQTHLTYRIENYTPDLPRADVDHAIEKAFQLWSNVTPLTFTKVSEGQADIMISFVRGDHRDNSPFDGPGGNLAHAFQPGPGIGGDAHFDEDERWTNVFREYNLHRVAAHELGHSLGLSHSTDIGALMYPSYTFSGDVQLAQDDIDGIQAIYGRSQNPVQPIGPQTPKACDSKLTFDAITTIRGEVMFFKDRFYMRTNPFYPEVELNFISVFWPQLPNGLEAAYEFADRDEVRFFKGNKYWAVQGQNVLHGYPKDIYSSFGFPRTVKHIDAALSEENTGKTYFFVANKYWRYDEYKRSMDPGYPKMIAHDFPGIGHKVDAVFMKDGFFYFFHGTRQYKFDPKTKRILTLQKANSWFNCRKN

SEQ ID NO: 266 - protein, 450 aa, Artificial Sequence
  MMP-1 variant N187L
FPATLETQEQDVDLVQKYLEKYYNLKNDGRQVEKRRNSGPVVEKLKQMQEFFGLKVTGKPDAETLKVMKQPRCGVPDVAQFVLTEGNPRWEQTHLTYRIENYTPDLPRADVDHAIEKAFQLWSNVTPLTFTKVSEGQADIMISFVRGDHRDNSPFDGPGGNLAHAFQPGPGIGGDAHFDEDERWTNLFREYNLHRVAAHELGHSLGLSHSTDIGALMYPSYTFSGDVQLAQDDIDGIQAIYGRSQNPVQPIGPQTPKACDSKLTFDAITTIRGEVMFFKDRFYMRTNPFYPEVELNFISVFWPQLPNGLEAAYEFADRDEVRFFKGNKYWAVQGQNVLHGYPKDIYSSFGFPRTVKHIDAALSEENTGKTYFFVANKYWRYDEYKRSMDPGYPKMIAHDFPGIGHKVDAVFMKDGFFYFFHGTRQYKFDPKTKRILTLQKANSWFNCRKN

SEQ ID NO: 267 - protein, 450 aa, Artificial Sequence
  MMP-1 variant N187A
FPATLETQEQDVDLVQKYLEKYYNLKNDGRQVEKRRNSGPVVEKLKQMQEFFGLKVTGKPDAETLKVMKQPRCGVPDVAQFVLTEGNPRWEQTHLTYRIENYTPDLPRADVDHAIEKAFQLWSNVTPLTFTKVSEGQADIMISFVRGDHRDNSPFDGPGGNLAHAFQPGPGIGGDAHFDEDERWTNAFREYNLHRVAAHELGHSLGLSHSTDIGALMYPSYTFSGDVQLAQDDIDGIQAIYGRSQNPVQPIGPQTPKACDSKLTFDAITTIRGEVMFFKDRFYMRTNPFYPEVELNFISVFWPQLPNGLEAAYEFADRDEVRFFKGNKYWAVQGQNVLHGYPKDIYSSFGFPRTVKHIDAALSEENTGKTYFFVANKYWRYDEYKRSMDPGYPKMIAHDFPGIGHKVDAVFMKDGFFYFFHGTRQYKFDPKTKRILTLQKANSWFNCRKN

SEQ ID NO: 268 - protein, 450 aa, Artificial Sequence
  MMP-1 variant N187P
FPATLETQEQDVDLVQKYLEKYYNLKNDGRQVEKRRNSGPVVEKLKQMQEFFGLKVTGKPDAETLKVMKQPRCGVPDVAQFVLTEGNPRWEQTHLTYRIENYTPDLPRADVDHAIEKAFQLWSNVTPLTFTKVSEGQADIMISFVRGDHRDNSPFDGPGGNLAHAFQPGPGIGGDAHFDEDERWTNPFREYNLHRVAAHELGHSLGLSHSTDIGALMYPSYTFSGDVQLAQDDIDGIQAIYGRSQNPVQPIGPQTPKACDSKLTFDAITTIRGEVMFFKDRFYMRTNPFYPEVELNFISVFWPQLPNGLEAAYEFADRDEVRFFKGNKYWAVQGQNVLHGYPKDIYSSFGFPRTVKHIDAALSEENTGKTYFFVANKYWRYDEYKRSMDPGYPKMIAHDFPGIGHKVDAVFMKDGFFYFFHGTRQYKFDPKTKRILTLQKANSWFNCRKN

SEQ ID NO: 269 - protein, 450 aa, Artificial Sequence
  MMP-1 variant R195D
FPATLETQEQDVDLVQKYLEKYYNLKNDGRQVEKRRNSGPVVEKLKQMQEFFGLKVTGKPDAETLKVMKQPRCGVPDVAQFVLTEGNPRWEQTHLTYRIENYTPDLPRADVDHAIEKAFQLWSNVTPLTFTKVSEGQADIMISFVRGDHRDNSPFDGPGGNLAHAFQPGPGIGGDAHFDEDERWTNNFREYNLHDVAAHELGHSLGLSHSTDIGALMYPSYTFSGDVQLAQDDIDGIQAIYGRSQNPVQPIGPQTPKACDSKLTFDAITTIRGEVMFFKDRFYMRTNPFYPEVELNFISVFWPQLPNGLEAAYEFADRDEVRFFKGNKYWAVQGQNVLHGYPKDIYSSFGFPRTVKHIDAALSEENTGKTYFFVANKYWRYDEYKRSMDPGYPKMIAHDFPGIGHKVDAVFMKDGFFYFFHGTRQYKFDPKTKRILTLQKANSWFNCRKN

SEQ ID NO: 270 - protein, 450 aa, Artificial Sequence
  MMP-1 variant R195E
FPATLETQEQDVDLVQKYLEKYYNLKNDGRQVEKRRNSGPVVEKLKQMQEFFGLKVTGKPDAETLKVMKQPRCGVPDVAQFVLTEGNPRWEQTHLTYRIENYTPDLPRADVDHAIEKAFQLWSNVTPLTFTKVSEGQADIMISFVRGDHRDNSPFDGPGGNLAHAFQPGPGIGGDAHFDEDERWTNNFREYNLHEVAAHELGHSLGLSHSTDIGALMYPSYTFSGDVQLAQDDIDGIQAIYGRSQNPVQPIGPQTPKACDSKLTFDAITTIRGEVMFFKDRFYMRTNPFYPEVELNFISVFWPQLPNGLEAAYEFADRDEVRFFKGNKYWAVQGQNVLHGYPKDIYSSFGFPRTVKHIDAALSEENTGKTYFFVANKYWRYDEYKRSMDPGYPKMIAHDFPGIGHKVDAVFMKDGFFYFFHGTRQYKFDPKTKRILTLQKANSWFNCRKN

SEQ ID NO: 271 - protein, 450 aa, Artificial Sequence
  MMP-1 variant R195H
FPATLETQEQDVDLVQKYLEKYYNLKNDGRQVEKRRNSGPVVEKLKQMQEFFGLKVTGKPDAETLKVMKQPRCGVPDVAQFVLTEGNPRWEQTHLTYRIENYTPDLPRADVDHAIEKAFQLWSNVTPLTFTKVSEGQADIMISFVRGDHRDNSPFDGPGGNLAHAFQPGPGIGGDAHFDEDERWTNNFREYNLHHVAAHELGHSLGLSHSTDIGALMYPSYTFSGDVQLAQDDIDGIQAIYGRSQNPVQPIGPQTPKACDSKLTFDAITTIRGEVMFFKDRFYMRTNPFYPEVELNFISVFWPQLPNGLEAAYEFADRDEVRFFKGNKYWAVQGQNVLHGYPKDIYSSFGFPRTVKHIDAALSEENTGKTYFFVANKYWRYDEYKRSMDPGYPKMIAHDFPGIGHKVDAVFMKDGFFYFFHGTRQYKFDPKTKRILTLQKANSWFNCRKN

SEQ ID NO: 272 - protein, 450 aa, Artificial Sequence
  MMP-1 variant R195K
FPATLETQEQDVDLVQKYLEKYYNLKNDGRQVEKRRNSGPVVEKLKQMQEFFGLKVTGKPDAETLKVMKQPRCGVPDVAQFVLTEGNPRWEQTHLTYRIENYTPDLPRADVDHAIEKAFQLWSNVTPLTFTKVSEGQADIMISFVRGDHRDNSPFDGPGGNLAHAFQPGPGIGGDAHFDEDERWTNNFREYNLHKVAAHELGHSLGLSHSTDIGALMYPSYTFSGDVQLAQDDIDGIQAIYGRSQNPVQPIGPQTPKACDSKLTFDAITTIRGEVMFFKDRFYMRTNPFYPEVELNFISVFWPQLPNGLEAAYEFADRDEVRFFKGNKYWAVQGQNVLHGYPKDIYSSFGFPRTVKHIDAALSEENTGKTYFFVANKYWRYDEYKRSMDPGYPKMIAHDFPGIGHKVDAVFMKDGFFYFFHGTRQYKFDPKTKRILTLQKANSWFNCRKN

SEQ ID NO: 273 - protein, 450 aa, Artificial Sequence
  MMP-1 variant R195C
FPATLETQEQDVDLVQKYLEKYYNLKNDGRQVEKRRNSGPVVEKLKQMQEFFGLKVTGKPDAETLKVMKQPRCGVPDVAQFVLTEGNPRWEQTHLTYRIENYTPDLPRADVDHAIEKAFQLWSNVTPLTFTKVSEGQADIMISFVRGDHRDNSPFDGPGGNLAHAFQPGPGIGGDAHFDEDERWTNNFREYNLHCVAAHELGHSLGLSHSTDIGALMYPSYTFSGDVQLAQDDIDGIQAIYGRSQNPVQPIGPQTPKACDSKLTFDAITTIRGEVMFFKDRFYMRTNPFYPEVELNFISVFWPQLPNGLEAAYEFADRDEVRFFKGNKYWAVQGQNVLHGYPKDIYSSFGFPRTVKHIDAALSEENTGKTYFFVANKYWRYDEYKRSMDPGYPKMIAHDFPGIGHKVDAVFMKDGFFYFFHGTRQYKFDPKTKRILTLQKANSWFNCRKN

SEQ ID NO: 274 - protein, 450 aa, Artificial Sequence
  MMP-1 variant R195N
FPATLETQEQDVDLVQKYLEKYYNLKNDGRQVEKRRNSGPVVEKLKQMQEFFGLKVTGKPDAETLKVMKQPRCGVPDVAQFVLTEGNPRWEQTHLTYRIENYTPDLPRADVDHAIEKAFQLWSNVTPLTFTKVSEGQADIMISFVRGDHRDNSPFDGPGGNLAHAFQPGPGIGGDAHFDEDERWTNNFREYNLHNVAAHELGHSLGLSHSTDIGALMYPSYTFSGDVQLAQDDIDGIQAIYGRSQNPVQPIGPQTPKACDSKLTFDAITTIRGEVMFFKDRFYMRTNPFYPEVELNFISVFWPQLPNGLEAAYEFADRDEVRFFKGNKYWAVQGQNVLHGYPKDIYSSFGFPRTVKHIDAALSEENTGKTYFFVANKYWRYDEYKRSMDPGYPKMIAHDFPGIGHKVDAVFMKDGFFYFFHGTRQYKFDPKTKRILTLQKANSWFNCRKN

SEQ ID NO: 275 - protein, 450 aa, Artificial Sequence
  MMP-1 variant R195Q
FPATLETQEQDVDLVQKYLEKYYNLKNDGRQVEKRRNSGPVVEKLKQMQEFFGLKVTGKPDAETLKVMKQPRCGVPDVAQFVLTEGNPRWEQTHLTYRIENYTPDLPRADVDHAIEKAFQLWSNVTPLTFTKVSEGQADIMISFVRGDHRDNSPFDGPGGNLAHAFQPGPGIGGDAHFDEDERWTNNFREYNLHQVAAHELGHSLGLSHSTDIGALMYPSYTFSGDVQLAQDDIDGIQAIYGRSQNPVQPIGPQTPKACDSKLTFDAITTIRGEVMFFKDRFYMRTNPFYPEVELNFISVFWPQLPNGLEAAYEFADRDEVRFFKGNKYWAVQGQNVLHGYPKDIYSSFGFPRTVKHIDAALSEENTGKTYFFVANKYWRYDEYKRSMDPGYPKMIAHDFPGIGHKVDAVFMKDGFFYFFHGTRQYKFDPKTKRILTLQKANSWFNCRKN

SEQ ID NO: 276 - protein, 450 aa, Artificial Sequence
  MMP-1 variant R195T
FPATLETQEQDVDLVQKYLEKYYNLKNDGRQVEKRRNSGPVVEKLKQMQEFFGLKVTGKPDAETLKVMKQPRCGVPDVAQFVLTEGNPRWEQTHLTYRIENYTPDLPRADVDHAIEKAFQLWSNVTPLTFTKVSEGQADIMISFVRGDHRDNSPFDGPGGNLAHAFQPGPGIGGDAHFDEDERWTNNFREYNLHTVAAHELGHSLGLSHSTDIGALMYPSYTFSGDVQLAQDDIDGIQAIYGRSQNPVQPIGPQTPKACDSKLTFDAITTIRGEVMFFKDRFYMRTNPFYPEVELNFISVFWPQLPNGLEAAYEFADRDEVRFFKGNKYWAVQGQNVLHGYPKDIYSSFGFPRTVKHIDAALSEENTGKTYFFVANKYWRYDEYKRSMDPGYPKMIAHDFPGIGHKVDAVFMKDGFFYFFHGTRQYKFDPKTKRILTLQKANSWFNCRKN

SEQ ID NO: 277 - protein, 450 aa, Artificial Sequence
  MMP-1 variant R195Y
FPATLETQEQDVDLVQKYLEKYYNLKNDGRQVEKRRNSGPVVEKLKQMQEFFGLKVTGKPDAETLKVMKQPRCGVPDVAQFVLTEGNPRWEQTHLTYRIENYTPDLPRADVDHAIEKAFQLWSNVTPLTFTKVSEGQADIMISFVRGDHRDNSPFDGPGGNLAHAFQPGPGIGGDAHFDEDERWTNNFREYNLHYVAAHELGHSLGLSHSTDIGALMYPSYTFSGDVQLAQDDIDGIQAIYGRSQNPVQPIGPQTPKACDSKLTFDAITTIRGEVMFFKDRFYMRTNPFYPEVELNFISVFWPQLPNGLEAAYEFADRDEVRFFKGNKYWAVQGQNVLHGYPKDIYSSFGFPRTVKHIDAALSEENTGKTYFFVANKYWRYDEYKRSMDPGYPKMIAHDFPGIGHKVDAVFMKDGFFYFFHGTRQYKFDPKTKRILTLQKANSWFNCRKN

SEQ ID NO: 278 - protein, 450 aa, Artificial Sequence
  MMP-1 variant R195S
FPATLETQEQDVDLVQKYLEKYYNLKNDGRQVEKRRNSGPVVEKLKQMQEFFGLKVTGKPDAETLKVMKQPRCGVPDVAQFVLTEGNPRWEQTHLTYRIENYTPDLPRADVDHAIEKAFQLWSNVTPLTFTKVSEGQADIMISFVRGDHRDNSPFDGPGGNLAHAFQPGPGIGGDAHFDEDERWTNNFREYNLHSVAAHELGHSLGLSHSTDIGALMYPSYTFSGDVQLAQDDIDGIQAIYGRSQNPVQPIGPQTPKACDSKLTFDAITTIRGEVMFFKDRFYMRTNPFYPEVELNFISVFWPQLPNGLEAAYEFADRDEVRFFKGNKYWAVQGQNVLHGYPKDIYSSFGFPRTVKHIDAALSEENTGKTYFFVANKYWRYDEYKRSMDPGYPKMIAHDFPGIGHKVDAVFMKDGFFYFFHGTRQYKFDPKTKRILTLQKANSWFNCRKN

SEQ ID NO: 279 - protein, 450 aa, Artificial Sequence
  MMP-1 variant R195G
FPATLETQEQDVDLVQKYLEKYYNLKNDGRQVEKRRNSGPVVEKLKQMQEFFGLKVTGKPDAETLKVMKQPRCGVPDVAQFVLTEGNPRWEQTHLTYRIENYTPDLPRADVDHAIEKAFQLWSNVTPLTFTKVSEGQADIMISFVRGDHRDNSPFDGPGGNLAHAFQPGPGIGGDAHFDEDERWTNNFREYNLHGVAAHELGHSLGLSHSTDIGALMYPSYTFSGDVQLAQDDIDGIQAIYGRSQNPVQPIGPQTPKACDSKLTFDAITTIRGEVMFFKDRFYMRTNPFYPEVELNFISVFWPQLPNGLEAAYEFADRDEVRFFKGNKYWAVQGQNVLHGYPKDIYSSFGFPRTVKHIDAALSEENTGKTYFFVANKYWRYDEYKRSMDPGYPKMIAHDFPGIGHKVDAVFMKDGFFYFFHGTRQYKFDPKTKRILTLQKANSWFNCRKN

SEQ ID NO: 280 - protein, 450 aa, Artificial Sequence
  MMP-1 variant R195F
FPATLETQEQDVDLVQKYLEKYYNLKNDGRQVEKRRNSGPVVEKLKQMQEFFGLKVTGKPDAETLKVMKQPRCGVPDVAQFVLTEGNPRWEQTHLTYRIENYTPDLPRADVDHAIEKAFQLWSNVTPLTFTKVSEGQADIMISFVRGDHRDNSPFDGPGGNLAHAFQPGPGIGGDAHFDEDERWTNNFREYNLHFVAAHELGHSLGLSHSTDIGALMYPSYTFSGDVQLAQDDIDGIQAIYGRSQNPVQPIGPQTPKACDSKLTFDAITTIRGEVMFFKDRFYMRTNPFYPEVELNFISVFWPQLPNGLEAAYEFADRDEVRFFKGNKYWAVQGQNVLHGYPKDIYSSFGFPRTVKHIDAALSEENTGKTYFFVANKYWRYDEYKRSMDPGYPKMIAHDFPGIGHKVDAVFMKDGFFYFFHGTRQYKFDPKTKRILTLQKANSWFNCRKN

SEQ ID NO: 281 - protein, 450 aa, Artificial Sequence
  MMP-1 variant R195M
FPATLETQEQDVDLVQKYLEKYYNLKNDGRQVEKRRNSGPVVEKLKQMQEFFGLKVTGKPDAETLKVMKQPRCGVPDVAQFVLTEGNPRWEQTHLTYRIENYTPDLPRADVDHAIEKAFQLWSNVTPLTFTKVSEGQADIMISFVRGDHRDNSPFDGPGGNLAHAFQPGPGIGGDAHFDEDERWTNNFREYNLHMVAAHELGHSLGLSHSTDIGALMYPSYTFSGDVQLAQDDIDGIQAIYGRSQNPVQPIGPQTPKACDSKLTFDAITTIRGEVMFFKDRFYMRTNPFYPEVELNFISVFWPQLPNGLEAAYEFADRDEVRFFKGNKYWAVQGQNVLHGYPKDIYSSFGFPRTVKHIDAALSEENTGKTYFFVANKYWRYDEYKRSMDPGYPKMIAHDFPGIGHKVDAVFMKDGFFYFFHGTRQYKFDPKTKRILTLQKANSWFNCRKN

SEQ ID NO: 282 - protein, 450 aa, Artificial Sequence
  MMP-1 variant R195W
FPATLETQEQDVDLVQKYLEKYYNLKNDGRQVEKRRNSGPVVEKLKQMQEFFGLKVTGKPDAETLKVMKQPRCGVPDVAQFVLTEGNPRWEQTHLTYRIENYTPDLPRADVDHAIEKAFQLWSNVTPLTFTKVSEGQADIMISFVRGDHRDNSPFDGPGGNLAHAFQPGPGIGGDAHFDEDERWTNNFREYNLHWVAAHELGHSLGLSHSTDIGALMYPSYTFSGDVQLAQDDIDGIQAIYGRSQNPVQPIGPQTPKACDSKLTFDAITTIRGEVMFFKDRFYMRTNPFYPEVELNFISVFWPQLPNGLEAAYEFADRDEVRFFKGNKYWAVQGQNVLHGYPKDIYSSFGFPRTVKHIDAALSEENTGKTYFFVANKYWRYDEYKRSMDPGYPKMIAHDFPGIGHKVDAVFMKDGFFYFFHGTRQYKFDPKTKRILTLQKANSWFNCRKN

SEQ ID NO: 283 - protein, 450 aa, Artificial Sequence
  MMP-1 variant R195I
FPATLETQEQDVDLVQKYLEKYYNLKNDGRQVEKRRNSGPVVEKLKQMQEFFGLKVTGKPDAETLKVMKQPRCGVPDVAQFVLTEGNPRWEQTHLTYRIENYTPDLPRADVDHAIEKAFQLWSNVTPLTFTKVSEGQADIMISFVRGDHRDNSPFDGPGGNLAHAFQPGPGIGGDAHFDEDERWTNNFREYNLHIVAAHELGHSLGLSHSTDIGALMYPSYTFSGDVQLAQDDIDGIQAIYGRSQNPVQPIGPQTPKACDSKLTFDAITTIRGEVMFFKDRFYMRTNPFYPEVELNFISVFWPQLPNGLEAAYEFADRDEVRFFKGNKYWAVQGQNVLHGYPKDIYSSFGFPRTVKHIDAALSEENTGKTYFFVANKYWRYDEYKRSMDPGYPKMIAHDFPGIGHKVDAVFMKDGFFYFFHGTRQYKFDPKTKRILTLQKANSWFNCRKN

SEQ ID NO: 284 - protein, 450 aa, Artificial Sequence
  MMP-1 variant R195V
FPATLETQEQDVDLVQKYLEKYYNLKNDGRQVEKRRNSGPVVEKLKQMQEFFGLKVTGKPDAETLKVMKQPRCGVPDVAQFVLTEGNPRWEQTHLTYRIENYTPDLPRADVDHAIEKAFQLWSNVTPLTFTKVSEGQADIMISFVRGDHRDNSPFDGPGGNLAHAFQPGPGIGGDAHFDEDERWTNNFREYNLHVVAAHELGHSLGLSHSTDIGALMYPSYTFSGDVQLAQDDIDGIQAIYGRSQNPVQPIGPQTPKACDSKLTFDAITTIRGEVMFFKDRFYMRTNPFYPEVELNFISVFWPQLPNGLEAAYEFADRDEVRFFKGNKYWAVQGQNVLHGYPKDIYSSFGFPRTVKHIDAALSEENTGKTYFFVANKYWRYDEYKRSMDPGYPKMIAHDFPGIGHKVDAVFMKDGFFYFFHGTRQYKFDPKTKRILTLQKANSWFNCRKN

SEQ ID NO: 285 - protein, 450 aa, Artificial Sequence
  MMP-1 variant R195L
FPATLETQEQDVDLVQKYLEKYYNLKNDGRQVEKRRNSGPVVEKLKQMQEFFGLKVTGKPDAETLKVMKQPRCGVPDVAQFVLTEGNPRWEQTHLTYRIENYTPDLPRADVDHAIEKAFQLWSNVTPLTFTKVSEGQADIMISFVRGDHRDNSPFDGPGGNLAHAFQPGPGIGGDAHFDEDERWTNNFREYNLHLVAAHELGHSLGLSHSTDIGALMYPSYTFSGDVQLAQDDIDGIQAIYGRSQNPVQPIGPQTPKACDSKLTFDAITTIRGEVMFFKDRFYMRTNPFYPEVELNFISVFWPQLPNGLEAAYEFADRDEVRFFKGNKYWAVQGQNVLHGYPKDIYSSFGFPRTVKHIDAALSEENTGKTYFFVANKYWRYDEYKRSMDPGYPKMIAHDFPGIGHKVDAVFMKDGFFYFFHGTRQYKFDPKTKRILTLQKANSWFNCRKN

SEQ ID NO: 286 - protein, 450 aa, Artificial Sequence
  MMP-1 variant R195A
FPATLETQEQDVDLVQKYLEKYYNLKNDGRQVEKRRNSGPVVEKLKQMQEFFGLKVTGKPDAETLKVMKQPRCGVPDVAQFVLTEGNPRWEQTHLTYRIENYTPDLPRADVDHAIEKAFQLWSNVTPLTFTKVSEGQADIMISFVRGDHRDNSPFDGPGGNLAHAFQPGPGIGGDAHFDEDERWTNNFREYNLHAVAAHELGHSLGLSHSTDIGALMYPSYTFSGDVQLAQDDIDGIQAIYGRSQNPVQPIGPQTPKACDSKLTFDAITTIRGEVMFFKDRFYMRTNPFYPEVELNFISVFWPQLPNGLEAAYEFADRDEVRFFKGNKYWAVQGQNVLHGYPKDIYSSFGFPRTVKHIDAALSEENTGKTYFFVANKYWRYDEYKRSMDPGYPKMIAHDFPGIGHKVDAVFMKDGFFYFFHGTRQYKFDPKTKRILTLQKANSWFNCRKN

SEQ ID NO: 287 - protein, 450 aa, Artificial Sequence
  MMP-1 variant R195P
FPATLETQEQDVDLVQKYLEKYYNLKNDGRQVEKRRNSGPVVEKLKQMQEFFGLKVTGKPDAETLKVMKQPRCGVPDVAQFVLTEGNPRWEQTHLTYRIENYTPDLPRADVDHAIEKAFQLWSNVTPLTFTKVSEGQADIMISFVRGDHRDNSPFDGPGGNLAHAFQPGPGIGGDAHFDEDERWTNNFREYNLHPVAAHELGHSLGLSHSTDIGALMYPSYTFSGDVQLAQDDIDGIQAIYGRSQNPVQPIGPQTPKACDSKLTFDAITTIRGEVMFFKDRFYMRTNPFYPEVELNFISVFWPQLPNGLEAAYEFADRDEVRFFKGNKYWAVQGQNVLHGYPKDIYSSFGFPRTVKHIDAALSEENTGKTYFFVANKYWRYDEYKRSMDPGYPKMIAHDFPGIGHKVDAVFMKDGFFYFFHGTRQYKFDPKTKRILTLQKANSWFNCRKN

SEQ ID NO: 288 - protein, 450 aa, Artificial Sequence
  MMP-1 variant A198D
FPATLETQEQDVDLVQKYLEKYYNLKNDGRQVEKRRNSGPVVEKLKQMQEFFGLKVTGKPDAETLKVMKQPRCGVPDVAQFVLTEGNPRWEQTHLTYRIENYTPDLPRADVDHAIEKAFQLWSNVTPLTFTKVSEGQADIMISFVRGDHRDNSPFDGPGGNLAHAFQPGPGIGGDAHFDEDERWTNNFREYNLHRVADHELGHSLGLSHSTDIGALMYPSYTFSGDVQLAQDDIDGIQAIYGRSQNPVQPIGPQTPKACDSKLTFDAITTIRGEVMFFKDRFYMRTNPFYPEVELNFISVFWPQLPNGLEAAYEFADRDEVRFFKGNKYWAVQGQNVLHGYPKDIYSSFGFPRTVKHIDAALSEENTGKTYFFVANKYWRYDEYKRSMDPGYPKMIAHDFPGIGHKVDAVFMKDGFFYFFHGTRQYKFDPKTKRILTLQKANSWFNCRKN

SEQ ID NO: 289 - protein, 450 aa, Artificial Sequence
  MMP-1 variant A198E
FPATLETQEQDVDLVQKYLEKYYNLKNDGRQVEKRRNSGPVVEKLKQMQEFFGLKVTGKPDAETLKVMKQPRCGVPDVAQFVLTEGNPRWEQTHLTYRIENYTPDLPRADVDHAIEKAFQLWSNVTPLTFTKVSEGQADIMISFVRGDHRDNSPFDGPGGNLAHAFQPGPGIGGDAHFDEDERWTNNFREYNLHRVAEHELGHSLGLSHSTDIGALMYPSYTFSGDVQLAQDDIDGIQAIYGRSQNPVQPIGPQTPKACDSKLTFDAITTIRGEVMFFKDRFYMRTNPFYPEVELNFISVFWPQLPNGLEAAYEFADRDEVRFFKGNKYWAVQGQNVLHGYPKDIYSSFGFPRTVKHIDAALSEENTGKTYFFVANKYWRYDEYKRSMDPGYPKMIAHDFPGIGHKVDAVFMKDGFFYFFHGTRQYKFDPKTKRILTLQKANSWFNCRKN

SEQ ID NO: 290 - protein, 450 aa, Artificial Sequence
  MMP-1 variant A198H
FPATLETQEQDVDLVQKYLEKYYNLKNDGRQVEKRRNSGPVVEKLKQMQEFFGLKVTGKPDAETLKVMKQPRCGVPDVAQFVLTEGNPRWEQTHLTYRIENYTPDLPRADVDHAIEKAFQLWSNVTPLTFTKVSEGQADIMISFVRGDHRDNSPFDGPGGNLAHAFQPGPGIGGDAHFDEDERWTNNFREYNLHRVAHHELGHSLGLSHSTDIGALMYPSYTFSGDVQLAQDDIDGIQAIYGRSQNPVQPIGPQTPKACDSKLTFDAITTIRGEVMFFKDRFYMRTNPFYPEVELNFISVFWPQLPNGLEAAYEFADRDEVRFFKGNKYWAVQGQNVLHGYPKDIYSSFGFPRTVKHIDAALSEENTGKTYFFVANKYWRYDEYKRSMDPGYPKMIAHDFPGIGHKVDAVFMKDGFFYFFHGTRQYKFDPKTKRILTLQKANSWFNCRKN

SEQ ID NO: 291 - protein, 450 aa, Artificial Sequence
  MMP-1 variant A198K
FPATLETQEQDVDLVQKYLEKYYNLKNDGRQVEKRRNSGPVVEKLKQMQEFFGLKVTGKPDAETLKVMKQPRCGVPDVAQFVLTEGNPRWEQTHLTYRIENYTPDLPRADVDHAIEKAFQLWSNVTPLTFTKVSEGQADIMISFVRGDHRDNSPFDGPGGNLAHAFQPGPGIGGDAHFDEDERWTNNFREYNLHRVAKHELGHSLGLSHSTDIGALMYPSYTFSGDVQLAQDDIDGIQAIYGRSQNPVQPIGPQTPKACDSKLTFDAITTIRGEVMFFKDRFYMRTNPFYPEVELNFISVFWPQLPNGLEAAYEFADRDEVRFFKGNKYWAVQGQNVLHGYPKDIYSSFGFPRTVKHIDAALSEENTGKTYFFVANKYWRYDEYKRSMDPGYPKMIAHDFPGIGHKVDAVFMKDGFFYFFHGTRQYKFDPKTKRILTLQKANSWFNCRKN

SEQ ID NO: 292 - protein, 450 aa, Artificial Sequence
  MMP-1 variant A198R
FPATLETQEQDVDLVQKYLEKYYNLKNDGRQVEKRRNSGPVVEKLKQMQEFFGLKVTGKPDAETLKVMKQPRCGVPDVAQFVLTEGNPRWEQTHLTYRIENYTPDLPRADVDHAIEKAFQLWSNVTPLTFTKVSEGQADIMISFVRGDHRDNSPFDGPGGNLAHAFQPGPGIGGDAHFDEDERWTNNFREYNLHRVARHELGHSLGLSHSTDIGALMYPSYTFSGDVQLAQDDIDGIQAIYGRSQNPVQPIGPQTPKACDSKLTFDAITTIRGEVMFFKDRFYMRTNPFYPEVELNFISVFWPQLPNGLEAAYEFADRDEVRFFKGNKYWAVQGQNVLHGYPKDIYSSFGFPRTVKHIDAALSEENTGKTYFFVANKYWRYDEYKRSMDPGYPKMIAHDFPGIGHKVDAVFMKDGFFYFFHGTRQYKFDPKTKRILTLQKANSWFNCRKN

SEQ ID NO: 293 - protein, 450 aa, Artificial Sequence
  MMP-1 variant A198C
FPATLETQEQDVDLVQKYLEKYYNLKNDGRQVEKRRNSGPVVEKLKQMQEFFGLKVTGKPDAETLKVMKQPRCGVPDVAQFVLTEGNPRWEQTHLTYRIENYTPDLPRADVDHAIEKAFQLWSNVTPLTFTKVSEGQADIMISFVRGDHRDNSPFDGPGGNLAHAFQPGPGIGGDAHFDEDERWTNNFREYNLHRVACHELGHSLGLSHSTDIGALMYPSYTFSGDVQLAQDDIDGIQAIYGRSQNPVQPIGPQTPKACDSKLTFDAITTIRGEVMFFKDRFYMRTNPFYPEVELNFISVFWPQLPNGLEAAYEFADRDEVRFFKGNKYWAVQGQNVLHGYPKDIYSSFGFPRTVKHIDAALSEENTGKTYFFVANKYWRYDEYKRSMDPGYPKMIAHDFPGIGHKVDAVFMKDGFFYFFHGTRQYKFDPKTKRILTLQKANSWFNCRKN

SEQ ID NO: 294 - protein, 450 aa, Artificial Sequence
  MMP-1 variant A198N
FPATLETQEQDVDLVQKYLEKYYNLKNDGRQVEKRRNSGPVVEKLKQMQEFFGLKVTGKPDAETLKVMKQPRCGVPDVAQFVLTEGNPRWEQTHLTYRIENYTPDLPRADVDHAIEKAFQLWSNVTPLTFTKVSEGQADIMISFVRGDHRDNSPFDGPGGNLAHAFQPGPGIGGDAHFDEDERWTNNFREYNLHRVANHELGHSLGLSHSTDIGALMYPSYTFSGDVQLAQDDIDGIQAIYGRSQNPVQPIGPQTPKACDSKLTFDAITTIRGEVMFFKDRFYMRTNPFYPEVELNFISVFWPQLPNGLEAAYEFADRDEVRFFKGNKYWAVQGQNVLHGYPKDIYSSFGFPRTVKHIDAALSEENTGKTYFFVANKYWRYDEYKRSMDPGYPKMIAHDFPGIGHKVDAVFMKDGFFYFFHGTRQYKFDPKTKRILTLQKANSWFNCRKN

SEQ ID NO: 295 - protein, 450 aa, Artificial Sequence
  MMP-1 variant A198Q
FPATLETQEQDVDLVQKYLEKYYNLKNDGRQVEKRRNSGPVVEKLKQMQEFFGLKVTGKPDAETLKVMKQPRCGVPDVAQFVLTEGNPRWEQTHLTYRIENYTPDLPRADVDHAIEKAFQLWSNVTPLTFTKVSEGQADIMISFVRGDHRDNSPFDGPGGNLAHAFQPGPGIGGDAHFDEDERWTNNFREYNLHRVAQHELGHSLGLSHSTDIGALMYPSYTFSGDVQLAQDDIDGIQAIYGRSQNPVQPIGPQTPKACDSKLTFDAITTIRGEVMFFKDRFYMRTNPFYPEVELNFISVFWPQLPNGLEAAYEFADRDEVRFFKGNKYWAVQGQNVLHGYPKDIYSSFGFPRTVKHIDAALSEENTGKTYFFVANKYWRYDEYKRSMDPGYPKMIAHDFPGIGHKVDAVFMKDGFFYFFHGTRQYKFDPKTKRILTLQKANSWFNCRKN

SEQ ID NO: 296 - protein, 450 aa, Artificial Sequence
  MMP-1 variant A198T
FPATLETQEQDVDLVQKYLEKYYNLKNDGRQVEKRRNSGPVVEKLKQMQEFFGLKVTGKPDAETLKVMKQPRCGVPDVAQFVLTEGNPRWEQTHLTYRIENYTPDLPRADVDHAIEKAFQLWSNVTPLTFTKVSEGQADIMISFVRGDHRDNSPFDGPGGNLAHAFQPGPGIGGDAHFDEDERWTNNFREYNLHRVATHELGHSLGLSHSTDIGALMYPSYTFSGDVQLAQDDIDGIQAIYGRSQNPVQPIGPQTPKACDSKLTFDAITTIRGEVMFFKDRFYMRTNPFYPEVELNFISVFWPQLPNGLEAAYEFADRDEVRFFKGNKYWAVQGQNVLHGYPKDIYSSFGFPRTVKHIDAALSEENTGKTYFFVANKYWRYDEYKRSMDPGYPKMIAHDFPGIGHKVDAVFMKDGFFYFFHGTRQYKFDPKTKRILTLQKANSWFNCRKN

SEQ ID NO: 297 - protein, 450 aa, Artificial Sequence
  MMP-1 variant A198Y
FPATLETQEQDVDLVQKYLEKYYNLKNDGRQVEKRRNSGPVVEKLKQMQEFFGLKVTGKPDAETLKVMKQPRCGVPDVAQFVLTEGNPRWEQTHLTYRIENYTPDLPRADVDHAIEKAFQLWSNVTPLTFTKVSEGQADIMISFVRGDHRDNSPFDGPGGNLAHAFQPGPGIGGDAHFDEDERWTNNFREYNLHRVAYHELGHSLGLSHSTDIGALMYPSYTFSGDVQLAQDDIDGIQAIYGRSQNPVQPIGPQTPKACDSKLTFDAITTIRGEVMFFKDRFYMRTNPFYPEVELNFISVFWPQLPNGLEAAYEFADRDEVRFFKGNKYWAVQGQNVLHGYPKDIYSSFGFPRTVKHIDAALSEENTGKTYFFVANKYWRYDEYKRSMDPGYPKMIAHDFPGIGHKVDAVFMKDGFFYFFHGTRQYKFDPKTKRILTLQKANSWFNCRKN

SEQ ID NO: 298 - protein, 450 aa, Artificial Sequence
  MMP-1 variant A198S
FPATLETQEQDVDLVQKYLEKYYNLKNDGRQVEKRRNSGPVVEKLKQMQEFFGLKVTGKPDAETLKVMKQPRCGVPDVAQFVLTEGNPRWEQTHLTYRIENYTPDLPRADVDHAIEKAFQLWSNVTPLTFTKVSEGQADIMISFVRGDHRDNSPFDGPGGNLAHAFQPGPGIGGDAHFDEDERWTNNFREYNLHRVASHELGHSLGLSHSTDIGALMYPSYTFSGDVQLAQDDIDGIQAIYGRSQNPVQPIGPQTPKACDSKLTFDAITTIRGEVMFFKDRFYMRTNPFYPEVELNFISVFWPQLPNGLEAAYEFADRDEVRFFKGNKYWAVQGQNVLHGYPKDIYSSFGFPRTVKHIDAALSEENTGKTYFFVANKYWRYDEYKRSMDPGYPKMIAHDFPGIGHKVDAVFMKDGFFYFFHGTRQYKFDPKTKRILTLQKANSWFNCRKN

SEQ ID NO: 299 - protein, 450 aa, Artificial Sequence
  MMP-1 variant A198G
FPATLETQEQDVDLVQKYLEKYYNLKNDGRQVEKRRNSGPVVEKLKQMQEFFGLKVTGKPDAETLKVMKQPRCGVPDVAQFVLTEGNPRWEQTHLTYRIENYTPDLPRADVDHAIEKAFQLWSNVTPLTFTKVSEGQADIMISFVRGDHRDNSPFDGPGGNLAHAFQPGPGIGGDAHFDEDERWTNNFREYNLHRVAGHELGHSLGLSHSTDIGALMYPSYTFSGDVQLAQDDIDGIQAIYGRSQNPVQPIGPQTPKACDSKLTFDAITTIRGEVMFFKDRFYMRTNPFYPEVELNFISVFWPQLPNGLEAAYEFADRDEVRFFKGNKYWAVQGQNVLHGYPKDIYSSFGFPRTVKHIDAALSEENTGKTYFFVANKYWRYDEYKRSMDPGYPKMIAHDFPGIGHKVDAVFMKDGFFYFFHGTRQYKFDPKTKRILTLQKANSWFNCRKN

SEQ ID NO: 300 - protein, 450 aa, Artificial Sequence
  MMP-1 variant A198F
FPATLETQEQDVDLVQKYLEKYYNLKNDGRQVEKRRNSGPVVEKLKQMQEFFGLKVTGKPDAETLKVMKQPRCGVPDVAQFVLTEGNPRWEQTHLTYRIENYTPDLPRADVDHAIEKAFQLWSNVTPLTFTKVSEGQADIMISFVRGDHRDNSPFDGPGGNLAHAFQPGPGIGGDAHFDEDERWTNNFREYNLHRVAFHELGHSLGLSHSTDIGALMYPSYTFSGDVQLAQDDIDGIQAIYGRSQNPVQPIGPQTPKACDSKLTFDAITTIRGEVMFFKDRFYMRTNPFYPEVELNFISVFWPQLPNGLEAAYEFADRDEVRFFKGNKYWAVQGQNVLHGYPKDIYSSFGFPRTVKHIDAALSEENTGKTYFFVANKYWRYDEYKRSMDPGYPKMIAHDFPGIGHKVDAVFMKDGFFYFFHGTRQYKFDPKTKRILTLQKANSWFNCRKN

SEQ ID NO: 301 - protein, 450 aa, Artificial Sequence
  MMP-1 variant A198M
FPATLETQEQDVDLVQKYLEKYYNLKNDGRQVEKRRNSGPVVEKLKQMQEFFGLKVTGKPDAETLKVMKQPRCGVPDVAQFVLTEGNPRWEQTHLTYRIENYTPDLPRADVDHAIEKAFQLWSNVTPLTFTKVSEGQADIMISFVRGDHRDNSPFDGPGGNLAHAFQPGPGIGGDAHFDEDERWTNNFREYNLHRVAMHELGHSLGLSHSTDIGALMYPSYTFSGDVQLAQDDIDGIQAIYGRSQNPVQPIGPQTPKACDSKLTFDAITTIRGEVMFFKDRFYMRTNPFYPEVELNFISVFWPQLPNGLEAAYEFADRDEVRFFKGNKYWAVQGQNVLHGYPKDIYSSFGFPRTVKHIDAALSEENTGKTYFFVANKYWRYDEYKRSMDPGYPKMIAHDFPGIGHKVDAVFMKDGFFYFFHGTRQYKFDPKTKRILTLQKANSWFNCRKN

SEQ ID NO: 302 - protein, 450 aa, Artificial Sequence
  MMP-1 variant A198W
FPATLETQEQDVDLVQKYLEKYYNLKNDGRQVEKRRNSGPVVEKLKQMQEFFGLKVTGKPDAETLKVMKQPRCGVPDVAQFVLTEGNPRWEQTHLTYRIENYTPDLPRADVDHAIEKAFQLWSNVTPLTFTKVSEGQADIMISFVRGDHRDNSPFDGPGGNLAHAFQPGPGIGGDAHFDEDERWTNNFREYNLHRVAWHELGHSLGLSHSTDIGALMYPSYTFSGDVQLAQDDIDGIQAIYGRSQNPVQPIGPQTPKACDSKLTFDAITTIRGEVMFFKDRFYMRTNPFYPEVELNFISVFWPQLPNGLEAAYEFADRDEVRFFKGNKYWAVQGQNVLHGYPKDIYSSFGFPRTVKHIDAALSEENTGKTYFFVANKYWRYDEYKRSMDPGYPKMIAHDFPGIGHKVDAVFMKDGFFYFFHGTRQYKFDPKTKRILTLQKANSWFNCRKN

SEQ ID NO: 303 - protein, 450 aa, Artificial Sequence
  MMP-1 variant A198I
FPATLETQEQDVDLVQKYLEKYYNLKNDGRQVEKRRNSGPVVEKLKQMQEFFGLKVTGKPDAETLKVMKQPRCGVPDVAQFVLTEGNPRWEQTHLTYRIENYTPDLPRADVDHAIEKAFQLWSNVTPLTFTKVSEGQADIMISFVRGDHRDNSPFDGPGGNLAHAFQPGPGIGGDAHFDEDERWTNNFREYNLHRVAIHELGHSLGLSHSTDIGALMYPSYTFSGDVQLAQDDIDGIQAIYGRSQNPVQPIGPQTPKACDSKLTFDAITTIRGEVMFFKDRFYMRTNPFYPEVELNFISVFWPQLPNGLEAAYEFADRDEVRFFKGNKYWAVQGQNVLHGYPKDIYSSFGFPRTVKHIDAALSEENTGKTYFFVANKYWRYDEYKRSMDPGYPKMIAHDFPGIGHKVDAVFMKDGFFYFFHGTRQYKFDPKTKRILTLQKANSWFNCRKN

SEQ ID NO: 304 - protein, 450 aa, Artificial Sequence
  MMP-1 variant A198V
FPATLETQEQDVDLVQKYLEKYYNLKNDGRQVEKRRNSGPVVEKLKQMQEFFGLKVTGKPDAETLKVMKQPRCGVPDVAQFVLTEGNPRWEQTHLTYRIENYTPDLPRADVDHAIEKAFQLWSNVTPLTFTKVSEGQADIMISFVRGDHRDNSPFDGPGGNLAHAFQPGPGIGGDAHFDEDERWTNNFREYNLHRVAVHELGHSLGLSHSTDIGALMYPSYTFSGDVQLAQDDIDGIQAIYGRSQNPVQPIGPQTPKACDSKLTFDAITTIRGEVMFFKDRFYMRTNPFYPEVELNFISVFWPQLPNGLEAAYEFADRDEVRFFKGNKYWAVQGQNVLHGYPKDIYSSFGFPRTVKHIDAALSEENTGKTYFFVANKYWRYDEYKRSMDPGYPKMIAHDFPGIGHKVDAVFMKDGFFYFFHGTRQYKFDPKTKRILTLQKANSWFNCRKN

SEQ ID NO: 305 - protein, 450 aa, Artificial Sequence
  MMP-1 variant A198L
FPATLETQEQDVDLVQKYLEKYYNLKNDGRQVEKRRNSGPVVEKLKQMQEFFGLKVTGKPDAETLKVMKQPRCGVPDVAQFVLTEGNPRWEQTHLTYRIENYTPDLPRADVDHAIEKAFQLWSNVTPLTFTKVSEGQADIMISFVRGDHRDNSPFDGPGGNLAHAFQPGPGIGGDAHFDEDERWTNNFREYNLHRVALHELGHSLGLSHSTDIGALMYPSYTFSGDVQLAQDDIDGIQAIYGRSQNPVQPIGPQTPKACDSKLTFDAITTIRGEVMFFKDRFYMRTNPFYPEVELNFISVFWPQLPNGLEAAYEFADRDEVRFFKGNKYWAVQGQNVLHGYPKDIYSSFGFPRTVKHIDAALSEENTGKTYFFVANKYWRYDEYKRSMDPGYPKMIAHDFPGIGHKVDAVFMKDGFFYFFHGTRQYKFDPKTKRILTLQKANSWFNCRKN

SEQ ID NO: 306 - protein, 450 aa, Artificial Sequence
  MMP-1 variant A198P
FPATLETQEQDVDLVQKYLEKYYNLKNDGRQVEKRRNSGPVVEKLKQMQEFFGLKVTGKPDAETLKVMKQPRCGVPDVAQFVLTEGNPRWEQTHLTYRIENYTPDLPRADVDHAIEKAFQLWSNVTPLTFTKVSEGQADIMISFVRGDHRDNSPFDGPGGNLAHAFQPGPGIGGDAHFDEDERWTNNFREYNLHRVAPHELGHSLGLSHSTDIGALMYPSYTFSGDVQLAQDDIDGIQAIYGRSQNPVQPIGPQTPKACDSKLTFDAITTIRGEVMFFKDRFYMRTNPFYPEVELNFISVFWPQLPNGLEAAYEFADRDEVRFFKGNKYWAVQGQNVLHGYPKDIYSSFGFPRTVKHIDAALSEENTGKTYFFVANKYWRYDEYKRSMDPGYPKMIAHDFPGIGHKVDAVFMKDGFFYFFHGTRQYKFDPKTKRILTLQKANSWFNCRKN

SEQ ID NO: 307 - protein, 450 aa, Artificial Sequence
  MMP-1 variant G206D
FPATLETQEQDVDLVQKYLEKYYNLKNDGRQVEKRRNSGPVVEKLKQMQEFFGLKVTGKPDAETLKVMKQPRCGVPDVAQFVLTEGNPRWEQTHLTYRIENYTPDLPRADVDHAIEKAFQLWSNVTPLTFTKVSEGQADIMISFVRGDHRDNSPFDGPGGNLAHAFQPGPGIGGDAHFDEDERWTNNFREYNLHRVAAHELGHSLDLSHSTDIGALMYPSYTFSGDVQLAQDDIDGIQAIYGRSQNPVQPIGPQTPKACDSKLTFDAITTIRGEVMFFKDRFYMRTNPFYPEVELNFISVFWPQLPNGLEAAYEFADRDEVRFFKGNKYWAVQGQNVLHGYPKDIYSSFGFPRTVKHIDAALSEENTGKTYFFVANKYWRYDEYKRSMDPGYPKMIAHDFPGIGHKVDAVFMKDGFFYFFHGTRQYKFDPKTKRILTLQKANSWFNCRKN

SEQ ID NO: 308 - protein, 450 aa, Artificial Sequence
  MMP-1 variant G206E
FPATLETQEQDVDLVQKYLEKYYNLKNDGRQVEKRRNSGPVVEKLKQMQEFFGLKVTGKPDAETLKVMKQPRCGVPDVAQFVLTEGNPRWEQTHLTYRIENYTPDLPRADVDHAIEKAFQLWSNVTPLTFTKVSEGQADIMISFVRGDHRDNSPFDGPGGNLAHAFQPGPGIGGDAHFDEDERWTNNFREYNLHRVAAHELGHSLELSHSTDIGALMYPSYTFSGDVQLAQDDIDGIQAIYGRSQNPVQPIGPQTPKACDSKLTFDAITTIRGEVMFFKDRFYMRTNPFYPEVELNFISVFWPQLPNGLEAAYEFADRDEVRFFKGNKYWAVQGQNVLHGYPKDIYSSFGFPRTVKHIDAALSEENTGKTYFFVANKYWRYDEYKRSMDPGYPKMIAHDFPGIGHKVDAVFMKDGFFYFFHGTRQYKFDPKTKRILTLQKANSWFNCRKN

SEQ ID NO: 309 - protein, 450 aa, Artificial Sequence
  MMP-1 variant G206H
FPATLETQEQDVDLVQKYLEKYYNLKNDGRQVEKRRNSGPVVEKLKQMQEFFGLKVTGKPDAETLKVMKQPRCGVPDVAQFVLTEGNPRWEQTHLTYRIENYTPDLPRADVDHAIEKAFQLWSNVTPLTFTKVSEGQADIMISFVRGDHRDNSPFDGPGGNLAHAFQPGPGIGGDAHFDEDERWTNNFREYNLHRVAAHELGHSLHLSHSTDIGALMYPSYTFSGDVQLAQDDIDGIQAIYGRSQNPVQPIGPQTPKACDSKLTFDAITTIRGEVMFFKDRFYMRTNPFYPEVELNFISVFWPQLPNGLEAAYEFADRDEVRFFKGNKYWAVQGQNVLHGYPKDIYSSFGFPRTVKHIDAALSEENTGKTYFFVANKYWRYDEYKRSMDPGYPKMIAHDFPGIGHKVDAVFMKDGFFYFFHGTRQYKFDPKTKRILTLQKANSWFNCRKN

SEQ ID NO: 310 - protein, 450 aa, Artificial Sequence
  MMP-1 variant G206K
FPATLETQEQDVDLVQKYLEKYYNLKNDGRQVEKRRNSGPVVEKLKQMQEFFGLKVTGKPDAETLKVMKQPRCGVPDVAQFVLTEGNPRWEQTHLTYRIENYTPDLPRADVDHAIEKAFQLWSNVTPLTFTKVSEGQADIMISFVRGDHRDNSPFDGPGGNLAHAFQPGPGIGGDAHFDEDERWTNNFREYNLHRVAAHELGHSLKLSHSTDIGALMYPSYTFSGDVQLAQDDIDGIQAIYGRSQNPVQPIGPQTPKACDSKLTFDAITTIRGEVMFFKDRFYMRTNPFYPEVELNFISVFWPQLPNGLEAAYEFADRDEVRFFKGNKYWAVQGQNVLHGYPKDIYSSFGFPRTVKHIDAALSEENTGKTYFFVANKYWRYDEYKRSMDPGYPKMIAHDFPGIGHKVDAVFMKDGFFYFFHGTRQYKFDPKTKRILTLQKANSWFNCRKN

SEQ ID NO: 311 - protein, 450 aa, Artificial Sequence
  MMP-1 variant G206R
FPATLETQEQDVDLVQKYLEKYYNLKNDGRQVEKRRNSGPVVEKLKQMQEFFGLKVTGKPDAETLKVMKQPRCGVPDVAQFVLTEGNPRWEQTHLTYRIENYTPDLPRADVDHAIEKAFQLWSNVTPLTFTKVSEGQADIMISFVRGDHRDNSPFDGPGGNLAHAFQPGPGIGGDAHFDEDERWTNNFREYNLHRVAAHELGHSLRLSHSTDIGALMYPSYTFSGDVQLAQDDIDGIQAIYGRSQNPVQPIGPQTPKACDSKLTFDAITTIRGEVMFFKDRFYMRTNPFYPEVELNFISVFWPQLPNGLEAAYEFADRDEVRFFKGNKYWAVQGQNVLHGYPKDIYSSFGFPRTVKHIDAALSEENTGKTYFFVANKYWRYDEYKRSMDPGYPKMIAHDFPGIGHKVDAVFMKDGFFYFFHGTRQYKFDPKTKRILTLQKANSWFNCRKN

SEQ ID NO: 312 - protein, 450 aa, Artificial Sequence
  MMP-1 variant G206C
FPATLETQEQDVDLVQKYLEKYYNLKNDGRQVEKRRNSGPVVEKLKQMQEFFGLKVTGKPDAETLKVMKQPRCGVPDVAQFVLTEGNPRWEQTHLTYRIENYTPDLPRADVDHAIEKAFQLWSNVTPLTFTKVSEGQADIMISFVRGDHRDNSPFDGPGGNLAHAFQPGPGIGGDAHFDEDERWTNNFREYNLHRVAAHELGHSLCLSHSTDIGALMYPSYTFSGDVQLAQDDIDGIQAIYGRSQNPVQPIGPQTPKACDSKLTFDAITTIRGEVMFFKDRFYMRTNPFYPEVELNFISVFWPQLPNGLEAAYEFADRDEVRFFKGNKYWAVQGQNVLHGYPKDIYSSFGFPRTVKHIDAALSEENTGKTYFFVANKYWRYDEYKRSMDPGYPKMIAHDFPGIGHKVDAVFMKDGFFYFFHGTRQYKFDPKTKRILTLQKANSWFNCRKN

SEQ ID NO: 313 - protein, 450 aa, Artificial Sequence
  MMP-1 variant G206N
FPATLETQEQDVDLVQKYLEKYYNLKNDGRQVEKRRNSGPVVEKLKQMQEFFGLKVTGKPDAETLKVMKQPRCGVPDVAQFVLTEGNPRWEQTHLTYRIENYTPDLPRADVDHAIEKAFQLWSNVTPLTFTKVSEGQADIMISFVRGDHRDNSPFDGPGGNLAHAFQPGPGIGGDAHFDEDERWTNNFREYNLHRVAAHELGHSLNLSHSTDIGALMYPSYTFSGDVQLAQDDIDGIQAIYGRSQNPVQPIGPQTPKACDSKLTFDAITTIRGEVMFFKDRFYMRTNPFYPEVELNFISVFWPQLPNGLEAAYEFADRDEVRFFKGNKYWAVQGQNVLHGYPKDIYSSFGFPRTVKHIDAALSEENTGKTYFFVANKYWRYDEYKRSMDPGYPKMIAHDFPGIGHKVDAVFMKDGFFYFFHGTRQYKFDPKTKRILTLQKANSWFNCRKN

SEQ ID NO: 314 - protein, 450 aa, Artificial Sequence
  MMP-1 variant G206Q
FPATLETQEQDVDLVQKYLEKYYNLKNDGRQVEKRRNSGPVVEKLKQMQEFFGLKVTGKPDAETLKVMKQPRCGVPDVAQFVLTEGNPRWEQTHLTYRIENYTPDLPRADVDHAIEKAFQLWSNVTPLTFTKVSEGQADIMISFVRGDHRDNSPFDGPGGNLAHAFQPGPGIGGDAHFDEDERWTNNFREYNLHRVAAHELGHSLQLSHSTDIGALMYPSYTFSGDVQLAQDDIDGIQAIYGRSQNPVQPIGPQTPKACDSKLTFDAITTIRGEVMFFKDRFYMRTNPFYPEVELNFISVFWPQLPNGLEAAYEFADRDEVRFFKGNKYWAVQGQNVLHGYPKDIYSSFGFPRTVKHIDAALSEENTGKTYFFVANKYWRYDEYKRSMDPGYPKMIAHDFPGIGHKVDAVFMKDGFFYFFHGTRQYKFDPKTKRILTLQKANSWFNCRKN

SEQ ID NO: 315 - protein, 450 aa, Artificial Sequence
  MMP-1 variant G206T
FPATLETQEQDVDLVQKYLEKYYNLKNDGRQVEKRRNSGPVVEKLKQMQEFFGLKVTGKPDAETLKVMKQPRCGVPDVAQFVLTEGNPRWEQTHLTYRIENYTPDLPRADVDHAIEKAFQLWSNVTPLTFTKVSEGQADIMISFVRGDHRDNSPFDGPGGNLAHAFQPGPGIGGDAHFDEDERWTNNFREYNLHRVAAHELGHSLTLSHSTDIGALMYPSYTFSGDVQLAQDDIDGIQAIYGRSQNPVQPIGPQTPKACDSKLTFDAITTIRGEVMFFKDRFYMRTNPFYPEVELNFISVFWPQLPNGLEAAYEFADRDEVRFFKGNKYWAVQGQNVLHGYPKDIYSSFGFPRTVKHIDAALSEENTGKTYFFVANKYWRYDEYKRSMDPGYPKMIAHDFPGIGHKVDAVFMKDGFFYFFHGTRQYKFDPKTKRILTLQKANSWFNCRKN

SEQ ID NO: 316 - protein, 450 aa, Artificial Sequence
  MMP-1 variant G206Y
FPATLETQEQDVDLVQKYLEKYYNLKNDGRQVEKRRNSGPVVEKLKQMQEFFGLKVTGKPDAETLKVMKQPRCGVPDVAQFVLTEGNPRWEQTHLTYRIENYTPDLPRADVDHAIEKAFQLWSNVTPLTFTKVSEGQADIMISFVRGDHRDNSPFDGPGGNLAHAFQPGPGIGGDAHFDEDERWTNNFREYNLHRVAAHELGHSLYLSHSTDIGALMYPSYTFSGDVQLAQDDIDGIQAIYGRSQNPVQPIGPQTPKACDSKLTFDAITTIRGEVMFFKDRFYMRTNPFYPEVELNFISVFWPQLPNGLEAAYEFADRDEVRFFKGNKYWAVQGQNVLHGYPKDIYSSFGFPRTVKHIDAALSEENTGKTYFFVANKYWRYDEYKRSMDPGYPKMIAHDFPGIGHKVDAVFMKDGFFYFFHGTRQYKFDPKTKRILTLQKANSWFNCRKN

SEQ ID NO: 317 - protein, 450 aa, Artificial Sequence
  MMP-1 variant G206S
FPATLETQEQDVDLVQKYLEKYYNLKNDGRQVEKRRNSGPVVEKLKQMQEFFGLKVTGKPDAETLKVMKQPRCGVPDVAQFVLTEGNPRWEQTHLTYRIENYTPDLPRADVDHAIEKAFQLWSNVTPLTFTKVSEGQADIMISFVRGDHRDNSPFDGPGGNLAHAFQPGPGIGGDAHFDEDERWTNNFREYNLHRVAAHELGHSLSLSHSTDIGALMYPSYTFSGDVQLAQDDIDGIQAIYGRSQNPVQPIGPQTPKACDSKLTFDAITTIRGEVMFFKDRFYMRTNPFYPEVELNFISVFWPQLPNGLEAAYEFADRDEVRFFKGNKYWAVQGQNVLHGYPKDIYSSFGFPRTVKHIDAALSEENTGKTYFFVANKYWRYDEYKRSMDPGYPKMIAHDFPGIGHKVDAVFMKDGFFYFFHGTRQYKFDPKTKRILTLQKANSWFNCRKN

SEQ ID NO: 318 - protein, 450 aa, Artificial Sequence
  MMP-1 variant G206F
FPATLETQEQDVDLVQKYLEKYYNLKNDGRQVEKRRNSGPVVEKLKQMQEFFGLKVTGKPDAETLKVMKQPRCGVPDVAQFVLTEGNPRWEQTHLTYRIENYTPDLPRADVDHAIEKAFQLWSNVTPLTFTKVSEGQADIMISFVRGDHRDNSPFDGPGGNLAHAFQPGPGIGGDAHFDEDERWTNNFREYNLHRVAAHELGHSLFLSHSTDIGALMYPSYTFSGDVQLAQDDIDGIQAIYGRSQNPVQPIGPQTPKACDSKLTFDAITTIRGEVMFFKDRFYMRTNPFYPEVELNFISVFWPQLPNGLEAAYEFADRDEVRFFKGNKYWAVQGQNVLHGYPKDIYSSFGFPRTVKHIDAALSEENTGKTYFFVANKYWRYDEYKRSMDPGYPKMIAHDFPGIGHKVDAVFMKDGFFYFFHGTRQYKFDPKTKRILTLQKANSWFNCRKN

SEQ ID NO: 319 - protein, 450 aa, Artificial Sequence
  MMP-1 variant G206M
FPATLETQEQDVDLVQKYLEKYYNLKNDGRQVEKRRNSGPVVEKLKQMQEFFGLKVTGKPDAETLKVMKQPRCGVPDVAQFVLTEGNPRWEQTHLTYRIENYTPDLPRADVDHAIEKAFQLWSNVTPLTFTKVSEGQADIMISFVRGDHRDNSPFDGPGGNLAHAFQPGPGIGGDAHFDEDERWTNNFREYNLHRVAAHELGHSLMLSHSTDIGALMYPSYTFSGDVQLAQDDIDGIQAIYGRSQNPVQPIGPQTPKACDSKLTFDAITTIRGEVMFFKDRFYMRTNPFYPEVELNFISVFWPQLPNGLEAAYEFADRDEVRFFKGNKYWAVQGQNVLHGYPKDIYSSFGFPRTVKHIDAALSEENTGKTYFFVANKYWRYDEYKRSMDPGYPKMIAHDFPGIGHKVDAVFMKDGFFYFFHGTRQYKFDPKTKRILTLQKANSWFNCRKN

SEQ ID NO: 320 - protein, 450 aa, Artificial Sequence
  MMP-1 variant G206W
FPATLETQEQDVDLVQKYLEKYYNLKNDGRQVEKRRNSGPVVEKLKQMQEFFGLKVTGKPDAETLKVMKQPRCGVPDVAQFVLTEGNPRWEQTHLTYRIENYTPDLPRADVDHAIEKAFQLWSNVTPLTFTKVSEGQADIMISFVRGDHRDNSPFDGPGGNLAHAFQPGPGIGGDAHFDEDERWTNNFREYNLHRVAAHELGHSLWLSHSTDIGALMYPSYTFSGDVQLAQDDIDGIQAIYGRSQNPVQPIGPQTPKACDSKLTFDAITTIRGEVMFFKDRFYMRTNPFYPEVELNFISVFWPQLPNGLEAAYEFADRDEVRFFKGNKYWAVQGQNVLHGYPKDIYSSFGFPRTVKHIDAALSEENTGKTYFFVANKYWRYDEYKRSMDPGYPKMIAHDFPGIGHKVDAVFMKDGFFYFFHGTRQYKFDPKTKRILTLQKANSWFNCRKN

SEQ ID NO: 321 - protein, 450 aa, Artificial Sequence
  MMP-1 variant G206I
FPATLETQEQDVDLVQKYLEKYYNLKNDGRQVEKRRNSGPVVEKLKQMQEFFGLKVTGKPDAETLKVMKQPRCGVPDVAQFVLTEGNPRWEQTHLTYRIENYTPDLPRADVDHAIEKAFQLWSNVTPLTFTKVSEGQADIMISFVRGDHRDNSPFDGPGGNLAHAFQPGPGIGGDAHFDEDERWTNNFREYNLHRVAAHELGHSLILSHSTDIGALMYPSYTFSGDVQLAQDDIDGIQAIYGRSQNPVQPIGPQTPKACDSKLTFDAITTIRGEVMFFKDRFYMRTNPFYPEVELNFISVFWPQLPNGLEAAYEFADRDEVRFFKGNKYWAVQGQNVLHGYPKDIYSSFGFPRTVKHIDAALSEENTGKTYFFVANKYWRYDEYKRSMDPGYPKMIAHDFPGIGHKVDAVFMKDGFFYFFHGTRQYKFDPKTKRILTLQKANSWFNCRKN

SEQ ID NO: 322 - protein, 450 aa, Artificial Sequence
  MMP-1 variant G206V
FPATLETQEQDVDLVQKYLEKYYNLKNDGRQVEKRRNSGPVVEKLKQMQEFFGLKVTGKPDAETLKVMKQPRCGVPDVAQFVLTEGNPRWEQTHLTYRIENYTPDLPRADVDHAIEKAFQLWSNVTPLTFTKVSEGQADIMISFVRGDHRDNSPFDGPGGNLAHAFQPGPGIGGDAHFDEDERWTNNFREYNLHRVAAHELGHSLVLSHSTDIGALMYPSYTFSGDVQLAQDDIDGIQAIYGRSQNPVQPIGPQTPKACDSKLTFDAITTIRGEVMFFKDRFYMRTNPFYPEVELNFISVFWPQLPNGLEAAYEFADRDEVRFFKGNKYWAVQGQNVLHGYPKDIYSSFGFPRTVKHIDAALSEENTGKTYFFVANKYWRYDEYKRSMDPGYPKMIAHDFPGIGHKVDAVFMKDGFFYFFHGTRQYKFDPKTKRILTLQKANSWFNCRKN

SEQ ID NO: 323 - protein, 450 aa, Artificial Sequence
  MMP-1 variant G206L
FPATLETQEQDVDLVQKYLEKYYNLKNDGRQVEKRRNSGPVVEKLKQMQEFFGLKVTGKPDAETLKVMKQPRCGVPDVAQFVLTEGNPRWEQTHLTYRIENYTPDLPRADVDHAIEKAFQLWSNVTPLTFTKVSEGQADIMISFVRGDHRDNSPFDGPGGNLAHAFQPGPGIGGDAHFDEDERWTNNFREYNLHRVAAHELGHSLLLSHSTDIGALMYPSYTFSGDVQLAQDDIDGIQAIYGRSQNPVQPIGPQTPKACDSKLTFDAITTIRGEVMFFKDRFYMRTNPFYPEVELNFISVFWPQLPNGLEAAYEFADRDEVRFFKGNKYWAVQGQNVLHGYPKDIYSSFGFPRTVKHIDAALSEENTGKTYFFVANKYWRYDEYKRSMDPGYPKMIAHDFPGIGHKVDAVFMKDGFFYFFHGTRQYKFDPKTKRILTLQKANSWFNCRKN

SEQ ID NO: 324 - protein, 450 aa, Artificial Sequence
  MMP-1 variant G206A
FPATLETQEQDVDLVQKYLEKYYNLKNDGRQVEKRRNSGPVVEKLKQMQEFFGLKVTGKPDAETLKVMKQPRCGVPDVAQFVLTEGNPRWEQTHLTYRIENYTPDLPRADVDHAIEKAFQLWSNVTPLTFTKVSEGQADIMISFVRGDHRDNSPFDGPGGNLAHAFQPGPGIGGDAHFDEDERWTNNFREYNLHRVAAHELGHSLALSHSTDIGALMYPSYTFSGDVQLAQDDIDGIQAIYGRSQNPVQPIGPQTPKACDSKLTFDAITTIRGEVMFFKDRFYMRTNPFYPEVELNFISVFWPQLPNGLEAAYEFADRDEVRFFKGNKYWAVQGQNVLHGYPKDIYSSFGFPRTVKHIDAALSEENTGKTYFFVANKYWRYDEYKRSMDPGYPKMIAHDFPGIGHKVDAVFMKDGFFYFFHGTRQYKFDPKTKRILTLQKANSWFNCRKN

SEQ ID NO: 325 - protein, 450 aa, Artificial Sequence
  MMP-1 variant G206P
FPATLETQEQDVDLVQKYLEKYYNLKNDGRQVEKRRNSGPVVEKLKQMQEFFGLKVTGKPDAETLKVMKQPRCGVPDVAQFVLTEGNPRWEQTHLTYRIENYTPDLPRADVDHAIEKAFQLWSNVTPLTFTKVSEGQADIMISFVRGDHRDNSPFDGPGGNLAHAFQPGPGIGGDAHFDEDERWTNNFREYNLHRVAAHELGHSLPLSHSTDIGALMYPSYTFSGDVQLAQDDIDGIQAIYGRSQNPVQPIGPQTPKACDSKLTFDAITTIRGEVMFFKDRFYMRTNPFYPEVELNFISVFWPQLPNGLEAAYEFADRDEVRFFKGNKYWAVQGQNVLHGYPKDIYSSFGFPRTVKHIDAALSEENTGKTYFFVANKYWRYDEYKRSMDPGYPKMIAHDFPGIGHKVDAVFMKDGFFYFFHGTRQYKFDPKTKRILTLQKANSWFNCRKN

SEQ ID NO: 326 - protein, 450 aa, Artificial Sequence
  MMP-1 variant S210D
FPATLETQEQDVDLVQKYLEKYYNLKNDGRQVEKRRNSGPVVEKLKQMQEFFGLKVTGKPDAETLKVMKQPRCGVPDVAQFVLTEGNPRWEQTHLTYRIENYTPDLPRADVDHAIEKAFQLWSNVTPLTFTKVSEGQADIMISFVRGDHRDNSPFDGPGGNLAHAFQPGPGIGGDAHFDEDERWTNNFREYNLHRVAAHELGHSLGLSHDTDIGALMYPSYTFSGDVQLAQDDIDGIQAIYGRSQNPVQPIGPQTPKACDSKLTFDAITTIRGEVMFFKDRFYMRTNPFYPEVELNFISVFWPQLPNGLEAAYEFADRDEVRFFKGNKYWAVQGQNVLHGYPKDIYSSFGFPRTVKHIDAALSEENTGKTYFFVANKYWRYDEYKRSMDPGYPKMIAHDFPGIGHKVDAVFMKDGFFYFFHGTRQYKFDPKTKRILTLQKANSWFNCRKN

SEQ ID NO: 327 - protein, 450 aa, Artificial Sequence
  MMP-1 variant S210E
FPATLETQEQDVDLVQKYLEKYYNLKNDGRQVEKRRNSGPVVEKLKQMQEFFGLKVTGKPDAETLKVMKQPRCGVPDVAQFVLTEGNPRWEQTHLTYRIENYTPDLPRADVDHAIEKAFQLWSNVTPLTFTKVSEGQADIMISFVRGDHRDNSPFDGPGGNLAHAFQPGPGIGGDAHFDEDERWTNNFREYNLHRVAAHELGHSLGLSHETDIGALMYPSYTFSGDVQLAQDDIDGIQAIYGRSQNPVQPIGPQTPKACDSKLTFDAITTIRGEVMFFKDRFYMRTNPFYPEVELNFISVFWPQLPNGLEAAYEFADRDEVRFFKGNKYWAVQGQNVLHGYPKDIYSSFGFPRTVKHIDAALSEENTGKTYFFVANKYWRYDEYKRSMDPGYPKMIAHDFPGIGHKVDAVFMKDGFFYFFHGTRQYKFDPKTKRILTLQKANSWFNCRKN

SEQ ID NO: 328 - protein, 450 aa, Artificial Sequence
  MMP-1 variant S210H
FPATLETQEQDVDLVQKYLEKYYNLKNDGRQVEKRRNSGPVVEKLKQMQEFFGLKVTGKPDAETLKVMKQPRCGVPDVAQFVLTEGNPRWEQTHLTYRIENYTPDLPRADVDHAIEKAFQLWSNVTPLTFTKVSEGQADIMISFVRGDHRDNSPFDGPGGNLAHAFQPGPGIGGDAHFDEDERWTNNFREYNLHRVAAHELGHSLGLSHHTDIGALMYPSYTFSGDVQLAQDDIDGIQAIYGRSQNPVQPIGPQTPKACDSKLTFDAITTIRGEVMFFKDRFYMRTNPFYPEVELNFISVFWPQLPNGLEAAYEFADRDEVRFFKGNKYWAVQGQNVLHGYPKDIYSSFGFPRTVKHIDAALSEENTGKTYFFVANKYWRYDEYKRSMDPGYPKMIAHDFPGIGHKVDAVFMKDGFFYFFHGTRQYKFDPKTKRILTLQKANSWFNCRKN

SEQ ID NO: 329 - protein, 450 aa, Artificial Sequence
  MMP-1 variant S210K
FPATLETQEQDVDLVQKYLEKYYNLKNDGRQVEKRRNSGPVVEKLKQMQEFFGLKVTGKPDAETLKVMKQPRCGVPDVAQFVLTEGNPRWEQTHLTYRIENYTPDLPRADVDHAIEKAFQLWSNVTPLTFTKVSEGQADIMISFVRGDHRDNSPFDGPGGNLAHAFQPGPGIGGDAHFDEDERWTNNFREYNLHRVAAHELGHSLGLSHKTDIGALMYPSYTFSGDVQLAQDDIDGIQAIYGRSQNPVQPIGPQTPKACDSKLTFDAITTIRGEVMFFKDRFYMRTNPFYPEVELNFISVFWPQLPNGLEAAYEFADRDEVRFFKGNKYWAVQGQNVLHGYPKDIYSSFGFPRTVKHIDAALSEENTGKTYFFVANKYWRYDEYKRSMDPGYPKMIAHDFPGIGHKVDAVFMKDGFFYFFHGTRQYKFDPKTKRILTLQKANSWFNCRKN

SEQ ID NO: 330 - protein, 450 aa, Artificial Sequence
  MMP-1 variant S210R
FPATLETQEQDVDLVQKYLEKYYNLKNDGRQVEKRRNSGPVVEKLKQMQEFFGLKVTGKPDAETLKVMKQPRCGVPDVAQFVLTEGNPRWEQTHLTYRIENYTPDLPRADVDHAIEKAFQLWSNVTPLTFTKVSEGQADIMISFVRGDHRDNSPFDGPGGNLAHAFQPGPGIGGDAHFDEDERWTNNFREYNLHRVAAHELGHSLGLSHRTDIGALMYPSYTFSGDVQLAQDDIDGIQAIYGRSQNPVQPIGPQTPKACDSKLTFDAITTIRGEVMFFKDRFYMRTNPFYPEVELNFISVFWPQLPNGLEAAYEFADRDEVRFFKGNKYWAVQGQNVLHGYPKDIYSSFGFPRTVKHIDAALSEENTGKTYFFVANKYWRYDEYKRSMDPGYPKMIAHDFPGIGHKVDAVFMKDGFFYFFHGTRQYKFDPKTKRILTLQKANSWFNCRKN

SEQ ID NO: 331 - protein, 450 aa, Artificial Sequence
  MMP-1 variant S210C
FPATLETQEQDVDLVQKYLEKYYNLKNDGRQVEKRRNSGPVVEKLKQMQEFFGLKVTGKPDAETLKVMKQPRCGVPDVAQFVLTEGNPRWEQTHLTYRIENYTPDLPRADVDHAIEKAFQLWSNVTPLTFTKVSEGQADIMISFVRGDHRDNSPFDGPGGNLAHAFQPGPGIGGDAHFDEDERWTNNFREYNLHRVAAHELGHSLGLSHCTDIGALMYPSYTFSGDVQLAQDDIDGIQAIYGRSQNPVQPIGPQTPKACDSKLTFDAITTIRGEVMFFKDRFYMRTNPFYPEVELNFISVFWPQLPNGLEAAYEFADRDEVRFFKGNKYWAVQGQNVLHGYPKDIYSSFGFPRTVKHIDAALSEENTGKTYFFVANKYWRYDEYKRSMDPGYPKMIAHDFPGIGHKVDAVFMKDGFFYFFHGTRQYKFDPKTKRILTLQKANSWFNCRKN

SEQ ID NO: 332 - protein, 450 aa, Artificial Sequence
  MMP-1 variant S210N
FPATLETQEQDVDLVQKYLEKYYNLKNDGRQVEKRRNSGPVVEKLKQMQEFFGLKVTGKPDAETLKVMKQPRCGVPDVAQFVLTEGNPRWEQTHLTYRIENYTPDLPRADVDHAIEKAFQLWSNVTPLTFTKVSEGQADIMISFVRGDHRDNSPFDGPGGNLAHAFQPGPGIGGDAHFDEDERWTNNFREYNLHRVAAHELGHSLGLSHNTDIGALMYPSYTFSGDVQLAQDDIDGIQAIYGRSQNPVQPIGPQTPKACDSKLTFDAITTIRGEVMFFKDRFYMRTNPFYPEVELNFISVFWPQLPNGLEAAYEFADRDEVRFFKGNKYWAVQGQNVLHGYPKDIYSSFGFPRTVKHIDAALSEENTGKTYFFVANKYWRYDEYKRSMDPGYPKMIAHDFPGIGHKVDAVFMKDGFFYFFHGTRQYKFDPKTKRILTLQKANSWFNCRKN

SEQ ID NO: 333 - protein, 450 aa, Artificial Sequence
  MMP-1 variant S210Q
FPATLETQEQDVDLVQKYLEKYYNLKNDGRQVEKRRNSGPVVEKLKQMQEFFGLKVTGKPDAETLKVMKQPRCGVPDVAQFVLTEGNPRWEQTHLTYRIENYTPDLPRADVDHAIEKAFQLWSNVTPLTFTKVSEGQADIMISFVRGDHRDNSPFDGPGGNLAHAFQPGPGIGGDAHFDEDERWTNNFREYNLHRVAAHELGHSLGLSHQTDIGALMYPSYTFSGDVQLAQDDIDGIQAIYGRSQNPVQPIGPQTPKACDSKLTFDAITTIRGEVMFFKDRFYMRTNPFYPEVELNFISVFWPQLPNGLEAAYEFADRDEVRFFKGNKYWAVQGQNVLHGYPKDIYSSFGFPRTVKHIDAALSEENTGKTYFFVANKYWRYDEYKRSMDPGYPKMIAHDFPGIGHKVDAVFMKDGFFYFFHGTRQYKFDPKTKRILTLQKANSWFNCRKN

SEQ ID NO: 334 - protein, 450 aa, Artificial Sequence
  MMP-1 variant S210T
FPATLETQEQDVDLVQKYLEKYYNLKNDGRQVEKRRNSGPVVEKLKQMQEFFGLKVTGKPDAETLKVMKQPRCGVPDVAQFVLTEGNPRWEQTHLTYRIENYTPDLPRADVDHAIEKAFQLWSNVTPLTFTKVSEGQADIMISFVRGDHRDNSPFDGPGGNLAHAFQPGPGIGGDAHFDEDERWTNNFREYNLHRVAAHELGHSLGLSHTTDIGALMYPSYTFSGDVQLAQDDIDGIQAIYGRSQNPVQPIGPQTPKACDSKLTFDAITTIRGEVMFFKDRFYMRTNPFYPEVELNFISVFWPQLPNGLEAAYEFADRDEVRFFKGNKYWAVQGQNVLHGYPKDIYSSFGFPRTVKHIDAALSEENTGKTYFFVANKYWRYDEYKRSMDPGYPKMIAHDFPGIGHKVDAVFMKDGFFYFFHGTRQYKFDPKTKRILTLQKANSWFNCRKN

SEQ ID NO: 335 - protein, 450 aa, Artificial Sequence
  MMP-1 variant S210Y
FPATLETQEQDVDLVQKYLEKYYNLKNDGRQVEKRRNSGPVVEKLKQMQEFFGLKVTGKPDAETLKVMKQPRCGVPDVAQFVLTEGNPRWEQTHLTYRIENYTPDLPRADVDHAIEKAFQLWSNVTPLTFTKVSEGQADIMISFVRGDHRDNSPFDGPGGNLAHAFQPGPGIGGDAHFDEDERWTNNFREYNLHRVAAHELGHSLGLSHYTDIGALMYPSYTFSGDVQLAQDDIDGIQAIYGRSQNPVQPIGPQTPKACDSKLTFDAITTIRGEVMFFKDRFYMRTNPFYPEVELNFISVFWPQLPNGLEAAYEFADRDEVRFFKGNKYWAVQGQNVLHGYPKDIYSSFGFPRTVKHIDAALSEENTGKTYFFVANKYWRYDEYKRSMDPGYPKMIAHDFPGIGHKVDAVFMKDGFFYFFHGTRQYKFDPKTKRILTLQKANSWFNCRKN

SEQ ID NO: 336 - protein, 450 aa, Artificial Sequence
  MMP-1 variant S210G
FPATLETQEQDVDLVQKYLEKYYNLKNDGRQVEKRRNSGPVVEKLKQMQEFFGLKVTGKPDAETLKVMKQPRCGVPDVAQFVLTEGNPRWEQTHLTYRIENYTPDLPRADVDHAIEKAFQLWSNVTPLTFTKVSEGQADIMISFVRGDHRDNSPFDGPGGNLAHAFQPGPGIGGDAHFDEDERWTNNFREYNLHRVAAHELGHSLGLSHGTDIGALMYPSYTFSGDVQLAQDDIDGIQAIYGRSQNPVQPIGPQTPKACDSKLTFDAITTIRGEVMFFKDRFYMRTNPFYPEVELNFISVFWPQLPNGLEAAYEFADRDEVRFFKGNKYWAVQGQNVLHGYPKDIYSSFGFPRTVKHIDAALSEENTGKTYFFVANKYWRYDEYKRSMDPGYPKMIAHDFPGIGHKVDAVFMKDGFFYFFHGTRQYKFDPKTKRILTLQKANSWFNCRKN

SEQ ID NO: 337 - protein, 450 aa, Artificial Sequence
  MMP-1 variant S210F
FPATLETQEQDVDLVQKYLEKYYNLKNDGRQVEKRRNSGPVVEKLKQMQEFFGLKVTGKPDAETLKVMKQPRCGVPDVAQFVLTEGNPRWEQTHLTYRIENYTPDLPRADVDHAIEKAFQLWSNVTPLTFTKVSEGQADIMISFVRGDHRDNSPFDGPGGNLAHAFQPGPGIGGDAHFDEDERWTNNFREYNLHRVAAHELGHSLGLSHFTDIGALMYPSYTFSGDVQLAQDDIDGIQAIYGRSQNPVQPIGPQTPKACDSKLTFDAITTIRGEVMFFKDRFYMRTNPFYPEVELNFISVFWPQLPNGLEAAYEFADRDEVRFFKGNKYWAVQGQNVLHGYPKDIYSSFGFPRTVKHIDAALSEENTGKTYFFVANKYWRYDEYKRSMDPGYPKMIAHDFPGIGHKVDAVFMKDGFFYFFHGTRQYKFDPKTKRILTLQKANSWFNCRKN

SEQ ID NO: 338 - protein, 450 aa, Artificial Sequence
  MMP-1 variant S210M
FPATLETQEQDVDLVQKYLEKYYNLKNDGRQVEKRRNSGPVVEKLKQMQEFFGLKVTGKPDAETLKVMKQPRCGVPDVAQFVLTEGNPRWEQTHLTYRIENYTPDLPRADVDHAIEKAFQLWSNVTPLTFTKVSEGQADIMISFVRGDHRDNSPFDGPGGNLAHAFQPGPGIGGDAHFDEDERWTNNFREYNLHRVAAHELGHSLGLSHMTDIGALMYPSYTFSGDVQLAQDDIDGIQAIYGRSQNPVQPIGPQTPKACDSKLTFDAITTIRGEVMFFKDRFYMRTNPFYPEVELNFISVFWPQLPNGLEAAYEFADRDEVRFFKGNKYWAVQGQNVLHGYPKDIYSSFGFPRTVKHIDAALSEENTGKTYFFVANKYWRYDEYKRSMDPGYPKMIAHDFPGIGHKVDAVFMKDGFFYFFHGTRQYKFDPKTKRILTLQKANSWFNCRKN

SEQ ID NO: 339 - protein, 450 aa, Artificial Sequence
  MMP-1 variant S210W
FPATLETQEQDVDLVQKYLEKYYNLKNDGRQVEKRRNSGPVVEKLKQMQEFFGLKVTGKPDAETLKVMKQPRCGVPDVAQFVLTEGNPRWEQTHLTYRIENYTPDLPRADVDHAIEKAFQLWSNVTPLTFTKVSEGQADIMISFVRGDHRDNSPFDGPGGNLAHAFQPGPGIGGDAHFDEDERWTNNFREYNLHRVAAHELGHSLGLSHWTDIGALMYPSYTFSGDVQLAQDDIDGIQAIYGRSQNPVQPIGPQTPKACDSKLTFDAITTIRGEVMFFKDRFYMRTNPFYPEVELNFISVFWPQLPNGLEAAYEFADRDEVRFFKGNKYWAVQGQNVLHGYPKDIYSSFGFPRTVKHIDAALSEENTGKTYFFVANKYWRYDEYKRSMDPGYPKMIAHDFPGIGHKVDAVFMKDGFFYFFHGTRQYKFDPKTKRILTLQKANSWFNCRKN

SEQ ID NO: 340 - protein, 450 aa, Artificial Sequence
  MMP-1 variant S210I
FPATLETQEQDVDLVQKYLEKYYNLKNDGRQVEKRRNSGPVVEKLKQMQEFFGLKVTGKPDAETLKVMKQPRCGVPDVAQFVLTEGNPRWEQTHLTYRIENYTPDLPRADVDHAIEKAFQLWSNVTPLTFTKVSEGQADIMISFVRGDHRDNSPFDGPGGNLAHAFQPGPGIGGDAHFDEDERWTNNFREYNLHRVAAHELGHSLGLSHITDIGALMYPSYTFSGDVQLAQDDIDGIQAIYGRSQNPVQPIGPQTPKACDSKLTFDAITTIRGEVMFFKDRFYMRTNPFYPEVELNFISVFWPQLPNGLEAAYEFADRDEVRFFKGNKYWAVQGQNVLHGYPKDIYSSFGFPRTVKHIDAALSEENTGKTYFFVANKYWRYDEYKRSMDPGYPKMIAHDFPGIGHKVDAVFMKDGFFYFFHGTRQYKFDPKTKRILTLQKANSWFNCRKN

SEQ ID NO: 341 - protein, 450 aa, Artificial Sequence
  MMP-1 variant S210V
FPATLETQEQDVDLVQKYLEKYYNLKNDGRQVEKRRNSGPVVEKLKQMQEFFGLKVTGKPDAETLKVMKQPRCGVPDVAQFVLTEGNPRWEQTHLTYRIENYTPDLPRADVDHAIEKAFQLWSNVTPLTFTKVSEGQADIMISFVRGDHRDNSPFDGPGGNLAHAFQPGPGIGGDAHFDEDERWTNNFREYNLHRVAAHELGHSLGLSHVTDIGALMYPSYTFSGDVQLAQDDIDGIQAIYGRSQNPVQPIGPQTPKACDSKLTFDAITTIRGEVMFFKDRFYMRTNPFYPEVELNFISVFWPQLPNGLEAAYEFADRDEVRFFKGNKYWAVQGQNVLHGYPKDIYSSFGFPRTVKHIDAALSEENTGKTYFFVANKYWRYDEYKRSMDPGYPKMIAHDFPGIGHKVDAVFMKDGFFYFFHGTRQYKFDPKTKRILTLQKANSWFNCRKN

SEQ ID NO: 342 - protein, 450 aa, Artificial Sequence
  MMP-1 variant S210L
FPATLETQEQDVDLVQKYLEKYYNLKNDGRQVEKRRNSGPVVEKLKQMQEFFGLKVTGKPDAETLKVMKQPRCGVPDVAQFVLTEGNPRWEQTHLTYRIENYTPDLPRADVDHAIEKAFQLWSNVTPLTFTKVSEGQADIMISFVRGDHRDNSPFDGPGGNLAHAFQPGPGIGGDAHFDEDERWTNNFREYNLHRVAAHELGHSLGLSHLTDIGALMYPSYTFSGDVQLAQDDIDGIQAIYGRSQNPVQPIGPQTPKACDSKLTFDAITTIRGEVMFFKDRFYMRTNPFYPEVELNFISVFWPQLPNGLEAAYEFADRDEVRFFKGNKYWAVQGQNVLHGYPKDIYSSFGFPRTVKHIDAALSEENTGKTYFFVANKYWRYDEYKRSMDPGYPKMIAHDFPGIGHKVDAVFMKDGFFYFFHGTRQYKFDPKTKRILTLQKANSWFNCRKN

SEQ ID NO: 343 - protein, 450 aa, Artificial Sequence
  MMP-1 variant S210A
FPATLETQEQDVDLVQKYLEKYYNLKNDGRQVEKRRNSGPVVEKLKQMQEFFGLKVTGKPDAETLKVMKQPRCGVPDVAQFVLTEGNPRWEQTHLTYRIENYTPDLPRADVDHAIEKAFQLWSNVTPLTFTKVSEGQADIMISFVRGDHRDNSPFDGPGGNLAHAFQPGPGIGGDAHFDEDERWTNNFREYNLHRVAAHELGHSLGLSHATDIGALMYPSYTFSGDVQLAQDDIDGIQAIYGRSQNPVQPIGPQTPKACDSKLTFDAITTIRGEVMFFKDRFYMRTNPFYPEVELNFISVFWPQLPNGLEAAYEFADRDEVRFFKGNKYWAVQGQNVLHGYPKDIYSSFGFPRTVKHIDAALSEENTGKTYFFVANKYWRYDEYKRSMDPGYPKMIAHDFPGIGHKVDAVFMKDGFFYFFHGTRQYKFDPKTKRILTLQKANSWFNCRKN

SEQ ID NO: 344 - protein, 450 aa, Artificial Sequence
  MMP-1 variant S210P
FPATLETQEQDVDLVQKYLEKYYNLKNDGRQVEKRRNSGPVVEKLKQMQEFFGLKVTGKPDAETLKVMKQPRCGVPDVAQFVLTEGNPRWEQTHLTYRIENYTPDLPRADVDHAIEKAFQLWSNVTPLTFTKVSEGQADIMISFVRGDHRDNSPFDGPGGNLAHAFQPGPGIGGDAHFDEDERWTNNFREYNLHRVAAHELGHSLGLSHPTDIGALMYPSYTFSGDVQLAQDDIDGIQAIYGRSQNPVQPIGPQTPKACDSKLTFDAITTIRGEVMFFKDRFYMRTNPFYPEVELNFISVFWPQLPNGLEAAYEFADRDEVRFFKGNKYWAVQGQNVLHGYPKDIYSSFGFPRTVKHIDAALSEENTGKTYFFVANKYWRYDEYKRSMDPGYPKMIAHDFPGIGHKVDAVFMKDGFFYFFHGTRQYKFDPKTKRILTLQKANSWFNCRKN

SEQ ID NO: 345 - protein, 450 aa, Artificial Sequence
  MMP-1 variant Y218D
FPATLETQEQDVDLVQKYLEKYYNLKNDGRQVEKRRNSGPVVEKLKQMQEFFGLKVTGKPDAETLKVMKQPRCGVPDVAQFVLTEGNPRWEQTHLTYRIENYTPDLPRADVDHAIEKAFQLWSNVTPLTFTKVSEGQADIMISFVRGDHRDNSPFDGPGGNLAHAFQPGPGIGGDAHFDEDERWTNNFREYNLHRVAAHELGHSLGLSHSTDIGALMDPSYTFSGDVQLAQDDIDGIQAIYGRSQNPVQPIGPQTPKACDSKLTFDAITTIRGEVMFFKDRFYMRTNPFYPEVELNFISVFWPQLPNGLEAAYEFADRDEVRFFKGNKYWAVQGQNVLHGYPKDIYSSFGFPRTVKHIDAALSEENTGKTYFFVANKYWRYDEYKRSMDPGYPKMIAHDFPGIGHKVDAVFMKDGFFYFFHGTRQYKFDPKTKRILTLQKANSWFNCRKN

SEQ ID NO: 346 - protein, 450 aa, Artificial Sequence
  MMP-1 variant Y218E
FPATLETQEQDVDLVQKYLEKYYNLKNDGRQVEKRRNSGPVVEKLKQMQEFFGLKVTGKPDAETLKVMKQPRCGVPDVAQFVLTEGNPRWEQTHLTYRIENYTPDLPRADVDHAIEKAFQLWSNVTPLTFTKVSEGQADIMISFVRGDHRDNSPFDGPGGNLAHAFQPGPGIGGDAHFDEDERWTNNFREYNLHRVAAHELGHSLGLSHSTDIGALMEPSYTFSGDVQLAQDDIDGIQAIYGRSQNPVQPIGPQTPKACDSKLTFDAITTIRGEVMFFKDRFYMRTNPFYPEVELNFISVFWPQLPNGLEAAYEFADRDEVRFFKGNKYWAVQGQNVLHGYPKDIYSSFGFPRTVKHIDAALSEENTGKTYFFVANKYWRYDEYKRSMDPGYPKMIAHDFPGIGHKVDAVFMKDGFFYFFHGTRQYKFDPKTKRILTLQKANSWFNCRKN

SEQ ID NO: 347 - protein, 450 aa, Artificial Sequence
  MMP-1 variant Y218H
FPATLETQEQDVDLVQKYLEKYYNLKNDGRQVEKRRNSGPVVEKLKQMQEFFGLKVTGKPDAETLKVMKQPRCGVPDVAQFVLTEGNPRWEQTHLTYRIENYTPDLPRADVDHAIEKAFQLWSNVTPLTFTKVSEGQADIMISFVRGDHRDNSPFDGPGGNLAHAFQPGPGIGGDAHFDEDERWTNNFREYNLHRVAAHELGHSLGLSHSTDIGALMHPSYTFSGDVQLAQDDIDGIQAIYGRSQNPVQPIGPQTPKACDSKLTFDAITTIRGEVMFFKDRFYMRTNPFYPEVELNFISVFWPQLPNGLEAAYEFADRDEVRFFKGNKYWAVQGQNVLHGYPKDIYSSFGFPRTVKHIDAALSEENTGKTYFFVANKYWRYDEYKRSMDPGYPKMIAHDFPGIGHKVDAVFMKDGFFYFFHGTRQYKFDPKTKRILTLQKANSWFNCRKN

SEQ ID NO: 348 - protein, 450 aa, Artificial Sequence
  MMP-1 variant Y218K
FPATLETQEQDVDLVQKYLEKYYNLKNDGRQVEKRRNSGPVVEKLKQMQEFFGLKVTGKPDAETLKVMKQPRCGVPDVAQFVLTEGNPRWEQTHLTYRIENYTPDLPRADVDHAIEKAFQLWSNVTPLTFTKVSEGQADIMISFVRGDHRDNSPFDGPGGNLAHAFQPGPGIGGDAHFDEDERWTNNFREYNLHRVAAHELGHSLGLSHSTDIGALMKPSYTFSGDVQLAQDDIDGIQAIYGRSQNPVQPIGPQTPKACDSKLTFDAITTIRGEVMFFKDRFYMRTNPFYPEVELNFISVFWPQLPNGLEAAYEFADRDEVRFFKGNKYWAVQGQNVLHGYPKDIYSSFGFPRTVKHIDAALSEENTGKTYFFVANKYWRYDEYKRSMDPGYPKMIAHDFPGIGHKVDAVFMKDGFFYFFHGTRQYKFDPKTKRILTLQKANSWFNCRKN

SEQ ID NO: 349 - protein, 450 aa, Artificial Sequence
  MMP-1 variant Y218R
FPATLETQEQDVDLVQKYLEKYYNLKNDGRQVEKRRNSGPVVEKLKQMQEFFGLKVTGKPDAETLKVMKQPRCGVPDVAQFVLTEGNPRWEQTHLTYRIENYTPDLPRADVDHAIEKAFQLWSNVTPLTFTKVSEGQADIMISFVRGDHRDNSPFDGPGGNLAHAFQPGPGIGGDAHFDEDERWTNNFREYNLHRVAAHELGHSLGLSHSTDIGALMRPSYTFSGDVQLAQDDIDGIQAIYGRSQNPVQPIGPQTPKACDSKLTFDAITTIRGEVMFFKDRFYMRTNPFYPEVELNFISVFWPQLPNGLEAAYEFADRDEVRFFKGNKYWAVQGQNVLHGYPKDIYSSFGFPRTVKHIDAALSEENTGKTYFFVANKYWRYDEYKRSMDPGYPKMIAHDFPGIGHKVDAVFMKDGFFYFFHGTRQYKFDPKTKRILTLQKANSWFNCRKN

SEQ ID NO: 350 - protein, 450 aa, Artificial Sequence
  MMP-1 variant Y218C
FPATLETQEQDVDLVQKYLEKYYNLKNDGRQVEKRRNSGPVVEKLKQMQEFFGLKVTGKPDAETLKVMKQPRCGVPDVAQFVLTEGNPRWEQTHLTYRIENYTPDLPRADVDHAIEKAFQLWSNVTPLTFTKVSEGQADIMISFVRGDHRDNSPFDGPGGNLAHAFQPGPGIGGDAHFDEDERWTNNFREYNLHRVAAHELGHSLGLSHSTDIGALMCPSYTFSGDVQLAQDDIDGIQAIYGRSQNPVQPIGPQTPKACDSKLTFDAITTIRGEVMFFKDRFYMRTNPFYPEVELNFISVFWPQLPNGLEAAYEFADRDEVRFFKGNKYWAVQGQNVLHGYPKDIYSSFGFPRTVKHIDAALSEENTGKTYFFVANKYWRYDEYKRSMDPGYPKMIAHDFPGIGHKVDAVFMKDGFFYFFHGTRQYKFDPKTKRILTLQKANSWFNCRKN

SEQ ID NO: 351 - protein, 450 aa, Artificial Sequence
  MMP-1 variant Y218N
FPATLETQEQDVDLVQKYLEKYYNLKNDGRQVEKRRNSGPVVEKLKQMQEFFGLKVTGKPDAETLKVMKQPRCGVPDVAQFVLTEGNPRWEQTHLTYRIENYTPDLPRADVDHAIEKAFQLWSNVTPLTFTKVSEGQADIMISFVRGDHRDNSPFDGPGGNLAHAFQPGPGIGGDAHFDEDERWTNNFREYNLHRVAAHELGHSLGLSHSTDIGALMNPSYTFSGDVQLAQDDIDGIQAIYGRSQNPVQPIGPQTPKACDSKLTFDAITTIRGEVMFFKDRFYMRTNPFYPEVELNFISVFWPQLPNGLEAAYEFADRDEVRFFKGNKYWAVQGQNVLHGYPKDIYSSFGFPRTVKHIDAALSEENTGKTYFFVANKYWRYDEYKRSMDPGYPKMIAHDFPGIGHKVDAVFMKDGFFYFFHGTRQYKFDPKTKRILTLQKANSWFNCRKN

SEQ ID NO: 352 - protein, 450 aa, Artificial Sequence
  MMP-1 variant Y218Q
FPATLETQEQDVDLVQKYLEKYYNLKNDGRQVEKRRNSGPVVEKLKQMQEFFGLKVTGKPDAETLKVMKQPRCGVPDVAQFVLTEGNPRWEQTHLTYRIENYTPDLPRADVDHAIEKAFQLWSNVTPLTFTKVSEGQADIMISFVRGDHRDNSPFDGPGGNLAHAFQPGPGIGGDAHFDEDERWTNNFREYNLHRVAAHELGHSLGLSHSTDIGALMQPSYTFSGDVQLAQDDIDGIQAIYGRSQNPVQPIGPQTPKACDSKLTFDAITTIRGEVMFFKDRFYMRTNPFYPEVELNFISVFWPQLPNGLEAAYEFADRDEVRFFKGNKYWAVQGQNVLHGYPKDIYSSFGFPRTVKHIDAALSEENTGKTYFFVANKYWRYDEYKRSMDPGYPKMIAHDFPGIGHKVDAVFMKDGFFYFFHGTRQYKFDPKTKRILTLQKANSWFNCRKN

SEQ ID NO: 353 - protein, 450 aa, Artificial Sequence
  MMP-1 variant Y218T
FPATLETQEQDVDLVQKYLEKYYNLKNDGRQVEKRRNSGPVVEKLKQMQEFFGLKVTGKPDAETLKVMKQPRCGVPDVAQFVLTEGNPRWEQTHLTYRIENYTPDLPRADVDHAIEKAFQLWSNVTPLTFTKVSEGQADIMISFVRGDHRDNSPFDGPGGNLAHAFQPGPGIGGDAHFDEDERWTNNFREYNLHRVAAHELGHSLGLSHSTDIGALMTPSYTFSGDVQLAQDDIDGIQAIYGRSQNPVQPIGPQTPKACDSKLTFDAITTIRGEVMFFKDRFYMRTNPFYPEVELNFISVFWPQLPNGLEAAYEFADRDEVRFFKGNKYWAVQGQNVLHGYPKDIYSSFGFPRTVKHIDAALSEENTGKTYFFVANKYWRYDEYKRSMDPGYPKMIAHDFPGIGHKVDAVFMKDGFFYFFHGTRQYKFDPKTKRILTLQKANSWFNCRKN

SEQ ID NO: 354 - protein, 450 aa, Artificial Sequence
  MMP-1 variant Y218S
FPATLETQEQDVDLVQKYLEKYYNLKNDGRQVEKRRNSGPVVEKLKQMQEFFGLKVTGKPDAETLKVMKQPRCGVPDVAQFVLTEGNPRWEQTHLTYRIENYTPDLPRADVDHAIEKAFQLWSNVTPLTFTKVSEGQADIMISFVRGDHRDNSPFDGPGGNLAHAFQPGPGIGGDAHFDEDERWTNNFREYNLHRVAAHELGHSLGLSHSTDIGALMSPSYTFSGDVQLAQDDIDGIQAIYGRSQNPVQPIGPQTPKACDSKLTFDAITTIRGEVMFFKDRFYMRTNPFYPEVELNFISVFWPQLPNGLEAAYEFADRDEVRFFKGNKYWAVQGQNVLHGYPKDIYSSFGFPRTVKHIDAALSEENTGKTYFFVANKYWRYDEYKRSMDPGYPKMIAHDFPGIGHKVDAVFMKDGFFYFFHGTRQYKFDPKTKRILTLQKANSWFNCRKN

SEQ ID NO: 355 - protein, 450 aa, Artificial Sequence
  MMP-1 variant Y218G
FPATLETQEQDVDLVQKYLEKYYNLKNDGRQVEKRRNSGPVVEKLKQMQEFFGLKVTGKPDAETLKVMKQPRCGVPDVAQFVLTEGNPRWEQTHLTYRIENYTPDLPRADVDHAIEKAFQLWSNVTPLTFTKVSEGQADIMISFVRGDHRDNSPFDGPGGNLAHAFQPGPGIGGDAHFDEDERWTNNFREYNLHRVAAHELGHSLGLSHSTDIGALMGPSYTFSGDVQLAQDDIDGIQAIYGRSQNPVQPIGPQTPKACDSKLTFDAITTIRGEVMFFKDRFYMRTNPFYPEVELNFISVFWPQLPNGLEAAYEFADRDEVRFFKGNKYWAVQGQNVLHGYPKDIYSSFGFPRTVKHIDAALSEENTGKTYFFVANKYWRYDEYKRSMDPGYPKMIAHDFPGIGHKVDAVFMKDGFFYFFHGTRQYKFDPKTKRILTLQKANSWFNCRKN

SEQ ID NO: 356 - protein, 450 aa, Artificial Sequence
  MMP-1 variant Y218F
FPATLETQEQDVDLVQKYLEKYYNLKNDGRQVEKRRNSGPVVEKLKQMQEFFGLKVTGKPDAETLKVMKQPRCGVPDVAQFVLTEGNPRWEQTHLTYRIENYTPDLPRADVDHAIEKAFQLWSNVTPLTFTKVSEGQADIMISFVRGDHRDNSPFDGPGGNLAHAFQPGPGIGGDAHFDEDERWTNNFREYNLHRVAAHELGHSLGLSHSTDIGALMFPSYTFSGDVQLAQDDIDGIQAIYGRSQNPVQPIGPQTPKACDSKLTFDAITTIRGEVMFFKDRFYMRTNPFYPEVELNFISVFWPQLPNGLEAAYEFADRDEVRFFKGNKYWAVQGQNVLHGYPKDIYSSFGFPRTVKHIDAALSEENTGKTYFFVANKYWRYDEYKRSMDPGYPKMIAHDFPGIGHKVDAVFMKDGFFYFFHGTRQYKFDPKTKRILTLQKANSWFNCRKN

SEQ ID NO: 357 - protein, 450 aa, Artificial Sequence
  MMP-1 variant Y218M
FPATLETQEQDVDLVQKYLEKYYNLKNDGRQVEKRRNSGPVVEKLKQMQEFFGLKVTGKPDAETLKVMKQPRCGVPDVAQFVLTEGNPRWEQTHLTYRIENYTPDLPRADVDHAIEKAFQLWSNVTPLTFTKVSEGQADIMISFVRGDHRDNSPFDGPGGNLAHAFQPGPGIGGDAHFDEDERWTNNFREYNLHRVAAHELGHSLGLSHSTDIGALMMPSYTFSGDVQLAQDDIDGIQAIYGRSQNPVQPIGPQTPKACDSKLTFDAITTIRGEVMFFKDRFYMRTNPFYPEVELNFISVFWPQLPNGLEAAYEFADRDEVRFFKGNKYWAVQGQNVLHGYPKDIYSSFGFPRTVKHIDAALSEENTGKTYFFVANKYWRYDEYKRSMDPGYPKMIAHDFPGIGHKVDAVFMKDGFFYFFHGTRQYKFDPKTKRILTLQKANSWFNCRKN

SEQ ID NO: 358 - protein, 450 aa, Artificial Sequence
  MMP-1 variant Y218W
FPATLETQEQDVDLVQKYLEKYYNLKNDGRQVEKRRNSGPVVEKLKQMQEFFGLKVTGKPDAETLKVMKQPRCGVPDVAQFVLTEGNPRWEQTHLTYRIENYTPDLPRADVDHAIEKAFQLWSNVTPLTFTKVSEGQADIMISFVRGDHRDNSPFDGPGGNLAHAFQPGPGIGGDAHFDEDERWTNNFREYNLHRVAAHELGHSLGLSHSTDIGALMWPSYTFSGDVQLAQDDIDGIQAIYGRSQNPVQPIGPQTPKACDSKLTFDAITTIRGEVMFFKDRFYMRTNPFYPEVELNFISVFWPQLPNGLEAAYEFADRDEVRFFKGNKYWAVQGQNVLHGYPKDIYSSFGFPRTVKHIDAALSEENTGKTYFFVANKYWRYDEYKRSMDPGYPKMIAHDFPGIGHKVDAVFMKDGFFYFFHGTRQYKFDPKTKRILTLQKANSWFNCRKN

SEQ ID NO: 359 - protein, 450 aa, Artificial Sequence
  MMP-1 variant Y218I
FPATLETQEQDVDLVQKYLEKYYNLKNDGRQVEKRRNSGPVVEKLKQMQEFFGLKVTGKPDAETLKVMKQPRCGVPDVAQFVLTEGNPRWEQTHLTYRIENYTPDLPRADVDHAIEKAFQLWSNVTPLTFTKVSEGQADIMISFVRGDHRDNSPFDGPGGNLAHAFQPGPGIGGDAHFDEDERWTNNFREYNLHRVAAHELGHSLGLSHSTDIGALMIPSYTFSGDVQLAQDDIDGIQAIYGRSQNPVQPIGPQTPKACDSKLTFDAITTIRGEVMFFKDRFYMRTNPFYPEVELNFISVFWPQLPNGLEAAYEFADRDEVRFFKGNKYWAVQGQNVLHGYPKDIYSSFGFPRTVKHIDAALSEENTGKTYFFVANKYWRYDEYKRSMDPGYPKMIAHDFPGIGHKVDAVFMKDGFFYFFHGTRQYKFDPKTKRILTLQKANSWFNCRKN

SEQ ID NO: 360 - protein, 450 aa, Artificial Sequence
  MMP-1 variant Y218V
FPATLETQEQDVDLVQKYLEKYYNLKNDGRQVEKRRNSGPVVEKLKQMQEFFGLKVTGKPDAETLKVMKQPRCGVPDVAQFVLTEGNPRWEQTHLTYRIENYTPDLPRADVDHAIEKAFQLWSNVTPLTFTKVSEGQADIMISFVRGDHRDNSPFDGPGGNLAHAFQPGPGIGGDAHFDEDERWTNNFREYNLHRVAAHELGHSLGLSHSTDIGALMVPSYTFSGDVQLAQDDIDGIQAIYGRSQNPVQPIGPQTPKACDSKLTFDAITTIRGEVMFFKDRFYMRTNPFYPEVELNFISVFWPQLPNGLEAAYEFADRDEVRFFKGNKYWAVQGQNVLHGYPKDIYSSFGFPRTVKHIDAALSEENTGKTYFFVANKYWRYDEYKRSMDPGYPKMIAHDFPGIGHKVDAVFMKDGFFYFFHGTRQYKFDPKTKRILTLQKANSWFNCRKN

SEQ ID NO: 361 - protein, 450 aa, Artificial Sequence
  MMP-1 variant Y218L
FPATLETQEQDVDLVQKYLEKYYNLKNDGRQVEKRRNSGPVVEKLKQMQEFFGLKVTGKPDAETLKVMKQPRCGVPDVAQFVLTEGNPRWEQTHLTYRIENYTPDLPRADVDHAIEKAFQLWSNVTPLTFTKVSEGQADIMISFVRGDHRDNSPFDGPGGNLAHAFQPGPGIGGDAHFDEDERWTNNFREYNLHRVAAHELGHSLGLSHSTDIGALMLPSYTFSGDVQLAQDDIDGIQAIYGRSQNPVQPIGPQTPKACDSKLTFDAITTIRGEVMFFKDRFYMRTNPFYPEVELNFISVFWPQLPNGLEAAYEFADRDEVRFFKGNKYWAVQGQNVLHGYPKDIYSSFGFPRTVKHIDAALSEENTGKTYFFVANKYWRYDEYKRSMDPGYPKMIAHDFPGIGHKVDAVFMKDGFFYFFHGTRQYKFDPKTKRILTLQKANSWFNCRKN

SEQ ID NO: 362 - protein, 450 aa, Artificial Sequence
  MMP-1 variant Y218A
FPATLETQEQDVDLVQKYLEKYYNLKNDGRQVEKRRNSGPVVEKLKQMQEFFGLKVTGKPDAETLKVMKQPRCGVPDVAQFVLTEGNPRWEQTHLTYRIENYTPDLPRADVDHAIEKAFQLWSNVTPLTFTKVSEGQADIMISFVRGDHRDNSPFDGPGGNLAHAFQPGPGIGGDAHFDEDERWTNNFREYNLHRVAAHELGHSLGLSHSTDIGALMAPSYTFSGDVQLAQDDIDGIQAIYGRSQNPVQPIGPQTPKACDSKLTFDAITTIRGEVMFFKDRFYMRTNPFYPEVELNFISVFWPQLPNGLEAAYEFADRDEVRFFKGNKYWAVQGQNVLHGYPKDIYSSFGFPRTVKHIDAALSEENTGKTYFFVANKYWRYDEYKRSMDPGYPKMIAHDFPGIGHKVDAVFMKDGFFYFFHGTRQYKFDPKTKRILTLQKANSWFNCRKN

SEQ ID NO: 363 - protein, 450 aa, Artificial Sequence
  MMP-1 variant Y218P
FPATLETQEQDVDLVQKYLEKYYNLKNDGRQVEKRRNSGPVVEKLKQMQEFFGLKVTGKPDAETLKVMKQPRCGVPDVAQFVLTEGNPRWEQTHLTYRIENYTPDLPRADVDHAIEKAFQLWSNVTPLTFTKVSEGQADIMISFVRGDHRDNSPFDGPGGNLAHAFQPGPGIGGDAHFDEDERWTNNFREYNLHRVAAHELGHSLGLSHSTDIGALMPPSYTFSGDVQLAQDDIDGIQAIYGRSQNPVQPIGPQTPKACDSKLTFDAITTIRGEVMFFKDRFYMRTNPFYPEVELNFISVFWPQLPNGLEAAYEFADRDEVRFFKGNKYWAVQGQNVLHGYPKDIYSSFGFPRTVKHIDAALSEENTGKTYFFVANKYWRYDEYKRSMDPGYPKMIAHDFPGIGHKVDAVFMKDGFFYFFHGTRQYKFDPKTKRILTLQKANSWFNCRKN

SEQ ID NO: 364 - protein, 450 aa, Artificial Sequence
  MMP-1 variant F223D
FPATLETQEQDVDLVQKYLEKYYNLKNDGRQVEKRRNSGPVVEKLKQMQEFFGLKVTGKPDAETLKVMKQPRCGVPDVAQFVLTEGNPRWEQTHLTYRIENYTPDLPRADVDHAIEKAFQLWSNVTPLTFTKVSEGQADIMISFVRGDHRDNSPFDGPGGNLAHAFQPGPGIGGDAHFDEDERWTNNFREYNLHRVAAHELGHSLGLSHSTDIGALMYPSYTDSGDVQLAQDDIDGIQAIYGRSQNPVQPIGPQTPKACDSKLTFDAITTIRGEVMFFKDRFYMRTNPFYPEVELNFISVFWPQLPNGLEAAYEFADRDEVRFFKGNKYWAVQGQNVLHGYPKDIYSSFGFPRTVKHIDAALSEENTGKTYFFVANKYWRYDEYKRSMDPGYPKMIAHDFPGIGHKVDAVFMKDGFFYFFHGTRQYKFDPKTKRILTLQKANSWFNCRKN

SEQ ID NO: 365 - protein, 450 aa, Artificial Sequence
  MMP-1 variant F223E
FPATLETQEQDVDLVQKYLEKYYNLKNDGRQVEKRRNSGPVVEKLKQMQEFFGLKVTGKPDAETLKVMKQPRCGVPDVAQFVLTEGNPRWEQTHLTYRIENYTPDLPRADVDHAIEKAFQLWSNVTPLTFTKVSEGQADIMISFVRGDHRDNSPFDGPGGNLAHAFQPGPGIGGDAHFDEDERWTNNFREYNLHRVAAHELGHSLGLSHSTDIGALMYPSYTESGDVQLAQDDIDGIQAIYGRSQNPVQPIGPQTPKACDSKLTFDAITTIRGEVMFFKDRFYMRTNPFYPEVELNFISVFWPQLPNGLEAAYEFADRDEVRFFKGNKYWAVQGQNVLHGYPKDIYSSFGFPRTVKHIDAALSEENTGKTYFFVANKYWRYDEYKRSMDPGYPKMIAHDFPGIGHKVDAVFMKDGFFYFFHGTRQYKFDPKTKRILTLQKANSWFNCRKN

SEQ ID NO: 366 - protein, 450 aa, Artificial Sequence
  MMP-1 variant F223H
FPATLETQEQDVDLVQKYLEKYYNLKNDGRQVEKRRNSGPVVEKLKQMQEFFGLKVTGKPDAETLKVMKQPRCGVPDVAQFVLTEGNPRWEQTHLTYRIENYTPDLPRADVDHAIEKAFQLWSNVTPLTFTKVSEGQADIMISFVRGDHRDNSPFDGPGGNLAHAFQPGPGIGGDAHFDEDERWTNNFREYNLHRVAAHELGHSLGLSHSTDIGALMYPSYTHSGDVQLAQDDIDGIQAIYGRSQNPVQPIGPQTPKACDSKLTFDAITTIRGEVMFFKDRFYMRTNPFYPEVELNFISVFWPQLPNGLEAAYEFADRDEVRFFKGNKYWAVQGQNVLHGYPKDIYSSFGFPRTVKHIDAALSEENTGKTYFFVANKYWRYDEYKRSMDPGYPKMIAHDFPGIGHKVDAVFMKDGFFYFFHGTRQYKFDPKTKRILTLQKANSWFNCRKN

SEQ ID NO: 367 - protein, 450 aa, Artificial Sequence
  MMP-1 variant F223K
FPATLETQEQDVDLVQKYLEKYYNLKNDGRQVEKRRNSGPVVEKLKQMQEFFGLKVTGKPDAETLKVMKQPRCGVPDVAQFVLTEGNPRWEQTHLTYRIENYTPDLPRADVDHAIEKAFQLWSNVTPLTFTKVSEGQADIMISFVRGDHRDNSPFDGPGGNLAHAFQPGPGIGGDAHFDEDERWTNNFREYNLHRVAAHELGHSLGLSHSTDIGALMYPSYTKSGDVQLAQDDIDGIQAIYGRSQNPVQPIGPQTPKACDSKLTFDAITTIRGEVMFFKDRFYMRTNPFYPEVELNFISVFWPQLPNGLEAAYEFADRDEVRFFKGNKYWAVQGQNVLHGYPKDIYSSFGFPRTVKHIDAALSEENTGKTYFFVANKYWRYDEYKRSMDPGYPKMIAHDFPGIGHKVDAVFMKDGFFYFFHGTRQYKFDPKTKRILTLQKANSWFNCRKN

SEQ ID NO: 368 - protein, 450 aa, Artificial Sequence
  MMP-1 variant F223R
FPATLETQEQDVDLVQKYLEKYYNLKNDGRQVEKRRNSGPVVEKLKQMQEFFGLKVTGKPDAETLKVMKQPRCGVPDVAQFVLTEGNPRWEQTHLTYRIENYTPDLPRADVDHAIEKAFQLWSNVTPLTFTKVSEGQADIMISFVRGDHRDNSPFDGPGGNLAHAFQPGPGIGGDAHFDEDERWTNNFREYNLHRVAAHELGHSLGLSHSTDIGALMYPSYTRSGDVQLAQDDIDGIQAIYGRSQNPVQPIGPQTPKACDSKLTFDAITTIRGEVMFFKDRFYMRTNPFYPEVELNFISVFWPQLPNGLEAAYEFADRDEVRFFKGNKYWAVQGQNVLHGYPKDIYSSFGFPRTVKHIDAALSEENTGKTYFFVANKYWRYDEYKRSMDPGYPKMIAHDFPGIGHKVDAVFMKDGFFYFFHGTRQYKFDPKTKRILTLQKANSWFNCRKN

SEQ ID NO: 369 - protein, 450 aa, Artificial Sequence
  MMP-1 variant F223C
FPATLETQEQDVDLVQKYLEKYYNLKNDGRQVEKRRNSGPVVEKLKQMQEFFGLKVTGKPDAETLKVMKQPRCGVPDVAQFVLTEGNPRWEQTHLTYRIENYTPDLPRADVDHAIEKAFQLWSNVTPLTFTKVSEGQADIMISFVRGDHRDNSPFDGPGGNLAHAFQPGPGIGGDAHFDEDERWTNNFREYNLHRVAAHELGHSLGLSHSTDIGALMYPSYTCSGDVQLAQDDIDGIQAIYGRSQNPVQPIGPQTPKACDSKLTFDAITTIRGEVMFFKDRFYMRTNPFYPEVELNFISVFWPQLPNGLEAAYEFADRDEVRFFKGNKYWAVQGQNVLHGYPKDIYSSFGFPRTVKHIDAALSEENTGKTYFFVANKYWRYDEYKRSMDPGYPKMIAHDFPGIGHKVDAVFMKDGFFYFFHGTRQYKFDPKTKRILTLQKANSWFNCRKN

SEQ ID NO: 370 - protein, 450 aa, Artificial Sequence
  MMP-1 variant F223N
FPATLETQEQDVDLVQKYLEKYYNLKNDGRQVEKRRNSGPVVEKLKQMQEFFGLKVTGKPDAETLKVMKQPRCGVPDVAQFVLTEGNPRWEQTHLTYRIENYTPDLPRADVDHAIEKAFQLWSNVTPLTFTKVSEGQADIMISFVRGDHRDNSPFDGPGGNLAHAFQPGPGIGGDAHFDEDERWTNNFREYNLHRVAAHELGHSLGLSHSTDIGALMYPSYTNSGDVQLAQDDIDGIQAIYGRSQNPVQPIGPQTPKACDSKLTFDAITTIRGEVMFFKDRFYMRTNPFYPEVELNFISVFWPQLPNGLEAAYEFADRDEVRFFKGNKYWAVQGQNVLHGYPKDIYSSFGFPRTVKHIDAALSEENTGKTYFFVANKYWRYDEYKRSMDPGYPKMIAHDFPGIGHKVDAVFMKDGFFYFFHGTRQYKFDPKTKRILTLQKANSWFNCRKN

SEQ ID NO: 371 - protein, 450 aa, Artificial Sequence
  MMP-1 variant F223Q
FPATLETQEQDVDLVQKYLEKYYNLKNDGRQVEKRRNSGPVVEKLKQMQEFFGLKVTGKPDAETLKVMKQPRCGVPDVAQFVLTEGNPRWEQTHLTYRIENYTPDLPRADVDHAIEKAFQLWSNVTPLTFTKVSEGQADIMISFVRGDHRDNSPFDGPGGNLAHAFQPGPGIGGDAHFDEDERWTNNFREYNLHRVAAHELGHSLGLSHSTDIGALMYPSYTQSGDVQLAQDDIDGIQAIYGRSQNPVQPIGPQTPKACDSKLTFDAITTIRGEVMFFKDRFYMRTNPFYPEVELNFISVFWPQLPNGLEAAYEFADRDEVRFFKGNKYWAVQGQNVLHGYPKDIYSSFGFPRTVKHIDAALSEENTGKTYFFVANKYWRYDEYKRSMDPGYPKMIAHDFPGIGHKVDAVFMKDGFFYFFHGTRQYKFDPKTKRILTLQKANSWFNCRKN

SEQ ID NO: 372 - protein, 450 aa, Artificial Sequence
  MMP-1 variant F223T
FPATLETQEQDVDLVQKYLEKYYNLKNDGRQVEKRRNSGPVVEKLKQMQEFFGLKVTGKPDAETLKVMKQPRCGVPDVAQFVLTEGNPRWEQTHLTYRIENYTPDLPRADVDHAIEKAFQLWSNVTPLTFTKVSEGQADIMISFVRGDHRDNSPFDGPGGNLAHAFQPGPGIGGDAHFDEDERWTNNFREYNLHRVAAHELGHSLGLSHSTDIGALMYPSYTTSGDVQLAQDDIDGIQAIYGRSQNPVQPIGPQTPKACDSKLTFDAITTIRGEVMFFKDRFYMRTNPFYPEVELNFISVFWPQLPNGLEAAYEFADRDEVRFFKGNKYWAVQGQNVLHGYPKDIYSSFGFPRTVKHIDAALSEENTGKTYFFVANKYWRYDEYKRSMDPGYPKMIAHDFPGIGHKVDAVFMKDGFFYFFHGTRQYKFDPKTKRILTLQKANSWFNCRKN

SEQ ID NO: 373 - protein, 450 aa, Artificial Sequence
  MMP-1 variant F223Y
FPATLETQEQDVDLVQKYLEKYYNLKNDGRQVEKRRNSGPVVEKLKQMQEFFGLKVTGKPDAETLKVMKQPRCGVPDVAQFVLTEGNPRWEQTHLTYRIENYTPDLPRADVDHAIEKAFQLWSNVTPLTFTKVSEGQADIMISFVRGDHRDNSPFDGPGGNLAHAFQPGPGIGGDAHFDEDERWTNNFREYNLHRVAAHELGHSLGLSHSTDIGALMYPSYTYSGDVQLAQDDIDGIQAIYGRSQNPVQPIGPQTPKACDSKLTFDAITTIRGEVMFFKDRFYMRTNPFYPEVELNFISVFWPQLPNGLEAAYEFADRDEVRFFKGNKYWAVQGQNVLHGYPKDIYSSFGFPRTVKHIDAALSEENTGKTYFFVANKYWRYDEYKRSMDPGYPKMIAHDFPGIGHKVDAVFMKDGFFYFFHGTRQYKFDPKTKRILTLQKANSWFNCRKN

SEQ ID NO: 374 - protein, 450 aa, Artificial Sequence
  MMP-1 variant F223S
FPATLETQEQDVDLVQKYLEKYYNLKNDGRQVEKRRNSGPVVEKLKQMQEFFGLKVTGKPDAETLKVMKQPRCGVPDVAQFVLTEGNPRWEQTHLTYRIENYTPDLPRADVDHAIEKAFQLWSNVTPLTFTKVSEGQADIMISFVRGDHRDNSPFDGPGGNLAHAFQPGPGIGGDAHFDEDERWTNNFREYNLHRVAAHELGHSLGLSHSTDIGALMYPSYTSSGDVQLAQDDIDGIQAIYGRSQNPVQPIGPQTPKACDSKLTFDAITTIRGEVMFFKDRFYMRTNPFYPEVELNFISVFWPQLPNGLEAAYEFADRDEVRFFKGNKYWAVQGQNVLHGYPKDIYSSFGFPRTVKHIDAALSEENTGKTYFFVANKYWRYDEYKRSMDPGYPKMIAHDFPGIGHKVDAVFMKDGFFYFFHGTRQYKFDPKTKRILTLQKANSWFNCRKN

SEQ ID NO: 375 - protein, 450 aa, Artificial Sequence
  MMP-1 variant F223G
FPATLETQEQDVDLVQKYLEKYYNLKNDGRQVEKRRNSGPVVEKLKQMQEFFGLKVTGKPDAETLKVMKQPRCGVPDVAQFVLTEGNPRWEQTHLTYRIENYTPDLPRADVDHAIEKAFQLWSNVTPLTFTKVSEGQADIMISFVRGDHRDNSPFDGPGGNLAHAFQPGPGIGGDAHFDEDERWTNNFREYNLHRVAAHELGHSLGLSHSTDIGALMYPSYTGSGDVQLAQDDIDGIQAIYGRSQNPVQPIGPQTPKACDSKLTFDAITTIRGEVMFFKDRFYMRTNPFYPEVELNFISVFWPQLPNGLEAAYEFADRDEVRFFKGNKYWAVQGQNVLHGYPKDIYSSFGFPRTVKHIDAALSEENTGKTYFFVANKYWRYDEYKRSMDPGYPKMIAHDFPGIGHKVDAVFMKDGFFYFFHGTRQYKFDPKTKRILTLQKANSWFNCRKN

SEQ ID NO: 376 - protein, 450 aa, Artificial Sequence
  MMP-1 variant F223M
FPATLETQEQDVDLVQKYLEKYYNLKNDGRQVEKRRNSGPVVEKLKQMQEFFGLKVTGKPDAETLKVMKQPRCGVPDVAQFVLTEGNPRWEQTHLTYRIENYTPDLPRADVDHAIEKAFQLWSNVTPLTFTKVSEGQADIMISFVRGDHRDNSPFDGPGGNLAHAFQPGPGIGGDAHFDEDERWTNNFREYNLHRVAAHELGHSLGLSHSTDIGALMYPSYTMSGDVQLAQDDIDGIQAIYGRSQNPVQPIGPQTPKACDSKLTFDAITTIRGEVMFFKDRFYMRTNPFYPEVELNFISVFWPQLPNGLEAAYEFADRDEVRFFKGNKYWAVQGQNVLHGYPKDIYSSFGFPRTVKHIDAALSEENTGKTYFFVANKYWRYDEYKRSMDPGYPKMIAHDFPGIGHKVDAVFMKDGFFYFFHGTRQYKFDPKTKRILTLQKANSWFNCRKN

SEQ ID NO: 377 - protein, 450 aa, Artificial Sequence
  MMP-1 variant F223W
FPATLETQEQDVDLVQKYLEKYYNLKNDGRQVEKRRNSGPVVEKLKQMQEFFGLKVTGKPDAETLKVMKQPRCGVPDVAQFVLTEGNPRWEQTHLTYRIENYTPDLPRADVDHAIEKAFQLWSNVTPLTFTKVSEGQADIMISFVRGDHRDNSPFDGPGGNLAHAFQPGPGIGGDAHFDEDERWTNNFREYNLHRVAAHELGHSLGLSHSTDIGALMYPSYTWSGDVQLAQDDIDGIQAIYGRSQNPVQPIGPQTPKACDSKLTFDAITTIRGEVMFFKDRFYMRTNPFYPEVELNFISVFWPQLPNGLEAAYEFADRDEVRFFKGNKYWAVQGQNVLHGYPKDIYSSFGFPRTVKHIDAALSEENTGKTYFFVANKYWRYDEYKRSMDPGYPKMIAHDFPGIGHKVDAVFMKDGFFYFFHGTRQYKFDPKTKRILTLQKANSWFNCRKN

SEQ ID NO: 378 - protein, 450 aa, Artificial Sequence
  MMP-1 variant F223I
FPATLETQEQDVDLVQKYLEKYYNLKNDGRQVEKRRNSGPVVEKLKQMQEFFGLKVTGKPDAETLKVMKQPRCGVPDVAQFVLTEGNPRWEQTHLTYRIENYTPDLPRADVDHAIEKAFQLWSNVTPLTFTKVSEGQADIMISFVRGDHRDNSPFDGPGGNLAHAFQPGPGIGGDAHFDEDERWTNNFREYNLHRVAAHELGHSLGLSHSTDIGALMYPSYTISGDVQLAQDDIDGIQAIYGRSQNPVQPIGPQTPKACDSKLTFDAITTIRGEVMFFKDRFYMRTNPFYPEVELNFISVFWPQLPNGLEAAYEFADRDEVRFFKGNKYWAVQGQNVLHGYPKDIYSSFGFPRTVKHIDAALSEENTGKTYFFVANKYWRYDEYKRSMDPGYPKMIAHDFPGIGHKVDAVFMKDGFFYFFHGTRQYKFDPKTKRILTLQKANSWFNCRKN

SEQ ID NO: 379 - protein, 450 aa, Artificial Sequence
  MMP-1 variant F223V
FPATLETQEQDVDLVQKYLEKYYNLKNDGRQVEKRRNSGPVVEKLKQMQEFFGLKVTGKPDAETLKVMKQPRCGVPDVAQFVLTEGNPRWEQTHLTYRIENYTPDLPRADVDHAIEKAFQLWSNVTPLTFTKVSEGQADIMISFVRGDHRDNSPFDGPGGNLAHAFQPGPGIGGDAHFDEDERWTNNFREYNLHRVAAHELGHSLGLSHSTDIGALMYPSYTVSGDVQLAQDDIDGIQAIYGRSQNPVQPIGPQTPKACDSKLTFDAITTIRGEVMFFKDRFYMRTNPFYPEVELNFISVFWPQLPNGLEAAYEFADRDEVRFFKGNKYWAVQGQNVLHGYPKDIYSSFGFPRTVKHIDAALSEENTGKTYFFVANKYWRYDEYKRSMDPGYPKMIAHDFPGIGHKVDAVFMKDGFFYFFHGTRQYKFDPKTKRILTLQKANSWFNCRKN

SEQ ID NO: 380 - protein, 450 aa, Artificial Sequence
  MMP-1 variant F223L
FPATLETQEQDVDLVQKYLEKYYNLKNDGRQVEKRRNSGPVVEKLKQMQEFFGLKVTGKPDAETLKVMKQPRCGVPDVAQFVLTEGNPRWEQTHLTYRIENYTPDLPRADVDHAIEKAFQLWSNVTPLTFTKVSEGQADIMISFVRGDHRDNSPFDGPGGNLAHAFQPGPGIGGDAHFDEDERWTNNFREYNLHRVAAHELGHSLGLSHSTDIGALMYPSYTLSGDVQLAQDDIDGIQAIYGRSQNPVQPIGPQTPKACDSKLTFDAITTIRGEVMFFKDRFYMRTNPFYPEVELNFISVFWPQLPNGLEAAYEFADRDEVRFFKGNKYWAVQGQNVLHGYPKDIYSSFGFPRTVKHIDAALSEENTGKTYFFVANKYWRYDEYKRSMDPGYPKMIAHDFPGIGHKVDAVFMKDGFFYFFHGTRQYKFDPKTKRILTLQKANSWFNCRKN

SEQ ID NO: 381 - protein, 450 aa, Artificial Sequence
  MMP-1 variant F223A
FPATLETQEQDVDLVQKYLEKYYNLKNDGRQVEKRRNSGPVVEKLKQMQEFFGLKVTGKPDAETLKVMKQPRCGVPDVAQFVLTEGNPRWEQTHLTYRIENYTPDLPRADVDHAIEKAFQLWSNVTPLTFTKVSEGQADIMISFVRGDHRDNSPFDGPGGNLAHAFQPGPGIGGDAHFDEDERWTNNFREYNLHRVAAHELGHSLGLSHSTDIGALMYPSYTASGDVQLAQDDIDGIQAIYGRSQNPVQPIGPQTPKACDSKLTFDAITTIRGEVMFFKDRFYMRTNPFYPEVELNFISVFWPQLPNGLEAAYEFADRDEVRFFKGNKYWAVQGQNVLHGYPKDIYSSFGFPRTVKHIDAALSEENTGKTYFFVANKYWRYDEYKRSMDPGYPKMIAHDFPGIGHKVDAVFMKDGFFYFFHGTRQYKFDPKTKRILTLQKANSWFNCRKN

SEQ ID NO: 382 - protein, 450 aa, Artificial Sequence
  MMP-1 variant F223P
FPATLETQEQDVDLVQKYLEKYYNLKNDGRQVEKRRNSGPVVEKLKQMQEFFGLKVTGKPDAETLKVMKQPRCGVPDVAQFVLTEGNPRWEQTHLTYRIENYTPDLPRADVDHAIEKAFQLWSNVTPLTFTKVSEGQADIMISFVRGDHRDNSPFDGPGGNLAHAFQPGPGIGGDAHFDEDERWTNNFREYNLHRVAAHELGHSLGLSHSTDIGALMYPSYTPSGDVQLAQDDIDGIQAIYGRSQNPVQPIGPQTPKACDSKLTFDAITTIRGEVMFFKDRFYMRTNPFYPEVELNFISVFWPQLPNGLEAAYEFADRDEVRFFKGNKYWAVQGQNVLHGYPKDIYSSFGFPRTVKHIDAALSEENTGKTYFFVANKYWRYDEYKRSMDPGYPKMIAHDFPGIGHKVDAVFMKDGFFYFFHGTRQYKFDPKTKRILTLQKANSWFNCRKN

SEQ ID NO: 383 - protein, 450 aa, Artificial Sequence
  MMP-1 variant V227D
FPATLETQEQDVDLVQKYLEKYYNLKNDGRQVEKRRNSGPVVEKLKQMQEFFGLKVTGKPDAETLKVMKQPRCGVPDVAQFVLTEGNPRWEQTHLTYRIENYTPDLPRADVDHAIEKAFQLWSNVTPLTFTKVSEGQADIMISFVRGDHRDNSPFDGPGGNLAHAFQPGPGIGGDAHFDEDERWTNNFREYNLHRVAAHELGHSLGLSHSTDIGALMYPSYTFSGDDQLAQDDIDGIQAIYGRSQNPVQPIGPQTPKACDSKLTFDAITTIRGEVMFFKDRFYMRTNPFYPEVELNFISVFWPQLPNGLEAAYEFADRDEVRFFKGNKYWAVQGQNVLHGYPKDIYSSFGFPRTVKHIDAALSEENTGKTYFFVANKYWRYDEYKRSMDPGYPKMIAHDFPGIGHKVDAVFMKDGFFYFFHGTRQYKFDPKTKRILTLQKANSWFNCRKN

SEQ ID NO: 384 - protein, 450 aa, Artificial Sequence
  MMP-1 variant V227E
FPATLETQEQDVDLVQKYLEKYYNLKNDGRQVEKRRNSGPVVEKLKQMQEFFGLKVTGKPDAETLKVMKQPRCGVPDVAQFVLTEGNPRWEQTHLTYRIENYTPDLPRADVDHAIEKAFQLWSNVTPLTFTKVSEGQADIMISFVRGDHRDNSPFDGPGGNLAHAFQPGPGIGGDAHFDEDERWTNNFREYNLHRVAAHELGHSLGLSHSTDIGALMYPSYTFSGDEQLAQDDIDGIQAIYGRSQNPVQPIGPQTPKACDSKLTFDAITTIRGEVMFFKDRFYMRTNPFYPEVELNFISVFWPQLPNGLEAAYEFADRDEVRFFKGNKYWAVQGQNVLHGYPKDIYSSFGFPRTVKHIDAALSEENTGKTYFFVANKYWRYDEYKRSMDPGYPKMIAHDFPGIGHKVDAVFMKDGFFYFFHGTRQYKFDPKTKRILTLQKANSWFNCRKN

SEQ ID NO: 385 - protein, 450 aa, Artificial Sequence
  MMP-1 variant V227H
FPATLETQEQDVDLVQKYLEKYYNLKNDGRQVEKRRNSGPVVEKLKQMQEFFGLKVTGKPDAETLKVMKQPRCGVPDVAQFVLTEGNPRWEQTHLTYRIENYTPDLPRADVDHAIEKAFQLWSNVTPLTFTKVSEGQADIMISFVRGDHRDNSPFDGPGGNLAHAFQPGPGIGGDAHFDEDERWTNNFREYNLHRVAAHELGHSLGLSHSTDIGALMYPSYTFSGDHQLAQDDIDGIQAIYGRSQNPVQPIGPQTPKACDSKLTFDAITTIRGEVMFFKDRFYMRTNPFYPEVELNFISVFWPQLPNGLEAAYEFADRDEVRFFKGNKYWAVQGQNVLHGYPKDIYSSFGFPRTVKHIDAALSEENTGKTYFFVANKYWRYDEYKRSMDPGYPKMIAHDFPGIGHKVDAVFMKDGFFYFFHGTRQYKFDPKTKRILTLQKANSWFNCRKN

SEQ ID NO: 386 - protein, 450 aa, Artificial Sequence
  MMP-1 variant V227K
FPATLETQEQDVDLVQKYLEKYYNLKNDGRQVEKRRNSGPVVEKLKQMQEFFGLKVTGKPDAETLKVMKQPRCGVPDVAQFVLTEGNPRWEQTHLTYRIENYTPDLPRADVDHAIEKAFQLWSNVTPLTFTKVSEGQADIMISFVRGDHRDNSPFDGPGGNLAHAFQPGPGIGGDAHFDEDERWTNNFREYNLHRVAAHELGHSLGLSHSTDIGALMYPSYTFSGDKQLAQDDIDGIQAIYGRSQNPVQPIGPQTPKACDSKLTFDAITTIRGEVMFFKDRFYMRTNPFYPEVELNFISVFWPQLPNGLEAAYEFADRDEVRFFKGNKYWAVQGQNVLHGYPKDIYSSFGFPRTVKHIDAALSEENTGKTYFFVANKYWRYDEYKRSMDPGYPKMIAHDFPGIGHKVDAVFMKDGFFYFFHGTRQYKFDPKTKRILTLQKANSWFNCRKN

SEQ ID NO: 387 - protein, 450 aa, Artificial Sequence
  MMP-1 variant V227R
FPATLETQEQDVDLVQKYLEKYYNLKNDGRQVEKRRNSGPVVEKLKQMQEFFGLKVTGKPDAETLKVMKQPRCGVPDVAQFVLTEGNPRWEQTHLTYRIENYTPDLPRADVDHAIEKAFQLWSNVTPLTFTKVSEGQADIMISFVRGDHRDNSPFDGPGGNLAHAFQPGPGIGGDAHFDEDERWTNNFREYNLHRVAAHELGHSLGLSHSTDIGALMYPSYTFSGDRQLAQDDIDGIQAIYGRSQNPVQPIGPQTPKACDSKLTFDAITTIRGEVMFFKDRFYMRTNPFYPEVELNFISVFWPQLPNGLEAAYEFADRDEVRFFKGNKYWAVQGQNVLHGYPKDIYSSFGFPRTVKHIDAALSEENTGKTYFFVANKYWRYDEYKRSMDPGYPKMIAHDFPGIGHKVDAVFMKDGFFYFFHGTRQYKFDPKTKRILTLQKANSWFNCRKN

SEQ ID NO: 388 - protein, 450 aa, Artificial Sequence
  MMP-1 variant V227C
FPATLETQEQDVDLVQKYLEKYYNLKNDGRQVEKRRNSGPVVEKLKQMQEFFGLKVTGKPDAETLKVMKQPRCGVPDVAQFVLTEGNPRWEQTHLTYRIENYTPDLPRADVDHAIEKAFQLWSNVTPLTFTKVSEGQADIMISFVRGDHRDNSPFDGPGGNLAHAFQPGPGIGGDAHFDEDERWTNNFREYNLHRVAAHELGHSLGLSHSTDIGALMYPSYTFSGDCQLAQDDIDGIQAIYGRSQNPVQPIGPQTPKACDSKLTFDAITTIRGEVMFFKDRFYMRTNPFYPEVELNFISVFWPQLPNGLEAAYEFADRDEVRFFKGNKYWAVQGQNVLHGYPKDIYSSFGFPRTVKHIDAALSEENTGKTYFFVANKYWRYDEYKRSMDPGYPKMIAHDFPGIGHKVDAVFMKDGFFYFFHGTRQYKFDPKTKRILTLQKANSWFNCRKN

SEQ ID NO: 389 - protein, 450 aa, Artificial Sequence
  MMP-1 variant V227N
FPATLETQEQDVDLVQKYLEKYYNLKNDGRQVEKRRNSGPVVEKLKQMQEFFGLKVTGKPDAETLKVMKQPRCGVPDVAQFVLTEGNPRWEQTHLTYRIENYTPDLPRADVDHAIEKAFQLWSNVTPLTFTKVSEGQADIMISFVRGDHRDNSPFDGPGGNLAHAFQPGPGIGGDAHFDEDERWTNNFREYNLHRVAAHELGHSLGLSHSTDIGALMYPSYTFSGDNQLAQDDIDGIQAIYGRSQNPVQPIGPQTPKACDSKLTFDAITTIRGEVMFFKDRFYMRTNPFYPEVELNFISVFWPQLPNGLEAAYEFADRDEVRFFKGNKYWAVQGQNVLHGYPKDIYSSFGFPRTVKHIDAALSEENTGKTYFFVANKYWRYDEYKRSMDPGYPKMIAHDFPGIGHKVDAVFMKDGFFYFFHGTRQYKFDPKTKRILTLQKANSWFNCRKN

SEQ ID NO: 390 - protein, 450 aa, Artificial Sequence
  MMP-1 variant V227Q
FPATLETQEQDVDLVQKYLEKYYNLKNDGRQVEKRRNSGPVVEKLKQMQEFFGLKVTGKPDAETLKVMKQPRCGVPDVAQFVLTEGNPRWEQTHLTYRIENYTPDLPRADVDHAIEKAFQLWSNVTPLTFTKVSEGQADIMISFVRGDHRDNSPFDGPGGNLAHAFQPGPGIGGDAHFDEDERWTNNFREYNLHRVAAHELGHSLGLSHSTDIGALMYPSYTFSGDQQLAQDDIDGIQAIYGRSQNPVQPIGPQTPKACDSKLTFDAITTIRGEVMFFKDRFYMRTNPFYPEVELNFISVFWPQLPNGLEAAYEFADRDEVRFFKGNKYWAVQGQNVLHGYPKDIYSSFGFPRTVKHIDAALSEENTGKTYFFVANKYWRYDEYKRSMDPGYPKMIAHDFPGIGHKVDAVFMKDGFFYFFHGTRQYKFDPKTKRILTLQKANSWFNCRKN

SEQ ID NO: 391 - protein, 450 aa, Artificial Sequence
  MMP-1 variant V227T
FPATLETQEQDVDLVQKYLEKYYNLKNDGRQVEKRRNSGPVVEKLKQMQEFFGLKVTGKPDAETLKVMKQPRCGVPDVAQFVLTEGNPRWEQTHLTYRIENYTPDLPRADVDHAIEKAFQLWSNVTPLTFTKVSEGQADIMISFVRGDHRDNSPFDGPGGNLAHAFQPGPGIGGDAHFDEDERWTNNFREYNLHRVAAHELGHSLGLSHSTDIGALMYPSYTFSGDTQLAQDDIDGIQAIYGRSQNPVQPIGPQTPKACDSKLTFDAITTIRGEVMFFKDRFYMRTNPFYPEVELNFISVFWPQLPNGLEAAYEFADRDEVRFFKGNKYWAVQGQNVLHGYPKDIYSSFGFPRTVKHIDAALSEENTGKTYFFVANKYWRYDEYKRSMDPGYPKMIAHDFPGIGHKVDAVFMKDGFFYFFHGTRQYKFDPKTKRILTLQKANSWFNCRKN

SEQ ID NO: 392 - protein, 450 aa, Artificial Sequence
  MMP-1 variant V227Y
FPATLETQEQDVDLVQKYLEKYYNLKNDGRQVEKRRNSGPVVEKLKQMQEFFGLKVTGKPDAETLKVMKQPRCGVPDVAQFVLTEGNPRWEQTHLTYRIENYTPDLPRADVDHAIEKAFQLWSNVTPLTFTKVSEGQADIMISFVRGDHRDNSPFDGPGGNLAHAFQPGPGIGGDAHFDEDERWTNNFREYNLHRVAAHELGHSLGLSHSTDIGALMYPSYTFSGDYQLAQDDIDGIQAIYGRSQNPVQPIGPQTPKACDSKLTFDAITTIRGEVMFFKDRFYMRTNPFYPEVELNFISVFWPQLPNGLEAAYEFADRDEVRFFKGNKYWAVQGQNVLHGYPKDIYSSFGFPRTVKHIDAALSEENTGKTYFFVANKYWRYDEYKRSMDPGYPKMIAHDFPGIGHKVDAVFMKDGFFYFFHGTRQYKFDPKTKRILTLQKANSWFNCRKN

SEQ ID NO: 393 - protein, 450 aa, Artificial Sequence
  MMP-1 variant V227S
FPATLETQEQDVDLVQKYLEKYYNLKNDGRQVEKRRNSGPVVEKLKQMQEFFGLKVTGKPDAETLKVMKQPRCGVPDVAQFVLTEGNPRWEQTHLTYRIENYTPDLPRADVDHAIEKAFQLWSNVTPLTFTKVSEGQADIMISFVRGDHRDNSPFDGPGGNLAHAFQPGPGIGGDAHFDEDERWTNNFREYNLHRVAAHELGHSLGLSHSTDIGALMYPSYTFSGDSQLAQDDIDGIQAIYGRSQNPVQPIGPQTPKACDSKLTFDAITTIRGEVMFFKDRFYMRTNPFYPEVELNFISVFWPQLPNGLEAAYEFADRDEVRFFKGNKYWAVQGQNVLHGYPKDIYSSFGFPRTVKHIDAALSEENTGKTYFFVANKYWRYDEYKRSMDPGYPKMIAHDFPGIGHKVDAVFMKDGFFYFFHGTRQYKFDPKTKRILTLQKANSWFNCRKN

SEQ ID NO: 394 - protein, 450 aa, Artificial Sequence
  MMP-1 variant V227G
FPATLETQEQDVDLVQKYLEKYYNLKNDGRQVEKRRNSGPVVEKLKQMQEFFGLKVTGKPDAETLKVMKQPRCGVPDVAQFVLTEGNPRWEQTHLTYRIENYTPDLPRADVDHAIEKAFQLWSNVTPLTFTKVSEGQADIMISFVRGDHRDNSPFDGPGGNLAHAFQPGPGIGGDAHFDEDERWTNNFREYNLHRVAAHELGHSLGLSHSTDIGALMYPSYTFSGDGQLAQDDIDGIQAIYGRSQNPVQPIGPQTPKACDSKLTFDAITTIRGEVMFFKDRFYMRTNPFYPEVELNFISVFWPQLPNGLEAAYEFADRDEVRFFKGNKYWAVQGQNVLHGYPKDIYSSFGFPRTVKHIDAALSEENTGKTYFFVANKYWRYDEYKRSMDPGYPKMIAHDFPGIGHKVDAVFMKDGFFYFFHGTRQYKFDPKTKRILTLQKANSWFNCRKN

SEQ ID NO: 395 - protein, 450 aa, Artificial Sequence
  MMP-1 variant V227F
FPATLETQEQDVDLVQKYLEKYYNLKNDGRQVEKRRNSGPVVEKLKQMQEFFGLKVTGKPDAETLKVMKQPRCGVPDVAQFVLTEGNPRWEQTHLTYRIENYTPDLPRADVDHAIEKAFQLWSNVTPLTFTKVSEGQADIMISFVRGDHRDNSPFDGPGGNLAHAFQPGPGIGGDAHFDEDERWTNNFREYNLHRVAAHELGHSLGLSHSTDIGALMYPSYTFSGDFQLAQDDIDGIQAIYGRSQNPVQPIGPQTPKACDSKLTFDAITTIRGEVMFFKDRFYMRTNPFYPEVELNFISVFWPQLPNGLEAAYEFADRDEVRFFKGNKYWAVQGQNVLHGYPKDIYSSFGFPRTVKHIDAALSEENTGKTYFFVANKYWRYDEYKRSMDPGYPKMIAHDFPGIGHKVDAVFMKDGFFYFFHGTRQYKFDPKTKRILTLQKANSWFNCRKN

SEQ ID NO: 396 - protein, 450 aa, Artificial Sequence
  MMP-1 variant V227M
FPATLETQEQDVDLVQKYLEKYYNLKNDGRQVEKRRNSGPVVEKLKQMQEFFGLKVTGKPDAETLKVMKQPRCGVPDVAQFVLTEGNPRWEQTHLTYRIENYTPDLPRADVDHAIEKAFQLWSNVTPLTFTKVSEGQADIMISFVRGDHRDNSPFDGPGGNLAHAFQPGPGIGGDAHFDEDERWTNNFREYNLHRVAAHELGHSLGLSHSTDIGALMYPSYTFSGDMQLAQDDIDGIQAIYGRSQNPVQPIGPQTPKACDSKLTFDAITTIRGEVMFFKDRFYMRTNPFYPEVELNFISVFWPQLPNGLEAAYEFADRDEVRFFKGNKYWAVQGQNVLHGYPKDIYSSFGFPRTVKHIDAALSEENTGKTYFFVANKYWRYDEYKRSMDPGYPKMIAHDFPGIGHKVDAVFMKDGFFYFFHGTRQYKFDPKTKRILTLQKANSWFNCRKN

SEQ ID NO: 397 - protein, 450 aa, Artificial Sequence
  MMP-1 variant V227W
FPATLETQEQDVDLVQKYLEKYYNLKNDGRQVEKRRNSGPVVEKLKQMQEFFGLKVTGKPDAETLKVMKQPRCGVPDVAQFVLTEGNPRWEQTHLTYRIENYTPDLPRADVDHAIEKAFQLWSNVTPLTFTKVSEGQADIMISFVRGDHRDNSPFDGPGGNLAHAFQPGPGIGGDAHFDEDERWTNNFREYNLHRVAAHELGHSLGLSHSTDIGALMYPSYTFSGDWQLAQDDIDGIQAIYGRSQNPVQPIGPQTPKACDSKLTFDAITTIRGEVMFFKDRFYMRTNPFYPEVELNFISVFWPQLPNGLEAAYEFADRDEVRFFKGNKYWAVQGQNVLHGYPKDIYSSFGFPRTVKHIDAALSEENTGKTYFFVANKYWRYDEYKRSMDPGYPKMIAHDFPGIGHKVDAVFMKDGFFYFFHGTRQYKFDPKTKRILTLQKANSWFNCRKN

SEQ ID NO: 398 - protein, 450 aa, Artificial Sequence
  MMP-1 variant V227I
FPATLETQEQDVDLVQKYLEKYYNLKNDGRQVEKRRNSGPVVEKLKQMQEFFGLKVTGKPDAETLKVMKQPRCGVPDVAQFVLTEGNPRWEQTHLTYRIENYTPDLPRADVDHAIEKAFQLWSNVTPLTFTKVSEGQADIMISFVRGDHRDNSPFDGPGGNLAHAFQPGPGIGGDAHFDEDERWTNNFREYNLHRVAAHELGHSLGLSHSTDIGALMYPSYTFSGDIQLAQDDIDGIQAIYGRSQNPVQPIGPQTPKACDSKLTFDAITTIRGEVMFFKDRFYMRTNPFYPEVELNFISVFWPQLPNGLEAAYEFADRDEVRFFKGNKYWAVQGQNVLHGYPKDIYSSFGFPRTVKHIDAALSEENTGKTYFFVANKYWRYDEYKRSMDPGYPKMIAHDFPGIGHKVDAVFMKDGFFYFFHGTRQYKFDPKTKRILTLQKANSWFNCRKN

SEQ ID NO: 399 - protein, 450 aa, Artificial Sequence
  MMP-1 variant V227L
FPATLETQEQDVDLVQKYLEKYYNLKNDGRQVEKRRNSGPVVEKLKQMQEFFGLKVTGKPDAETLKVMKQPRCGVPDVAQFVLTEGNPRWEQTHLTYRIENYTPDLPRADVDHAIEKAFQLWSNVTPLTFTKVSEGQADIMISFVRGDHRDNSPFDGPGGNLAHAFQPGPGIGGDAHFDEDERWTNNFREYNLHRVAAHELGHSLGLSHSTDIGALMYPSYTFSGDLQLAQDDIDGIQAIYGRSQNPVQPIGPQTPKACDSKLTFDAITTIRGEVMFFKDRFYMRTNPFYPEVELNFISVFWPQLPNGLEAAYEFADRDEVRFFKGNKYWAVQGQNVLHGYPKDIYSSFGFPRTVKHIDAALSEENTGKTYFFVANKYWRYDEYKRSMDPGYPKMIAHDFPGIGHKVDAVFMKDGFFYFFHGTRQYKFDPKTKRILTLQKANSWFNCRKN

SEQ ID NO: 400 - protein, 450 aa, Artificial Sequence
  MMP-1 variant V227A
FPATLETQEQDVDLVQKYLEKYYNLKNDGRQVEKRRNSGPVVEKLKQMQEFFGLKVTGKPDAETLKVMKQPRCGVPDVAQFVLTEGNPRWEQTHLTYRIENYTPDLPRADVDHAIEKAFQLWSNVTPLTFTKVSEGQADIMISFVRGDHRDNSPFDGPGGNLAHAFQPGPGIGGDAHFDEDERWTNNFREYNLHRVAAHELGHSLGLSHSTDIGALMYPSYTFSGDAQLAQDDIDGIQAIYGRSQNPVQPIGPQTPKACDSKLTFDAITTIRGEVMFFKDRFYMRTNPFYPEVELNFISVFWPQLPNGLEAAYEFADRDEVRFFKGNKYWAVQGQNVLHGYPKDIYSSFGFPRTVKHIDAALSEENTGKTYFFVANKYWRYDEYKRSMDPGYPKMIAHDFPGIGHKVDAVFMKDGFFYFFHGTRQYKFDPKTKRILTLQKANSWFNCRKN

SEQ ID NO: 401 - protein, 450 aa, Artificial Sequence
  MMP-1 variant V227P
FPATLETQEQDVDLVQKYLEKYYNLKNDGRQVEKRRNSGPVVEKLKQMQEFFGLKVTGKPDAETLKVMKQPRCGVPDVAQFVLTEGNPRWEQTHLTYRIENYTPDLPRADVDHAIEKAFQLWSNVTPLTFTKVSEGQADIMISFVRGDHRDNSPFDGPGGNLAHAFQPGPGIGGDAHFDEDERWTNNFREYNLHRVAAHELGHSLGLSHSTDIGALMYPSYTFSGDPQLAQDDIDGIQAIYGRSQNPVQPIGPQTPKACDSKLTFDAITTIRGEVMFFKDRFYMRTNPFYPEVELNFISVFWPQLPNGLEAAYEFADRDEVRFFKGNKYWAVQGQNVLHGYPKDIYSSFGFPRTVKHIDAALSEENTGKTYFFVANKYWRYDEYKRSMDPGYPKMIAHDFPGIGHKVDAVFMKDGFFYFFHGTRQYKFDPKTKRILTLQKANSWFNCRKN

SEQ ID NO: 402 - protein, 450 aa, Artificial Sequence
  MMP-1 variant Q228D
FPATLETQEQDVDLVQKYLEKYYNLKNDGRQVEKRRNSGPVVEKLKQMQEFFGLKVTGKPDAETLKVMKQPRCGVPDVAQFVLTEGNPRWEQTHLTYRIENYTPDLPRADVDHAIEKAFQLWSNVTPLTFTKVSEGQADIMISFVRGDHRDNSPFDGPGGNLAHAFQPGPGIGGDAHFDEDERWTNNFREYNLHRVAAHELGHSLGLSHSTDIGALMYPSYTFSGDVDLAQDDIDGIQAIYGRSQNPVQPIGPQTPKACDSKLTFDAITTIRGEVMFFKDRFYMRTNPFYPEVELNFISVFWPQLPNGLEAAYEFADRDEVRFFKGNKYWAVQGQNVLHGYPKDIYSSFGFPRTVKHIDAALSEENTGKTYFFVANKYWRYDEYKRSMDPGYPKMIAHDFPGIGHKVDAVFMKDGFFYFFHGTRQYKFDPKTKRILTLQKANSWFNCRKN

SEQ ID NO: 403 - protein, 450 aa, Artificial Sequence
  MMP-1 variant Q228E
FPATLETQEQDVDLVQKYLEKYYNLKNDGRQVEKRRNSGPVVEKLKQMQEFFGLKVTGKPDAETLKVMKQPRCGVPDVAQFVLTEGNPRWEQTHLTYRIENYTPDLPRADVDHAIEKAFQLWSNVTPLTFTKVSEGQADIMISFVRGDHRDNSPFDGPGGNLAHAFQPGPGIGGDAHFDEDERWTNNFREYNLHRVAAHELGHSLGLSHSTDIGALMYPSYTFSGDVELAQDDIDGIQAIYGRSQNPVQPIGPQTPKACDSKLTFDAITTIRGEVMFFKDRFYMRTNPFYPEVELNFISVFWPQLPNGLEAAYEFADRDEVRFFKGNKYWAVQGQNVLHGYPKDIYSSFGFPRTVKHIDAALSEENTGKTYFFVANKYWRYDEYKRSMDPGYPKMIAHDFPGIGHKVDAVFMKDGFFYFFHGTRQYKFDPKTKRILTLQKANSWFNCRKN

SEQ ID NO: 404 - protein, 450 aa, Artificial Sequence
  MMP-1 variant Q228H
FPATLETQEQDVDLVQKYLEKYYNLKNDGRQVEKRRNSGPVVEKLKQMQEFFGLKVTGKPDAETLKVMKQPRCGVPDVAQFVLTEGNPRWEQTHLTYRIENYTPDLPRADVDHAIEKAFQLWSNVTPLTFTKVSEGQADIMISFVRGDHRDNSPFDGPGGNLAHAFQPGPGIGGDAHFDEDERWTNNFREYNLHRVAAHELGHSLGLSHSTDIGALMYPSYTFSGDVHLAQDDIDGIQAIYGRSQNPVQPIGPQTPKACDSKLTFDAITTIRGEVMFFKDRFYMRTNPFYPEVELNFISVFWPQLPNGLEAAYEFADRDEVRFFKGNKYWAVQGQNVLHGYPKDIYSSFGFPRTVKHIDAALSEENTGKTYFFVANKYWRYDEYKRSMDPGYPKMIAHDFPGIGHKVDAVFMKDGFFYFFHGTRQYKFDPKTKRILTLQKANSWFNCRKN

SEQ ID NO: 405 - protein, 450 aa, Artificial Sequence
  MMP-1 variant Q228K
FPATLETQEQDVDLVQKYLEKYYNLKNDGRQVEKRRNSGPVVEKLKQMQEFFGLKVTGKPDAETLKVMKQPRCGVPDVAQFVLTEGNPRWEQTHLTYRIENYTPDLPRADVDHAIEKAFQLWSNVTPLTFTKVSEGQADIMISFVRGDHRDNSPFDGPGGNLAHAFQPGPGIGGDAHFDEDERWTNNFREYNLHRVAAHELGHSLGLSHSTDIGALMYPSYTFSGDVKLAQDDIDGIQAIYGRSQNPVQPIGPQTPKACDSKLTFDAITTIRGEVMFFKDRFYMRTNPFYPEVELNFISVFWPQLPNGLEAAYEFADRDEVRFFKGNKYWAVQGQNVLHGYPKDIYSSFGFPRTVKHIDAALSEENTGKTYFFVANKYWRYDEYKRSMDPGYPKMIAHDFPGIGHKVDAVFMKDGFFYFFHGTRQYKFDPKTKRILTLQKANSWFNCRKN

SEQ ID NO: 406 - protein, 450 aa, Artificial Sequence
  MMP-1 variant Q228R
FPATLETQEQDVDLVQKYLEKYYNLKNDGRQVEKRRNSGPVVEKLKQMQEFFGLKVTGKPDAETLKVMKQPRCGVPDVAQFVLTEGNPRWEQTHLTYRIENYTPDLPRADVDHAIEKAFQLWSNVTPLTFTKVSEGQADIMISFVRGDHRDNSPFDGPGGNLAHAFQPGPGIGGDAHFDEDERWTNNFREYNLHRVAAHELGHSLGLSHSTDIGALMYPSYTFSGDVRLAQDDIDGIQAIYGRSQNPVQPIGPQTPKACDSKLTFDAITTIRGEVMFFKDRFYMRTNPFYPEVELNFISVFWPQLPNGLEAAYEFADRDEVRFFKGNKYWAVQGQNVLHGYPKDIYSSFGFPRTVKHIDAALSEENTGKTYFFVANKYWRYDEYKRSMDPGYPKMIAHDFPGIGHKVDAVFMKDGFFYFFHGTRQYKFDPKTKRILTLQKANSWFNCRKN

SEQ ID NO: 407 - protein, 450 aa, Artificial Sequence
  MMP-1 variant Q228C
FPATLETQEQDVDLVQKYLEKYYNLKNDGRQVEKRRNSGPVVEKLKQMQEFFGLKVTGKPDAETLKVMKQPRCGVPDVAQFVLTEGNPRWEQTHLTYRIENYTPDLPRADVDHAIEKAFQLWSNVTPLTFTKVSEGQADIMISFVRGDHRDNSPFDGPGGNLAHAFQPGPGIGGDAHFDEDERWTNNFREYNLHRVAAHELGHSLGLSHSTDIGALMYPSYTFSGDVCLAQDDIDGIQAIYGRSQNPVQPIGPQTPKACDSKLTFDAITTIRGEVMFFKDRFYMRTNPFYPEVELNFISVFWPQLPNGLEAAYEFADRDEVRFFKGNKYWAVQGQNVLHGYPKDIYSSFGFPRTVKHIDAALSEENTGKTYFFVANKYWRYDEYKRSMDPGYPKMIAHDFPGIGHKVDAVFMKDGFFYFFHGTRQYKFDPKTKRILTLQKANSWFNCRKN

SEQ ID NO: 408 - protein, 450 aa, Artificial Sequence
  MMP-1 variant Q228N
FPATLETQEQDVDLVQKYLEKYYNLKNDGRQVEKRRNSGPVVEKLKQMQEFFGLKVTGKPDAETLKVMKQPRCGVPDVAQFVLTEGNPRWEQTHLTYRIENYTPDLPRADVDHAIEKAFQLWSNVTPLTFTKVSEGQADIMISFVRGDHRDNSPFDGPGGNLAHAFQPGPGIGGDAHFDEDERWTNNFREYNLHRVAAHELGHSLGLSHSTDIGALMYPSYTFSGDVNLAQDDIDGIQAIYGRSQNPVQPIGPQTPKACDSKLTFDAITTIRGEVMFFKDRFYMRTNPFYPEVELNFISVFWPQLPNGLEAAYEFADRDEVRFFKGNKYWAVQGQNVLHGYPKDIYSSFGFPRTVKHIDAALSEENTGKTYFFVANKYWRYDEYKRSMDPGYPKMIAHDFPGIGHKVDAVFMKDGFFYFFHGTRQYKFDPKTKRILTLQKANSWFNCRKN

SEQ ID NO: 409 - protein, 450 aa, Artificial Sequence
  MMP-1 variant Q228T
FPATLETQEQDVDLVQKYLEKYYNLKNDGRQVEKRRNSGPVVEKLKQMQEFFGLKVTGKPDAETLKVMKQPRCGVPDVAQFVLTEGNPRWEQTHLTYRIENYTPDLPRADVDHAIEKAFQLWSNVTPLTFTKVSEGQADIMISFVRGDHRDNSPFDGPGGNLAHAFQPGPGIGGDAHFDEDERWTNNFREYNLHRVAAHELGHSLGLSHSTDIGALMYPSYTFSGDVTLAQDDIDGIQAIYGRSQNPVQPIGPQTPKACDSKLTFDAITTIRGEVMFFKDRFYMRTNPFYPEVELNFISVFWPQLPNGLEAAYEFADRDEVRFFKGNKYWAVQGQNVLHGYPKDIYSSFGFPRTVKHIDAALSEENTGKTYFFVANKYWRYDEYKRSMDPGYPKMIAHDFPGIGHKVDAVFMKDGFFYFFHGTRQYKFDPKTKRILTLQKANSWFNCRKN

SEQ ID NO: 410 - protein, 450 aa, Artificial Sequence
  MMP-1 variant Q228Y
FPATLETQEQDVDLVQKYLEKYYNLKNDGRQVEKRRNSGPVVEKLKQMQEFFGLKVTGKPDAETLKVMKQPRCGVPDVAQFVLTEGNPRWEQTHLTYRIENYTPDLPRADVDHAIEKAFQLWSNVTPLTFTKVSEGQADIMISFVRGDHRDNSPFDGPGGNLAHAFQPGPGIGGDAHFDEDERWTNNFREYNLHRVAAHELGHSLGLSHSTDIGALMYPSYTFSGDVYLAQDDIDGIQAIYGRSQNPVQPIGPQTPKACDSKLTFDAITTIRGEVMFFKDRFYMRTNPFYPEVELNFISVFWPQLPNGLEAAYEFADRDEVRFFKGNKYWAVQGQNVLHGYPKDIYSSFGFPRTVKHIDAALSEENTGKTYFFVANKYWRYDEYKRSMDPGYPKMIAHDFPGIGHKVDAVFMKDGFFYFFHGTRQYKFDPKTKRILTLQKANSWFNCRKN

SEQ ID NO: 411 - protein, 450 aa, Artificial Sequence
  MMP-1 variant Q228S
FPATLETQEQDVDLVQKYLEKYYNLKNDGRQVEKRRNSGPVVEKLKQMQEFFGLKVTGKPDAETLKVMKQPRCGVPDVAQFVLTEGNPRWEQTHLTYRIENYTPDLPRADVDHAIEKAFQLWSNVTPLTFTKVSEGQADIMISFVRGDHRDNSPFDGPGGNLAHAFQPGPGIGGDAHFDEDERWTNNFREYNLHRVAAHELGHSLGLSHSTDIGALMYPSYTFSGDVSLAQDDIDGIQAIYGRSQNPVQPIGPQTPKACDSKLTFDAITTIRGEVMFFKDRFYMRTNPFYPEVELNFISVFWPQLPNGLEAAYEFADRDEVRFFKGNKYWAVQGQNVLHGYPKDIYSSFGFPRTVKHIDAALSEENTGKTYFFVANKYWRYDEYKRSMDPGYPKMIAHDFPGIGHKVDAVFMKDGFFYFFHGTRQYKFDPKTKRILTLQKANSWFNCRKN

SEQ ID NO: 412 - protein, 450 aa, Artificial Sequence
  MMP-1 variant Q228G
FPATLETQEQDVDLVQKYLEKYYNLKNDGRQVEKRRNSGPVVEKLKQMQEFFGLKVTGKPDAETLKVMKQPRCGVPDVAQFVLTEGNPRWEQTHLTYRIENYTPDLPRADVDHAIEKAFQLWSNVTPLTFTKVSEGQADIMISFVRGDHRDNSPFDGPGGNLAHAFQPGPGIGGDAHFDEDERWTNNFREYNLHRVAAHELGHSLGLSHSTDIGALMYPSYTFSGDVGLAQDDIDGIQAIYGRSQNPVQPIGPQTPKACDSKLTFDAITTIRGEVMFFKDRFYMRTNPFYPEVELNFISVFWPQLPNGLEAAYEFADRDEVRFFKGNKYWAVQGQNVLHGYPKDIYSSFGFPRTVKHIDAALSEENTGKTYFFVANKYWRYDEYKRSMDPGYPKMIAHDFPGIGHKVDAVFMKDGFFYFFHGTRQYKFDPKTKRILTLQKANSWFNCRKN

SEQ ID NO: 413 - protein, 450 aa, Artificial Sequence
  MMP-1 variant Q228F
FPATLETQEQDVDLVQKYLEKYYNLKNDGRQVEKRRNSGPVVEKLKQMQEFFGLKVTGKPDAETLKVMKQPRCGVPDVAQFVLTEGNPRWEQTHLTYRIENYTPDLPRADVDHAIEKAFQLWSNVTPLTFTKVSEGQADIMISFVRGDHRDNSPFDGPGGNLAHAFQPGPGIGGDAHFDEDERWTNNFREYNLHRVAAHELGHSLGLSHSTDIGALMYPSYTFSGDVFLAQDDIDGIQAIYGRSQNPVQPIGPQTPKACDSKLTFDAITTIRGEVMFFKDRFYMRTNPFYPEVELNFISVFWPQLPNGLEAAYEFADRDEVRFFKGNKYWAVQGQNVLHGYPKDIYSSFGFPRTVKHIDAALSEENTGKTYFFVANKYWRYDEYKRSMDPGYPKMIAHDFPGIGHKVDAVFMKDGFFYFFHGTRQYKFDPKTKRILTLQKANSWFNCRKN

SEQ ID NO: 414 - protein, 450 aa, Artificial Sequence
  MMP-1 variant Q228M
FPATLETQEQDVDLVQKYLEKYYNLKNDGRQVEKRRNSGPVVEKLKQMQEFFGLKVTGKPDAETLKVMKQPRCGVPDVAQFVLTEGNPRWEQTHLTYRIENYTPDLPRADVDHAIEKAFQLWSNVTPLTFTKVSEGQADIMISFVRGDHRDNSPFDGPGGNLAHAFQPGPGIGGDAHFDEDERWTNNFREYNLHRVAAHELGHSLGLSHSTDIGALMYPSYTFSGDVMLAQDDIDGIQAIYGRSQNPVQPIGPQTPKACDSKLTFDAITTIRGEVMFFKDRFYMRTNPFYPEVELNFISVFWPQLPNGLEAAYEFADRDEVRFFKGNKYWAVQGQNVLHGYPKDIYSSFGFPRTVKHIDAALSEENTGKTYFFVANKYWRYDEYKRSMDPGYPKMIAHDFPGIGHKVDAVFMKDGFFYFFHGTRQYKFDPKTKRILTLQKANSWFNCRKN

SEQ ID NO: 415 - protein, 450 aa, Artificial Sequence
  MMP-1 variant Q228W
FPATLETQEQDVDLVQKYLEKYYNLKNDGRQVEKRRNSGPVVEKLKQMQEFFGLKVTGKPDAETLKVMKQPRCGVPDVAQFVLTEGNPRWEQTHLTYRIENYTPDLPRADVDHAIEKAFQLWSNVTPLTFTKVSEGQADIMISFVRGDHRDNSPFDGPGGNLAHAFQPGPGIGGDAHFDEDERWTNNFREYNLHRVAAHELGHSLGLSHSTDIGALMYPSYTFSGDVWLAQDDIDGIQAIYGRSQNPVQPIGPQTPKACDSKLTFDAITTIRGEVMFFKDRFYMRTNPFYPEVELNFISVFWPQLPNGLEAAYEFADRDEVRFFKGNKYWAVQGQNVLHGYPKDIYSSFGFPRTVKHIDAALSEENTGKTYFFVANKYWRYDEYKRSMDPGYPKMIAHDFPGIGHKVDAVFMKDGFFYFFHGTRQYKFDPKTKRILTLQKANSWFNCRKN

SEQ ID NO: 416 - protein, 450 aa, Artificial Sequence
  MMP-1 variant Q228I
FPATLETQEQDVDLVQKYLEKYYNLKNDGRQVEKRRNSGPVVEKLKQMQEFFGLKVTGKPDAETLKVMKQPRCGVPDVAQFVLTEGNPRWEQTHLTYRIENYTPDLPRADVDHAIEKAFQLWSNVTPLTFTKVSEGQADIMISFVRGDHRDNSPFDGPGGNLAHAFQPGPGIGGDAHFDEDERWTNNFREYNLHRVAAHELGHSLGLSHSTDIGALMYPSYTFSGDVILAQDDIDGIQAIYGRSQNPVQPIGPQTPKACDSKLTFDAITTIRGEVMFFKDRFYMRTNPFYPEVELNFISVFWPQLPNGLEAAYEFADRDEVRFFKGNKYWAVQGQNVLHGYPKDIYSSFGFPRTVKHIDAALSEENTGKTYFFVANKYWRYDEYKRSMDPGYPKMIAHDFPGIGHKVDAVFMKDGFFYFFHGTRQYKFDPKTKRILTLQKANSWFNCRKN

SEQ ID NO: 417 - protein, 450 aa, Artificial Sequence
  MMP-1 variant Q228V
FPATLETQEQDVDLVQKYLEKYYNLKNDGRQVEKRRNSGPVVEKLKQMQEFFGLKVTGKPDAETLKVMKQPRCGVPDVAQFVLTEGNPRWEQTHLTYRIENYTPDLPRADVDHAIEKAFQLWSNVTPLTFTKVSEGQADIMISFVRGDHRDNSPFDGPGGNLAHAFQPGPGIGGDAHFDEDERWTNNFREYNLHRVAAHELGHSLGLSHSTDIGALMYPSYTFSGDVVLAQDDIDGIQAIYGRSQNPVQPIGPQTPKACDSKLTFDAITTIRGEVMFFKDRFYMRTNPFYPEVELNFISVFWPQLPNGLEAAYEFADRDEVRFFKGNKYWAVQGQNVLHGYPKDIYSSFGFPRTVKHIDAALSEENTGKTYFFVANKYWRYDEYKRSMDPGYPKMIAHDFPGIGHKVDAVFMKDGFFYFFHGTRQYKFDPKTKRILTLQKANSWFNCRKN

SEQ ID NO: 418 - protein, 450 aa, Artificial Sequence
  MMP-1 variant Q228L
FPATLETQEQDVDLVQKYLEKYYNLKNDGRQVEKRRNSGPVVEKLKQMQEFFGLKVTGKPDAETLKVMKQPRCGVPDVAQFVLTEGNPRWEQTHLTYRIENYTPDLPRADVDHAIEKAFQLWSNVTPLTFTKVSEGQADIMISFVRGDHRDNSPFDGPGGNLAHAFQPGPGIGGDAHFDEDERWTNNFREYNLHRVAAHELGHSLGLSHSTDIGALMYPSYTFSGDVLLAQDDIDGIQAIYGRSQNPVQPIGPQTPKACDSKLTFDAITTIRGEVMFFKDRFYMRTNPFYPEVELNFISVFWPQLPNGLEAAYEFADRDEVRFFKGNKYWAVQGQNVLHGYPKDIYSSFGFPRTVKHIDAALSEENTGKTYFFVANKYWRYDEYKRSMDPGYPKMIAHDFPGIGHKVDAVFMKDGFFYFFHGTRQYKFDPKTKRILTLQKANSWFNCRKN

SEQ ID NO: 419 - protein, 450 aa, Artificial Sequence
  MMP-1 variant Q228A
FPATLETQEQDVDLVQKYLEKYYNLKNDGRQVEKRRNSGPVVEKLKQMQEFFGLKVTGKPDAETLKVMKQPRCGVPDVAQFVLTEGNPRWEQTHLTYRIENYTPDLPRADVDHAIEKAFQLWSNVTPLTFTKVSEGQADIMISFVRGDHRDNSPFDGPGGNLAHAFQPGPGIGGDAHFDEDERWTNNFREYNLHRVAAHELGHSLGLSHSTDIGALMYPSYTFSGDVALAQDDIDGIQAIYGRSQNPVQPIGPQTPKACDSKLTFDAITTIRGEVMFFKDRFYMRTNPFYPEVELNFISVFWPQLPNGLEAAYEFADRDEVRFFKGNKYWAVQGQNVLHGYPKDIYSSFGFPRTVKHIDAALSEENTGKTYFFVANKYWRYDEYKRSMDPGYPKMIAHDFPGIGHKVDAVFMKDGFFYFFHGTRQYKFDPKTKRILTLQKANSWFNCRKN

SEQ ID NO: 420 - protein, 450 aa, Artificial Sequence
  MMP-1 variant Q228P
FPATLETQEQDVDLVQKYLEKYYNLKNDGRQVEKRRNSGPVVEKLKQMQEFFGLKVTGKPDAETLKVMKQPRCGVPDVAQFVLTEGNPRWEQTHLTYRIENYTPDLPRADVDHAIEKAFQLWSNVTPLTFTKVSEGQADIMISFVRGDHRDNSPFDGPGGNLAHAFQPGPGIGGDAHFDEDERWTNNFREYNLHRVAAHELGHSLGLSHSTDIGALMYPSYTFSGDVPLAQDDIDGIQAIYGRSQNPVQPIGPQTPKACDSKLTFDAITTIRGEVMFFKDRFYMRTNPFYPEVELNFISVFWPQLPNGLEAAYEFADRDEVRFFKGNKYWAVQGQNVLHGYPKDIYSSFGFPRTVKHIDAALSEENTGKTYFFVANKYWRYDEYKRSMDPGYPKMIAHDFPGIGHKVDAVFMKDGFFYFFHGTRQYKFDPKTKRILTLQKANSWFNCRKN

SEQ ID NO: 421 - protein, 450 aa, Artificial Sequence
  MMP-1 variant L229D
FPATLETQEQDVDLVQKYLEKYYNLKNDGRQVEKRRNSGPVVEKLKQMQEFFGLKVTGKPDAETLKVMKQPRCGVPDVAQFVLTEGNPRWEQTHLTYRIENYTPDLPRADVDHAIEKAFQLWSNVTPLTFTKVSEGQADIMISFVRGDHRDNSPFDGPGGNLAHAFQPGPGIGGDAHFDEDERWTNNFREYNLHRVAAHELGHSLGLSHSTDIGALMYPSYTFSGDVQDAQDDIDGIQAIYGRSQNPVQPIGPQTPKACDSKLTFDAITTIRGEVMFFKDRFYMRTNPFYPEVELNFISVFWPQLPNGLEAAYEFADRDEVRFFKGNKYWAVQGQNVLHGYPKDIYSSFGFPRTVKHIDAALSEENTGKTYFFVANKYWRYDEYKRSMDPGYPKMIAHDFPGIGHKVDAVFMKDGFFYFFHGTRQYKFDPKTKRILTLQKANSWFNCRKN

SEQ ID NO: 422 - protein, 450 aa, Artificial Sequence
  MMP-1 variant L229E
FPATLETQEQDVDLVQKYLEKYYNLKNDGRQVEKRRNSGPVVEKLKQMQEFFGLKVTGKPDAETLKVMKQPRCGVPDVAQFVLTEGNPRWEQTHLTYRIENYTPDLPRADVDHAIEKAFQLWSNVTPLTFTKVSEGQADIMISFVRGDHRDNSPFDGPGGNLAHAFQPGPGIGGDAHFDEDERWTNNFREYNLHRVAAHELGHSLGLSHSTDIGALMYPSYTFSGDVQEAQDDIDGIQAIYGRSQNPVQPIGPQTPKACDSKLTFDAITTIRGEVMFFKDRFYMRTNPFYPEVELNFISVFWPQLPNGLEAAYEFADRDEVRFFKGNKYWAVQGQNVLHGYPKDIYSSFGFPRTVKHIDAALSEENTGKTYFFVANKYWRYDEYKRSMDPGYPKMIAHDFPGIGHKVDAVFMKDGFFYFFHGTRQYKFDPKTKRILTLQKANSWFNCRKN

SEQ ID NO: 423 - protein, 450 aa, Artificial Sequence
  MMP-1 variant L229H
FPATLETQEQDVDLVQKYLEKYYNLKNDGRQVEKRRNSGPVVEKLKQMQEFFGLKVTGKPDAETLKVMKQPRCGVPDVAQFVLTEGNPRWEQTHLTYRIENYTPDLPRADVDHAIEKAFQLWSNVTPLTFTKVSEGQADIMISFVRGDHRDNSPFDGPGGNLAHAFQPGPGIGGDAHFDEDERWTNNFREYNLHRVAAHELGHSLGLSHSTDIGALMYPSYTFSGDVQHAQDDIDGIQAIYGRSQNPVQPIGPQTPKACDSKLTFDAITTIRGEVMFFKDRFYMRTNPFYPEVELNFISVFWPQLPNGLEAAYEFADRDEVRFFKGNKYWAVQGQNVLHGYPKDIYSSFGFPRTVKHIDAALSEENTGKTYFFVANKYWRYDEYKRSMDPGYPKMIAHDFPGIGHKVDAVFMKDGFFYFFHGTRQYKFDPKTKRILTLQKANSWFNCRKN

SEQ ID NO: 424 - protein, 450 aa, Artificial Sequence
  MMP-1 variant L229K
FPATLETQEQDVDLVQKYLEKYYNLKNDGRQVEKRRNSGPVVEKLKQMQEFFGLKVTGKPDAETLKVMKQPRCGVPDVAQFVLTEGNPRWEQTHLTYRIENYTPDLPRADVDHAIEKAFQLWSNVTPLTFTKVSEGQADIMISFVRGDHRDNSPFDGPGGNLAHAFQPGPGIGGDAHFDEDERWTNNFREYNLHRVAAHELGHSLGLSHSTDIGALMYPSYTFSGDVQKAQDDIDGIQAIYGRSQNPVQPIGPQTPKACDSKLTFDAITTIRGEVMFFKDRFYMRTNPFYPEVELNFISVFWPQLPNGLEAAYEFADRDEVRFFKGNKYWAVQGQNVLHGYPKDIYSSFGFPRTVKHIDAALSEENTGKTYFFVANKYWRYDEYKRSMDPGYPKMIAHDFPGIGHKVDAVFMKDGFFYFFHGTRQYKFDPKTKRILTLQKANSWFNCRKN

SEQ ID NO: 425 - protein, 450 aa, Artificial Sequence
  MMP-1 variant L229R
FPATLETQEQDVDLVQKYLEKYYNLKNDGRQVEKRRNSGPVVEKLKQMQEFFGLKVTGKPDAETLKVMKQPRCGVPDVAQFVLTEGNPRWEQTHLTYRIENYTPDLPRADVDHAIEKAFQLWSNVTPLTFTKVSEGQADIMISFVRGDHRDNSPFDGPGGNLAHAFQPGPGIGGDAHFDEDERWTNNFREYNLHRVAAHELGHSLGLSHSTDIGALMYPSYTFSGDVQRAQDDIDGIQAIYGRSQNPVQPIGPQTPKACDSKLTFDAITTIRGEVMFFKDRFYMRTNPFYPEVELNFISVFWPQLPNGLEAAYEFADRDEVRFFKGNKYWAVQGQNVLHGYPKDIYSSFGFPRTVKHIDAALSEENTGKTYFFVANKYWRYDEYKRSMDPGYPKMIAHDFPGIGHKVDAVFMKDGFFYFFHGTRQYKFDPKTKRILTLQKANSWFNCRKN

SEQ ID NO: 426 - protein, 450 aa, Artificial Sequence
  MMP-1 variant L229C
FPATLETQEQDVDLVQKYLEKYYNLKNDGRQVEKRRNSGPVVEKLKQMQEFFGLKVTGKPDAETLKVMKQPRCGVPDVAQFVLTEGNPRWEQTHLTYRIENYTPDLPRADVDHAIEKAFQLWSNVTPLTFTKVSEGQADIMISFVRGDHRDNSPFDGPGGNLAHAFQPGPGIGGDAHFDEDERWTNNFREYNLHRVAAHELGHSLGLSHSTDIGALMYPSYTFSGDVQCAQDDIDGIQAIYGRSQNPVQPIGPQTPKACDSKLTFDAITTIRGEVMFFKDRFYMRTNPFYPEVELNFISVFWPQLPNGLEAAYEFADRDEVRFFKGNKYWAVQGQNVLHGYPKDIYSSFGFPRTVKHIDAALSEENTGKTYFFVANKYWRYDEYKRSMDPGYPKMIAHDFPGIGHKVDAVFMKDGFFYFFHGTRQYKFDPKTKRILTLQKANSWFNCRKN

SEQ ID NO: 427 - protein, 450 aa, Artificial Sequence
  MMP-1 variant L229N
FPATLETQEQDVDLVQKYLEKYYNLKNDGRQVEKRRNSGPVVEKLKQMQEFFGLKVTGKPDAETLKVMKQPRCGVPDVAQFVLTEGNPRWEQTHLTYRIENYTPDLPRADVDHAIEKAFQLWSNVTPLTFTKVSEGQADIMISFVRGDHRDNSPFDGPGGNLAHAFQPGPGIGGDAHFDEDERWTNNFREYNLHRVAAHELGHSLGLSHSTDIGALMYPSYTFSGDVQNAQDDIDGIQAIYGRSQNPVQPIGPQTPKACDSKLTFDAITTIRGEVMFFKDRFYMRTNPFYPEVELNFISVFWPQLPNGLEAAYEFADRDEVRFFKGNKYWAVQGQNVLHGYPKDIYSSFGFPRTVKHIDAALSEENTGKTYFFVANKYWRYDEYKRSMDPGYPKMIAHDFPGIGHKVDAVFMKDGFFYFFHGTRQYKFDPKTKRILTLQKANSWFNCRKN

SEQ ID NO: 428 - protein, 450 aa, Artificial Sequence
  MMP-1 variant L229Q
FPATLETQEQDVDLVQKYLEKYYNLKNDGRQVEKRRNSGPVVEKLKQMQEFFGLKVTGKPDAETLKVMKQPRCGVPDVAQFVLTEGNPRWEQTHLTYRIENYTPDLPRADVDHAIEKAFQLWSNVTPLTFTKVSEGQADIMISFVRGDHRDNSPFDGPGGNLAHAFQPGPGIGGDAHFDEDERWTNNFREYNLHRVAAHELGHSLGLSHSTDIGALMYPSYTFSGDVQQAQDDIDGIQAIYGRSQNPVQPIGPQTPKACDSKLTFDAITTIRGEVMFFKDRFYMRTNPFYPEVELNFISVFWPQLPNGLEAAYEFADRDEVRFFKGNKYWAVQGQNVLHGYPKDIYSSFGFPRTVKHIDAALSEENTGKTYFFVANKYWRYDEYKRSMDPGYPKMIAHDFPGIGHKVDAVFMKDGFFYFFHGTRQYKFDPKTKRILTLQKANSWFNCRKN

SEQ ID NO: 429 - protein, 450 aa, Artificial Sequence
  MMP-1 variant L229T
FPATLETQEQDVDLVQKYLEKYYNLKNDGRQVEKRRNSGPVVEKLKQMQEFFGLKVTGKPDAETLKVMKQPRCGVPDVAQFVLTEGNPRWEQTHLTYRIENYTPDLPRADVDHAIEKAFQLWSNVTPLTFTKVSEGQADIMISFVRGDHRDNSPFDGPGGNLAHAFQPGPGIGGDAHFDEDERWTNNFREYNLHRVAAHELGHSLGLSHSTDIGALMYPSYTFSGDVQTAQDDIDGIQAIYGRSQNPVQPIGPQTPKACDSKLTFDAITTIRGEVMFFKDRFYMRTNPFYPEVELNFISVFWPQLPNGLEAAYEFADRDEVRFFKGNKYWAVQGQNVLHGYPKDIYSSFGFPRTVKHIDAALSEENTGKTYFFVANKYWRYDEYKRSMDPGYPKMIAHDFPGIGHKVDAVFMKDGFFYFFHGTRQYKFDPKTKRILTLQKANSWFNCRKN

SEQ ID NO: 430 - protein, 450 aa, Artificial Sequence
  MMP-1 variant L229Y
FPATLETQEQDVDLVQKYLEKYYNLKNDGRQVEKRRNSGPVVEKLKQMQEFFGLKVTGKPDAETLKVMKQPRCGVPDVAQFVLTEGNPRWEQTHLTYRIENYTPDLPRADVDHAIEKAFQLWSNVTPLTFTKVSEGQADIMISFVRGDHRDNSPFDGPGGNLAHAFQPGPGIGGDAHFDEDERWTNNFREYNLHRVAAHELGHSLGLSHSTDIGALMYPSYTFSGDVQYAQDDIDGIQAIYGRSQNPVQPIGPQTPKACDSKLTFDAITTIRGEVMFFKDRFYMRTNPFYPEVELNFISVFWPQLPNGLEAAYEFADRDEVRFFKGNKYWAVQGQNVLHGYPKDIYSSFGFPRTVKHIDAALSEENTGKTYFFVANKYWRYDEYKRSMDPGYPKMIAHDFPGIGHKVDAVFMKDGFFYFFHGTRQYKFDPKTKRILTLQKANSWFNCRKN

SEQ ID NO: 431 - protein, 450 aa, Artificial Sequence
  MMP-1 variant L229S
FPATLETQEQDVDLVQKYLEKYYNLKNDGRQVEKRRNSGPVVEKLKQMQEFFGLKVTGKPDAETLKVMKQPRCGVPDVAQFVLTEGNPRWEQTHLTYRIENYTPDLPRADVDHAIEKAFQLWSNVTPLTFTKVSEGQADIMISFVRGDHRDNSPFDGPGGNLAHAFQPGPGIGGDAHFDEDERWTNNFREYNLHRVAAHELGHSLGLSHSTDIGALMYPSYTFSGDVQSAQDDIDGIQAIYGRSQNPVQPIGPQTPKACDSKLTFDAITTIRGEVMFFKDRFYMRTNPFYPEVELNFISVFWPQLPNGLEAAYEFADRDEVRFFKGNKYWAVQGQNVLHGYPKDIYSSFGFPRTVKHIDAALSEENTGKTYFFVANKYWRYDEYKRSMDPGYPKMIAHDFPGIGHKVDAVFMKDGFFYFFHGTRQYKFDPKTKRILTLQKANSWFNCRKN

SEQ ID NO: 432 - protein, 499 aa, Artificial Sequence
  MMP-1 variant L229G
FPATLETQEQDVDLVQKYLEKYYNLKNDGRQVEKRRNSGPVVEKLKQMQEFFGLKVTGKPDAETLKVMKQPRCGVPDVAQFVLTEGNPRWEQTHLTYRIENYTPDLPRADVDHAIEKAFQLWSNVTPLTFTKVSEGQADIMISFVRGDHRDNSPFDGPGGNLAHAFQPGPGIGGDAHFDEDERWTNNFREYNLHRVAAHELGHSLGLSHSTDIGALMYPSYTFSGDVQGAQDDIDGIQAIYGRSQNPVQPIGPQTPKACDSKLTFDAITTIRGEVMFFKDRFYMRTNPFYPEVELNFISVFWPQLPNGLEAAYEFADRDEVRFFKGNKYWAVQGQNVLHGYPKDIYSSFGFPRTVKHIDAALSEENTGKTYFFVANKYWRYDEYKRSMDPGYPKMIAHDFPGIGHKVDAVFMKDGFFYFFHGTRQYKFDPKTKRILTLQKANSWFNCRKNGIGHKVDAVFMKDGFFYFFHGTRQYKFDPKTKRILTLQKANSWFNCRKN

SEQ ID NO: 433 - protein, 450 aa, Artificial Sequence
  MMP-1 variant L229F
FPATLETQEQDVDLVQKYLEKYYNLKNDGRQVEKRRNSGPVVEKLKQMQEFFGLKVTGKPDAETLKVMKQPRCGVPDVAQFVLTEGNPRWEQTHLTYRIENYTPDLPRADVDHAIEKAFQLWSNVTPLTFTKVSEGQADIMISFVRGDHRDNSPFDGPGGNLAHAFQPGPGIGGDAHFDEDERWTNNFREYNLHRVAAHELGHSLGLSHSTDIGALMYPSYTFSGDVQFAQDDIDGIQAIYGRSQNPVQPIGPQTPKACDSKLTFDAITTIRGEVMFFKDRFYMRTNPFYPEVELNFISVFWPQLPNGLEAAYEFADRDEVRFFKGNKYWAVQGQNVLHGYPKDIYSSFGFPRTVKHIDAALSEENTGKTYFFVANKYWRYDEYKRSMDPGYPKMIAHDFPGIGHKVDAVFMKDGFFYFFHGTRQYKFDPKTKRILTLQKANSWFNCRKN

SEQ ID NO: 434 - protein, 450 aa, Artificial Sequence
  MMP-1 variant L229M
FPATLETQEQDVDLVQKYLEKYYNLKNDGRQVEKRRNSGPVVEKLKQMQEFFGLKVTGKPDAETLKVMKQPRCGVPDVAQFVLTEGNPRWEQTHLTYRIENYTPDLPRADVDHAIEKAFQLWSNVTPLTFTKVSEGQADIMISFVRGDHRDNSPFDGPGGNLAHAFQPGPGIGGDAHFDEDERWTNNFREYNLHRVAAHELGHSLGLSHSTDIGALMYPSYTFSGDVQMAQDDIDGIQAIYGRSQNPVQPIGPQTPKACDSKLTFDAITTIRGEVMFFKDRFYMRTNPFYPEVELNFISVFWPQLPNGLEAAYEFADRDEVRFFKGNKYWAVQGQNVLHGYPKDIYSSFGFPRTVKHIDAALSEENTGKTYFFVANKYWRYDEYKRSMDPGYPKMIAHDFPGIGHKVDAVFMKDGFFYFFHGTRQYKFDPKTKRILTLQKANSWFNCRKN

SEQ ID NO: 435 - protein, 450 aa, Artificial Sequence
  MMP-1 variant L229W
FPATLETQEQDVDLVQKYLEKYYNLKNDGRQVEKRRNSGPVVEKLKQMQEFFGLKVTGKPDAETLKVMKQPRCGVPDVAQFVLTEGNPRWEQTHLTYRIENYTPDLPRADVDHAIEKAFQLWSNVTPLTFTKVSEGQADIMISFVRGDHRDNSPFDGPGGNLAHAFQPGPGIGGDAHFDEDERWTNNFREYNLHRVAAHELGHSLGLSHSTDIGALMYPSYTFSGDVQWAQDDIDGIQAIYGRSQNPVQPIGPQTPKACDSKLTFDAITTIRGEVMFFKDRFYMRTNPFYPEVELNFISVFWPQLPNGLEAAYEFADRDEVRFFKGNKYWAVQGQNVLHGYPKDIYSSFGFPRTVKHIDAALSEENTGKTYFFVANKYWRYDEYKRSMDPGYPKMIAHDFPGIGHKVDAVFMKDGFFYFFHGTRQYKFDPKTKRILTLQKANSWFNCRKN

SEQ ID NO: 436 - protein, 450 aa, Artificial Sequence
  MMP-1 variant L229I
FPATLETQEQDVDLVQKYLEKYYNLKNDGRQVEKRRNSGPVVEKLKQMQEFFGLKVTGKPDAETLKVMKQPRCGVPDVAQFVLTEGNPRWEQTHLTYRIENYTPDLPRADVDHAIEKAFQLWSNVTPLTFTKVSEGQADIMISFVRGDHRDNSPFDGPGGNLAHAFQPGPGIGGDAHFDEDERWTNNFREYNLHRVAAHELGHSLGLSHSTDIGALMYPSYTFSGDVQIAQDDIDGIQAIYGRSQNPVQPIGPQTPKACDSKLTFDAITTIRGEVMFFKDRFYMRTNPFYPEVELNFISVFWPQLPNGLEAAYEFADRDEVRFFKGNKYWAVQGQNVLHGYPKDIYSSFGFPRTVKHIDAALSEENTGKTYFFVANKYWRYDEYKRSMDPGYPKMIAHDFPGIGHKVDAVFMKDGFFYFFHGTRQYKFDPKTKRILTLQKANSWFNCRKN

SEQ ID NO: 437 - protein, 450 aa, Artificial Sequence
  MMP-1 variant L229V
FPATLETQEQDVDLVQKYLEKYYNLKNDGRQVEKRRNSGPVVEKLKQMQEFFGLKVTGKPDAETLKVMKQPRCGVPDVAQFVLTEGNPRWEQTHLTYRIENYTPDLPRADVDHAIEKAFQLWSNVTPLTFTKVSEGQADIMISFVRGDHRDNSPFDGPGGNLAHAFQPGPGIGGDAHFDEDERWTNNFREYNLHRVAAHELGHSLGLSHSTDIGALMYPSYTFSGDVQVAQDDIDGIQAIYGRSQNPVQPIGPQTPKACDSKLTFDAITTIRGEVMFFKDRFYMRTNPFYPEVELNFISVFWPQLPNGLEAAYEFADRDEVRFFKGNKYWAVQGQNVLHGYPKDIYSSFGFPRTVKHIDAALSEENTGKTYFFVANKYWRYDEYKRSMDPGYPKMIAHDFPGIGHKVDAVFMKDGFFYFFHGTRQYKFDPKTKRILTLQKANSWFNCRKN

SEQ ID NO: 438 - protein, 450 aa, Artificial Sequence
  MMP-1 variant L229A
FPATLETQEQDVDLVQKYLEKYYNLKNDGRQVEKRRNSGPVVEKLKQMQEFFGLKVTGKPDAETLKVMKQPRCGVPDVAQFVLTEGNPRWEQTHLTYRIENYTPDLPRADVDHAIEKAFQLWSNVTPLTFTKVSEGQADIMISFVRGDHRDNSPFDGPGGNLAHAFQPGPGIGGDAHFDEDERWTNNFREYNLHRVAAHELGHSLGLSHSTDIGALMYPSYTFSGDVQAAQDDIDGIQAIYGRSQNPVQPIGPQTPKACDSKLTFDAITTIRGEVMFFKDRFYMRTNPFYPEVELNFISVFWPQLPNGLEAAYEFADRDEVRFFKGNKYWAVQGQNVLHGYPKDIYSSFGFPRTVKHIDAALSEENTGKTYFFVANKYWRYDEYKRSMDPGYPKMIAHDFPGIGHKVDAVFMKDGFFYFFHGTRQYKFDPKTKRILTLQKANSWFNCRKN

SEQ ID NO: 439 - protein, 450 aa, Artificial Sequence
  MMP-1 variant L229P
FPATLETQEQDVDLVQKYLEKYYNLKNDGRQVEKRRNSGPVVEKLKQMQEFFGLKVTGKPDAETLKVMKQPRCGVPDVAQFVLTEGNPRWEQTHLTYRIENYTPDLPRADVDHAIEKAFQLWSNVTPLTFTKVSEGQADIMISFVRGDHRDNSPFDGPGGNLAHAFQPGPGIGGDAHFDEDERWTNNFREYNLHRVAAHELGHSLGLSHSTDIGALMYPSYTFSGDVQPAQDDIDGIQAIYGRSQNPVQPIGPQTPKACDSKLTFDAITTIRGEVMFFKDRFYMRTNPFYPEVELNFISVFWPQLPNGLEAAYEFADRDEVRFFKGNKYWAVQGQNVLHGYPKDIYSSFGFPRTVKHIDAALSEENTGKTYFFVANKYWRYDEYKRSMDPGYPKMIAHDFPGIGHKVDAVFMKDGFFYFFHGTRQYKFDPKTKRILTLQKANSWFNCRKN

SEQ ID NO: 440 - protein, 450 aa, Artificial Sequence
  MMP-1 variant D233E
FPATLETQEQDVDLVQKYLEKYYNLKNDGRQVEKRRNSGPVVEKLKQMQEFFGLKVTGKPDAETLKVMKQPRCGVPDVAQFVLTEGNPRWEQTHLTYRIENYTPDLPRADVDHAIEKAFQLWSNVTPLTFTKVSEGQADIMISFVRGDHRDNSPFDGPGGNLAHAFQPGPGIGGDAHFDEDERWTNNFREYNLHRVAAHELGHSLGLSHSTDIGALMYPSYTFSGDVQLAQDEIDGIQAIYGRSQNPVQPIGPQTPKACDSKLTFDAITTIRGEVMFFKDRFYMRTNPFYPEVELNFISVFWPQLPNGLEAAYEFADRDEVRFFKGNKYWAVQGQNVLHGYPKDIYSSFGFPRTVKHIDAALSEENTGKTYFFVANKYWRYDEYKRSMDPGYPKMIAHDFPGIGHKVDAVFMKDGFFYFFHGTRQYKFDPKTKRILTLQKANSWFNCRKN

SEQ ID NO: 441 - protein, 450 aa, Artificial Sequence
  MMP-1 variant D233H
FPATLETQEQDVDLVQKYLEKYYNLKNDGRQVEKRRNSGPVVEKLKQMQEFFGLKVTGKPDAETLKVMKQPRCGVPDVAQFVLTEGNPRWEQTHLTYRIENYTPDLPRADVDHAIEKAFQLWSNVTPLTFTKVSEGQADIMISFVRGDHRDNSPFDGPGGNLAHAFQPGPGIGGDAHFDEDERWTNNFREYNLHRVAAHELGHSLGLSHSTDIGALMYPSYTFSGDVQLAQDHIDGIQAIYGRSQNPVQPIGPQTPKACDSKLTFDAITTIRGEVMFFKDRFYMRTNPFYPEVELNFISVFWPQLPNGLEAAYEFADRDEVRFFKGNKYWAVQGQNVLHGYPKDIYSSFGFPRTVKHIDAALSEENTGKTYFFVANKYWRYDEYKRSMDPGYPKMIAHDFPGIGHKVDAVFMKDGFFYFFHGTRQYKFDPKTKRILTLQKANSWFNCRKN

SEQ ID NO: 442 - protein, 450 aa, Artificial Sequence
  MMP-1 variant D233K
FPATLETQEQDVDLVQKYLEKYYNLKNDGRQVEKRRNSGPVVEKLKQMQEFFGLKVTGKPDAETLKVMKQPRCGVPDVAQFVLTEGNPRWEQTHLTYRIENYTPDLPRADVDHAIEKAFQLWSNVTPLTFTKVSEGQADIMISFVRGDHRDNSPFDGPGGNLAHAFQPGPGIGGDAHFDEDERWTNNFREYNLHRVAAHELGHSLGLSHSTDIGALMYPSYTFSGDVQLAQDKIDGIQAIYGRSQNPVQPIGPQTPKACDSKLTFDAITTIRGEVMFFKDRFYMRTNPFYPEVELNFISVFWPQLPNGLEAAYEFADRDEVRFFKGNKYWAVQGQNVLHGYPKDIYSSFGFPRTVKHIDAALSEENTGKTYFFVANKYWRYDEYKRSMDPGYPKMIAHDFPGIGHKVDAVFMKDGFFYFFHGTRQYKFDPKTKRILTLQKANSWFNCRKN

SEQ ID NO: 443 - protein, 450 aa, Artificial Sequence
  MMP-1 variant D233R
FPATLETQEQDVDLVQKYLEKYYNLKNDGRQVEKRRNSGPVVEKLKQMQEFFGLKVTGKPDAETLKVMKQPRCGVPDVAQFVLTEGNPRWEQTHLTYRIENYTPDLPRADVDHAIEKAFQLWSNVTPLTFTKVSEGQADIMISFVRGDHRDNSPFDGPGGNLAHAFQPGPGIGGDAHFDEDERWTNNFREYNLHRVAAHELGHSLGLSHSTDIGALMYPSYTFSGDVQLAQDRIDGIQAIYGRSQNPVQPIGPQTPKACDSKLTFDAITTIRGEVMFFKDRFYMRTNPFYPEVELNFISVFWPQLPNGLEAAYEFADRDEVRFFKGNKYWAVQGQNVLHGYPKDIYSSFGFPRTVKHIDAALSEENTGKTYFFVANKYWRYDEYKRSMDPGYPKMIAHDFPGIGHKVDAVFMKDGFFYFFHGTRQYKFDPKTKRILTLQKANSWFNCRKN

SEQ ID NO: 444 - protein, 450 aa, Artificial Sequence
  MMP-1 variant D233C
FPATLETQEQDVDLVQKYLEKYYNLKNDGRQVEKRRNSGPVVEKLKQMQEFFGLKVTGKPDAETLKVMKQPRCGVPDVAQFVLTEGNPRWEQTHLTYRIENYTPDLPRADVDHAIEKAFQLWSNVTPLTFTKVSEGQADIMISFVRGDHRDNSPFDGPGGNLAHAFQPGPGIGGDAHFDEDERWTNNFREYNLHRVAAHELGHSLGLSHSTDIGALMYPSYTFSGDVQLAQDCIDGIQAIYGRSQNPVQPIGPQTPKACDSKLTFDAITTIRGEVMFFKDRFYMRTNPFYPEVELNFISVFWPQLPNGLEAAYEFADRDEVRFFKGNKYWAVQGQNVLHGYPKDIYSSFGFPRTVKHIDAALSEENTGKTYFFVANKYWRYDEYKRSMDPGYPKMIAHDFPGIGHKVDAVFMKDGFFYFFHGTRQYKFDPKTKRILTLQKANSWFNCRKN

SEQ ID NO: 445 - protein, 450 aa, Artificial Sequence
  MMP-1 variant D233N
FPATLETQEQDVDLVQKYLEKYYNLKNDGRQVEKRRNSGPVVEKLKQMQEFFGLKVTGKPDAETLKVMKQPRCGVPDVAQFVLTEGNPRWEQTHLTYRIENYTPDLPRADVDHAIEKAFQLWSNVTPLTFTKVSEGQADIMISFVRGDHRDNSPFDGPGGNLAHAFQPGPGIGGDAHFDEDERWTNNFREYNLHRVAAHELGHSLGLSHSTDIGALMYPSYTFSGDVQLAQDNIDGIQAIYGRSQNPVQPIGPQTPKACDSKLTFDAITTIRGEVMFFKDRFYMRTNPFYPEVELNFISVFWPQLPNGLEAAYEFADRDEVRFFKGNKYWAVQGQNVLHGYPKDIYSSFGFPRTVKHIDAALSEENTGKTYFFVANKYWRYDEYKRSMDPGYPKMIAHDFPGIGHKVDAVFMKDGFFYFFHGTRQYKFDPKTKRILTLQKANSWFNCRKN

SEQ ID NO: 446 - protein, 450 aa, Artificial Sequence
  MMP-1 variant D233Q
FPATLETQEQDVDLVQKYLEKYYNLKNDGRQVEKRRNSGPVVEKLKQMQEFFGLKVTGKPDAETLKVMKQPRCGVPDVAQFVLTEGNPRWEQTHLTYRIENYTPDLPRADVDHAIEKAFQLWSNVTPLTFTKVSEGQADIMISFVRGDHRDNSPFDGPGGNLAHAFQPGPGIGGDAHFDEDERWTNNFREYNLHRVAAHELGHSLGLSHSTDIGALMYPSYTFSGDVQLAQDQIDGIQAIYGRSQNPVQPIGPQTPKACDSKLTFDAITTIRGEVMFFKDRFYMRTNPFYPEVELNFISVFWPQLPNGLEAAYEFADRDEVRFFKGNKYWAVQGQNVLHGYPKDIYSSFGFPRTVKHIDAALSEENTGKTYFFVANKYWRYDEYKRSMDPGYPKMIAHDFPGIGHKVDAVFMKDGFFYFFHGTRQYKFDPKTKRILTLQKANSWFNCRKN

SEQ ID NO: 447 - protein, 450 aa, Artificial Sequence
  MMP-1 variant D233T
FPATLETQEQDVDLVQKYLEKYYNLKNDGRQVEKRRNSGPVVEKLKQMQEFFGLKVTGKPDAETLKVMKQPRCGVPDVAQFVLTEGNPRWEQTHLTYRIENYTPDLPRADVDHAIEKAFQLWSNVTPLTFTKVSEGQADIMISFVRGDHRDNSPFDGPGGNLAHAFQPGPGIGGDAHFDEDERWTNNFREYNLHRVAAHELGHSLGLSHSTDIGALMYPSYTFSGDVQLAQDTIDGIQAIYGRSQNPVQPIGPQTPKACDSKLTFDAITTIRGEVMFFKDRFYMRTNPFYPEVELNFISVFWPQLPNGLEAAYEFADRDEVRFFKGNKYWAVQGQNVLHGYPKDIYSSFGFPRTVKHIDAALSEENTGKTYFFVANKYWRYDEYKRSMDPGYPKMIAHDFPGIGHKVDAVFMKDGFFYFFHGTRQYKFDPKTKRILTLQKANSWFNCRKN

SEQ ID NO: 448 - protein, 450 aa, Artificial Sequence
  MMP-1 variant D233Y
FPATLETQEQDVDLVQKYLEKYYNLKNDGRQVEKRRNSGPVVEKLKQMQEFFGLKVTGKPDAETLKVMKQPRCGVPDVAQFVLTEGNPRWEQTHLTYRIENYTPDLPRADVDHAIEKAFQLWSNVTPLTFTKVSEGQADIMISFVRGDHRDNSPFDGPGGNLAHAFQPGPGIGGDAHFDEDERWTNNFREYNLHRVAAHELGHSLGLSHSTDIGALMYPSYTFSGDVQLAQDYIDGIQAIYGRSQNPVQPIGPQTPKACDSKLTFDAITTIRGEVMFFKDRFYMRTNPFYPEVELNFISVFWPQLPNGLEAAYEFADRDEVRFFKGNKYWAVQGQNVLHGYPKDIYSSFGFPRTVKHIDAALSEENTGKTYFFVANKYWRYDEYKRSMDPGYPKMIAHDFPGIGHKVDAVFMKDGFFYFFHGTRQYKFDPKTKRILTLQKANSWFNCRKN

SEQ ID NO: 449 - protein, 450 aa, Artificial Sequence
  MMP-1 variant D233S
FPATLETQEQDVDLVQKYLEKYYNLKNDGRQVEKRRNSGPVVEKLKQMQEFFGLKVTGKPDAETLKVMKQPRCGVPDVAQFVLTEGNPRWEQTHLTYRIENYTPDLPRADVDHAIEKAFQLWSNVTPLTFTKVSEGQADIMISFVRGDHRDNSPFDGPGGNLAHAFQPGPGIGGDAHFDEDERWTNNFREYNLHRVAAHELGHSLGLSHSTDIGALMYPSYTFSGDVQLAQDSIDGIQAIYGRSQNPVQPIGPQTPKACDSKLTFDAITTIRGEVMFFKDRFYMRTNPFYPEVELNFISVFWPQLPNGLEAAYEFADRDEVRFFKGNKYWAVQGQNVLHGYPKDIYSSFGFPRTVKHIDAALSEENTGKTYFFVANKYWRYDEYKRSMDPGYPKMIAHDFPGIGHKVDAVFMKDGFFYFFHGTRQYKFDPKTKRILTLQKANSWFNCRKN

SEQ ID NO: 450 - protein, 450 aa, Artificial Sequence
  MMP-1 variant D233G
FPATLETQEQDVDLVQKYLEKYYNLKNDGRQVEKRRNSGPVVEKLKQMQEFFGLKVTGKPDAETLKVMKQPRCGVPDVAQFVLTEGNPRWEQTHLTYRIENYTPDLPRADVDHAIEKAFQLWSNVTPLTFTKVSEGQADIMISFVRGDHRDNSPFDGPGGNLAHAFQPGPGIGGDAHFDEDERWTNNFREYNLHRVAAHELGHSLGLSHSTDIGALMYPSYTFSGDVQLAQDGIDGIQAIYGRSQNPVQPIGPQTPKACDSKLTFDAITTIRGEVMFFKDRFYMRTNPFYPEVELNFISVFWPQLPNGLEAAYEFADRDEVRFFKGNKYWAVQGQNVLHGYPKDIYSSFGFPRTVKHIDAALSEENTGKTYFFVANKYWRYDEYKRSMDPGYPKMIAHDFPGIGHKVDAVFMKDGFFYFFHGTRQYKFDPKTKRILTLQKANSWFNCRKN

SEQ ID NO: 451 - protein, 450 aa, Artificial Sequence
  MMP-1 variant D233F
FPATLETQEQDVDLVQKYLEKYYNLKNDGRQVEKRRNSGPVVEKLKQMQEFFGLKVTGKPDAETLKVMKQPRCGVPDVAQFVLTEGNPRWEQTHLTYRIENYTPDLPRADVDHAIEKAFQLWSNVTPLTFTKVSEGQADIMISFVRGDHRDNSPFDGPGGNLAHAFQPGPGIGGDAHFDEDERWTNNFREYNLHRVAAHELGHSLGLSHSTDIGALMYPSYTFSGDVQLAQDFIDGIQAIYGRSQNPVQPIGPQTPKACDSKLTFDAITTIRGEVMFFKDRFYMRTNPFYPEVELNFISVFWPQLPNGLEAAYEFADRDEVRFFKGNKYWAVQGQNVLHGYPKDIYSSFGFPRTVKHIDAALSEENTGKTYFFVANKYWRYDEYKRSMDPGYPKMIAHDFPGIGHKVDAVFMKDGFFYFFHGTRQYKFDPKTKRILTLQKANSWFNCRKN

SEQ ID NO: 452 - protein, 450 aa, Artificial Sequence
  MMP-1 variant D233M
FPATLETQEQDVDLVQKYLEKYYNLKNDGRQVEKRRNSGPVVEKLKQMQEFFGLKVTGKPDAETLKVMKQPRCGVPDVAQFVLTEGNPRWEQTHLTYRIENYTPDLPRADVDHAIEKAFQLWSNVTPLTFTKVSEGQADIMISFVRGDHRDNSPFDGPGGNLAHAFQPGPGIGGDAHFDEDERWTNNFREYNLHRVAAHELGHSLGLSHSTDIGALMYPSYTFSGDVQLAQDMIDGIQAIYGRSQNPVQPIGPQTPKACDSKLTFDAITTIRGEVMFFKDRFYMRTNPFYPEVELNFISVFWPQLPNGLEAAYEFADRDEVRFFKGNKYWAVQGQNVLHGYPKDIYSSFGFPRTVKHIDAALSEENTGKTYFFVANKYWRYDEYKRSMDPGYPKMIAHDFPGIGHKVDAVFMKDGFFYFFHGTRQYKFDPKTKRILTLQKANSWFNCRKN

SEQ ID NO: 453 - protein, 450 aa, Artificial Sequence
  MMP-1 variant D233W
FPATLETQEQDVDLVQKYLEKYYNLKNDGRQVEKRRNSGPVVEKLKQMQEFFGLKVTGKPDAETLKVMKQPRCGVPDVAQFVLTEGNPRWEQTHLTYRIENYTPDLPRADVDHAIEKAFQLWSNVTPLTFTKVSEGQADIMISFVRGDHRDNSPFDGPGGNLAHAFQPGPGIGGDAHFDEDERWTNNFREYNLHRVAAHELGHSLGLSHSTDIGALMYPSYTFSGDVQLAQDWIDGIQAIYGRSQNPVQPIGPQTPKACDSKLTFDAITTIRGEVMFFKDRFYMRTNPFYPEVELNFISVFWPQLPNGLEAAYEFADRDEVRFFKGNKYWAVQGQNVLHGYPKDIYSSFGFPRTVKHIDAALSEENTGKTYFFVANKYWRYDEYKRSMDPGYPKMIAHDFPGIGHKVDAVFMKDGFFYFFHGTRQYKFDPKTKRILTLQKANSWFNCRKN

SEQ ID NO: 454 - protein, 450 aa, Artificial Sequence
  MMP-1 variant D233I
FPATLETQEQDVDLVQKYLEKYYNLKNDGRQVEKRRNSGPVVEKLKQMQEFFGLKVTGKPDAETLKVMKQPRCGVPDVAQFVLTEGNPRWEQTHLTYRIENYTPDLPRADVDHAIEKAFQLWSNVTPLTFTKVSEGQADIMISFVRGDHRDNSPFDGPGGNLAHAFQPGPGIGGDAHFDEDERWTNNFREYNLHRVAAHELGHSLGLSHSTDIGALMYPSYTFSGDVQLAQDIIDGIQAIYGRSQNPVQPIGPQTPKACDSKLTFDAITTIRGEVMFFKDRFYMRTNPFYPEVELNFISVFWPQLPNGLEAAYEFADRDEVRFFKGNKYWAVQGQNVLHGYPKDIYSSFGFPRTVKHIDAALSEENTGKTYFFVANKYWRYDEYKRSMDPGYPKMIAHDFPGIGHKVDAVFMKDGFFYFFHGTRQYKFDPKTKRILTLQKANSWFNCRKN

SEQ ID NO: 455 - protein, 450 aa, Artificial Sequence
  MMP-1 variant D233V
FPATLETQEQDVDLVQKYLEKYYNLKNDGRQVEKRRNSGPVVEKLKQMQEFFGLKVTGKPDAETLKVMKQPRCGVPDVAQFVLTEGNPRWEQTHLTYRIENYTPDLPRADVDHAIEKAFQLWSNVTPLTFTKVSEGQADIMISFVRGDHRDNSPFDGPGGNLAHAFQPGPGIGGDAHFDEDERWTNNFREYNLHRVAAHELGHSLGLSHSTDIGALMYPSYTFSGDVQLAQDVIDGIQAIYGRSQNPVQPIGPQTPKACDSKLTFDAITTIRGEVMFFKDRFYMRTNPFYPEVELNFISVFWPQLPNGLEAAYEFADRDEVRFFKGNKYWAVQGQNVLHGYPKDIYSSFGFPRTVKHIDAALSEENTGKTYFFVANKYWRYDEYKRSMDPGYPKMIAHDFPGIGHKVDAVFMKDGFFYFFHGTRQYKFDPKTKRILTLQKANSWFNCRKN

SEQ ID NO: 456 - protein, 450 aa, Artificial Sequence
  MMP-1 variant D233L
FPATLETQEQDVDLVQKYLEKYYNLKNDGRQVEKRRNSGPVVEKLKQMQEFFGLKVTGKPDAETLKVMKQPRCGVPDVAQFVLTEGNPRWEQTHLTYRIENYTPDLPRADVDHAIEKAFQLWSNVTPLTFTKVSEGQADIMISFVRGDHRDNSPFDGPGGNLAHAFQPGPGIGGDAHFDEDERWTNNFREYNLHRVAAHELGHSLGLSHSTDIGALMYPSYTFSGDVQLAQDLIDGIQAIYGRSQNPVQPIGPQTPKACDSKLTFDAITTIRGEVMFFKDRFYMRTNPFYPEVELNFISVFWPQLPNGLEAAYEFADRDEVRFFKGNKYWAVQGQNVLHGYPKDIYSSFGFPRTVKHIDAALSEENTGKTYFFVANKYWRYDEYKRSMDPGYPKMIAHDFPGIGHKVDAVFMKDGFFYFFHGTRQYKFDPKTKRILTLQKANSWFNCRKN

SEQ ID NO: 457 - protein, 450 aa, Artificial Sequence
  MMP-1 variant D233A
FPATLETQEQDVDLVQKYLEKYYNLKNDGRQVEKRRNSGPVVEKLKQMQEFFGLKVTGKPDAETLKVMKQPRCGVPDVAQFVLTEGNPRWEQTHLTYRIENYTPDLPRADVDHAIEKAFQLWSNVTPLTFTKVSEGQADIMISFVRGDHRDNSPFDGPGGNLAHAFQPGPGIGGDAHFDEDERWTNNFREYNLHRVAAHELGHSLGLSHSTDIGALMYPSYTFSGDVQLAQDAIDGIQAIYGRSQNPVQPIGPQTPKACDSKLTFDAITTIRGEVMFFKDRFYMRTNPFYPEVELNFISVFWPQLPNGLEAAYEFADRDEVRFFKGNKYWAVQGQNVLHGYPKDIYSSFGFPRTVKHIDAALSEENTGKTYFFVANKYWRYDEYKRSMDPGYPKMIAHDFPGIGHKVDAVFMKDGFFYFFHGTRQYKFDPKTKRILTLQKANSWFNCRKN

SEQ ID NO: 458 - protein, 450 aa, Artificial Sequence
  MMP-1 variant D233P
FPATLETQEQDVDLVQKYLEKYYNLKNDGRQVEKRRNSGPVVEKLKQMQEFFGLKVTGKPDAETLKVMKQPRCGVPDVAQFVLTEGNPRWEQTHLTYRIENYTPDLPRADVDHAIEKAFQLWSNVTPLTFTKVSEGQADIMISFVRGDHRDNSPFDGPGGNLAHAFQPGPGIGGDAHFDEDERWTNNFREYNLHRVAAHELGHSLGLSHSTDIGALMYPSYTFSGDVQLAQDPIDGIQAIYGRSQNPVQPIGPQTPKACDSKLTFDAITTIRGEVMFFKDRFYMRTNPFYPEVELNFISVFWPQLPNGLEAAYEFADRDEVRFFKGNKYWAVQGQNVLHGYPKDIYSSFGFPRTVKHIDAALSEENTGKTYFFVANKYWRYDEYKRSMDPGYPKMIAHDFPGIGHKVDAVFMKDGFFYFFHGTRQYKFDPKTKRILTLQKANSWFNCRKN

SEQ ID NO: 459 - protein, 450 aa, Artificial Sequence
  MMP-1 variant I234D
FPATLETQEQDVDLVQKYLEKYYNLKNDGRQVEKRRNSGPVVEKLKQMQEFFGLKVTGKPDAETLKVMKQPRCGVPDVAQFVLTEGNPRWEQTHLTYRIENYTPDLPRADVDHAIEKAFQLWSNVTPLTFTKVSEGQADIMISFVRGDHRDNSPFDGPGGNLAHAFQPGPGIGGDAHFDEDERWTNNFREYNLHRVAAHELGHSLGLSHSTDIGALMYPSYTFSGDVQLAQDDDDGIQAIYGRSQNPVQPIGPQTPKACDSKLTFDAITTIRGEVMFFKDRFYMRTNPFYPEVELNFISVFWPQLPNGLEAAYEFADRDEVRFFKGNKYWAVQGQNVLHGYPKDIYSSFGFPRTVKHIDAALSEENTGKTYFFVANKYWRYDEYKRSMDPGYPKMIAHDFPGIGHKVDAVFMKDGFFYFFHGTRQYKFDPKTKRILTLQKANSWFNCRKN

SEQ ID NO: 460 - protein, 450 aa, Artificial Sequence
  MMP-1 variant I234E
FPATLETQEQDVDLVQKYLEKYYNLKNDGRQVEKRRNSGPVVEKLKQMQEFFGLKVTGKPDAETLKVMKQPRCGVPDVAQFVLTEGNPRWEQTHLTYRIENYTPDLPRADVDHAIEKAFQLWSNVTPLTFTKVSEGQADIMISFVRGDHRDNSPFDGPGGNLAHAFQPGPGIGGDAHFDEDERWTNNFREYNLHRVAAHELGHSLGLSHSTDIGALMYPSYTFSGDVQLAQDDEDGIQAIYGRSQNPVQPIGPQTPKACDSKLTFDAITTIRGEVMFFKDRFYMRTNPFYPEVELNFISVFWPQLPNGLEAAYEFADRDEVRFFKGNKYWAVQGQNVLHGYPKDIYSSFGFPRTVKHIDAALSEENTGKTYFFVANKYWRYDEYKRSMDPGYPKMIAHDFPGIGHKVDAVFMKDGFFYFFHGTRQYKFDPKTKRILTLQKANSWFNCRKN

SEQ ID NO: 461 - protein, 450 aa, Artificial Sequence
  MMP-1 variant I234H
FPATLETQEQDVDLVQKYLEKYYNLKNDGRQVEKRRNSGPVVEKLKQMQEFFGLKVTGKPDAETLKVMKQPRCGVPDVAQFVLTEGNPRWEQTHLTYRIENYTPDLPRADVDHAIEKAFQLWSNVTPLTFTKVSEGQADIMISFVRGDHRDNSPFDGPGGNLAHAFQPGPGIGGDAHFDEDERWTNNFREYNLHRVAAHELGHSLGLSHSTDIGALMYPSYTFSGDVQLAQDDHDGIQAIYGRSQNPVQPIGPQTPKACDSKLTFDAITTIRGEVMFFKDRFYMRTNPFYPEVELNFISVFWPQLPNGLEAAYEFADRDEVRFFKGNKYWAVQGQNVLHGYPKDIYSSFGFPRTVKHIDAALSEENTGKTYFFVANKYWRYDEYKRSMDPGYPKMIAHDFPGIGHKVDAVFMKDGFFYFFHGTRQYKFDPKTKRILTLQKANSWFNCRKN

SEQ ID NO: 462 - protein, 450 aa, Artificial Sequence
  MMP-1 variant I234K
FPATLETQEQDVDLVQKYLEKYYNLKNDGRQVEKRRNSGPVVEKLKQMQEFFGLKVTGKPDAETLKVMKQPRCGVPDVAQFVLTEGNPRWEQTHLTYRIENYTPDLPRADVDHAIEKAFQLWSNVTPLTFTKVSEGQADIMISFVRGDHRDNSPFDGPGGNLAHAFQPGPGIGGDAHFDEDERWTNNFREYNLHRVAAHELGHSLGLSHSTDIGALMYPSYTFSGDVQLAQDDKDGIQAIYGRSQNPVQPIGPQTPKACDSKLTFDAITTIRGEVMFFKDRFYMRTNPFYPEVELNFISVFWPQLPNGLEAAYEFADRDEVRFFKGNKYWAVQGQNVLHGYPKDIYSSFGFPRTVKHIDAALSEENTGKTYFFVANKYWRYDEYKRSMDPGYPKMIAHDFPGIGHKVDAVFMKDGFFYFFHGTRQYKFDPKTKRILTLQKANSWFNCRKN

SEQ ID NO: 463 - protein, 450 aa, Artificial Sequence
  MMP-1 variant I234R
FPATLETQEQDVDLVQKYLEKYYNLKNDGRQVEKRRNSGPVVEKLKQMQEFFGLKVTGKPDAETLKVMKQPRCGVPDVAQFVLTEGNPRWEQTHLTYRIENYTPDLPRADVDHAIEKAFQLWSNVTPLTFTKVSEGQADIMISFVRGDHRDNSPFDGPGGNLAHAFQPGPGIGGDAHFDEDERWTNNFREYNLHRVAAHELGHSLGLSHSTDIGALMYPSYTFSGDVQLAQDDRDGIQAIYGRSQNPVQPIGPQTPKACDSKLTFDAITTIRGEVMFFKDRFYMRTNPFYPEVELNFISVFWPQLPNGLEAAYEFADRDEVRFFKGNKYWAVQGQNVLHGYPKDIYSSFGFPRTVKHIDAALSEENTGKTYFFVANKYWRYDEYKRSMDPGYPKMIAHDFPGIGHKVDAVFMKDGFFYFFHGTRQYKFDPKTKRILTLQKANSWFNCRKN

SEQ ID NO: 464 - protein, 450 aa, Artificial Sequence
  MMP-1 variant I234C
FPATLETQEQDVDLVQKYLEKYYNLKNDGRQVEKRRNSGPVVEKLKQMQEFFGLKVTGKPDAETLKVMKQPRCGVPDVAQFVLTEGNPRWEQTHLTYRIENYTPDLPRADVDHAIEKAFQLWSNVTPLTFTKVSEGQADIMISFVRGDHRDNSPFDGPGGNLAHAFQPGPGIGGDAHFDEDERWTNNFREYNLHRVAAHELGHSLGLSHSTDIGALMYPSYTFSGDVQLAQDDCDGIQAIYGRSQNPVQPIGPQTPKACDSKLTFDAITTIRGEVMFFKDRFYMRTNPFYPEVELNFISVFWPQLPNGLEAAYEFADRDEVRFFKGNKYWAVQGQNVLHGYPKDIYSSFGFPRTVKHIDAALSEENTGKTYFFVANKYWRYDEYKRSMDPGYPKMIAHDFPGIGHKVDAVFMKDGFFYFFHGTRQYKFDPKTKRILTLQKANSWFNCRKN

SEQ ID NO: 465 - protein, 450 aa, Artificial Sequence
  MMP-1 variant I234N
FPATLETQEQDVDLVQKYLEKYYNLKNDGRQVEKRRNSGPVVEKLKQMQEFFGLKVTGKPDAETLKVMKQPRCGVPDVAQFVLTEGNPRWEQTHLTYRIENYTPDLPRADVDHAIEKAFQLWSNVTPLTFTKVSEGQADIMISFVRGDHRDNSPFDGPGGNLAHAFQPGPGIGGDAHFDEDERWTNNFREYNLHRVAAHELGHSLGLSHSTDIGALMYPSYTFSGDVQLAQDDNDGIQAIYGRSQNPVQPIGPQTPKACDSKLTFDAITTIRGEVMFFKDRFYMRTNPFYPEVELNFISVFWPQLPNGLEAAYEFADRDEVRFFKGNKYWAVQGQNVLHGYPKDIYSSFGFPRTVKHIDAALSEENTGKTYFFVANKYWRYDEYKRSMDPGYPKMIAHDFPGIGHKVDAVFMKDGFFYFFHGTRQYKFDPKTKRILTLQKANSWFNCRKN

SEQ ID NO: 466 - protein, 450 aa, Artificial Sequence
  MMP-1 variant I234Q
FPATLETQEQDVDLVQKYLEKYYNLKNDGRQVEKRRNSGPVVEKLKQMQEFFGLKVTGKPDAETLKVMKQPRCGVPDVAQFVLTEGNPRWEQTHLTYRIENYTPDLPRADVDHAIEKAFQLWSNVTPLTFTKVSEGQADIMISFVRGDHRDNSPFDGPGGNLAHAFQPGPGIGGDAHFDEDERWTNNFREYNLHRVAAHELGHSLGLSHSTDIGALMYPSYTFSGDVQLAQDDQDGIQAIYGRSQNPVQPIGPQTPKACDSKLTFDAITTIRGEVMFFKDRFYMRTNPFYPEVELNFISVFWPQLPNGLEAAYEFADRDEVRFFKGNKYWAVQGQNVLHGYPKDIYSSFGFPRTVKHIDAALSEENTGKTYFFVANKYWRYDEYKRSMDPGYPKMIAHDFPGIGHKVDAVFMKDGFFYFFHGTRQYKFDPKTKRILTLQKANSWFNCRKN

SEQ ID NO: 467 - protein, 450 aa, Artificial Sequence
  MMP-1 variant I234T
FPATLETQEQDVDLVQKYLEKYYNLKNDGRQVEKRRNSGPVVEKLKQMQEFFGLKVTGKPDAETLKVMKQPRCGVPDVAQFVLTEGNPRWEQTHLTYRIENYTPDLPRADVDHAIEKAFQLWSNVTPLTFTKVSEGQADIMISFVRGDHRDNSPFDGPGGNLAHAFQPGPGIGGDAHFDEDERWTNNFREYNLHRVAAHELGHSLGLSHSTDIGALMYPSYTFSGDVQLAQDDTDGIQAIYGRSQNPVQPIGPQTPKACDSKLTFDAITTIRGEVMFFKDRFYMRTNPFYPEVELNFISVFWPQLPNGLEAAYEFADRDEVRFFKGNKYWAVQGQNVLHGYPKDIYSSFGFPRTVKHIDAALSEENTGKTYFFVANKYWRYDEYKRSMDPGYPKMIAHDFPGIGHKVDAVFMKDGFFYFFHGTRQYKFDPKTKRILTLQKANSWFNCRKN

SEQ ID NO: 468 - protein, 450 aa, Artificial Sequence
  MMP-1 variant I234Y
FPATLETQEQDVDLVQKYLEKYYNLKNDGRQVEKRRNSGPVVEKLKQMQEFFGLKVTGKPDAETLKVMKQPRCGVPDVAQFVLTEGNPRWEQTHLTYRIENYTPDLPRADVDHAIEKAFQLWSNVTPLTFTKVSEGQADIMISFVRGDHRDNSPFDGPGGNLAHAFQPGPGIGGDAHFDEDERWTNNFREYNLHRVAAHELGHSLGLSHSTDIGALMYPSYTFSGDVQLAQDDYDGIQAIYGRSQNPVQPIGPQTPKACDSKLTFDAITTIRGEVMFFKDRFYMRTNPFYPEVELNFISVFWPQLPNGLEAAYEFADRDEVRFFKGNKYWAVQGQNVLHGYPKDIYSSFGFPRTVKHIDAALSEENTGKTYFFVANKYWRYDEYKRSMDPGYPKMIAHDFPGIGHKVDAVFMKDGFFYFFHGTRQYKFDPKTKRILTLQKANSWFNCRKN

SEQ ID NO: 469 - protein, 450 aa, Artificial Sequence
  MMP-1 variant I234S
FPATLETQEQDVDLVQKYLEKYYNLKNDGRQVEKRRNSGPVVEKLKQMQEFFGLKVTGKPDAETLKVMKQPRCGVPDVAQFVLTEGNPRWEQTHLTYRIENYTPDLPRADVDHAIEKAFQLWSNVTPLTFTKVSEGQADIMISFVRGDHRDNSPFDGPGGNLAHAFQPGPGIGGDAHFDEDERWTNNFREYNLHRVAAHELGHSLGLSHSTDIGALMYPSYTFSGDVQLAQDDSDGIQAIYGRSQNPVQPIGPQTPKACDSKLTFDAITTIRGEVMFFKDRFYMRTNPFYPEVELNFISVFWPQLPNGLEAAYEFADRDEVRFFKGNKYWAVQGQNVLHGYPKDIYSSFGFPRTVKHIDAALSEENTGKTYFFVANKYWRYDEYKRSMDPGYPKMIAHDFPGIGHKVDAVFMKDGFFYFFHGTRQYKFDPKTKRILTLQKANSWFNCRKN

SEQ ID NO: 470 - protein, 450 aa, Artificial Sequence
  MMP-1 variant I234G
FPATLETQEQDVDLVQKYLEKYYNLKNDGRQVEKRRNSGPVVEKLKQMQEFFGLKVTGKPDAETLKVMKQPRCGVPDVAQFVLTEGNPRWEQTHLTYRIENYTPDLPRADVDHAIEKAFQLWSNVTPLTFTKVSEGQADIMISFVRGDHRDNSPFDGPGGNLAHAFQPGPGIGGDAHFDEDERWTNNFREYNLHRVAAHELGHSLGLSHSTDIGALMYPSYTFSGDVQLAQDDGDGIQAIYGRSQNPVQPIGPQTPKACDSKLTFDAITTIRGEVMFFKDRFYMRTNPFYPEVELNFISVFWPQLPNGLEAAYEFADRDEVRFFKGNKYWAVQGQNVLHGYPKDIYSSFGFPRTVKHIDAALSEENTGKTYFFVANKYWRYDEYKRSMDPGYPKMIAHDFPGIGHKVDAVFMKDGFFYFFHGTRQYKFDPKTKRILTLQKANSWFNCRKN

SEQ ID NO: 471 - protein, 450 aa, Artificial Sequence
  MMP-1 variant I234F
FPATLETQEQDVDLVQKYLEKYYNLKNDGRQVEKRRNSGPVVEKLKQMQEFFGLKVTGKPDAETLKVMKQPRCGVPDVAQFVLTEGNPRWEQTHLTYRIENYTPDLPRADVDHAIEKAFQLWSNVTPLTFTKVSEGQADIMISFVRGDHRDNSPFDGPGGNLAHAFQPGPGIGGDAHFDEDERWTNNFREYNLHRVAAHELGHSLGLSHSTDIGALMYPSYTFSGDVQLAQDDFDGIQAIYGRSQNPVQPIGPQTPKACDSKLTFDAITTIRGEVMFFKDRFYMRTNPFYPEVELNFISVFWPQLPNGLEAAYEFADRDEVRFFKGNKYWAVQGQNVLHGYPKDIYSSFGFPRTVKHIDAALSEENTGKTYFFVANKYWRYDEYKRSMDPGYPKMIAHDFPGIGHKVDAVFMKDGFFYFFHGTRQYKFDPKTKRILTLQKANSWFNCRKN

SEQ ID NO: 472 - protein, 450 aa, Artificial Sequence
  MMP-1 variant I234M
FPATLETQEQDVDLVQKYLEKYYNLKNDGRQVEKRRNSGPVVEKLKQMQEFFGLKVTGKPDAETLKVMKQPRCGVPDVAQFVLTEGNPRWEQTHLTYRIENYTPDLPRADVDHAIEKAFQLWSNVTPLTFTKVSEGQADIMISFVRGDHRDNSPFDGPGGNLAHAFQPGPGIGGDAHFDEDERWTNNFREYNLHRVAAHELGHSLGLSHSTDIGALMYPSYTFSGDVQLAQDDMDGIQAIYGRSQNPVQPIGPQTPKACDSKLTFDAITTIRGEVMFFKDRFYMRTNPFYPEVELNFISVFWPQLPNGLEAAYEFADRDEVRFFKGNKYWAVQGQNVLHGYPKDIYSSFGFPRTVKHIDAALSEENTGKTYFFVANKYWRYDEYKRSMDPGYPKMIAHDFPGIGHKVDAVFMKDGFFYFFHGTRQYKFDPKTKRILTLQKANSWFNCRKN

SEQ ID NO: 473 - protein, 450 aa, Artificial Sequence
  MMP-1 variant I234W
FPATLETQEQDVDLVQKYLEKYYNLKNDGRQVEKRRNSGPVVEKLKQMQEFFGLKVTGKPDAETLKVMKQPRCGVPDVAQFVLTEGNPRWEQTHLTYRIENYTPDLPRADVDHAIEKAFQLWSNVTPLTFTKVSEGQADIMISFVRGDHRDNSPFDGPGGNLAHAFQPGPGIGGDAHFDEDERWTNNFREYNLHRVAAHELGHSLGLSHSTDIGALMYPSYTFSGDVQLAQDDWDGIQAIYGRSQNPVQPIGPQTPKACDSKLTFDAITTIRGEVMFFKDRFYMRTNPFYPEVELNFISVFWPQLPNGLEAAYEFADRDEVRFFKGNKYWAVQGQNVLHGYPKDIYSSFGFPRTVKHIDAALSEENTGKTYFFVANKYWRYDEYKRSMDPGYPKMIAHDFPGIGHKVDAVFMKDGFFYFFHGTRQYKFDPKTKRILTLQKANSWFNCRKN

SEQ ID NO: 474 - protein, 450 aa, Artificial Sequence
  MMP-1 variant I234V
FPATLETQEQDVDLVQKYLEKYYNLKNDGRQVEKRRNSGPVVEKLKQMQEFFGLKVTGKPDAETLKVMKQPRCGVPDVAQFVLTEGNPRWEQTHLTYRIENYTPDLPRADVDHAIEKAFQLWSNVTPLTFTKVSEGQADIMISFVRGDHRDNSPFDGPGGNLAHAFQPGPGIGGDAHFDEDERWTNNFREYNLHRVAAHELGHSLGLSHSTDIGALMYPSYTFSGDVQLAQDDVDGIQAIYGRSQNPVQPIGPQTPKACDSKLTFDAITTIRGEVMFFKDRFYMRTNPFYPEVELNFISVFWPQLPNGLEAAYEFADRDEVRFFKGNKYWAVQGQNVLHGYPKDIYSSFGFPRTVKHIDAALSEENTGKTYFFVANKYWRYDEYKRSMDPGYPKMIAHDFPGIGHKVDAVFMKDGFFYFFHGTRQYKFDPKTKRILTLQKANSWFNCRKN

SEQ ID NO: 475 - protein, 450 aa, Artificial Sequence
  MMP-1 variant I234L
FPATLETQEQDVDLVQKYLEKYYNLKNDGRQVEKRRNSGPVVEKLKQMQEFFGLKVTGKPDAETLKVMKQPRCGVPDVAQFVLTEGNPRWEQTHLTYRIENYTPDLPRADVDHAIEKAFQLWSNVTPLTFTKVSEGQADIMISFVRGDHRDNSPFDGPGGNLAHAFQPGPGIGGDAHFDEDERWTNNFREYNLHRVAAHELGHSLGLSHSTDIGALMYPSYTFSGDVQLAQDDLDGIQAIYGRSQNPVQPIGPQTPKACDSKLTFDAITTIRGEVMFFKDRFYMRTNPFYPEVELNFISVFWPQLPNGLEAAYEFADRDEVRFFKGNKYWAVQGQNVLHGYPKDIYSSFGFPRTVKHIDAALSEENTGKTYFFVANKYWRYDEYKRSMDPGYPKMIAHDFPGIGHKVDAVFMKDGFFYFFHGTRQYKFDPKTKRILTLQKANSWFNCRKN

SEQ ID NO: 476 - protein, 450 aa, Artificial Sequence
  MMP-1 variant I234A
FPATLETQEQDVDLVQKYLEKYYNLKNDGRQVEKRRNSGPVVEKLKQMQEFFGLKVTGKPDAETLKVMKQPRCGVPDVAQFVLTEGNPRWEQTHLTYRIENYTPDLPRADVDHAIEKAFQLWSNVTPLTFTKVSEGQADIMISFVRGDHRDNSPFDGPGGNLAHAFQPGPGIGGDAHFDEDERWTNNFREYNLHRVAAHELGHSLGLSHSTDIGALMYPSYTFSGDVQLAQDDADGIQAIYGRSQNPVQPIGPQTPKACDSKLTFDAITTIRGEVMFFKDRFYMRTNPFYPEVELNFISVFWPQLPNGLEAAYEFADRDEVRFFKGNKYWAVQGQNVLHGYPKDIYSSFGFPRTVKHIDAALSEENTGKTYFFVANKYWRYDEYKRSMDPGYPKMIAHDFPGIGHKVDAVFMKDGFFYFFHGTRQYKFDPKTKRILTLQKANSWFNCRKN

SEQ ID NO: 477 - protein, 450 aa, Artificial Sequence
  MMP-1 variant I234P
FPATLETQEQDVDLVQKYLEKYYNLKNDGRQVEKRRNSGPVVEKLKQMQEFFGLKVTGKPDAETLKVMKQPRCGVPDVAQFVLTEGNPRWEQTHLTYRIENYTPDLPRADVDHAIEKAFQLWSNVTPLTFTKVSEGQADIMISFVRGDHRDNSPFDGPGGNLAHAFQPGPGIGGDAHFDEDERWTNNFREYNLHRVAAHELGHSLGLSHSTDIGALMYPSYTFSGDVQLAQDDPDGIQAIYGRSQNPVQPIGPQTPKACDSKLTFDAITTIRGEVMFFKDRFYMRTNPFYPEVELNFISVFWPQLPNGLEAAYEFADRDEVRFFKGNKYWAVQGQNVLHGYPKDIYSSFGFPRTVKHIDAALSEENTGKTYFFVANKYWRYDEYKRSMDPGYPKMIAHDFPGIGHKVDAVFMKDGFFYFFHGTRQYKFDPKTKRILTLQKANSWFNCRKN

SEQ ID NO: 478 - protein, 450 aa, Artificial Sequence
  MMP-1 variant I240D
FPATLETQEQDVDLVQKYLEKYYNLKNDGRQVEKRRNSGPVVEKLKQMQEFFGLKVTGKPDAETLKVMKQPRCGVPDVAQFVLTEGNPRWEQTHLTYRIENYTPDLPRADVDHAIEKAFQLWSNVTPLTFTKVSEGQADIMISFVRGDHRDNSPFDGPGGNLAHAFQPGPGIGGDAHFDEDERWTNNFREYNLHRVAAHELGHSLGLSHSTDIGALMYPSYTFSGDVQLAQDDIDGIQADYGRSQNPVQPIGPQTPKACDSKLTFDAITTIRGEVMFFKDRFYMRTNPFYPEVELNFISVFWPQLPNGLEAAYEFADRDEVRFFKGNKYWAVQGQNVLHGYPKDIYSSFGFPRTVKHIDAALSEENTGKTYFFVANKYWRYDEYKRSMDPGYPKMIAHDFPGIGHKVDAVFMKDGFFYFFHGTRQYKFDPKTKRILTLQKANSWFNCRKN

SEQ ID NO: 479 - protein, 450 aa, Artificial Sequence
  MMP-1 variant I240E
FPATLETQEQDVDLVQKYLEKYYNLKNDGRQVEKRRNSGPVVEKLKQMQEFFGLKVTGKPDAETLKVMKQPRCGVPDVAQFVLTEGNPRWEQTHLTYRIENYTPDLPRADVDHAIEKAFQLWSNVTPLTFTKVSEGQADIMISFVRGDHRDNSPFDGPGGNLAHAFQPGPGIGGDAHFDEDERWTNNFREYNLHRVAAHELGHSLGLSHSTDIGALMYPSYTFSGDVQLAQDDIDGIQAEYGRSQNPVQPIGPQTPKACDSKLTFDAITTIRGEVMFFKDRFYMRTNPFYPEVELNFISVFWPQLPNGLEAAYEFADRDEVRFFKGNKYWAVQGQNVLHGYPKDIYSSFGFPRTVKHIDAALSEENTGKTYFFVANKYWRYDEYKRSMDPGYPKMIAHDFPGIGHKVDAVFMKDGFFYFFHGTRQYKFDPKTKRILTLQKANSWFNCRKN

SEQ ID NO: 480 - protein, 450 aa, Artificial Sequence
  MMP-1 variant I240H
FPATLETQEQDVDLVQKYLEKYYNLKNDGRQVEKRRNSGPVVEKLKQMQEFFGLKVTGKPDAETLKVMKQPRCGVPDVAQFVLTEGNPRWEQTHLTYRIENYTPDLPRADVDHAIEKAFQLWSNVTPLTFTKVSEGQADIMISFVRGDHRDNSPFDGPGGNLAHAFQPGPGIGGDAHFDEDERWTNNFREYNLHRVAAHELGHSLGLSHSTDIGALMYPSYTFSGDVQLAQDDIDGIQAHYGRSQNPVQPIGPQTPKACDSKLTFDAITTIRGEVMFFKDRFYMRTNPFYPEVELNFISVFWPQLPNGLEAAYEFADRDEVRFFKGNKYWAVQGQNVLHGYPKDIYSSFGFPRTVKHIDAALSEENTGKTYFFVANKYWRYDEYKRSMDPGYPKMIAHDFPGIGHKVDAVFMKDGFFYFFHGTRQYKFDPKTKRILTLQKANSWFNCRKN

SEQ ID NO: 481 - protein, 450 aa, Artificial Sequence
  MMP-1 variant I240K
FPATLETQEQDVDLVQKYLEKYYNLKNDGRQVEKRRNSGPVVEKLKQMQEFFGLKVTGKPDAETLKVMKQPRCGVPDVAQFVLTEGNPRWEQTHLTYRIENYTPDLPRADVDHAIEKAFQLWSNVTPLTFTKVSEGQADIMISFVRGDHRDNSPFDGPGGNLAHAFQPGPGIGGDAHFDEDERWTNNFREYNLHRVAAHELGHSLGLSHSTDIGALMYPSYTFSGDVQLAQDDIDGIQAKYGRSQNPVQPIGPQTPKACDSKLTFDAITTIRGEVMFFKDRFYMRTNPFYPEVELNFISVFWPQLPNGLEAAYEFADRDEVRFFKGNKYWAVQGQNVLHGYPKDIYSSFGFPRTVKHIDAALSEENTGKTYFFVANKYWRYDEYKRSMDPGYPKMIAHDFPGIGHKVDAVFMKDGFFYFFHGTRQYKFDPKTKRILTLQKANSWFNCRKN

SEQ ID NO: 482 - protein, 450 aa, Artificial Sequence
  MMP-1 variant I240R
FPATLETQEQDVDLVQKYLEKYYNLKNDGRQVEKRRNSGPVVEKLKQMQEFFGLKVTGKPDAETLKVMKQPRCGVPDVAQFVLTEGNPRWEQTHLTYRIENYTPDLPRADVDHAIEKAFQLWSNVTPLTFTKVSEGQADIMISFVRGDHRDNSPFDGPGGNLAHAFQPGPGIGGDAHFDEDERWTNNFREYNLHRVAAHELGHSLGLSHSTDIGALMYPSYTFSGDVQLAQDDIDGIQARYGRSQNPVQPIGPQTPKACDSKLTFDAITTIRGEVMFFKDRFYMRTNPFYPEVELNFISVFWPQLPNGLEAAYEFADRDEVRFFKGNKYWAVQGQNVLHGYPKDIYSSFGFPRTVKHIDAALSEENTGKTYFFVANKYWRYDEYKRSMDPGYPKMIAHDFPGIGHKVDAVFMKDGFFYFFHGTRQYKFDPKTKRILTLQKANSWFNCRKN

SEQ ID NO: 483 - protein, 450 aa, Artificial Sequence
  MMP-1 variant I240C
FPATLETQEQDVDLVQKYLEKYYNLKNDGRQVEKRRNSGPVVEKLKQMQEFFGLKVTGKPDAETLKVMKQPRCGVPDVAQFVLTEGNPRWEQTHLTYRIENYTPDLPRADVDHAIEKAFQLWSNVTPLTFTKVSEGQADIMISFVRGDHRDNSPFDGPGGNLAHAFQPGPGIGGDAHFDEDERWTNNFREYNLHRVAAHELGHSLGLSHSTDIGALMYPSYTFSGDVQLAQDDIDGIQACYGRSQNPVQPIGPQTPKACDSKLTFDAITTIRGEVMFFKDRFYMRTNPFYPEVELNFISVFWPQLPNGLEAAYEFADRDEVRFFKGNKYWAVQGQNVLHGYPKDIYSSFGFPRTVKHIDAALSEENTGKTYFFVANKYWRYDEYKRSMDPGYPKMIAHDFPGIGHKVDAVFMKDGFFYFFHGTRQYKFDPKTKRILTLQKANSWFNCRKN

SEQ ID NO: 484 - protein, 450 aa, Artificial Sequence
  MMP-1 variant I240N
FPATLETQEQDVDLVQKYLEKYYNLKNDGRQVEKRRNSGPVVEKLKQMQEFFGLKVTGKPDAETLKVMKQPRCGVPDVAQFVLTEGNPRWEQTHLTYRIENYTPDLPRADVDHAIEKAFQLWSNVTPLTFTKVSEGQADIMISFVRGDHRDNSPFDGPGGNLAHAFQPGPGIGGDAHFDEDERWTNNFREYNLHRVAAHELGHSLGLSHSTDIGALMYPSYTFSGDVQLAQDDIDGIQAQYGRSQNPVQPIGPQTPKACDSKLTFDAITTIRGEVMFFKDRFYMRTNPFYPEVELNFISVFWPQLPNGLEAAYEFADRDEVRFFKGNKYWAVQGQNVLHGYPKDIYSSFGFPRTVKHIDAALSEENTGKTYFFVANKYWRYDEYKRSMDPGYPKMIAHDFPGIGHKVDAVFMKDGFFYFFHGTRQYKFDPKTKRILTLQKANSWFNCRKN

SEQ ID NO: 485 - protein, 450 aa, Artificial Sequence; identical to SEQ ID NO: 484
  MMP-1 variant I240Q

SEQ ID NO: 486 - protein, 450 aa, Artificial Sequence
  MMP-1 variant I240T
FPATLETQEQDVDLVQKYLEKYYNLKNDGRQVEKRRNSGPVVEKLKQMQEFFGLKVTGKPDAETLKVMKQPRCGVPDVAQFVLTEGNPRWEQTHLTYRIENYTPDLPRADVDHAIEKAFQLWSNVTPLTFTKVSEGQADIMISFVRGDHRDNSPFDGPGGNLAHAFQPGPGIGGDAHFDEDERWTNNFREYNLHRVAAHELGHSLGLSHSTDIGALMYPSYTFSGDVQLAQDDIDGIQATYGRSQNPVQPIGPQTPKACDSKLTFDAITTIRGEVMFFKDRFYMRTNPFYPEVELNFISVFWPQLPNGLEAAYEFADRDEVRFFKGNKYWAVQGQNVLHGYPKDIYSSFGFPRTVKHIDAALSEENTGKTYFFVANKYWRYDEYKRSMDPGYPKMIAHDFPGIGHKVDAVFMKDGFFYFFHGTRQYKFDPKTKRILTLQKANSWFNCRKN

SEQ ID NO: 487 - protein, 450 aa, Artificial Sequence
  MMP-1 variant I240Y
FPATLETQEQDVDLVQKYLEKYYNLKNDGRQVEKRRNSGPVVEKLKQMQEFFGLKVTGKPDAETLKVMKQPRCGVPDVAQFVLTEGNPRWEQTHLTYRIENYTPDLPRADVDHAIEKAFQLWSNVTPLTFTKVSEGQADIMISFVRGDHRDNSPFDGPGGNLAHAFQPGPGIGGDAHFDEDERWTNNFREYNLHRVAAHELGHSLGLSHSTDIGALMYPSYTFSGDVQLAQDDIDGIQAYYGRSQNPVQPIGPQTPKACDSKLTFDAITTIRGEVMFFKDRFYMRTNPFYPEVELNFISVFWPQLPNGLEAAYEFADRDEVRFFKGNKYWAVQGQNVLHGYPKDIYSSFGFPRTVKHIDAALSEENTGKTYFFVANKYWRYDEYKRSMDPGYPKMIAHDFPGIGHKVDAVFMKDGFFYFFHGTRQYKFDPKTKRILTLQKANSWFNCRKN

SEQ ID NO: 488 - protein, 450 aa, Artificial Sequence
  MMP-1 variant I240S
FPATLETQEQDVDLVQKYLEKYYNLKNDGRQVEKRRNSGPVVEKLKQMQEFFGLKVTGKPDAETLKVMKQPRCGVPDVAQFVLTEGNPRWEQTHLTYRIENYTPDLPRADVDHAIEKAFQLWSNVTPLTFTKVSEGQADIMISFVRGDHRDNSPFDGPGGNLAHAFQPGPGIGGDAHFDEDERWTNNFREYNLHRVAAHELGHSLGLSHSTDIGALMYPSYTFSGDVQLAQDDIDGIQASYGRSQNPVQPIGPQTPKACDSKLTFDAITTIRGEVMFFKDRFYMRTNPFYPEVELNFISVFWPQLPNGLEAAYEFADRDEVRFFKGNKYWAVQGQNVLHGYPKDIYSSFGFPRTVKHIDAALSEENTGKTYFFVANKYWRYDEYKRSMDPGYPKMIAHDFPGIGHKVDAVFMKDGFFYFFHGTRQYKFDPKTKRILTLQKANSWFNCRKN

SEQ ID NO: 489 - protein, 450 aa, Artificial Sequence
  MMP-1 variant I240G
FPATLETQEQDVDLVQKYLEKYYNLKNDGRQVEKRRNSGPVVEKLKQMQEFFGLKVTGKPDAETLKVMKQPRCGVPDVAQFVLTEGNPRWEQTHLTYRIENYTPDLPRADVDHAIEKAFQLWSNVTPLTFTKVSEGQADIMISFVRGDHRDNSPFDGPGGNLAHAFQPGPGIGGDAHFDEDERWTNNFREYNLHRVAAHELGHSLGLSHSTDIGALMYPSYTFSGDVQLAQDDIDGIQAGYGRSQNPVQPIGPQTPKACDSKLTFDAITTIRGEVMFFKDRFYMRTNPFYPEVELNFISVFWPQLPNGLEAAYEFADRDEVRFFKGNKYWAVQGQNVLHGYPKDIYSSFGFPRTVKHIDAALSEENTGKTYFFVANKYWRYDEYKRSMDPGYPKMIAHDFPGIGHKVDAVFMKDGFFYFFHGTRQYKFDPKTKRILTLQKANSWFNCRKN

SEQ ID NO: 490 - protein, 450 aa, Artificial Sequence
  MMP-1 variant I240F
FPATLETQEQDVDLVQKYLEKYYNLKNDGRQVEKRRNSGPVVEKLKQMQEFFGLKVTGKPDAETLKVMKQPRCGVPDVAQFVLTEGNPRWEQTHLTYRIENYTPDLPRADVDHAIEKAFQLWSNVTPLTFTKVSEGQADIMISFVRGDHRDNSPFDGPGGNLAHAFQPGPGIGGDAHFDEDERWTNNFREYNLHRVAAHELGHSLGLSHSTDIGALMYPSYTFSGDVQLAQDDIDGIQAFYGRSQNPVQPIGPQTPKACDSKLTFDAITTIRGEVMFFKDRFYMRTNPFYPEVELNFISVFWPQLPNGLEAAYEFADRDEVRFFKGNKYWAVQGQNVLHGYPKDIYSSFGFPRTVKHIDAALSEENTGKTYFFVANKYWRYDEYKRSMDPGYPKMIAHDFPGIGHKVDAVFMKDGFFYFFHGTRQYKFDPKTKRILTLQKANSWFNCRKN

SEQ ID NO: 491 - protein, 450 aa, Artificial Sequence
  MMP-1 variant I240M
FPATLETQEQDVDLVQKYLEKYYNLKNDGRQVEKRRNSGPVVEKLKQMQEFFGLKVTGKPDAETLKVMKQPRCGVPDVAQFVLTEGNPRWEQTHLTYRIENYTPDLPRADVDHAIEKAFQLWSNVTPLTFTKVSEGQADIMISFVRGDHRDNSPFDGPGGNLAHAFQPGPGIGGDAHFDEDERWTNNFREYNLHRVAAHELGHSLGLSHSTDIGALMYPSYTFSGDVQLAQDDIDGIQAMYGRSQNPVQPIGPQTPKACDSKLTFDAITTIRGEVMFFKDRFYMRTNPFYPEVELNFISVFWPQLPNGLEAAYEFADRDEVRFFKGNKYWAVQGQNVLHGYPKDIYSSFGFPRTVKHIDAALSEENTGKTYFFVANKYWRYDEYKRSMDPGYPKMIAHDFPGIGHKVDAVFMKDGFFYFFHGTRQYKFDPKTKRILTLQKANSWFNCRKN

SEQ ID NO: 492 - protein, 450 aa, Artificial Sequence
  MMP-1 variant I240W
FPATLETQEQDVDLVQKYLEKYYNLKNDGRQVEKRRNSGPVVEKLKQMQEFFGLKVTGKPDAETLKVMKQPRCGVPDVAQFVLTEGNPRWEQTHLTYRIENYTPDLPRADVDHAIEKAFQLWSNVTPLTFTKVSEGQADIMISFVRGDHRDNSPFDGPGGNLAHAFQPGPGIGGDAHFDEDERWTNNFREYNLHRVAAHELGHSLGLSHSTDIGALMYPSYTFSGDVQLAQDDIDGIQAWYGRSQNPVQPIGPQTPKACDSKLTFDAITTIRGEVMFFKDRFYMRTNPFYPEVELNFISVFWPQLPNGLEAAYEFADRDEVRFFKGNKYWAVQGQNVLHGYPKDIYSSFGFPRTVKHIDAALSEENTGKTYFFVANKYWRYDEYKRSMDPGYPKMIAHDFPGIGHKVDAVFMKDGFFYFFHGTRQYKFDPKTKRILTLQKANSWFNCRKN

SEQ ID NO: 493 - protein, 450 aa, Artificial Sequence
  MMP-1 variant I240V
FPATLETQEQDVDLVQKYLEKYYNLKNDGRQVEKRRNSGPVVEKLKQMQEFFGLKVTGKPDAETLKVMKQPRCGVPDVAQFVLTEGNPRWEQTHLTYRIENYTPDLPRADVDHAIEKAFQLWSNVTPLTFTKVSEGQADIMISFVRGDHRDNSPFDGPGGNLAHAFQPGPGIGGDAHFDEDERWTNNFREYNLHRVAAHELGHSLGLSHSTDIGALMYPSYTFSGDVQLAQDDIDGIQAVYGRSQNPVQPIGPQTPKACDSKLTFDAITTIRGEVMFFKDRFYMRTNPFYPEVELNFISVFWPQLPNGLEAAYEFADRDEVRFFKGNKYWAVQGQNVLHGYPKDIYSSFGFPRTVKHIDAALSEENTGKTYFFVANKYWRYDEYKRSMDPGYPKMIAHDFPGIGHKVDAVFMKDGFFYFFHGTRQYKFDPKTKRILTLQKANSWFNCRKN

SEQ ID NO: 494 - protein, 450 aa, Artificial Sequence
  MMP-1 variant I240L
FPATLETQEQDVDLVQKYLEKYYNLKNDGRQVEKRRNSGPVVEKLKQMQEFFGLKVTGKPDAETLKVMKQPRCGVPDVAQFVLTEGNPRWEQTHLTYRIENYTPDLPRADVDHAIEKAFQLWSNVTPLTFTKVSEGQADIMISFVRGDHRDNSPFDGPGGNLAHAFQPGPGIGGDAHFDEDERWTNNFREYNLHRVAAHELGHSLGLSHSTDIGALMYPSYTFSGDVQLAQDDIDGIQALYGRSQNPVQPIGPQTPKACDSKLTFDAITTIRGEVMFFKDRFYMRTNPFYPEVELNFISVFWPQLPNGLEAAYEFADRDEVRFFKGNKYWAVQGQNVLHGYPKDIYSSFGFPRTVKHIDAALSEENTGKTYFFVANKYWRYDEYKRSMDPGYPKMIAHDFPGIGHKVDAVFMKDGFFYFFHGTRQYKFDPKTKRILTLQKANSWFNCRKN

SEQ ID NO: 495 - protein, 450 aa, Artificial Sequence
  MMP-1 variant I240A
FPATLETQEQDVDLVQKYLEKYYNLKNDGRQVEKRRNSGPVVEKLKQMQEFFGLKVTGKPDAETLKVMKQPRCGVPDVAQFVLTEGNPRWEQTHLTYRIENYTPDLPRADVDHAIEKAFQLWSNVTPLTFTKVSEGQADIMISFVRGDHRDNSPFDGPGGNLAHAFQPGPGIGGDAHFDEDERWTNNFREYNLHRVAAHELGHSLGLSHSTDIGALMYPSYTFSGDVQLAQDDIDGIQAAYGRSQNPVQPIGPQTPKACDSKLTFDAITTIRGEVMFFKDRFYMRTNPFYPEVELNFISVFWPQLPNGLEAAYEFADRDEVRFFKGNKYWAVQGQNVLHGYPKDIYSSFGFPRTVKHIDAALSEENTGKTYFFVANKYWRYDEYKRSMDPGYPKMIAHDFPGIGHKVDAVFMKDGFFYFFHGTRQYKFDPKTKRILTLQKANSWFNCRKN

SEQ ID NO: 496 - protein, 450 aa, Artificial Sequence
  MMP-1 variant I240P
FPATLETQEQDVDLVQKYLEKYYNLKNDGRQVEKRRNSGPVVEKLKQMQEFFGLKVTGKPDAETLKVMKQPRCGVPDVAQFVLTEGNPRWEQTHLTYRIENYTPDLPRADVDHAIEKAFQLWSNVTPLTFTKVSEGQADIMISFVRGDHRDNSPFDGPGGNLAHAFQPGPGIGGDAHFDEDERWTNNFREYNLHRVAAHELGHSLGLSHSTDIGALMYPSYTFSGDVQLAQDDIDGIQAPYGRSQNPVQPIGPQTPKACDSKLTFDAITTIRGEVMFFKDRFYMRTNPFYPEVELNFISVFWPQLPNGLEAAYEFADRDEVRFFKGNKYWAVQGQNVLHGYPKDIYSSFGFPRTVKHIDAALSEENTGKTYFFVANKYWRYDEYKRSMDPGYPKMIAHDFPGIGHKVDAVFMKDGFFYFFHGTRQYKFDPKTKRILTLQKANSWFNCRKN

SEQ ID NO: 497 - protein, 450 aa, Artificial Sequence
  MMP-1 variant E100D
FPATLETQEQDVDLVQKYLEKYYNLKNDGRQVEKRRNSGPVVEKLKQMQEFFGLKVTGKPDAETLKVMKQPRCGVPDVAQFVLTEGNPRWEQTHLTYRIDNYTPDLPRADVDHAIEKAFQLWSNVTPLTFTKVSEGQADIMISFVRGDHRDNSPFDGPGGNLAHAFQPGPGIGGDAHFDEDERWTNNFREYNLHRVAAHELGHSLGLSHSTDIGALMYPSYTFSGDVQLAQDDIDGIQAIYGRSQNPVQPIGPQTPKACDSKLTFDAITTIRGEVMFFKDRFYMRTNPFYPEVELNFISVFWPQLPNGLEAAYEFADRDEVRFFKGNKYWAVQGQNVLHGYPKDIYSSFGFPRTVKHIDAALSEENTGKTYFFVANKYWRYDEYKRSMDPGYPKMIAHDFPGIGHKVDAVFMKDGFFYFFHGTRQYKFDPKTKRILTLQKANSWFNCRKN

SEQ ID NO: 498 - protein, 450 aa, Artificial Sequence
  MMP-1 variant E100H
FPATLETQEQDVDLVQKYLEKYYNLKNDGRQVEKRRNSGPVVEKLKQMQEFFGLKVTGKPDAETLKVMKQPRCGVPDVAQFVLTEGNPRWEQTHLTYRIHNYTPDLPRADVDHAIEKAFQLWSNVTPLTFTKVSEGQADIMISFVRGDHRDNSPFDGPGGNLAHAFQPGPGIGGDAHFDEDERWTNNFREYNLHRVAAHELGHSLGLSHSTDIGALMYPSYTFSGDVQLAQDDIDGIQAIYGRSQNPVQPIGPQTPKACDSKLTFDAITTIRGEVMFFKDRFYMRTNPFYPEVELNFISVFWPQLPNGLEAAYEFADRDEVRFFKGNKYWAVQGQNVLHGYPKDIYSSFGFPRTVKHIDAALSEENTGKTYFFVANKYWRYDEYKRSMDPGYPKMIAHDFPGIGHKVDAVFMKDGFFYFFHGTRQYKFDPKTKRILTLQKANSWFNCRKN

SEQ ID NO: 499 - protein, 450 aa, Artificial Sequence
  MMP-1 variant E100K
FPATLETQEQDVDLVQKYLEKYYNLKNDGRQVEKRRNSGPVVEKLKQMQEFFGLKVTGKPDAETLKVMKQPRCGVPDVAQFVLTEGNPRWEQTHLTYRIKNYTPDLPRADVDHAIEKAFQLWSNVTPLTFTKVSEGQADIMISFVRGDHRDNSPFDGPGGNLAHAFQPGPGIGGDAHFDEDERWTNNFREYNLHRVAAHELGHSLGLSHSTDIGALMYPSYTFSGDVQLAQDDIDGIQAIYGRSQNPVQPIGPQTPKACDSKLTFDAITTIRGEVMFFKDRFYMRTNPFYPEVELNFISVFWPQLPNGLEAAYEFADRDEVRFFKGNKYWAVQGQNVLHGYPKDIYSSFGFPRTVKHIDAALSEENTGKTYFFVANKYWRYDEYKRSMDPGYPKMIAHDFPGIGHKVDAVFMKDGFFYFFHGTRQYKFDPKTKRILTLQKANSWFNCRKN

SEQ ID NO: 500 - protein, 450 aa, Artificial Sequence
  MMP-1 variant E100R
FPATLETQEQDVDLVQKYLEKYYNLKNDGRQVEKRRNSGPVVEKLKQMQEFFGLKVTGKPDAETLKVMKQPRCGVPDVAQFVLTEGNPRWEQTHLTYRIRNYTPDLPRADVDHAIEKAFQLWSNVTPLTFTKVSEGQADIMISFVRGDHRDNSPFDGPGGNLAHAFQPGPGIGGDAHFDEDERWTNNFREYNLHRVAAHELGHSLGLSHSTDIGALMYPSYTFSGDVQLAQDDIDGIQAIYGRSQNPVQPIGPQTPKACDSKLTFDAITTIRGEVMFFKDRFYMRTNPFYPEVELNFISVFWPQLPNGLEAAYEFADRDEVRFFKGNKYWAVQGQNVLHGYPKDIYSSFGFPRTVKHIDAALSEENTGKTYFFVANKYWRYDEYKRSMDPGYPKMIAHDFPGIGHKVDAVFMKDGFFYFFHGTRQYKFDPKTKRILTLQKANSWFNCRKN

SEQ ID NO: 501 - protein, 450 aa, Artificial Sequence
  MMP-1 variant E100C
FPATLETQEQDVDLVQKYLEKYYNLKNDGRQVEKRRNSGPVVEKLKQMQEFFGLKVTGKPDAETLKVMKQPRCGVPDVAQFVLTEGNPRWEQTHLTYRICNYTPDLPRADVDHAIEKAFQLWSNVTPLTFTKVSEGQADIMISFVRGDHRDNSPFDGPGGNLAHAFQPGPGIGGDAHFDEDERWTNNFREYNLHRVAAHELGHSLGLSHSTDIGALMYPSYTFSGDVQLAQDDIDGIQAIYGRSQNPVQPIGPQTPKACDSKLTFDAITTIRGEVMFFKDRFYMRTNPFYPEVELNFISVFWPQLPNGLEAAYEFADRDEVRFFKGNKYWAVQGQNVLHGYPKDIYSSFGFPRTVKHIDAALSEENTGKTYFFVANKYWRYDEYKRSMDPGYPKMIAHDFPGIGHKVDAVFMKDGFFYFFHGTRQYKFDPKTKRILTLQKANSWFNCRKN

SEQ ID NO: 502 - protein, 450 aa, Artificial Sequence
  MMP-1 variant E100N
FPATLETQEQDVDLVQKYLEKYYNLKNDGRQVEKRRNSGPVVEKLKQMQEFFGLKVTGKPDAETLKVMKQPRCGVPDVAQFVLTEGNPRWEQTHLTYRINNYTPDLPRADVDHAIEKAFQLWSNVTPLTFTKVSEGQADIMISFVRGDHRDNSPFDGPGGNLAHAFQPGPGIGGDAHFDEDERWTNNFREYNLHRVAAHELGHSLGLSHSTDIGALMYPSYTFSGDVQLAQDDIDGIQAIYGRSQNPVQPIGPQTPKACDSKLTFDAITTIRGEVMFFKDRFYMRTNPFYPEVELNFISVFWPQLPNGLEAAYEFADRDEVRFFKGNKYWAVQGQNVLHGYPKDIYSSFGFPRTVKHIDAALSEENTGKTYFFVANKYWRYDEYKRSMDPGYPKMIAHDFPGIGHKVDAVFMKDGFFYFFHGTRQYKFDPKTKRILTLQKANSWFNCRKN

SEQ ID NO: 503 - protein, 450 aa, Artificial Sequence
  MMP-1 variant E100Q
FPATLETQEQDVDLVQKYLEKYYNLKNDGRQVEKRRNSGPVVEKLKQMQEFFGLKVTGKPDAETLKVMKQPRCGVPDVAQFVLTEGNPRWEQTHLTYRIQNYTPDLPRADVDHAIEKAFQLWSNVTPLTFTKVSEGQADIMISFVRGDHRDNSPFDGPGGNLAHAFQPGPGIGGDAHFDEDERWTNNFREYNLHRVAAHELGHSLGLSHSTDIGALMYPSYTFSGDVQLAQDDIDGIQAIYGRSQNPVQPIGPQTPKACDSKLTFDAITTIRGEVMFFKDRFYMRTNPFYPEVELNFISVFWPQLPNGLEAAYEFADRDEVRFFKGNKYWAVQGQNVLHGYPKDIYSSFGFPRTVKHIDAALSEENTGKTYFFVANKYWRYDEYKRSMDPGYPKMIAHDFPGIGHKVDAVFMKDGFFYFFHGTRQYKFDPKTKRILTLQKANSWFNCRKN

SEQ ID NO: 504 - protein, 450 aa, Artificial Sequence
  MMP-1 variant E100T
FPATLETQEQDVDLVQKYLEKYYNLKNDGRQVEKRRNSGPVVEKLKQMQEFFGLKVTGKPDAETLKVMKQPRCGVPDVAQFVLTEGNPRWEQTHLTYRITNYTPDLPRADVDHAIEKAFQLWSNVTPLTFTKVSEGQADIMISFVRGDHRDNSPFDGPGGNLAHAFQPGPGIGGDAHFDEDERWTNNFREYNLHRVAAHELGHSLGLSHSTDIGALMYPSYTFSGDVQLAQDDIDGIQAIYGRSQNPVQPIGPQTPKACDSKLTFDAITTIRGEVMFFKDRFYMRTNPFYPEVELNFISVFWPQLPNGLEAAYEFADRDEVRFFKGNKYWAVQGQNVLHGYPKDIYSSFGFPRTVKHIDAALSEENTGKTYFFVANKYWRYDEYKRSMDPGYPKMIAHDFPGIGHKVDAVFMKDGFFYFFHGTRQYKFDPKTKRILTLQKANSWFNCRKN

SEQ ID NO: 505 - protein, 450 aa, Artificial Sequence
  MMP-1 variant E100Y
FPATLETQEQDVDLVQKYLEKYYNLKNDGRQVEKRRNSGPVVEKLKQMQEFFGLKVTGKPDAETLKVMKQPRCGVPDVAQFVLTEGNPRWEQTHLTYRIYNYTPDLPRADVDHAIEKAFQLWSNVTPLTFTKVSEGQADIMISFVRGDHRDNSPFDGPGGNLAHAFQPGPGIGGDAHFDEDERWTNNFREYNLHRVAAHELGHSLGLSHSTDIGALMYPSYTFSGDVQLAQDDIDGIQAIYGRSQNPVQPIGPQTPKACDSKLTFDAITTIRGEVMFFKDRFYMRTNPFYPEVELNFISVFWPQLPNGLEAAYEFADRDEVRFFKGNKYWAVQGQNVLHGYPKDIYSSFGFPRTVKHIDAALSEENTGKTYFFVANKYWRYDEYKRSMDPGYPKMIAHDFPGIGHKVDAVFMKDGFFYFFHGTRQYKFDPKTKRILTLQKANSWFNCRKN

SEQ ID NO: 506 - protein, 450 aa, Artificial Sequence
  MMP-1 variant E100S
FPATLETQEQDVDLVQKYLEKYYNLKNDGRQVEKRRNSGPVVEKLKQMQEFFGLKVTGKPDAETLKVMKQPRCGVPDVAQFVLTEGNPRWEQTHLTYRISNYTPDLPRADVDHAIEKAFQLWSNVTPLTFTKVSEGQADIMISFVRGDHRDNSPFDGPGGNLAHAFQPGPGIGGDAHFDEDERWTNNFREYNLHRVAAHELGHSLGLSHSTDIGALMYPSYTFSGDVQLAQDDIDGIQAIYGRSQNPVQPIGPQTPKACDSKLTFDAITTIRGEVMFFKDRFYMRTNPFYPEVELNFISVFWPQLPNGLEAAYEFADRDEVRFFKGNKYWAVQGQNVLHGYPKDIYSSFGFPRTVKHIDAALSEENTGKTYFFVANKYWRYDEYKRSMDPGYPKMIAHDFPGIGHKVDAVFMKDGFFYFFHGTRQYKFDPKTKRILTLQKANSWFNCRKN

SEQ ID NO: 507 - protein, 450 aa, Artificial Sequence
  MMP-1 variant E100G
FPATLETQEQDVDLVQKYLEKYYNLKNDGRQVEKRRNSGPVVEKLKQMQEFFGLKVTGKPDAETLKVMKQPRCGVPDVAQFVLTEGNPRWEQTHLTYRIGNYTPDLPRADVDHAIEKAFQLWSNVTPLTFTKVSEGQADIMISFVRGDHRDNSPFDGPGGNLAHAFQPGPGIGGDAHFDEDERWTNNFREYNLHRVAAHELGHSLGLSHSTDIGALMYPSYTFSGDVQLAQDDIDGIQAIYGRSQNPVQPIGPQTPKACDSKLTFDAITTIRGEVMFFKDRFYMRTNPFYPEVELNFISVFWPQLPNGLEAAYEFADRDEVRFFKGNKYWAVQGQNVLHGYPKDIYSSFGFPRTVKHIDAALSEENTGKTYFFVANKYWRYDEYKRSMDPGYPKMIAHDFPGIGHKVDAVFMKDGFFYFFHGTRQYKFDPKTKRILTLQKANSWFNCRKN

SEQ ID NO: 508 - protein, 450 aa, Artificial Sequence
  MMP-1 variant E100F
FPATLETQEQDVDLVQKYLEKYYNLKNDGRQVEKRRNSGPVVEKLKQMQEFFGLKVTGKPDAETLKVMKQPRCGVPDVAQFVLTEGNPRWEQTHLTYRIFNYTPDLPRADVDHAIEKAFQLWSNVTPLTFTKVSEGQADIMISFVRGDHRDNSPFDGPGGNLAHAFQPGPGIGGDAHFDEDERWTNNFREYNLHRVAAHELGHSLGLSHSTDIGALMYPSYTFSGDVQLAQDDIDGIQAIYGRSQNPVQPIGPQTPKACDSKLTFDAITTIRGEVMFFKDRFYMRTNPFYPEVELNFISVFWPQLPNGLEAAYEFADRDEVRFFKGNKYWAVQGQNVLHGYPKDIYSSFGFPRTVKHIDAALSEENTGKTYFFVANKYWRYDEYKRSMDPGYPKMIAHDFPGIGHKVDAVFMKDGFFYFFHGTRQYKFDPKTKRILTLQKANSWFNCRKN

SEQ ID NO: 509 - protein, 450 aa, Artificial Sequence
  MMP-1 variant E100M
FPATLETQEQDVDLVQKYLEKYYNLKNDGRQVEKRRNSGPVVEKLKQMQEFFGLKVTGKPDAETLKVMKQPRCGVPDVAQFVLTEGNPRWEQTHLTYRIMNYTPDLPRADVDHAIEKAFQLWSNVTPLTFTKVSEGQADIMISFVRGDHRDNSPFDGPGGNLAHAFQPGPGIGGDAHFDEDERWTNNFREYNLHRVAAHELGHSLGLSHSTDIGALMYPSYTFSGDVQLAQDDIDGIQAIYGRSQNPVQPIGPQTPKACDSKLTFDAITTIRGEVMFFKDRFYMRTNPFYPEVELNFISVFWPQLPNGLEAAYEFADRDEVRFFKGNKYWAVQGQNVLHGYPKDIYSSFGFPRTVKHIDAALSEENTGKTYFFVANKYWRYDEYKRSMDPGYPKMIAHDFPGIGHKVDAVFMKDGFFYFFHGTRQYKFDPKTKRILTLQKANSWFNCRKN

SEQ ID NO: 510 - protein, 450 aa, Artificial Sequence
  MMP-1 variant E100W
FPATLETQEQDVDLVQKYLEKYYNLKNDGRQVEKRRNSGPVVEKLKQMQEFFGLKVTGKPDAETLKVMKQPRCGVPDVAQFVLTEGNPRWEQTHLTYRIWNYTPDLPRADVDHAIEKAFQLWSNVTPLTFTKVSEGQADIMISFVRGDHRDNSPFDGPGGNLAHAFQPGPGIGGDAHFDEDERWTNNFREYNLHRVAAHELGHSLGLSHSTDIGALMYPSYTFSGDVQLAQDDIDGIQAIYGRSQNPVQPIGPQTPKACDSKLTFDAITTIRGEVMFFKDRFYMRTNPFYPEVELNFISVFWPQLPNGLEAAYEFADRDEVRFFKGNKYWAVQGQNVLHGYPKDIYSSFGFPRTVKHIDAALSEENTGKTYFFVANKYWRYDEYKRSMDPGYPKMIAHDFPGIGHKVDAVFMKDGFFYFFHGTRQYKFDPKTKRILTLQKANSWFNCRKN

SEQ ID NO: 511 - protein, 450 aa, Artificial Sequence
  MMP-1 variant E100I
FPATLETQEQDVDLVQKYLEKYYNLKNDGRQVEKRRNSGPVVEKLKQMQEFFGLKVTGKPDAETLKVMKQPRCGVPDVAQFVLTEGNPRWEQTHLTYRIINYTPDLPRADVDHAIEKAFQLWSNVTPLTFTKVSEGQADIMISFVRGDHRDNSPFDGPGGNLAHAFQPGPGIGGDAHFDEDERWTNNFREYNLHRVAAHELGHSLGLSHSTDIGALMYPSYTFSGDVQLAQDDIDGIQAIYGRSQNPVQPIGPQTPKACDSKLTFDAITTIRGEVMFFKDRFYMRTNPFYPEVELNFISVFWPQLPNGLEAAYEFADRDEVRFFKGNKYWAVQGQNVLHGYPKDIYSSFGFPRTVKHIDAALSEENTGKTYFFVANKYWRYDEYKRSMDPGYPKMIAHDFPGIGHKVDAVFMKDGFFYFFHGTRQYKFDPKTKRILTLQKANSWFNCRKN

SEQ ID NO: 512 - protein, 450 aa, Artificial Sequence
  MMP-1 variant E100V
FPATLETQEQDVDLVQKYLEKYYNLKNDGRQVEKRRNSGPVVEKLKQMQEFFGLKVTGKPDAETLKVMKQPRCGVPDVAQFVLTEGNPRWEQTHLTYRIVNYTPDLPRADVDHAIEKAFQLWSNVTPLTFTKVSEGQADIMISFVRGDHRDNSPFDGPGGNLAHAFQPGPGIGGDAHFDEDERWTNNFREYNLHRVAAHELGHSLGLSHSTDIGALMYPSYTFSGDVQLAQDDIDGIQAIYGRSQNPVQPIGPQTPKACDSKLTFDAITTIRGEVMFFKDRFYMRTNPFYPEVELNFISVFWPQLPNGLEAAYEFADRDEVRFFKGNKYWAVQGQNVLHGYPKDIYSSFGFPRTVKHIDAALSEENTGKTYFFVANKYWRYDEYKRSMDPGYPKMIAHDFPGIGHKVDAVFMKDGFFYFFHGTRQYKFDPKTKRILTLQKANSWFNCRKN

SEQ ID NO: 513 - protein, 450 aa, Artificial Sequence
  MMP-1 variant E100L
FPATLETQEQDVDLVQKYLEKYYNLKNDGRQVEKRRNSGPVVEKLKQMQEFFGLKVTGKPDAETLKVMKQPRCGVPDVAQFVLTEGNPRWEQTHLTYRILNYTPDLPRADVDHAIEKAFQLWSNVTPLTFTKVSEGQADIMISFVRGDHRDNSPFDGPGGNLAHAFQPGPGIGGDAHFDEDERWTNNFREYNLHRVAAHELGHSLGLSHSTDIGALMYPSYTFSGDVQLAQDDIDGIQAIYGRSQNPVQPIGPQTPKACDSKLTFDAITTIRGEVMFFKDRFYMRTNPFYPEVELNFISVFWPQLPNGLEAAYEFADRDEVRFFKGNKYWAVQGQNVLHGYPKDIYSSFGFPRTVKHIDAALSEENTGKTYFFVANKYWRYDEYKRSMDPGYPKMIAHDFPGIGHKVDAVFMKDGFFYFFHGTRQYKFDPKTKRILTLQKANSWFNCRKN

SEQ ID NO: 514 - protein, 450 aa, Artificial Sequence
  MMP-1 variant E100A
FPATLETQEQDVDLVQKYLEKYYNLKNDGRQVEKRRNSGPVVEKLKQMQEFFGLKVTGKPDAETLKVMKQPRCGVPDVAQFVLTEGNPRWEQTHLTYRIANYTPDLPRADVDHAIEKAFQLWSNVTPLTFTKVSEGQADIMISFVRGDHRDNSPFDGPGGNLAHAFQPGPGIGGDAHFDEDERWTNNFREYNLHRVAAHELGHSLGLSHSTDIGALMYPSYTFSGDVQLAQDDIDGIQAIYGRSQNPVQPIGPQTPKACDSKLTFDAITTIRGEVMFFKDRFYMRTNPFYPEVELNFISVFWPQLPNGLEAAYEFADRDEVRFFKGNKYWAVQGQNVLHGYPKDIYSSFGFPRTVKHIDAALSEENTGKTYFFVANKYWRYDEYKRSMDPGYPKMIAHDFPGIGHKVDAVFMKDGFFYFFHGTRQYKFDPKTKRILTLQKANSWFNCRKN

SEQ ID NO: 515 - protein, 450 aa, Artificial Sequence
  MMP-1 variant E100P
FPATLETQEQDVDLVQKYLEKYYNLKNDGRQVEKRRNSGPVVEKLKQMQEFFGLKVTGKPDAETLKVMKQPRCGVPDVAQFVLTEGNPRWEQTHLTYRIPNYTPDLPRADVDHAIEKAFQLWSNVTPLTFTKVSEGQADIMISFVRGDHRDNSPFDGPGGNLAHAFQPGPGIGGDAHFDEDERWTNNFREYNLHRVAAHELGHSLGLSHSTDIGALMYPSYTFSGDVQLAQDDIDGIQAIYGRSQNPVQPIGPQTPKACDSKLTFDAITTIRGEVMFFKDRFYMRTNPFYPEVELNFISVFWPQLPNGLEAAYEFADRDEVRFFKGNKYWAVQGQNVLHGYPKDIYSSFGFPRTVKHIDAALSEENTGKTYFFVANKYWRYDEYKRSMDPGYPKMIAHDFPGIGHKVDAVFMKDGFFYFFHGTRQYKFDPKTKRILTLQKANSWFNCRKN

SEQ ID NO: 516 - protein, 450 aa, Artificial Sequence
  MMP-1 variant T103D
FPATLETQEQDVDLVQKYLEKYYNLKNDGRQVEKRRNSGPVVEKLKQMQEFFGLKVTGKPDAETLKVMKQPRCGVPDVAQFVLTEGNPRWEQTHLTYRIENYDPDLPRADVDHAIEKAFQLWSNVTPLTFTKVSEGQADIMISFVRGDHRDNSPFDGPGGNLAHAFQPGPGIGGDAHFDEDERWTNNFREYNLHRVAAHELGHSLGLSHSTDIGALMYPSYTFSGDVQLAQDDIDGIQAIYGRSQNPVQPIGPQTPKACDSKLTFDAITTIRGEVMFFKDRFYMRTNPFYPEVELNFISVFWPQLPNGLEAAYEFADRDEVRFFKGNKYWAVQGQNVLHGYPKDIYSSFGFPRTVKHIDAALSEENTGKTYFFVANKYWRYDEYKRSMDPGYPKMIAHDFPGIGHKVDAVFMKDGFFYFFHGTRQYKFDPKTKRILTLQKANSWFNCRKN

SEQ ID NO: 517 - protein, 450 aa, Artificial Sequence
  MMP-1 variant T103E
FPATLETQEQDVDLVQKYLEKYYNLKNDGRQVEKRRNSGPVVEKLKQMQEFFGLKVTGKPDAETLKVMKQPRCGVPDVAQFVLTEGNPRWEQTHLTYRIENYEPDLPRADVDHAIEKAFQLWSNVTPLTFTKVSEGQADIMISFVRGDHRDNSPFDGPGGNLAHAFQPGPGIGGDAHFDEDERWTNNFREYNLHRVAAHELGHSLGLSHSTDIGALMYPSYTFSGDVQLAQDDIDGIQAIYGRSQNPVQPIGPQTPKACDSKLTFDAITTIRGEVMFFKDRFYMRTNPFYPEVELNFISVFWPQLPNGLEAAYEFADRDEVRFFKGNKYWAVQGQNVLHGYPKDIYSSFGFPRTVKHIDAALSEENTGKTYFFVANKYWRYDEYKRSMDPGYPKMIAHDFPGIGHKVDAVFMKDGFFYFFHGTRQYKFDPKTKRILTLQKANSWFNCRKN

SEQ ID NO: 518 - protein, 450 aa, Artificial Sequence
  MMP-1 variant T103H
FPATLETQEQDVDLVQKYLEKYYNLKNDGRQVEKRRNSGPVVEKLKQMQEFFGLKVTGKPDAETLKVMKQPRCGVPDVAQFVLTEGNPRWEQTHLTYRIENYHPDLPRADVDHAIEKAFQLWSNVTPLTFTKVSEGQADIMISFVRGDHRDNSPFDGPGGNLAHAFQPGPGIGGDAHFDEDERWTNNFREYNLHRVAAHELGHSLGLSHSTDIGALMYPSYTFSGDVQLAQDDIDGIQAIYGRSQNPVQPIGPQTPKACDSKLTFDAITTIRGEVMFFKDRFYMRTNPFYPEVELNFISVFWPQLPNGLEAAYEFADRDEVRFFKGNKYWAVQGQNVLHGYPKDIYSSFGFPRTVKHIDAALSEENTGKTYFFVANKYWRYDEYKRSMDPGYPKMIAHDFPGIGHKVDAVFMKDGFFYFFHGTRQYKFDPKTKRILTLQKANSWFNCRKN

SEQ ID NO: 519 - protein, 450 aa, Artificial Sequence
  MMP-1 variant T103K
FPATLETQEQDVDLVQKYLEKYYNLKNDGRQVEKRRNSGPVVEKLKQMQEFFGLKVTGKPDAETLKVMKQPRCGVPDVAQFVLTEGNPRWEQTHLTYRIENYKPDLPRADVDHAIEKAFQLWSNVTPLTFTKVSEGQADIMISFVRGDHRDNSPFDGPGGNLAHAFQPGPGIGGDAHFDEDERWTNNFREYNLHRVAAHELGHSLGLSHSTDIGALMYPSYTFSGDVQLAQDDIDGIQAIYGRSQNPVQPIGPQTPKACDSKLTFDAITTIRGEVMFFKDRFYMRTNPFYPEVELNFISVFWPQLPNGLEAAYEFADRDEVRFFKGNKYWAVQGQNVLHGYPKDIYSSFGFPRTVKHIDAALSEENTGKTYFFVANKYWRYDEYKRSMDPGYPKMIAHDFPGIGHKVDAVFMKDGFFYFFHGTRQYKFDPKTKRILTLQKANSWFNCRKN

SEQ ID NO: 520 - protein, 450 aa, Artificial Sequence
  MMP-1 variant T103R
FPATLETQEQDVDLVQKYLEKYYNLKNDGRQVEKRRNSGPVVEKLKQMQEFFGLKVTGKPDAETLKVMKQPRCGVPDVAQFVLTEGNPRWEQTHLTYRIENYRPDLPRADVDHAIEKAFQLWSNVTPLTFTKVSEGQADIMISFVRGDHRDNSPFDGPGGNLAHAFQPGPGIGGDAHFDEDERWTNNFREYNLHRVAAHELGHSLGLSHSTDIGALMYPSYTFSGDVQLAQDDIDGIQAIYGRSQNPVQPIGPQTPKACDSKLTFDAITTIRGEVMFFKDRFYMRTNPFYPEVELNFISVFWPQLPNGLEAAYEFADRDEVRFFKGNKYWAVQGQNVLHGYPKDIYSSFGFPRTVKHIDAALSEENTGKTYFFVANKYWRYDEYKRSMDPGYPKMIAHDFPGIGHKVDAVFMKDGFFYFFHGTRQYKFDPKTKRILTLQKANSWFNCRKN

SEQ ID NO: 521 - protein, 450 aa, Artificial Sequence
  MMP-1 variant T103C
FPATLETQEQDVDLVQKYLEKYYNLKNDGRQVEKRRNSGPVVEKLKQMQEFFGLKVTGKPDAETLKVMKQPRCGVPDVAQFVLTEGNPRWEQTHLTYRIENYCPDLPRADVDHAIEKAFQLWSNVTPLTFTKVSEGQADIMISFVRGDHRDNSPFDGPGGNLAHAFQPGPGIGGDAHFDEDERWTNNFREYNLHRVAAHELGHSLGLSHSTDIGALMYPSYTFSGDVQLAQDDIDGIQAIYGRSQNPVQPIGPQTPKACDSKLTFDAITTIRGEVMFFKDRFYMRTNPFYPEVELNFISVFWPQLPNGLEAAYEFADRDEVRFFKGNKYWAVQGQNVLHGYPKDIYSSFGFPRTVKHIDAALSEENTGKTYFFVANKYWRYDEYKRSMDPGYPKMIAHDFPGIGHKVDAVFMKDGFFYFFHGTRQYKFDPKTKRILTLQKANSWFNCRKN

SEQ ID NO: 522 - protein, 450 aa, Artificial Sequence
  MMP-1 variant T103N
FPATLETQEQDVDLVQKYLEKYYNLKNDGRQVEKRRNSGPVVEKLKQMQEFFGLKVTGKPDAETLKVMKQPRCGVPDVAQFVLTEGNPRWEQTHLTYRIENYNPDLPRADVDHAIEKAFQLWSNVTPLTFTKVSEGQADIMISFVRGDHRDNSPFDGPGGNLAHAFQPGPGIGGDAHFDEDERWTNNFREYNLHRVAAHELGHSLGLSHSTDIGALMYPSYTFSGDVQLAQDDIDGIQAIYGRSQNPVQPIGPQTPKACDSKLTFDAITTIRGEVMFFKDRFYMRTNPFYPEVELNFISVFWPQLPNGLEAAYEFADRDEVRFFKGNKYWAVQGQNVLHGYPKDIYSSFGFPRTVKHIDAALSEENTGKTYFFVANKYWRYDEYKRSMDPGYPKMIAHDFPGIGHKVDAVFMKDGFFYFFHGTRQYKFDPKTKRILTLQKANSWFNCRKN

SEQ ID NO: 523 - protein, 450 aa, Artificial Sequence
  MMP-1 variant T103Q
FPATLETQEQDVDLVQKYLEKYYNLKNDGRQVEKRRNSGPVVEKLKQMQEFFGLKVTGKPDAETLKVMKQPRCGVPDVAQFVLTEGNPRWEQTHLTYRIENYQPDLPRADVDHAIEKAFQLWSNVTPLTFTKVSEGQADIMISFVRGDHRDNSPFDGPGGNLAHAFQPGPGIGGDAHFDEDERWTNNFREYNLHRVAAHELGHSLGLSHSTDIGALMYPSYTFSGDVQLAQDDIDGIQAIYGRSQNPVQPIGPQTPKACDSKLTFDAITTIRGEVMFFKDRFYMRTNPFYPEVELNFISVFWPQLPNGLEAAYEFADRDEVRFFKGNKYWAVQGQNVLHGYPKDIYSSFGFPRTVKHIDAALSEENTGKTYFFVANKYWRYDEYKRSMDPGYPKMIAHDFPGIGHKVDAVFMKDGFFYFFHGTRQYKFDPKTKRILTLQKANSWFNCRKN

SEQ ID NO: 524 - protein, 450 aa, Artificial Sequence
  MMP-1 variant T103Y
FPATLETQEQDVDLVQKYLEKYYNLKNDGRQVEKRRNSGPVVEKLKQMQEFFGLKVTGKPDAETLKVMKQPRCGVPDVAQFVLTEGNPRWEQTHLTYRIENYYPDLPRADVDHAIEKAFQLWSNVTPLTFTKVSEGQADIMISFVRGDHRDNSPFDGPGGNLAHAFQPGPGIGGDAHFDEDERWTNNFREYNLHRVAAHELGHSLGLSHSTDIGALMYPSYTFSGDVQLAQDDIDGIQAIYGRSQNPVQPIGPQTPKACDSKLTFDAITTIRGEVMFFKDRFYMRTNPFYPEVELNFISVFWPQLPNGLEAAYEFADRDEVRFFKGNKYWAVQGQNVLHGYPKDIYSSFGFPRTVKHIDAALSEENTGKTYFFVANKYWRYDEYKRSMDPGYPKMIAHDFPGIGHKVDAVFMKDGFFYFFHGTRQYKFDPKTKRILTLQKANSWFNCRKN

SEQ ID NO: 525 - protein, 450 aa, Artificial Sequence
  MMP-1 variant T103S
FPATLETQEQDVDLVQKYLEKYYNLKNDGRQVEKRRNSGPVVEKLKQMQEFFGLKVTGKPDAETLKVMKQPRCGVPDVAQFVLTEGNPRWEQTHLTYRIENYSPDLPRADVDHAIEKAFQLWSNVTPLTFTKVSEGQADIMISFVRGDHRDNSPFDGPGGNLAHAFQPGPGIGGDAHFDEDERWTNNFREYNLHRVAAHELGHSLGLSHSTDIGALMYPSYTFSGDVQLAQDDIDGIQAIYGRSQNPVQPIGPQTPKACDSKLTFDAITTIRGEVMFFKDRFYMRTNPFYPEVELNFISVFWPQLPNGLEAAYEFADRDEVRFFKGNKYWAVQGQNVLHGYPKDIYSSFGFPRTVKHIDAALSEENTGKTYFFVANKYWRYDEYKRSMDPGYPKMIAHDFPGIGHKVDAVFMKDGFFYFFHGTRQYKFDPKTKRILTLQKANSWFNCRKN

SEQ ID NO: 526 - protein, 450 aa, Artificial Sequence
  MMP-1 variant T103G
FPATLETQEQDVDLVQKYLEKYYNLKNDGRQVEKRRNSGPVVEKLKQMQEFFGLKVTGKPDAETLKVMKQPRCGVPDVAQFVLTEGNPRWEQTHLTYRIENYGPDLPRADVDHAIEKAFQLWSNVTPLTFTKVSEGQADIMISFVRGDHRDNSPFDGPGGNLAHAFQPGPGIGGDAHFDEDERWTNNFREYNLHRVAAHELGHSLGLSHSTDIGALMYPSYTFSGDVQLAQDDIDGIQAIYGRSQNPVQPIGPQTPKACDSKLTFDAITTIRGEVMFFKDRFYMRTNPFYPEVELNFISVFWPQLPNGLEAAYEFADRDEVRFFKGNKYWAVQGQNVLHGYPKDIYSSFGFPRTVKHIDAALSEENTGKTYFFVANKYWRYDEYKRSMDPGYPKMIAHDFPGIGHKVDAVFMKDGFFYFFHGTRQYKFDPKTKRILTLQKANSWFNCRKN

SEQ ID NO: 527 - protein, 450 aa, Artificial Sequence
  MMP-1 variant T103F
FPATLETQEQDVDLVQKYLEKYYNLKNDGRQVEKRRNSGPVVEKLKQMQEFFGLKVTGKPDAETLKVMKQPRCGVPDVAQFVLTEGNPRWEQTHLTYRIENYFPDLPRADVDHAIEKAFQLWSNVTPLTFTKVSEGQADIMISFVRGDHRDNSPFDGPGGNLAHAFQPGPGIGGDAHFDEDERWTNNFREYNLHRVAAHELGHSLGLSHSTDIGALMYPSYTFSGDVQLAQDDIDGIQAIYGRSQNPVQPIGPQTPKACDSKLTFDAITTIRGEVMFFKDRFYMRTNPFYPEVELNFISVFWPQLPNGLEAAYEFADRDEVRFFKGNKYWAVQGQNVLHGYPKDIYSSFGFPRTVKHIDAALSEENTGKTYFFVANKYWRYDEYKRSMDPGYPKMIAHDFPGIGHKVDAVFMKDGFFYFFHGTRQYKFDPKTKRILTLQKANSWFNCRKN

SEQ ID NO: 528 - protein, 450 aa, Artificial Sequence
  MMP-1 variant T103M
FPATLETQEQDVDLVQKYLEKYYNLKNDGRQVEKRRNSGPVVEKLKQMQEFFGLKVTGKPDAETLKVMKQPRCGVPDVAQFVLTEGNPRWEQTHLTYRIENYMPDLPRADVDHAIEKAFQLWSNVTPLTFTKVSEGQADIMISFVRGDHRDNSPFDGPGGNLAHAFQPGPGIGGDAHFDEDERWTNNFREYNLHRVAAHELGHSLGLSHSTDIGALMYPSYTFSGDVQLAQDDIDGIQAIYGRSQNPVQPIGPQTPKACDSKLTFDAITTIRGEVMFFKDRFYMRTNPFYPEVELNFISVFWPQLPNGLEAAYEFADRDEVRFFKGNKYWAVQGQNVLHGYPKDIYSSFGFPRTVKHIDAALSEENTGKTYFFVANKYWRYDEYKRSMDPGYPKMIAHDFPGIGHKVDAVFMKDGFFYFFHGTRQYKFDPKTKRILTLQKANSWFNCRKN

SEQ ID NO: 529 - protein, 450 aa, Artificial Sequence
  MMP-1 variant T103W
FPATLETQEQDVDLVQKYLEKYYNLKNDGRQVEKRRNSGPVVEKLKQMQEFFGLKVTGKPDAETLKVMKQPRCGVPDVAQFVLTEGNPRWEQTHLTYRIENYWPDLPRADVDHAIEKAFQLWSNVTPLTFTKVSEGQADIMISFVRGDHRDNSPFDGPGGNLAHAFQPGPGIGGDAHFDEDERWTNNFREYNLHRVAAHELGHSLGLSHSTDIGALMYPSYTFSGDVQLAQDDIDGIQAIYGRSQNPVQPIGPQTPKACDSKLTFDAITTIRGEVMFFKDRFYMRTNPFYPEVELNFISVFWPQLPNGLEAAYEFADRDEVRFFKGNKYWAVQGQNVLHGYPKDIYSSFGFPRTVKHIDAALSEENTGKTYFFVANKYWRYDEYKRSMDPGYPKMIAHDFPGIGHKVDAVFMKDGFFYFFHGTRQYKFDPKTKRILTLQKANSWFNCRKN

SEQ ID NO: 530 - protein, 450 aa, Artificial Sequence
  MMP-1 variant T103I
FPATLETQEQDVDLVQKYLEKYYNLKNDGRQVEKRRNSGPVVEKLKQMQEFFGLKVTGKPDAETLKVMKQPRCGVPDVAQFVLTEGNPRWEQTHLTYRIENYIPDLPRADVDHAIEKAFQLWSNVTPLTFTKVSEGQADIMISFVRGDHRDNSPFDGPGGNLAHAFQPGPGIGGDAHFDEDERWTNNFREYNLHRVAAHELGHSLGLSHSTDIGALMYPSYTFSGDVQLAQDDIDGIQAIYGRSQNPVQPIGPQTPKACDSKLTFDAITTIRGEVMFFKDRFYMRTNPFYPEVELNFISVFWPQLPNGLEAAYEFADRDEVRFFKGNKYWAVQGQNVLHGYPKDIYSSFGFPRTVKHIDAALSEENTGKTYFFVANKYWRYDEYKRSMDPGYPKMIAHDFPGIGHKVDAVFMKDGFFYFFHGTRQYKFDPKTKRILTLQKANSWFNCRKN

SEQ ID NO: 531 - protein, 450 aa, Artificial Sequence
  MMP-1 variant T103V
FPATLETQEQDVDLVQKYLEKYYNLKNDGRQVEKRRNSGPVVEKLKQMQEFFGLKVTGKPDAETLKVMKQPRCGVPDVAQFVLTEGNPRWEQTHLTYRIENYVPDLPRADVDHAIEKAFQLWSNVTPLTFTKVSEGQADIMISFVRGDHRDNSPFDGPGGNLAHAFQPGPGIGGDAHFDEDERWTNNFREYNLHRVAAHELGHSLGLSHSTDIGALMYPSYTFSGDVQLAQDDIDGIQAIYGRSQNPVQPIGPQTPKACDSKLTFDAITTIRGEVMFFKDRFYMRTNPFYPEVELNFISVFWPQLPNGLEAAYEFADRDEVRFFKGNKYWAVQGQNVLHGYPKDIYSSFGFPRTVKHIDAALSEENTGKTYFFVANKYWRYDEYKRSMDPGYPKMIAHDFPGIGHKVDAVFMKDGFFYFFHGTRQYKFDPKTKRILTLQKANSWFNCRKN

SEQ ID NO: 532 - protein, 450 aa, Artificial Sequence
  MMP-1 variant T103L
FPATLETQEQDVDLVQKYLEKYYNLKNDGRQVEKRRNSGPVVEKLKQMQEFFGLKVTGKPDAETLKVMKQPRCGVPDVAQFVLTEGNPRWEQTHLTYRIENYLPDLPRADVDHAIEKAFQLWSNVTPLTFTKVSEGQADIMISFVRGDHRDNSPFDGPGGNLAHAFQPGPGIGGDAHFDEDERWTNNFREYNLHRVAAHELGHSLGLSHSTDIGALMYPSYTFSGDVQLAQDDIDGIQAIYGRSQNPVQPIGPQTPKACDSKLTFDAITTIRGEVMFFKDRFYMRTNPFYPEVELNFISVFWPQLPNGLEAAYEFADRDEVRFFKGNKYWAVQGQNVLHGYPKDIYSSFGFPRTVKHIDAALSEENTGKTYFFVANKYWRYDEYKRSMDPGYPKMIAHDFPGIGHKVDAVFMKDGFFYFFHGTRQYKFDPKTKRILTLQKANSWFNCRKN

SEQ ID NO: 533 - protein, 450 aa, Artificial Sequence
  MMP-1 variant T103A
FPATLETQEQDVDLVQKYLEKYYNLKNDGRQVEKRRNSGPVVEKLKQMQEFFGLKVTGKPDAETLKVMKQPRCGVPDVAQFVLTEGNPRWEQTHLTYRIENYAPDLPRADVDHAIEKAFQLWSNVTPLTFTKVSEGQADIMISFVRGDHRDNSPFDGPGGNLAHAFQPGPGIGGDAHFDEDERWTNNFREYNLHRVAAHELGHSLGLSHSTDIGALMYPSYTFSGDVQLAQDDIDGIQAIYGRSQNPVQPIGPQTPKACDSKLTFDAITTIRGEVMFFKDRFYMRTNPFYPEVELNFISVFWPQLPNGLEAAYEFADRDEVRFFKGNKYWAVQGQNVLHGYPKDIYSSFGFPRTVKHIDAALSEENTGKTYFFVANKYWRYDEYKRSMDPGYPKMIAHDFPGIGHKVDAVFMKDGFFYFFHGTRQYKFDPKTKRILTLQKANSWFNCRKN

SEQ ID NO: 534 - protein, 450 aa, Artificial Sequence
  MMP-1 variant T103P
FPATLETQEQDVDLVQKYLEKYYNLKNDGRQVEKRRNSGPVVEKLKQMQEFFGLKVTGKPDAETLKVMKQPRCGVPDVAQFVLTEGNPRWEQTHLTYRIENYPPDLPRADVDHAIEKAFQLWSNVTPLTFTKVSEGQADIMISFVRGDHRDNSPFDGPGGNLAHAFQPGPGIGGDAHFDEDERWTNNFREYNLHRVAAHELGHSLGLSHSTDIGALMYPSYTFSGDVQLAQDDIDGIQAIYGRSQNPVQPIGPQTPKACDSKLTFDAITTIRGEVMFFKDRFYMRTNPFYPEVELNFISVFWPQLPNGLEAAYEFADRDEVRFFKGNKYWAVQGQNVLHGYPKDIYSSFGFPRTVKHIDAALSEENTGKTYFFVANKYWRYDEYKRSMDPGYPKMIAHDFPGIGHKVDAVFMKDGFFYFFHGTRQYKFDPKTKRILTLQKANSWFNCRKN

SEQ ID NO: 535 - protein, 450 aa, Artificial Sequence
  MMP-1 variant S153D
FPATLETQEQDVDLVQKYLEKYYNLKNDGRQVEKRRNSGPVVEKLKQMQEFFGLKVTGKPDAETLKVMKQPRCGVPDVAQFVLTEGNPRWEQTHLTYRIENYTPDLPRADVDHAIEKAFQLWSNVTPLTFTKVSEGQADIMISFVRGDHRDNDPFDGPGGNLAHAFQPGPGIGGDAHFDEDERWTNNFREYNLHRVAAHELGHSLGLSHSTDIGALMYPSYTFSGDVQLAQDDIDGIQAIYGRSQNPVQPIGPQTPKACDSKLTFDAITTIRGEVMFFKDRFYMRTNPFYPEVELNFISVFWPQLPNGLEAAYEFADRDEVRFFKGNKYWAVQGQNVLHGYPKDIYSSFGFPRTVKHIDAALSEENTGKTYFFVANKYWRYDEYKRSMDPGYPKMIAHDFPGIGHKVDAVFMKDGFFYFFHGTRQYKFDPKTKRILTLQKANSWFNCRKN

SEQ ID NO: 536 - protein, 450 aa, Artificial Sequence
  MMP-1 variant S153E
FPATLETQEQDVDLVQKYLEKYYNLKNDGRQVEKRRNSGPVVEKLKQMQEFFGLKVTGKPDAETLKVMKQPRCGVPDVAQFVLTEGNPRWEQTHLTYRIENYTPDLPRADVDHAIEKAFQLWSNVTPLTFTKVSEGQADIMISFVRGDHRDNEPFDGPGGNLAHAFQPGPGIGGDAHFDEDERWTNNFREYNLHRVAAHELGHSLGLSHSTDIGALMYPSYTFSGDVQLAQDDIDGIQAIYGRSQNPVQPIGPQTPKACDSKLTFDAITTIRGEVMFFKDRFYMRTNPFYPEVELNFISVFWPQLPNGLEAAYEFADRDEVRFFKGNKYWAVQGQNVLHGYPKDIYSSFGFPRTVKHIDAALSEENTGKTYFFVANKYWRYDEYKRSMDPGYPKMIAHDFPGIGHKVDAVFMKDGFFYFFHGTRQYKFDPKTKRILTLQKANSWFNCRKN

SEQ ID NO: 537 - protein, 450 aa, Artificial Sequence
  MMP-1 variant S153H
FPATLETQEQDVDLVQKYLEKYYNLKNDGRQVEKRRNSGPVVEKLKQMQEFFGLKVTGKPDAETLKVMKQPRCGVPDVAQFVLTEGNPRWEQTHLTYRIENYTPDLPRADVDHAIEKAFQLWSNVTPLTFTKVSEGQADIMISFVRGDHRDNHPFDGPGGNLAHAFQPGPGIGGDAHFDEDERWTNNFREYNLHRVAAHELGHSLGLSHSTDIGALMYPSYTFSGDVQLAQDDIDGIQAIYGRSQNPVQPIGPQTPKACDSKLTFDAITTIRGEVMFFKDRFYMRTNPFYPEVELNFISVFWPQLPNGLEAAYEFADRDEVRFFKGNKYWAVQGQNVLHGYPKDIYSSFGFPRTVKHIDAALSEENTGKTYFFVANKYWRYDEYKRSMDPGYPKMIAHDFPGIGHKVDAVFMKDGFFYFFHGTRQYKFDPKTKRILTLQKANSWFNCRKN

SEQ ID NO: 538 - protein, 450 aa, Artificial Sequence
  MMP-1 variant S153K
FPATLETQEQDVDLVQKYLEKYYNLKNDGRQVEKRRNSGPVVEKLKQMQEFFGLKVTGKPDAETLKVMKQPRCGVPDVAQFVLTEGNPRWEQTHLTYRIENYTPDLPRADVDHAIEKAFQLWSNVTPLTFTKVSEGQADIMISFVRGDHRDNKPFDGPGGNLAHAFQPGPGIGGDAHFDEDERWTNNFREYNLHRVAAHELGHSLGLSHSTDIGALMYPSYTFSGDVQLAQDDIDGIQAIYGRSQNPVQPIGPQTPKACDSKLTFDAITTIRGEVMFFKDRFYMRTNPFYPEVELNFISVFWPQLPNGLEAAYEFADRDEVRFFKGNKYWAVQGQNVLHGYPKDIYSSFGFPRTVKHIDAALSEENTGKTYFFVANKYWRYDEYKRSMDPGYPKMIAHDFPGIGHKVDAVFMKDGFFYFFHGTRQYKFDPKTKRILTLQKANSWFNCRKN

SEQ ID NO: 539 - protein, 450 aa, Artificial Sequence
  MMP-1 variant S153R
FPATLETQEQDVDLVQKYLEKYYNLKNDGRQVEKRRNSGPVVEKLKQMQEFFGLKVTGKPDAETLKVMKQPRCGVPDVAQFVLTEGNPRWEQTHLTYRIENYTPDLPRADVDHAIEKAFQLWSNVTPLTFTKVSEGQADIMISFVRGDHRDNRPFDGPGGNLAHAFQPGPGIGGDAHFDEDERWTNNFREYNLHRVAAHELGHSLGLSHSTDIGALMYPSYTFSGDVQLAQDDIDGIQAIYGRSQNPVQPIGPQTPKACDSKLTFDAITTIRGEVMFFKDRFYMRTNPFYPEVELNFISVFWPQLPNGLEAAYEFADRDEVRFFKGNKYWAVQGQNVLHGYPKDIYSSFGFPRTVKHIDAALSEENTGKTYFFVANKYWRYDEYKRSMDPGYPKMIAHDFPGIGHKVDAVFMKDGFFYFFHGTRQYKFDPKTKRILTLQKANSWFNCRKN

SEQ ID NO: 540 - protein, 450 aa, Artificial Sequence
  MMP-1 variant S153C
FPATLETQEQDVDLVQKYLEKYYNLKNDGRQVEKRRNSGPVVEKLKQMQEFFGLKVTGKPDAETLKVMKQPRCGVPDVAQFVLTEGNPRWEQTHLTYRIENYTPDLPRADVDHAIEKAFQLWSNVTPLTFTKVSEGQADIMISFVRGDHRDNCPFDGPGGNLAHAFQPGPGIGGDAHFDEDERWTNNFREYNLHRVAAHELGHSLGLSHSTDIGALMYPSYTFSGDVQLAQDDIDGIQAIYGRSQNPVQPIGPQTPKACDSKLTFDAITTIRGEVMFFKDRFYMRTNPFYPEVELNFISVFWPQLPNGLEAAYEFADRDEVRFFKGNKYWAVQGQNVLHGYPKDIYSSFGFPRTVKHIDAALSEENTGKTYFFVANKYWRYDEYKRSMDPGYPKMIAHDFPGIGHKVDAVFMKDGFFYFFHGTRQYKFDPKTKRILTLQKANSWFNCRKN

SEQ ID NO: 541 - protein, 450 aa, Artificial Sequence
  MMP-1 variant S153N
FPATLETQEQDVDLVQKYLEKYYNLKNDGRQVEKRRNSGPVVEKLKQMQEFFGLKVTGKPDAETLKVMKQPRCGVPDVAQFVLTEGNPRWEQTHLTYRIENYTPDLPRADVDHAIEKAFQLWSNVTPLTFTKVSEGQADIMISFVRGDHRDNNPFDGPGGNLAHAFQPGPGIGGDAHFDEDERWTNNFREYNLHRVAAHELGHSLGLSHSTDIGALMYPSYTFSGDVQLAQDDIDGIQAIYGRSQNPVQPIGPQTPKACDSKLTFDAITTIRGEVMFFKDRFYMRTNPFYPEVELNFISVFWPQLPNGLEAAYEFADRDEVRFFKGNKYWAVQGQNVLHGYPKDIYSSFGFPRTVKHIDAALSEENTGKTYFFVANKYWRYDEYKRSMDPGYPKMIAHDFPGIGHKVDAVFMKDGFFYFFHGTRQYKFDPKTKRILTLQKANSWFNCRKN

SEQ ID NO: 542 - protein, 450 aa, Artificial Sequence
  MMP-1 variant S153Q
FPATLETQEQDVDLVQKYLEKYYNLKNDGRQVEKRRNSGPVVEKLKQMQEFFGLKVTGKPDAETLKVMKQPRCGVPDVAQFVLTEGNPRWEQTHLTYRIENYTPDLPRADVDHAIEKAFQLWSNVTPLTFTKVSEGQADIMISFVRGDHRDNQPFDGPGGNLAHAFQPGPGIGGDAHFDEDERWTNNFREYNLHRVAAHELGHSLGLSHSTDIGALMYPSYTFSGDVQLAQDDIDGIQAIYGRSQNPVQPIGPQTPKACDSKLTFDAITTIRGEVMFFKDRFYMRTNPFYPEVELNFISVFWPQLPNGLEAAYEFADRDEVRFFKGNKYWAVQGQNVLHGYPKDIYSSFGFPRTVKHIDAALSEENTGKTYFFVANKYWRYDEYKRSMDPGYPKMIAHDFPGIGHKVDAVFMKDGFFYFFHGTRQYKFDPKTKRILTLQKANSWFNCRKN

SEQ ID NO: 543 - protein, 450 aa, Artificial Sequence
  MMP-1 variant S153T
FPATLETQEQDVDLVQKYLEKYYNLKNDGRQVEKRRNSGPVVEKLKQMQEFFGLKVTGKPDAETLKVMKQPRCGVPDVAQFVLTEGNPRWEQTHLTYRIENYTPDLPRADVDHAIEKAFQLWSNVTPLTFTKVSEGQADIMISFVRGDHRDNTPFDGPGGNLAHAFQPGPGIGGDAHFDEDERWTNNFREYNLHRVAAHELGHSLGLSHSTDIGALMYPSYTFSGDVQLAQDDIDGIQAIYGRSQNPVQPIGPQTPKACDSKLTFDAITTIRGEVMFFKDRFYMRTNPFYPEVELNFISVFWPQLPNGLEAAYEFADRDEVRFFKGNKYWAVQGQNVLHGYPKDIYSSFGFPRTVKHIDAALSEENTGKTYFFVANKYWRYDEYKRSMDPGYPKMIAHDFPGIGHKVDAVFMKDGFFYFFHGTRQYKFDPKTKRILTLQKANSWFNCRKN

SEQ ID NO: 544 - protein, 450 aa, Artificial Sequence
  MMP-1 variant S153Y
FPATLETQEQDVDLVQKYLEKYYNLKNDGRQVEKRRNSGPVVEKLKQMQEFFGLKVTGKPDAETLKVMKQPRCGVPDVAQFVLTEGNPRWEQTHLTYRIENYTPDLPRADVDHAIEKAFQLWSNVTPLTFTKVSEGQADIMISFVRGDHRDNYPFDGPGGNLAHAFQPGPGIGGDAHFDEDERWTNNFREYNLHRVAAHELGHSLGLSHSTDIGALMYPSYTFSGDVQLAQDDIDGIQAIYGRSQNPVQPIGPQTPKACDSKLTFDAITTIRGEVMFFKDRFYMRTNPFYPEVELNFISVFWPQLPNGLEAAYEFADRDEVRFFKGNKYWAVQGQNVLHGYPKDIYSSFGFPRTVKHIDAALSEENTGKTYFFVANKYWRYDEYKRSMDPGYPKMIAHDFPGIGHKVDAVFMKDGFFYFFHGTRQYKFDPKTKRILTLQKANSWFNCRKN

SEQ ID NO: 545 - protein, 450 aa, Artificial Sequence
  MMP-1 variant S153G
FPATLETQEQDVDLVQKYLEKYYNLKNDGRQVEKRRNSGPVVEKLKQMQEFFGLKVTGKPDAETLKVMKQPRCGVPDVAQFVLTEGNPRWEQTHLTYRIENYTPDLPRADVDHAIEKAFQLWSNVTPLTFTKVSEGQADIMISFVRGDHRDNGPFDGPGGNLAHAFQPGPGIGGDAHFDEDERWTNNFREYNLHRVAAHELGHSLGLSHSTDIGALMYPSYTFSGDVQLAQDDIDGIQAIYGRSQNPVQPIGPQTPKACDSKLTFDAITTIRGEVMFFKDRFYMRTNPFYPEVELNFISVFWPQLPNGLEAAYEFADRDEVRFFKGNKYWAVQGQNVLHGYPKDIYSSFGFPRTVKHIDAALSEENTGKTYFFVANKYWRYDEYKRSMDPGYPKMIAHDFPGIGHKVDAVFMKDGFFYFFHGTRQYKFDPKTKRILTLQKANSWFNCRKN

SEQ ID NO: 546 - protein, 450 aa, Artificial Sequence
  MMP-1 variant S153F
FPATLETQEQDVDLVQKYLEKYYNLKNDGRQVEKRRNSGPVVEKLKQMQEFFGLKVTGKPDAETLKVMKQPRCGVPDVAQFVLTEGNPRWEQTHLTYRIENYTPDLPRADVDHAIEKAFQLWSNVTPLTFTKVSEGQADIMISFVRGDHRDNFPFDGPGGNLAHAFQPGPGIGGDAHFDEDERWTNNFREYNLHRVAAHELGHSLGLSHSTDIGALMYPSYTFSGDVQLAQDDIDGIQAIYGRSQNPVQPIGPQTPKACDSKLTFDAITTIRGEVMFFKDRFYMRTNPFYPEVELNFISVFWPQLPNGLEAAYEFADRDEVRFFKGNKYWAVQGQNVLHGYPKDIYSSFGFPRTVKHIDAALSEENTGKTYFFVANKYWRYDEYKRSMDPGYPKMIAHDFPGIGHKVDAVFMKDGFFYFFHGTRQYKFDPKTKRILTLQKANSWFNCRKN

SEQ ID NO: 547 - protein, 450 aa, Artificial Sequence
  MMP-1 variant S153M
FPATLETQEQDVDLVQKYLEKYYNLKNDGRQVEKRRNSGPVVEKLKQMQEFFGLKVTGKPDAETLKVMKQPRCGVPDVAQFVLTEGNPRWEQTHLTYRIENYTPDLPRADVDHAIEKAFQLWSNVTPLTFTKVSEGQADIMISFVRGDHRDNMPFDGPGGNLAHAFQPGPGIGGDAHFDEDERWTNNFREYNLHRVAAHELGHSLGLSHSTDIGALMYPSYTFSGDVQLAQDDIDGIQAIYGRSQNPVQPIGPQTPKACDSKLTFDAITTIRGEVMFFKDRFYMRTNPFYPEVELNFISVFWPQLPNGLEAAYEFADRDEVRFFKGNKYWAVQGQNVLHGYPKDIYSSFGFPRTVKHIDAALSEENTGKTYFFVANKYWRYDEYKRSMDPGYPKMIAHDFPGIGHKVDAVFMKDGFFYFFHGTRQYKFDPKTKRILTLQKANSWFNCRKN

SEQ ID NO: 548 - protein, 450 aa, Artificial Sequence
  MMP-1 variant S153W
FPATLETQEQDVDLVQKYLEKYYNLKNDGRQVEKRRNSGPVVEKLKQMQEFFGLKVTGKPDAETLKVMKQPRCGVPDVAQFVLTEGNPRWEQTHLTYRIENYTPDLPRADVDHAIEKAFQLWSNVTPLTFTKVSEGQADIMISFVRGDHRDNWPFDGPGGNLAHAFQPGPGIGGDAHFDEDERWTNNFREYNLHRVAAHELGHSLGLSHSTDIGALMYPSYTFSGDVQLAQDDIDGIQAIYGRSQNPVQPIGPQTPKACDSKLTFDAITTIRGEVMFFKDRFYMRTNPFYPEVELNFISVFWPQLPNGLEAAYEFADRDEVRFFKGNKYWAVQGQNVLHGYPKDIYSSFGFPRTVKHIDAALSEENTGKTYFFVANKYWRYDEYKRSMDPGYPKMIAHDFPGIGHKVDAVFMKDGFFYFFHGTRQYKFDPKTKRILTLQKANSWFNCRKN

SEQ ID NO: 549 - protein, 450 aa, Artificial Sequence
  MMP-1 variant S153I
FPATLETQEQDVDLVQKYLEKYYNLKNDGRQVEKRRNSGPVVEKLKQMQEFFGLKVTGKPDAETLKVMKQPRCGVPDVAQFVLTEGNPRWEQTHLTYRIENYTPDLPRADVDHAIEKAFQLWSNVTPLTFTKVSEGQADIMISFVRGDHRDNIPFDGPGGNLAHAFQPGPGIGGDAHFDEDERWTNNFREYNLHRVAAHELGHSLGLSHSTDIGALMYPSYTFSGDVQLAQDDIDGIQAIYGRSQNPVQPIGPQTPKACDSKLTFDAITTIRGEVMFFKDRFYMRTNPFYPEVELNFISVFWPQLPNGLEAAYEFADRDEVRFFKGNKYWAVQGQNVLHGYPKDIYSSFGFPRTVKHIDAALSEENTGKTYFFVANKYWRYDEYKRSMDPGYPKMIAHDFPGIGHKVDAVFMKDGFFYFFHGTRQYKFDPKTKRILTLQKANSWFNCRKN

SEQ ID NO: 550 - protein, 450 aa, Artificial Sequence
  MMP-1 variant S153V
FPATLETQEQDVDLVQKYLEKYYNLKNDGRQVEKRRNSGPVVEKLKQMQEFFGLKVTGKPDAETLKVMKQPRCGVPDVAQFVLTEGNPRWEQTHLTYRIENYTPDLPRADVDHAIEKAFQLWSNVTPLTFTKVSEGQADIMISFVRGDHRDNVPFDGPGGNLAHAFQPGPGIGGDAHFDEDERWTNNFREYNLHRVAAHELGHSLGLSHSTDIGALMYPSYTFSGDVQLAQDDIDGIQAIYGRSQNPVQPIGPQTPKACDSKLTFDAITTIRGEVMFFKDRFYMRTNPFYPEVELNFISVFWPQLPNGLEAAYEFADRDEVRFFKGNKYWAVQGQNVLHGYPKDIYSSFGFPRTVKHIDAALSEENTGKTYFFVANKYWRYDEYKRSMDPGYPKMIAHDFPGIGHKVDAVFMKDGFFYFFHGTRQYKFDPKTKRILTLQKANSWFNCRKN

SEQ ID NO: 551 - protein, 450 aa, Artificial Sequence
  MMP-1 variant S153L
FPATLETQEQDVDLVQKYLEKYYNLKNDGRQVEKRRNSGPVVEKLKQMQEFFGLKVTGKPDAETLKVMKQPRCGVPDVAQFVLTEGNPRWEQTHLTYRIENYTPDLPRADVDHAIEKAFQLWSNVTPLTFTKVSEGQADIMISFVRGDHRDNLPFDGPGGNLAHAFQPGPGIGGDAHFDEDERWTNNFREYNLHRVAAHELGHSLGLSHSTDIGALMYPSYTFSGDVQLAQDDIDGIQAIYGRSQNPVQPIGPQTPKACDSKLTFDAITTIRGEVMFFKDRFYMRTNPFYPEVELNFISVFWPQLPNGLEAAYEFADRDEVRFFKGNKYWAVQGQNVLHGYPKDIYSSFGFPRTVKHIDAALSEENTGKTYFFVANKYWRYDEYKRSMDPGYPKMIAHDFPGIGHKVDAVFMKDGFFYFFHGTRQYKFDPKTKRILTLQKANSWFNCRKN

SEQ ID NO: 552 - protein, 450 aa, Artificial Sequence
  MMP-1 variant S153A
FPATLETQEQDVDLVQKYLEKYYNLKNDGRQVEKRRNSGPVVEKLKQMQEFFGLKVTGKPDAETLKVMKQPRCGVPDVAQFVLTEGNPRWEQTHLTYRIENYTPDLPRADVDHAIEKAFQLWSNVTPLTFTKVSEGQADIMISFVRGDHRDNAPFDGPGGNLAHAFQPGPGIGGDAHFDEDERWTNNFREYNLHRVAAHELGHSLGLSHSTDIGALMYPSYTFSGDVQLAQDDIDGIQAIYGRSQNPVQPIGPQTPKACDSKLTFDAITTIRGEVMFFKDRFYMRTNPFYPEVELNFISVFWPQLPNGLEAAYEFADRDEVRFFKGNKYWAVQGQNVLHGYPKDIYSSFGFPRTVKHIDAALSEENTGKTYFFVANKYWRYDEYKRSMDPGYPKMIAHDFPGIGHKVDAVFMKDGFFYFFHGTRQYKFDPKTKRILTLQKANSWFNCRKN

SEQ ID NO: 553 - protein, 450 aa, Artificial Sequence
  MMP-1 variant S153P
FPATLETQEQDVDLVQKYLEKYYNLKNDGRQVEKRRNSGPVVEKLKQMQEFFGLKVTGKPDAETLKVMKQPRCGVPDVAQFVLTEGNPRWEQTHLTYRIENYTPDLPRADVDHAIEKAFQLWSNVTPLTFTKVSEGQADIMISFVRGDHRDNPPFDGPGGNLAHAFQPGPGIGGDAHFDEDERWTNNFREYNLHRVAAHELGHSLGLSHSTDIGALMYPSYTFSGDVQLAQDDIDGIQAIYGRSQNPVQPIGPQTPKACDSKLTFDAITTIRGEVMFFKDRFYMRTNPFYPEVELNFISVFWPQLPNGLEAAYEFADRDEVRFFKGNKYWAVQGQNVLHGYPKDIYSSFGFPRTVKHIDAALSEENTGKTYFFVANKYWRYDEYKRSMDPGYPKMIAHDFPGIGHKVDAVFMKDGFFYFFHGTRQYKFDPKTKRILTLQKANSWFNCRKN

SEQ ID NO: 554 - protein, 450 aa, Artificial Sequence
  MMP-1 variant G171D
FPATLETQEQDVDLVQKYLEKYYNLKNDGRQVEKRRNSGPVVEKLKQMQEFFGLKVTGKPDAETLKVMKQPRCGVPDVAQFVLTEGNPRWEQTHLTYRIENYTPDLPRADVDHAIEKAFQLWSNVTPLTFTKVSEGQADIMISFVRGDHRDNSPFDGPGGNLAHAFQPGPDIGGDAHFDEDERWTNNFREYNLHRVAAHELGHSLGLSHSTDIGALMYPSYTFSGDVQLAQDDIDGIQAIYGRSQNPVQPIGPQTPKACDSKLTFDAITTIRGEVMFFKDRFYMRTNPFYPEVELNFISVFWPQLPNGLEAAYEFADRDEVRFFKGNKYWAVQGQNVLHGYPKDIYSSFGFPRTVKHIDAALSEENTGKTYFFVANKYWRYDEYKRSMDPGYPKMIAHDFPGIGHKVDAVFMKDGFFYFFHGTRQYKFDPKTKRILTLQKANSWFNCRKN

SEQ ID NO: 555 - protein, 450 aa, Artificial Sequence
  MMP-1 variant G171E
FPATLETQEQDVDLVQKYLEKYYNLKNDGRQVEKRRNSGPVVEKLKQMQEFFGLKVTGKPDAETLKVMKQPRCGVPDVAQFVLTEGNPRWEQTHLTYRIENYTPDLPRADVDHAIEKAFQLWSNVTPLTFTKVSEGQADIMISFVRGDHRDNSPFDGPGGNLAHAFQPGPEIGGDAHFDEDERWTNNFREYNLHRVAAHELGHSLGLSHSTDIGALMYPSYTFSGDVQLAQDDIDGIQAIYGRSQNPVQPIGPQTPKACDSKLTFDAITTIRGEVMFFKDRFYMRTNPFYPEVELNFISVFWPQLPNGLEAAYEFADRDEVRFFKGNKYWAVQGQNVLHGYPKDIYSSFGFPRTVKHIDAALSEENTGKTYFFVANKYWRYDEYKRSMDPGYPKMIAHDFPGIGHKVDAVFMKDGFFYFFHGTRQYKFDPKTKRILTLQKANSWFNCRKN

SEQ ID NO: 556 - protein, 450 aa, Artificial Sequence
  MMP-1 variant G171H
FPATLETQEQDVDLVQKYLEKYYNLKNDGRQVEKRRNSGPVVEKLKQMQEFFGLKVTGKPDAETLKVMKQPRCGVPDVAQFVLTEGNPRWEQTHLTYRIENYTPDLPRADVDHAIEKAFQLWSNVTPLTFTKVSEGQADIMISFVRGDHRDNSPFDGPGGNLAHAFQPGPHIGGDAHFDEDERWTNNFREYNLHRVAAHELGHSLGLSHSTDIGALMYPSYTFSGDVQLAQDDIDGIQAIYGRSQNPVQPIGPQTPKACDSKLTFDAITTIRGEVMFFKDRFYMRTNPFYPEVELNFISVFWPQLPNGLEAAYEFADRDEVRFFKGNKYWAVQGQNVLHGYPKDIYSSFGFPRTVKHIDAALSEENTGKTYFFVANKYWRYDEYKRSMDPGYPKMIAHDFPGIGHKVDAVFMKDGFFYFFHGTRQYKFDPKTKRILTLQKANSWFNCRKN

SEQ ID NO: 557 - protein, 450 aa, Artificial Sequence
  MMP-1 variant G171K
FPATLETQEQDVDLVQKYLEKYYNLKNDGRQVEKRRNSGPVVEKLKQMQEFFGLKVTGKPDAETLKVMKQPRCGVPDVAQFVLTEGNPRWEQTHLTYRIENYTPDLPRADVDHAIEKAFQLWSNVTPLTFTKVSEGQADIMISFVRGDHRDNSPFDGPGGNLAHAFQPGPKIGGDAHFDEDERWTNNFREYNLHRVAAHELGHSLGLSHSTDIGALMYPSYTFSGDVQLAQDDIDGIQAIYGRSQNPVQPIGPQTPKACDSKLTFDAITTIRGEVMFFKDRFYMRTNPFYPEVELNFISVFWPQLPNGLEAAYEFADRDEVRFFKGNKYWAVQGQNVLHGYPKDIYSSFGFPRTVKHIDAALSEENTGKTYFFVANKYWRYDEYKRSMDPGYPKMIAHDFPGIGHKVDAVFMKDGFFYFFHGTRQYKFDPKTKRILTLQKANSWFNCRKN

SEQ ID NO: 558 - protein, 450 aa, Artificial Sequence
  MMP-1 variant G171R
FPATLETQEQDVDLVQKYLEKYYNLKNDGRQVEKRRNSGPVVEKLKQMQEFFGLKVTGKPDAETLKVMKQPRCGVPDVAQFVLTEGNPRWEQTHLTYRIENYTPDLPRADVDHAIEKAFQLWSNVTPLTFTKVSEGQADIMISFVRGDHRDNSPFDGPGGNLAHAFQPGPRIGGDAHFDEDERWTNNFREYNLHRVAAHELGHSLGLSHSTDIGALMYPSYTFSGDVQLAQDDIDGIQAIYGRSQNPVQPIGPQTPKACDSKLTFDAITTIRGEVMFFKDRFYMRTNPFYPEVELNFISVFWPQLPNGLEAAYEFADRDEVRFFKGNKYWAVQGQNVLHGYPKDIYSSFGFPRTVKHIDAALSEENTGKTYFFVANKYWRYDEYKRSMDPGYPKMIAHDFPGIGHKVDAVFMKDGFFYFFHGTRQYKFDPKTKRILTLQKANSWFNCRKN

SEQ ID NO: 559 - protein, 450 aa, Artificial Sequence
  MMP-1 variant G171C
FPATLETQEQDVDLVQKYLEKYYNLKNDGRQVEKRRNSGPVVEKLKQMQEFFGLKVTGKPDAETLKVMKQPRCGVPDVAQFVLTEGNPRWEQTHLTYRIENYTPDLPRADVDHAIEKAFQLWSNVTPLTFTKVSEGQADIMISFVRGDHRDNSPFDGPGGNLAHAFQPGPCIGGDAHFDEDERWTNNFREYNLHRVAAHELGHSLGLSHSTDIGALMYPSYTFSGDVQLAQDDIDGIQAIYGRSQNPVQPIGPQTPKACDSKLTFDAITTIRGEVMFFKDRFYMRTNPFYPEVELNFISVFWPQLPNGLEAAYEFADRDEVRFFKGNKYWAVQGQNVLHGYPKDIYSSFGFPRTVKHIDAALSEENTGKTYFFVANKYWRYDEYKRSMDPGYPKMIAHDFPGIGHKVDAVFMKDGFFYFFHGTRQYKFDPKTKRILTLQKANSWFNCRKN

SEQ ID NO: 560 - protein, 450 aa, Artificial Sequence
  MMP-1 variant G171N
FPATLETQEQDVDLVQKYLEKYYNLKNDGRQVEKRRNSGPVVEKLKQMQEFFGLKVTGKPDAETLKVMKQPRCGVPDVAQFVLTEGNPRWEQTHLTYRIENYTPDLPRADVDHAIEKAFQLWSNVTPLTFTKVSEGQADIMISFVRGDHRDNSPFDGPGGNLAHAFQPGPNIGGDAHFDEDERWTNNFREYNLHRVAAHELGHSLGLSHSTDIGALMYPSYTFSGDVQLAQDDIDGIQAIYGRSQNPVQPIGPQTPKACDSKLTFDAITTIRGEVMFFKDRFYMRTNPFYPEVELNFISVFWPQLPNGLEAAYEFADRDEVRFFKGNKYWAVQGQNVLHGYPKDIYSSFGFPRTVKHIDAALSEENTGKTYFFVANKYWRYDEYKRSMDPGYPKMIAHDFPGIGHKVDAVFMKDGFFYFFHGTRQYKFDPKTKRILTLQKANSWFNCRKN

SEQ ID NO: 561 - protein, 450 aa, Artificial Sequence
  MMP-1 variant G171Q
FPATLETQEQDVDLVQKYLEKYYNLKNDGRQVEKRRNSGPVVEKLKQMQEFFGLKVTGKPDAETLKVMKQPRCGVPDVAQFVLTEGNPRWEQTHLTYRIENYTPDLPRADVDHAIEKAFQLWSNVTPLTFTKVSEGQADIMISFVRGDHRDNSPFDGPGGNLAHAFQPGPQIGGDAHFDEDERWTNNFREYNLHRVAAHELGHSLGLSHSTDIGALMYPSYTFSGDVQLAQDDIDGIQAIYGRSQNPVQPIGPQTPKACDSKLTFDAITTIRGEVMFFKDRFYMRTNPFYPEVELNFISVFWPQLPNGLEAAYEFADRDEVRFFKGNKYWAVQGQNVLHGYPKDIYSSFGFPRTVKHIDAALSEENTGKTYFFVANKYWRYDEYKRSMDPGYPKMIAHDFPGIGHKVDAVFMKDGFFYFFHGTRQYKFDPKTKRILTLQKANSWFNCRKN

SEQ ID NO: 562 - protein, 450 aa, Artificial Sequence
  MMP-1 variant G171T
FPATLETQEQDVDLVQKYLEKYYNLKNDGRQVEKRRNSGPVVEKLKQMQEFFGLKVTGKPDAETLKVMKQPRCGVPDVAQFVLTEGNPRWEQTHLTYRIENYTPDLPRADVDHAIEKAFQLWSNVTPLTFTKVSEGQADIMISFVRGDHRDNSPFDGPGGNLAHAFQPGPTIGGDAHFDEDERWTNNFREYNLHRVAAHELGHSLGLSHSTDIGALMYPSYTFSGDVQLAQDDIDGIQAIYGRSQNPVQPIGPQTPKACDSKLTFDAITTIRGEVMFFKDRFYMRTNPFYPEVELNFISVFWPQLPNGLEAAYEFADRDEVRFFKGNKYWAVQGQNVLHGYPKDIYSSFGFPRTVKHIDAALSEENTGKTYFFVANKYWRYDEYKRSMDPGYPKMIAHDFPGIGHKVDAVFMKDGFFYFFHGTRQYKFDPKTKRILTLQKANSWFNCRKN

SEQ ID NO: 563 - protein, 450 aa, Artificial Sequence
  MMP-1 variant G171Y
FPATLETQEQDVDLVQKYLEKYYNLKNDGRQVEKRRNSGPVVEKLKQMQEFFGLKVTGKPDAETLKVMKQPRCGVPDVAQFVLTEGNPRWEQTHLTYRIENYTPDLPRADVDHAIEKAFQLWSNVTPLTFTKVSEGQADIMISFVRGDHRDNSPFDGPGGNLAHAFQPGPYIGGDAHFDEDERWTNNFREYNLHRVAAHELGHSLGLSHSTDIGALMYPSYTFSGDVQLAQDDIDGIQAIYGRSQNPVQPIGPQTPKACDSKLTFDAITTIRGEVMFFKDRFYMRTNPFYPEVELNFISVFWPQLPNGLEAAYEFADRDEVRFFKGNKYWAVQGQNVLHGYPKDIYSSFGFPRTVKHIDAALSEENTGKTYFFVANKYWRYDEYKRSMDPGYPKMIAHDFPGIGHKVDAVFMKDGFFYFFHGTRQYKFDPKTKRILTLQKANSWFNCRKN

SEQ ID NO: 564 - protein, 450 aa, Artificial Sequence
  MMP-1 variant G171S
FPATLETQEQDVDLVQKYLEKYYNLKNDGRQVEKRRNSGPVVEKLKQMQEFFGLKVTGKPDAETLKVMKQPRCGVPDVAQFVLTEGNPRWEQTHLTYRIENYTPDLPRADVDHAIEKAFQLWSNVTPLTFTKVSEGQADIMISFVRGDHRDNSPFDGPGGNLAHAFQPGPSIGGDAHFDEDERWTNNFREYNLHRVAAHELGHSLGLSHSTDIGALMYPSYTFSGDVQLAQDDIDGIQAIYGRSQNPVQPIGPQTPKACDSKLTFDAITTIRGEVMFFKDRFYMRTNPFYPEVELNFISVFWPQLPNGLEAAYEFADRDEVRFFKGNKYWAVQGQNVLHGYPKDIYSSFGFPRTVKHIDAALSEENTGKTYFFVANKYWRYDEYKRSMDPGYPKMIAHDFPGIGHKVDAVFMKDGFFYFFHGTRQYKFDPKTKRILTLQKANSWFNCRKN

SEQ ID NO: 565 - protein, 450 aa, Artificial Sequence
  MMP-1 variant G171F
FPATLETQEQDVDLVQKYLEKYYNLKNDGRQVEKRRNSGPVVEKLKQMQEFFGLKVTGKPDAETLKVMKQPRCGVPDVAQFVLTEGNPRWEQTHLTYRIENYTPDLPRADVDHAIEKAFQLWSNVTPLTFTKVSEGQADIMISFVRGDHRDNSPFDGPGGNLAHAFQPGPFIGGDAHFDEDERWTNNFREYNLHRVAAHELGHSLGLSHSTDIGALMYPSYTFSGDVQLAQDDIDGIQAIYGRSQNPVQPIGPQTPKACDSKLTFDAITTIRGEVMFFKDRFYMRTNPFYPEVELNFISVFWPQLPNGLEAAYEFADRDEVRFFKGNKYWAVQGQNVLHGYPKDIYSSFGFPRTVKHIDAALSEENTGKTYFFVANKYWRYDEYKRSMDPGYPKMIAHDFPGIGHKVDAVFMKDGFFYFFHGTRQYKFDPKTKRILTLQKANSWFNCRKN

SEQ ID NO: 566 - protein, 450 aa, Artificial Sequence
  MMP-1 variant G171M
FPATLETQEQDVDLVQKYLEKYYNLKNDGRQVEKRRNSGPVVEKLKQMQEFFGLKVTGKPDAETLKVMKQPRCGVPDVAQFVLTEGNPRWEQTHLTYRIENYTPDLPRADVDHAIEKAFQLWSNVTPLTFTKVSEGQADIMISFVRGDHRDNSPFDGPGGNLAHAFQPGPMIGGDAHFDEDERWTNNFREYNLHRVAAHELGHSLGLSHSTDIGALMYPSYTFSGDVQLAQDDIDGIQAIYGRSQNPVQPIGPQTPKACDSKLTFDAITTIRGEVMFFKDRFYMRTNPFYPEVELNFISVFWPQLPNGLEAAYEFADRDEVRFFKGNKYWAVQGQNVLHGYPKDIYSSFGFPRTVKHIDAALSEENTGKTYFFVANKYWRYDEYKRSMDPGYPKMIAHDFPGIGHKVDAVFMKDGFFYFFHGTRQYKFDPKTKRILTLQKANSWFNCRKN

SEQ ID NO: 567 - protein, 450 aa, Artificial Sequence
  MMP-1 variant G171W
FPATLETQEQDVDLVQKYLEKYYNLKNDGRQVEKRRNSGPVVEKLKQMQEFFGLKVTGKPDAETLKVMKQPRCGVPDVAQFVLTEGNPRWEQTHLTYRIENYTPDLPRADVDHAIEKAFQLWSNVTPLTFTKVSEGQADIMISFVRGDHRDNSPFDGPGGNLAHAFQPGPWIGGDAHFDEDERWTNNFREYNLHRVAAHELGHSLGLSHSTDIGALMYPSYTFSGDVQLAQDDIDGIQAIYGRSQNPVQPIGPQTPKACDSKLTFDAITTIRGEVMFFKDRFYMRTNPFYPEVELNFISVFWPQLPNGLEAAYEFADRDEVRFFKGNKYWAVQGQNVLHGYPKDIYSSFGFPRTVKHIDAALSEENTGKTYFFVANKYWRYDEYKRSMDPGYPKMIAHDFPGIGHKVDAVFMKDGFFYFFHGTRQYKFDPKTKRILTLQKANSWFNCRKN

SEQ ID NO: 568 - protein, 450 aa, Artificial Sequence
  MMP-1 variant G171I
FPATLETQEQDVDLVQKYLEKYYNLKNDGRQVEKRRNSGPVVEKLKQMQEFFGLKVTGKPDAETLKVMKQPRCGVPDVAQFVLTEGNPRWEQTHLTYRIENYTPDLPRADVDHAIEKAFQLWSNVTPLTFTKVSEGQADIMISFVRGDHRDNSPFDGPGGNLAHAFQPGPIIGGDAHFDEDERWTNNFREYNLHRVAAHELGHSLGLSHSTDIGALMYPSYTFSGDVQLAQDDIDGIQAIYGRSQNPVQPIGPQTPKACDSKLTFDAITTIRGEVMFFKDRFYMRTNPFYPEVELNFISVFWPQLPNGLEAAYEFADRDEVRFFKGNKYWAVQGQNVLHGYPKDIYSSFGFPRTVKHIDAALSEENTGKTYFFVANKYWRYDEYKRSMDPGYPKMIAHDFPGIGHKVDAVFMKDGFFYFFHGTRQYKFDPKTKRILTLQKANSWFNCRKN

SEQ ID NO: 569 - protein, 450 aa, Artificial Sequence
  MMP-1 variant G171V
FPATLETQEQDVDLVQKYLEKYYNLKNDGRQVEKRRNSGPVVEKLKQMQEFFGLKVTGKPDAETLKVMKQPRCGVPDVAQFVLTEGNPRWEQTHLTYRIENYTPDLPRADVDHAIEKAFQLWSNVTPLTFTKVSEGQADIMISFVRGDHRDNSPFDGPGGNLAHAFQPGPVIGGDAHFDEDERWTNNFREYNLHRVAAHELGHSLGLSHSTDIGALMYPSYTFSGDVQLAQDDIDGIQAIYGRSQNPVQPIGPQTPKACDSKLTFDAITTIRGEVMFFKDRFYMRTNPFYPEVELNFISVFWPQLPNGLEAAYEFADRDEVRFFKGNKYWAVQGQNVLHGYPKDIYSSFGFPRTVKHIDAALSEENTGKTYFFVANKYWRYDEYKRSMDPGYPKMIAHDFPGIGHKVDAVFMKDGFFYFFHGTRQYKFDPKTKRILTLQKANSWFNCRKN

SEQ ID NO: 570 - protein, 450 aa, Artificial Sequence
  MMP-1 variant G171L
FPATLETQEQDVDLVQKYLEKYYNLKNDGRQVEKRRNSGPVVEKLKQMQEFFGLKVTGKPDAETLKVMKQPRCGVPDVAQFVLTEGNPRWEQTHLTYRIENYTPDLPRADVDHAIEKAFQLWSNVTPLTFTKVSEGQADIMISFVRGDHRDNSPFDGPGGNLAHAFQPGPLIGGDAHFDEDERWTNNFREYNLHRVAAHELGHSLGLSHSTDIGALMYPSYTFSGDVQLAQDDIDGIQAIYGRSQNPVQPIGPQTPKACDSKLTFDAITTIRGEVMFFKDRFYMRTNPFYPEVELNFISVFWPQLPNGLEAAYEFADRDEVRFFKGNKYWAVQGQNVLHGYPKDIYSSFGFPRTVKHIDAALSEENTGKTYFFVANKYWRYDEYKRSMDPGYPKMIAHDFPGIGHKVDAVFMKDGFFYFFHGTRQYKFDPKTKRILTLQKANSWFNCRKN

SEQ ID NO: 571 - protein, 450 aa, Artificial Sequence
  MMP-1 variant G171A
FPATLETQEQDVDLVQKYLEKYYNLKNDGRQVEKRRNSGPVVEKLKQMQEFFGLKVTGKPDAETLKVMKQPRCGVPDVAQFVLTEGNPRWEQTHLTYRIENYTPDLPRADVDHAIEKAFQLWSNVTPLTFTKVSEGQADIMISFVRGDHRDNSPFDGPGGNLAHAFQPGPAIGGDAHFDEDERWTNNFREYNLHRVAAHELGHSLGLSHSTDIGALMYPSYTFSGDVQLAQDDIDGIQAIYGRSQNPVQPIGPQTPKACDSKLTFDAITTIRGEVMFFKDRFYMRTNPFYPEVELNFISVFWPQLPNGLEAAYEFADRDEVRFFKGNKYWAVQGQNVLHGYPKDIYSSFGFPRTVKHIDAALSEENTGKTYFFVANKYWRYDEYKRSMDPGYPKMIAHDFPGIGHKVDAVFMKDGFFYFFHGTRQYKFDPKTKRILTLQKANSWFNCRKN

SEQ ID NO: 572 - protein, 450 aa, Artificial Sequence
  MMP-1 variant G171P
FPATLETQEQDVDLVQKYLEKYYNLKNDGRQVEKRRNSGPVVEKLKQMQEFFGLKVTGKPDAETLKVMKQPRCGVPDVAQFVLTEGNPRWEQTHLTYRIENYTPDLPRADVDHAIEKAFQLWSNVTPLTFTKVSEGQADIMISFVRGDHRDNSPFDGPGGNLAHAFQPGPPIGGDAHFDEDERWTNNFREYNLHRVAAHELGHSLGLSHSTDIGALMYPSYTFSGDVQLAQDDIDGIQAIYGRSQNPVQPIGPQTPKACDSKLTFDAITTIRGEVMFFKDRFYMRTNPFYPEVELNFISVFWPQLPNGLEAAYEFADRDEVRFFKGNKYWAVQGQNVLHGYPKDIYSSFGFPRTVKHIDAALSEENTGKTYFFVANKYWRYDEYKRSMDPGYPKMIAHDFPGIGHKVDAVFMKDGFFYFFHGTRQYKFDPKTKRILTLQKANSWFNCRKN

SEQ ID NO: 573 - protein, 450 aa, Artificial Sequence
  MMP-1 variant E190D
FPATLETQEQDVDLVQKYLEKYYNLKNDGRQVEKRRNSGPVVEKLKQMQEFFGLKVTGKPDAETLKVMKQPRCGVPDVAQFVLTEGNPRWEQTHLTYRIENYTPDLPRADVDHAIEKAFQLWSNVTPLTFTKVSEGQADIMISFVRGDHRDNSPFDGPGGNLAHAFQPGPGIGGDAHFDEDERWTNNFRDYNLHRVAAHELGHSLGLSHSTDIGALMYPSYTFSGDVQLAQDDIDGIQAIYGRSQNPVQPIGPQTPKACDSKLTFDAITTIRGEVMFFKDRFYMRTNPFYPEVELNFISVFWPQLPNGLEAAYEFADRDEVRFFKGNKYWAVQGQNVLHGYPKDIYSSFGFPRTVKHIDAALSEENTGKTYFFVANKYWRYDEYKRSMDPGYPKMIAHDFPGIGHKVDAVFMKDGFFYFFHGTRQYKFDPKTKRILTLQKANSWFNCRKN

SEQ ID NO: 574 - protein, 450 aa, Artificial Sequence
  MMP-1 variant E190H
FPATLETQEQDVDLVQKYLEKYYNLKNDGRQVEKRRNSGPVVEKLKQMQEFFGLKVTGKPDAETLKVMKQPRCGVPDVAQFVLTEGNPRWEQTHLTYRIENYTPDLPRADVDHAIEKAFQLWSNVTPLTFTKVSEGQADIMISFVRGDHRDNSPFDGPGGNLAHAFQPGPGIGGDAHFDEDERWTNNFRHYNLHRVAAHELGHSLGLSHSTDIGALMYPSYTFSGDVQLAQDDIDGIQAIYGRSQNPVQPIGPQTPKACDSKLTFDAITTIRGEVMFFKDRFYMRTNPFYPEVELNFISVFWPQLPNGLEAAYEFADRDEVRFFKGNKYWAVQGQNVLHGYPKDIYSSFGFPRTVKHIDAALSEENTGKTYFFVANKYWRYDEYKRSMDPGYPKMIAHDFPGIGHKVDAVFMKDGFFYFFHGTRQYKFDPKTKRILTLQKANSWFNCRKN

SEQ ID NO: 575 - protein, 450 aa, Artificial Sequence
  MMP-1 variant E190K
FPATLETQEQDVDLVQKYLEKYYNLKNDGRQVEKRRNSGPVVEKLKQMQEFFGLKVTGKPDAETLKVMKQPRCGVPDVAQFVLTEGNPRWEQTHLTYRIENYTPDLPRADVDHAIEKAFQLWSNVTPLTFTKVSEGQADIMISFVRGDHRDNSPFDGPGGNLAHAFQPGPGIGGDAHFDEDERWTNNFRKYNLHRVAAHELGHSLGLSHSTDIGALMYPSYTFSGDVQLAQDDIDGIQAIYGRSQNPVQPIGPQTPKACDSKLTFDAITTIRGEVMFFKDRFYMRTNPFYPEVELNFISVFWPQLPNGLEAAYEFADRDEVRFFKGNKYWAVQGQNVLHGYPKDIYSSFGFPRTVKHIDAALSEENTGKTYFFVANKYWRYDEYKRSMDPGYPKMIAHDFPGIGHKVDAVFMKDGFFYFFHGTRQYKFDPKTKRILTLQKANSWFNCRKN

SEQ ID NO: 576 - protein, 450 aa, Artificial Sequence
  MMP-1 variant E190R
FPATLETQEQDVDLVQKYLEKYYNLKNDGRQVEKRRNSGPVVEKLKQMQEFFGLKVTGKPDAETLKVMKQPRCGVPDVAQFVLTEGNPRWEQTHLTYRIENYTPDLPRADVDHAIEKAFQLWSNVTPLTFTKVSEGQADIMISFVRGDHRDNSPFDGPGGNLAHAFQPGPGIGGDAHFDEDERWTNNFRRYNLHRVAAHELGHSLGLSHSTDIGALMYPSYTFSGDVQLAQDDIDGIQAIYGRSQNPVQPIGPQTPKACDSKLTFDAITTIRGEVMFFKDRFYMRTNPFYPEVELNFISVFWPQLPNGLEAAYEFADRDEVRFFKGNKYWAVQGQNVLHGYPKDIYSSFGFPRTVKHIDAALSEENTGKTYFFVANKYWRYDEYKRSMDPGYPKMIAHDFPGIGHKVDAVFMKDGFFYFFHGTRQYKFDPKTKRILTLQKANSWFNCRKN

SEQ ID NO: 577 - protein, 450 aa, Artificial Sequence
  MMP-1 variant E190C
FPATLETQEQDVDLVQKYLEKYYNLKNDGRQVEKRRNSGPVVEKLKQMQEFFGLKVTGKPDAETLKVMKQPRCGVPDVAQFVLTEGNPRWEQTHLTYRIENYTPDLPRADVDHAIEKAFQLWSNVTPLTFTKVSEGQADIMISFVRGDHRDNSPFDGPGGNLAHAFQPGPGIGGDAHFDEDERWTNNFRCYNLHRVAAHELGHSLGLSHSTDIGALMYPSYTFSGDVQLAQDDIDGIQAIYGRSQNPVQPIGPQTPKACDSKLTFDAITTIRGEVMFFKDRFYMRTNPFYPEVELNFISVFWPQLPNGLEAAYEFADRDEVRFFKGNKYWAVQGQNVLHGYPKDIYSSFGFPRTVKHIDAALSEENTGKTYFFVANKYWRYDEYKRSMDPGYPKMIAHDFPGIGHKVDAVFMKDGFFYFFHGTRQYKFDPKTKRILTLQKANSWFNCRKN

SEQ ID NO: 578 - protein, 450 aa, Artificial Sequence
  MMP-1 variant E190N
FPATLETQEQDVDLVQKYLEKYYNLKNDGRQVEKRRNSGPVVEKLKQMQEFFGLKVTGKPDAETLKVMKQPRCGVPDVAQFVLTEGNPRWEQTHLTYRIENYTPDLPRADVDHAIEKAFQLWSNVTPLTFTKVSEGQADIMISFVRGDHRDNSPFDGPGGNLAHAFQPGPGIGGDAHFDEDERWTNNFRNYNLHRVAAHELGHSLGLSHSTDIGALMYPSYTFSGDVQLAQDDIDGIQAIYGRSQNPVQPIGPQTPKACDSKLTFDAITTIRGEVMFFKDRFYMRTNPFYPEVELNFISVFWPQLPNGLEAAYEFADRDEVRFFKGNKYWAVQGQNVLHGYPKDIYSSFGFPRTVKHIDAALSEENTGKTYFFVANKYWRYDEYKRSMDPGYPKMIAHDFPGIGHKVDAVFMKDGFFYFFHGTRQYKFDPKTKRILTLQKANSWFNCRKN

SEQ ID NO: 579 - protein, 450 aa, Artificial Sequence
  MMP-1 variant E190Q
FPATLETQEQDVDLVQKYLEKYYNLKNDGRQVEKRRNSGPVVEKLKQMQEFFGLKVTGKPDAETLKVMKQPRCGVPDVAQFVLTEGNPRWEQTHLTYRIENYTPDLPRADVDHAIEKAFQLWSNVTPLTFTKVSEGQADIMISFVRGDHRDNSPFDGPGGNLAHAFQPGPGIGGDAHFDEDERWTNNFRQYNLHRVAAHELGHSLGLSHSTDIGALMYPSYTFSGDVQLAQDDIDGIQAIYGRSQNPVQPIGPQTPKACDSKLTFDAITTIRGEVMFFKDRFYMRTNPFYPEVELNFISVFWPQLPNGLEAAYEFADRDEVRFFKGNKYWAVQGQNVLHGYPKDIYSSFGFPRTVKHIDAALSEENTGKTYFFVANKYWRYDEYKRSMDPGYPKMIAHDFPGIGHKVDAVFMKDGFFYFFHGTRQYKFDPKTKRILTLQKANSWFNCRKN

SEQ ID NO: 580 - protein, 450 aa, Artificial Sequence
  MMP-1 variant E190T
FPATLETQEQDVDLVQKYLEKYYNLKNDGRQVEKRRNSGPVVEKLKQMQEFFGLKVTGKPDAETLKVMKQPRCGVPDVAQFVLTEGNPRWEQTHLTYRIENYTPDLPRADVDHAIEKAFQLWSNVTPLTFTKVSEGQADIMISFVRGDHRDNSPFDGPGGNLAHAFQPGPGIGGDAHFDEDERWTNNFRTYNLHRVAAHELGHSLGLSHSTDIGALMYPSYTFSGDVQLAQDDIDGIQAIYGRSQNPVQPIGPQTPKACDSKLTFDAITTIRGEVMFFKDRFYMRTNPFYPEVELNFISVFWPQLPNGLEAAYEFADRDEVRFFKGNKYWAVQGQNVLHGYPKDIYSSFGFPRTVKHIDAALSEENTGKTYFFVANKYWRYDEYKRSMDPGYPKMIAHDFPGIGHKVDAVFMKDGFFYFFHGTRQYKFDPKTKRILTLQKANSWFNCRKN

SEQ ID NO: 581 - protein, 450 aa, Artificial Sequence
  MMP-1 variant E190Y
FPATLETQEQDVDLVQKYLEKYYNLKNDGRQVEKRRNSGPVVEKLKQMQEFFGLKVTGKPDAETLKVMKQPRCGVPDVAQFVLTEGNPRWEQTHLTYRIENYTPDLPRADVDHAIEKAFQLWSNVTPLTFTKVSEGQADIMISFVRGDHRDNSPFDGPGGNLAHAFQPGPGIGGDAHFDEDERWTNNFRYYNLHRVAAHELGHSLGLSHSTDIGALMYPSYTFSGDVQLAQDDIDGIQAIYGRSQNPVQPIGPQTPKACDSKLTFDAITTIRGEVMFFKDRFYMRTNPFYPEVELNFISVFWPQLPNGLEAAYEFADRDEVRFFKGNKYWAVQGQNVLHGYPKDIYSSFGFPRTVKHIDAALSEENTGKTYFFVANKYWRYDEYKRSMDPGYPKMIAHDFPGIGHKVDAVFMKDGFFYFFHGTRQYKFDPKTKRILTLQKANSWFNCRKN

SEQ ID NO: 582 - protein, 450 aa, Artificial Sequence
  MMP-1 variant E190S
FPATLETQEQDVDLVQKYLEKYYNLKNDGRQVEKRRNSGPVVEKLKQMQEFFGLKVTGKPDAETLKVMKQPRCGVPDVAQFVLTEGNPRWEQTHLTYRIENYTPDLPRADVDHAIEKAFQLWSNVTPLTFTKVSEGQADIMISFVRGDHRDNSPFDGPGGNLAHAFQPGPGIGGDAHFDEDERWTNNFRSYNLHRVAAHELGHSLGLSHSTDIGALMYPSYTFSGDVQLAQDDIDGIQAIYGRSQNPVQPIGPQTPKACDSKLTFDAITTIRGEVMFFKDRFYMRTNPFYPEVELNFISVFWPQLPNGLEAAYEFADRDEVRFFKGNKYWAVQGQNVLHGYPKDIYSSFGFPRTVKHIDAALSEENTGKTYFFVANKYWRYDEYKRSMDPGYPKMIAHDFPGIGHKVDAVFMKDGFFYFFHGTRQYKFDPKTKRILTLQKANSWFNCRKN

SEQ ID NO: 583 - protein, 450 aa, Artificial Sequence
  MMP-1 variant E190G
FPATLETQEQDVDLVQKYLEKYYNLKNDGRQVEKRRNSGPVVEKLKQMQEFFGLKVTGKPDAETLKVMKQPRCGVPDVAQFVLTEGNPRWEQTHLTYRIENYTPDLPRADVDHAIEKAFQLWSNVTPLTFTKVSEGQADIMISFVRGDHRDNSPFDGPGGNLAHAFQPGPGIGGDAHFDEDERWTNNFRGYNLHRVAAHELGHSLGLSHSTDIGALMYPSYTFSGDVQLAQDDIDGIQAIYGRSQNPVQPIGPQTPKACDSKLTFDAITTIRGEVMFFKDRFYMRTNPFYPEVELNFISVFWPQLPNGLEAAYEFADRDEVRFFKGNKYWAVQGQNVLHGYPKDIYSSFGFPRTVKHIDAALSEENTGKTYFFVANKYWRYDEYKRSMDPGYPKMIAHDFPGIGHKVDAVFMKDGFFYFFHGTRQYKFDPKTKRILTLQKANSWFNCRKN

SEQ ID NO: 584 - protein, 450 aa, Artificial Sequence
  MMP-1 variant E190F
FPATLETQEQDVDLVQKYLEKYYNLKNDGRQVEKRRNSGPVVEKLKQMQEFFGLKVTGKPDAETLKVMKQPRCGVPDVAQFVLTEGNPRWEQTHLTYRIENYTPDLPRADVDHAIEKAFQLWSNVTPLTFTKVSEGQADIMISFVRGDHRDNSPFDGPGGNLAHAFQPGPGIGGDAHFDEDERWTNNFRFYNLHRVAAHELGHSLGLSHSTDIGALMYPSYTFSGDVQLAQDDIDGIQAIYGRSQNPVQPIGPQTPKACDSKLTFDAITTIRGEVMFFKDRFYMRTNPFYPEVELNFISVFWPQLPNGLEAAYEFADRDEVRFFKGNKYWAVQGQNVLHGYPKDIYSSFGFPRTVKHIDAALSEENTGKTYFFVANKYWRYDEYKRSMDPGYPKMIAHDFPGIGHKVDAVFMKDGFFYFFHGTRQYKFDPKTKRILTLQKANSWFNCRKN

SEQ ID NO: 585 - protein, 450 aa, Artificial Sequence
  MMP-1 variant E190M
FPATLETQEQDVDLVQKYLEKYYNLKNDGRQVEKRRNSGPVVEKLKQMQEFFGLKVTGKPDAETLKVMKQPRCGVPDVAQFVLTEGNPRWEQTHLTYRIENYTPDLPRADVDHAIEKAFQLWSNVTPLTFTKVSEGQADIMISFVRGDHRDNSPFDGPGGNLAHAFQPGPGIGGDAHFDEDERWTNNFRMYNLHRVAAHELGHSLGLSHSTDIGALMYPSYTFSGDVQLAQDDIDGIQAIYGRSQNPVQPIGPQTPKACDSKLTFDAITTIRGEVMFFKDRFYMRTNPFYPEVELNFISVFWPQLPNGLEAAYEFADRDEVRFFKGNKYWAVQGQNVLHGYPKDIYSSFGFPRTVKHIDAALSEENTGKTYFFVANKYWRYDEYKRSMDPGYPKMIAHDFPGIGHKVDAVFMKDGFFYFFHGTRQYKFDPKTKRILTLQKANSWFNCRKN

SEQ ID NO: 586 - protein, 450 aa, Artificial Sequence
  MMP-1 variant E190W
FPATLETQEQDVDLVQKYLEKYYNLKNDGRQVEKRRNSGPVVEKLKQMQEFFGLKVTGKPDAETLKVMKQPRCGVPDVAQFVLTEGNPRWEQTHLTYRIENYTPDLPRADVDHAIEKAFQLWSNVTPLTFTKVSEGQADIMISFVRGDHRDNSPFDGPGGNLAHAFQPGPGIGGDAHFDEDERWTNNFRWYNLHRVAAHELGHSLGLSHSTDIGALMYPSYTFSGDVQLAQDDIDGIQAIYGRSQNPVQPIGPQTPKACDSKLTFDAITTIRGEVMFFKDRFYMRTNPFYPEVELNFISVFWPQLPNGLEAAYEFADRDEVRFFKGNKYWAVQGQNVLHGYPKDIYSSFGFPRTVKHIDAALSEENTGKTYFFVANKYWRYDEYKRSMDPGYPKMIAHDFPGIGHKVDAVFMKDGFFYFFHGTRQYKFDPKTKRILTLQKANSWFNCRKN

SEQ ID NO: 587 - protein, 450 aa, Artificial Sequence
  MMP-1 variant E190I
FPATLETQEQDVDLVQKYLEKYYNLKNDGRQVEKRRNSGPVVEKLKQMQEFFGLKVTGKPDAETLKVMKQPRCGVPDVAQFVLTEGNPRWEQTHLTYRIENYTPDLPRADVDHAIEKAFQLWSNVTPLTFTKVSEGQADIMISFVRGDHRDNSPFDGPGGNLAHAFQPGPGIGGDAHFDEDERWTNNFRIYNLHRVAAHELGHSLGLSHSTDIGALMYPSYTFSGDVQLAQDDIDGIQAIYGRSQNPVQPIGPQTPKACDSKLTFDAITTIRGEVMFFKDRFYMRTNPFYPEVELNFISVFWPQLPNGLEAAYEFADRDEVRFFKGNKYWAVQGQNVLHGYPKDIYSSFGFPRTVKHIDAALSEENTGKTYFFVANKYWRYDEYKRSMDPGYPKMIAHDFPGIGHKVDAVFMKDGFFYFFHGTRQYKFDPKTKRILTLQKANSWFNCRKN

SEQ ID NO: 588 - protein, 450 aa, Artificial Sequence
  MMP-1 variant E190V
FPATLETQEQDVDLVQKYLEKYYNLKNDGRQVEKRRNSGPVVEKLKQMQEFFGLKVTGKPDAETLKVMKQPRCGVPDVAQFVLTEGNPRWEQTHLTYRIENYTPDLPRADVDHAIEKAFQLWSNVTPLTFTKVSEGQADIMISFVRGDHRDNSPFDGPGGNLAHAFQPGPGIGGDAHFDEDERWTNNFRVYNLHRVAAHELGHSLGLSHSTDIGALMYPSYTFSGDVQLAQDDIDGIQAIYGRSQNPVQPIGPQTPKACDSKLTFDAITTIRGEVMFFKDRFYMRTNPFYPEVELNFISVFWPQLPNGLEAAYEFADRDEVRFFKGNKYWAVQGQNVLHGYPKDIYSSFGFPRTVKHIDAALSEENTGKTYFFVANKYWRYDEYKRSMDPGYPKMIAHDFPGIGHKVDAVFMKDGFFYFFHGTRQYKFDPKTKRILTLQKANSWFNCRKN

SEQ ID NO: 589 - protein, 450 aa, Artificial Sequence
  MMP-1 variant E190L
FPATLETQEQDVDLVQKYLEKYYNLKNDGRQVEKRRNSGPVVEKLKQMQEFFGLKVTGKPDAETLKVMKQPRCGVPDVAQFVLTEGNPRWEQTHLTYRIENYTPDLPRADVDHAIEKAFQLWSNVTPLTFTKVSEGQADIMISFVRGDHRDNSPFDGPGGNLAHAFQPGPGIGGDAHFDEDERWTNNFRLYNLHRVAAHELGHSLGLSHSTDIGALMYPSYTFSGDVQLAQDDIDGIQAIYGRSQNPVQPIGPQTPKACDSKLTFDAITTIRGEVMFFKDRFYMRTNPFYPEVELNFISVFWPQLPNGLEAAYEFADRDEVRFFKGNKYWAVQGQNVLHGYPKDIYSSFGFPRTVKHIDAALSEENTGKTYFFVANKYWRYDEYKRSMDPGYPKMIAHDFPGIGHKVDAVFMKDGFFYFFHGTRQYKFDPKTKRILTLQKANSWFNCRKN

SEQ ID NO: 590 - protein, 450 aa, Artificial Sequence
  MMP-1 variant E190A
FPATLETQEQDVDLVQKYLEKYYNLKNDGRQVEKRRNSGPVVEKLKQMQEFFGLKVTGKPDAETLKVMKQPRCGVPDVAQFVLTEGNPRWEQTHLTYRIENYTPDLPRADVDHAIEKAFQLWSNVTPLTFTKVSEGQADIMISFVRGDHRDNSPFDGPGGNLAHAFQPGPGIGGDAHFDEDERWTNNFRAYNLHRVAAHELGHSLGLSHSTDIGALMYPSYTFSGDVQLAQDDIDGIQAIYGRSQNPVQPIGPQTPKACDSKLTFDAITTIRGEVMFFKDRFYMRTNPFYPEVELNFISVFWPQLPNGLEAAYEFADRDEVRFFKGNKYWAVQGQNVLHGYPKDIYSSFGFPRTVKHIDAALSEENTGKTYFFVANKYWRYDEYKRSMDPGYPKMIAHDFPGIGHKVDAVFMKDGFFYFFHGTRQYKFDPKTKRILTLQKANSWFNCRKN

SEQ ID NO: 591 - protein, 450 aa, Artificial Sequence
  MMP-1 variant E190P
FPATLETQEQDVDLVQKYLEKYYNLKNDGRQVEKRRNSGPVVEKLKQMQEFFGLKVTGKPDAETLKVMKQPRCGVPDVAQFVLTEGNPRWEQTHLTYRIENYTPDLPRADVDHAIEKAFQLWSNVTPLTFTKVSEGQADIMISFVRGDHRDNSPFDGPGGNLAHAFQPGPGIGGDAHFDEDERWTNNFRPYNLHRVAAHELGHSLGLSHSTDIGALMYPSYTFSGDVQLAQDDIDGIQAIYGRSQNPVQPIGPQTPKACDSKLTFDAITTIRGEVMFFKDRFYMRTNPFYPEVELNFISVFWPQLPNGLEAAYEFADRDEVRFFKGNKYWAVQGQNVLHGYPKDIYSSFGFPRTVKHIDAALSEENTGKTYFFVANKYWRYDEYKRSMDPGYPKMIAHDFPGIGHKVDAVFMKDGFFYFFHGTRQYKFDPKTKRILTLQKANSWFNCRKN

SEQ ID NO: 592 - protein, 450 aa, Artificial Sequence
  MMP-1 variant Y191D
FPATLETQEQDVDLVQKYLEKYYNLKNDGRQVEKRRNSGPVVEKLKQMQEFFGLKVTGKPDAETLKVMKQPRCGVPDVAQFVLTEGNPRWEQTHLTYRIENYTPDLPRADVDHAIEKAFQLWSNVTPLTFTKVSEGQADIMISFVRGDHRDNSPFDGPGGNLAHAFQPGPGIGGDAHFDEDERWTNNFREDNLHRVAAHELGHSLGLSHSTDIGALMYPSYTFSGDVQLAQDDIDGIQAIYGRSQNPVQPIGPQTPKACDSKLTFDAITTIRGEVMFFKDRFYMRTNPFYPEVELNFISVFWPQLPNGLEAAYEFADRDEVRFFKGNKYWAVQGQNVLHGYPKDIYSSFGFPRTVKHIDAALSEENTGKTYFFVANKYWRYDEYKRSMDPGYPKMIAHDFPGIGHKVDAVFMKDGFFYFFHGTRQYKFDPKTKRILTLQKANSWFNCRKN

SEQ ID NO: 593 - protein, 450 aa, Artificial Sequence
  MMP-1 variant Y191E
FPATLETQEQDVDLVQKYLEKYYNLKNDGRQVEKRRNSGPVVEKLKQMQEFFGLKVTGKPDAETLKVMKQPRCGVPDVAQFVLTEGNPRWEQTHLTYRIENYTPDLPRADVDHAIEKAFQLWSNVTPLTFTKVSEGQADIMISFVRGDHRDNSPFDGPGGNLAHAFQPGPGIGGDAHFDEDERWTNNFREENLHRVAAHELGHSLGLSHSTDIGALMYPSYTFSGDVQLAQDDIDGIQAIYGRSQNPVQPIGPQTPKACDSKLTFDAITTIRGEVMFFKDRFYMRTNPFYPEVELNFISVFWPQLPNGLEAAYEFADRDEVRFFKGNKYWAVQGQNVLHGYPKDIYSSFGFPRTVKHIDAALSEENTGKTYFFVANKYWRYDEYKRSMDPGYPKMIAHDFPGIGHKVDAVFMKDGFFYFFHGTRQYKFDPKTKRILTLQKANSWFNCRKN

SEQ ID NO: 594 - protein, 450 aa, Artificial Sequence
  MMP-1 variant Y191H
FPATLETQEQDVDLVQKYLEKYYNLKNDGRQVEKRRNSGPVVEKLKQMQEFFGLKVTGKPDAETLKVMKQPRCGVPDVAQFVLTEGNPRWEQTHLTYRIENYTPDLPRADVDHAIEKAFQLWSNVTPLTFTKVSEGQADIMISFVRGDHRDNSPFDGPGGNLAHAFQPGPGIGGDAHFDEDERWTNNFREHNLHRVAAHELGHSLGLSHSTDIGALMYPSYTFSGDVQLAQDDIDGIQAIYGRSQNPVQPIGPQTPKACDSKLTFDAITTIRGEVMFFKDRFYMRTNPFYPEVELNFISVFWPQLPNGLEAAYEFADRDEVRFFKGNKYWAVQGQNVLHGYPKDIYSSFGFPRTVKHIDAALSEENTGKTYFFVANKYWRYDEYKRSMDPGYPKMIAHDFPGIGHKVDAVFMKDGFFYFFHGTRQYKFDPKTKRILTLQKANSWFNCRKN

SEQ ID NO: 595 - protein, 450 aa, Artificial Sequence
  MMP-1 variant Y191K
FPATLETQEQDVDLVQKYLEKYYNLKNDGRQVEKRRNSGPVVEKLKQMQEFFGLKVTGKPDAETLKVMKQPRCGVPDVAQFVLTEGNPRWEQTHLTYRIENYTPDLPRADVDHAIEKAFQLWSNVTPLTFTKVSEGQADIMISFVRGDHRDNSPFDGPGGNLAHAFQPGPGIGGDAHFDEDERWTNNFREKNLHRVAAHELGHSLGLSHSTDIGALMYPSYTFSGDVQLAQDDIDGIQAIYGRSQNPVQPIGPQTPKACDSKLTFDAITTIRGEVMFFKDRFYMRTNPFYPEVELNFISVFWPQLPNGLEAAYEFADRDEVRFFKGNKYWAVQGQNVLHGYPKDIYSSFGFPRTVKHIDAALSEENTGKTYFFVANKYWRYDEYKRSMDPGYPKMIAHDFPGIGHKVDAVFMKDGFFYFFHGTRQYKFDPKTKRILTLQKANSWFNCRKN

SEQ ID NO: 596 - protein, 450 aa, Artificial Sequence
  MMP-1 variant Y191R
FPATLETQEQDVDLVQKYLEKYYNLKNDGRQVEKRRNSGPVVEKLKQMQEFFGLKVTGKPDAETLKVMKQPRCGVPDVAQFVLTEGNPRWEQTHLTYRIENYTPDLPRADVDHAIEKAFQLWSNVTPLTFTKVSEGQADIMISFVRGDHRDNSPFDGPGGNLAHAFQPGPGIGGDAHFDEDERWTNNFRERNLHRVAAHELGHSLGLSHSTDIGALMYPSYTFSGDVQLAQDDIDGIQAIYGRSQNPVQPIGPQTPKACDSKLTFDAITTIRGEVMFFKDRFYMRTNPFYPEVELNFISVFWPQLPNGLEAAYEFADRDEVRFFKGNKYWAVQGQNVLHGYPKDIYSSFGFPRTVKHIDAALSEENTGKTYFFVANKYWRYDEYKRSMDPGYPKMIAHDFPGIGHKVDAVFMKDGFFYFFHGTRQYKFDPKTKRILTLQKANSWFNCRKN

SEQ ID NO: 597 - protein, 450 aa, Artificial Sequence
  MMP-1 variant Y191C
FPATLETQEQDVDLVQKYLEKYYNLKNDGRQVEKRRNSGPVVEKLKQMQEFFGLKVTGKPDAETLKVMKQPRCGVPDVAQFVLTEGNPRWEQTHLTYRIENYTPDLPRADVDHAIEKAFQLWSNVTPLTFTKVSEGQADIMISFVRGDHRDNSPFDGPGGNLAHAFQPGPGIGGDAHFDEDERWTNNFRECNLHRVAAHELGHSLGLSHSTDIGALMYPSYTFSGDVQLAQDDIDGIQAIYGRSQNPVQPIGPQTPKACDSKLTFDAITTIRGEVMFFKDRFYMRTNPFYPEVELNFISVFWPQLPNGLEAAYEFADRDEVRFFKGNKYWAVQGQNVLHGYPKDIYSSFGFPRTVKHIDAALSEENTGKTYFFVANKYWRYDEYKRSMDPGYPKMIAHDFPGIGHKVDAVFMKDGFFYFFHGTRQYKFDPKTKRILTLQKANSWFNCRKN

SEQ ID NO: 598 - protein, 450 aa, Artificial Sequence
  MMP-1 variant Y191N
FPATLETQEQDVDLVQKYLEKYYNLKNDGRQVEKRRNSGPVVEKLKQMQEFFGLKVTGKPDAETLKVMKQPRCGVPDVAQFVLTEGNPRWEQTHLTYRIENYTPDLPRADVDHAIEKAFQLWSNVTPLTFTKVSEGQADIMISFVRGDHRDNSPFDGPGGNLAHAFQPGPGIGGDAHFDEDERWTNNFRENNLHRVAAHELGHSLGLSHSTDIGALMYPSYTFSGDVQLAQDDIDGIQAIYGRSQNPVQPIGPQTPKACDSKLTFDAITTIRGEVMFFKDRFYMRTNPFYPEVELNFISVFWPQLPNGLEAAYEFADRDEVRFFKGNKYWAVQGQNVLHGYPKDIYSSFGFPRTVKHIDAALSEENTGKTYFFVANKYWRYDEYKRSMDPGYPKMIAHDFPGIGHKVDAVFMKDGFFYFFHGTRQYKFDPKTKRILTLQKANSWFNCRKN

SEQ ID NO: 599 - protein, 450 aa, Artificial Sequence
  MMP-1 variant Y191Q
FPATLETQEQDVDLVQKYLEKYYNLKNDGRQVEKRRNSGPVVEKLKQMQEFFGLKVTGKPDAETLKVMKQPRCGVPDVAQFVLTEGNPRWEQTHLTYRIENYTPDLPRADVDHAIEKAFQLWSNVTPLTFTKVSEGQADIMISFVRGDHRDNSPFDGPGGNLAHAFQPGPGIGGDAHFDEDERWTNNFREQNLHRVAAHELGHSLGLSHSTDIGALMYPSYTFSGDVQLAQDDIDGIQAIYGRSQNPVQPIGPQTPKACDSKLTFDAITTIRGEVMFFKDRFYMRTNPFYPEVELNFISVFWPQLPNGLEAAYEFADRDEVRFFKGNKYWAVQGQNVLHGYPKDIYSSFGFPRTVKHIDAALSEENTGKTYFFVANKYWRYDEYKRSMDPGYPKMIAHDFPGIGHKVDAVFMKDGFFYFFHGTRQYKFDPKTKRILTLQKANSWFNCRKN

SEQ ID NO: 600 - protein, 450 aa, Artificial Sequence
  MMP-1 variant Y191T
FPATLETQEQDVDLVQKYLEKYYNLKNDGRQVEKRRNSGPVVEKLKQMQEFFGLKVTGKPDAETLKVMKQPRCGVPDVAQFVLTEGNPRWEQTHLTYRIENYTPDLPRADVDHAIEKAFQLWSNVTPLTFTKVSEGQADIMISFVRGDHRDNSPFDGPGGNLAHAFQPGPGIGGDAHFDEDERWTNNFRETNLHRVAAHELGHSLGLSHSTDIGALMYPSYTFSGDVQLAQDDIDGIQAIYGRSQNPVQPIGPQTPKACDSKLTFDAITTIRGEVMFFKDRFYMRTNPFYPEVELNFISVFWPQLPNGLEAAYEFADRDEVRFFKGNKYWAVQGQNVLHGYPKDIYSSFGFPRTVKHIDAALSEENTGKTYFFVANKYWRYDEYKRSMDPGYPKMIAHDFPGIGHKVDAVFMKDGFFYFFHGTRQYKFDPKTKRILTLQKANSWFNCRKN

SEQ ID NO: 601 - protein, 450 aa, Artificial Sequence
  MMP-1 variant Y191S
FPATLETQEQDVDLVQKYLEKYYNLKNDGRQVEKRRNSGPVVEKLKQMQEFFGLKVTGKPDAETLKVMKQPRCGVPDVAQFVLTEGNPRWEQTHLTYRIENYTPDLPRADVDHAIEKAFQLWSNVTPLTFTKVSEGQADIMISFVRGDHRDNSPFDGPGGNLAHAFQPGPGIGGDAHFDEDERWTNNFRESNLHRVAAHELGHSLGLSHSTDIGALMYPSYTFSGDVQLAQDDIDGIQAIYGRSQNPVQPIGPQTPKACDSKLTFDAITTIRGEVMFFKDRFYMRTNPFYPEVELNFISVFWPQLPNGLEAAYEFADRDEVRFFKGNKYWAVQGQNVLHGYPKDIYSSFGFPRTVKHIDAALSEENTGKTYFFVANKYWRYDEYKRSMDPGYPKMIAHDFPGIGHKVDAVFMKDGFFYFFHGTRQYKFDPKTKRILTLQKANSWFNCRKN

SEQ ID NO: 602 - protein, 450 aa, Artificial Sequence
  MMP-1 variant Y191G
FPATLETQEQDVDLVQKYLEKYYNLKNDGRQVEKRRNSGPVVEKLKQMQEFFGLKVTGKPDAETLKVMKQPRCGVPDVAQFVLTEGNPRWEQTHLTYRIENYTPDLPRADVDHAIEKAFQLWSNVTPLTFTKVSEGQADIMISFVRGDHRDNSPFDGPGGNLAHAFQPGPGIGGDAHFDEDERWTNNFREGNLHRVAAHELGHSLGLSHSTDIGALMYPSYTFSGDVQLAQDDIDGIQAIYGRSQNPVQPIGPQTPKACDSKLTFDAITTIRGEVMFFKDRFYMRTNPFYPEVELNFISVFWPQLPNGLEAAYEFADRDEVRFFKGNKYWAVQGQNVLHGYPKDIYSSFGFPRTVKHIDAALSEENTGKTYFFVANKYWRYDEYKRSMDPGYPKMIAHDFPGIGHKVDAVFMKDGFFYFFHGTRQYKFDPKTKRILTLQKANSWFNCRKN

SEQ ID NO: 603 - protein, 450 aa, Artificial Sequence
  MMP-1 variant Y191F
FPATLETQEQDVDLVQKYLEKYYNLKNDGRQVEKRRNSGPVVEKLKQMQEFFGLKVTGKPDAETLKVMKQPRCGVPDVAQFVLTEGNPRWEQTHLTYRIENYTPDLPRADVDHAIEKAFQLWSNVTPLTFTKVSEGQADIMISFVRGDHRDNSPFDGPGGNLAHAFQPGPGIGGDAHFDEDERWTNNFREFNLHRVAAHELGHSLGLSHSTDIGALMYPSYTFSGDVQLAQDDIDGIQAIYGRSQNPVQPIGPQTPKACDSKLTFDAITTIRGEVMFFKDRFYMRTNPFYPEVELNFISVFWPQLPNGLEAAYEFADRDEVRFFKGNKYWAVQGQNVLHGYPKDIYSSFGFPRTVKHIDAALSEENTGKTYFFVANKYWRYDEYKRSMDPGYPKMIAHDFPGIGHKVDAVFMKDGFFYFFHGTRQYKFDPKTKRILTLQKANSWFNCRKN

SEQ ID NO: 604 - protein, 450 aa, Artificial Sequence
  MMP-1 variant Y191M
FPATLETQEQDVDLVQKYLEKYYNLKNDGRQVEKRRNSGPVVEKLKQMQEFFGLKVTGKPDAETLKVMKQPRCGVPDVAQFVLTEGNPRWEQTHLTYRIENYTPDLPRADVDHAIEKAFQLWSNVTPLTFTKVSEGQADIMISFVRGDHRDNSPFDGPGGNLAHAFQPGPGIGGDAHFDEDERWTNNFREMNLHRVAAHELGHSLGLSHSTDIGALMYPSYTFSGDVQLAQDDIDGIQAIYGRSQNPVQPIGPQTPKACDSKLTFDAITTIRGEVMFFKDRFYMRTNPFYPEVELNFISVFWPQLPNGLEAAYEFADRDEVRFFKGNKYWAVQGQNVLHGYPKDIYSSFGFPRTVKHIDAALSEENTGKTYFFVANKYWRYDEYKRSMDPGYPKMIAHDFPGIGHKVDAVFMKDGFFYFFHGTRQYKFDPKTKRILTLQKANSWFNCRKN

SEQ ID NO: 605 - protein, 450 aa, Artificial Sequence
  MMP-1 variant Y191W
FPATLETQEQDVDLVQKYLEKYYNLKNDGRQVEKRRNSGPVVEKLKQMQEFFGLKVTGKPDAETLKVMKQPRCGVPDVAQFVLTEGNPRWEQTHLTYRIENYTPDLPRADVDHAIEKAFQLWSNVTPLTFTKVSEGQADIMISFVRGDHRDNSPFDGPGGNLAHAFQPGPGIGGDAHFDEDERWTNNFREWNLHRVAAHELGHSLGLSHSTDIGALMYPSYTFSGDVQLAQDDIDGIQAIYGRSQNPVQPIGPQTPKACDSKLTFDAITTIRGEVMFFKDRFYMRTNPFYPEVELNFISVFWPQLPNGLEAAYEFADRDEVRFFKGNKYWAVQGQNVLHGYPKDIYSSFGFPRTVKHIDAALSEENTGKTYFFVANKYWRYDEYKRSMDPGYPKMIAHDFPGIGHKVDAVFMKDGFFYFFHGTRQYKFDPKTKRILTLQKANSWFNCRKN

SEQ ID NO: 606 - protein, 450 aa, Artificial Sequence
  MMP-1 variant Y191I
FPATLETQEQDVDLVQKYLEKYYNLKNDGRQVEKRRNSGPVVEKLKQMQEFFGLKVTGKPDAETLKVMKQPRCGVPDVAQFVLTEGNPRWEQTHLTYRIENYTPDLPRADVDHAIEKAFQLWSNVTPLTFTKVSEGQADIMISFVRGDHRDNSPFDGPGGNLAHAFQPGPGIGGDAHFDEDERWTNNFREINLHRVAAHELGHSLGLSHSTDIGALMYPSYTFSGDVQLAQDDIDGIQAIYGRSQNPVQPIGPQTPKACDSKLTFDAITTIRGEVMFFKDRFYMRTNPFYPEVELNFISVFWPQLPNGLEAAYEFADRDEVRFFKGNKYWAVQGQNVLHGYPKDIYSSFGFPRTVKHIDAALSEENTGKTYFFVANKYWRYDEYKRSMDPGYPKMIAHDFPGIGHKVDAVFMKDGFFYFFHGTRQYKFDPKTKRILTLQKANSWFNCRKN

SEQ ID NO: 607 - protein, 450 aa, Artificial Sequence
  MMP-1 variant Y191V
FPATLETQEQDVDLVQKYLEKYYNLKNDGRQVEKRRNSGPVVEKLKQMQEFFGLKVTGKPDAETLKVMKQPRCGVPDVAQFVLTEGNPRWEQTHLTYRIENYTPDLPRADVDHAIEKAFQLWSNVTPLTFTKVSEGQADIMISFVRGDHRDNSPFDGPGGNLAHAFQPGPGIGGDAHFDEDERWTNNFREVNLHRVAAHELGHSLGLSHSTDIGALMYPSYTFSGDVQLAQDDIDGIQAIYGRSQNPVQPIGPQTPKACDSKLTFDAITTIRGEVMFFKDRFYMRTNPFYPEVELNFISVFWPQLPNGLEAAYEFADRDEVRFFKGNKYWAVQGQNVLHGYPKDIYSSFGFPRTVKHIDAALSEENTGKTYFFVANKYWRYDEYKRSMDPGYPKMIAHDFPGIGHKVDAVFMKDGFFYFFHGTRQYKFDPKTKRILTLQKANSWFNCRKN

SEQ ID NO: 608 - protein, 450 aa, Artificial Sequence
  MMP-1 variant Y191L
FPATLETQEQDVDLVQKYLEKYYNLKNDGRQVEKRRNSGPVVEKLKQMQEFFGLKVTGKPDAETLKVMKQPRCGVPDVAQFVLTEGNPRWEQTHLTYRIENYTPDLPRADVDHAIEKAFQLWSNVTPLTFTKVSEGQADIMISFVRGDHRDNSPFDGPGGNLAHAFQPGPGIGGDAHFDEDERWTNNFRELNLHRVAAHELGHSLGLSHSTDIGALMYPSYTFSGDVQLAQDDIDGIQAIYGRSQNPVQPIGPQTPKACDSKLTFDAITTIRGEVMFFKDRFYMRTNPFYPEVELNFISVFWPQLPNGLEAAYEFADRDEVRFFKGNKYWAVQGQNVLHGYPKDIYSSFGFPRTVKHIDAALSEENTGKTYFFVANKYWRYDEYKRSMDPGYPKMIAHDFPGIGHKVDAVFMKDGFFYFFHGTRQYKFDPKTKRILTLQKANSWFNCRKN

SEQ ID NO: 609 - protein, 450 aa, Artificial Sequence
  MMP-1 variant Y191A
FPATLETQEQDVDLVQKYLEKYYNLKNDGRQVEKRRNSGPVVEKLKQMQEFFGLKVTGKPDAETLKVMKQPRCGVPDVAQFVLTEGNPRWEQTHLTYRIENYTPDLPRADVDHAIEKAFQLWSNVTPLTFTKVSEGQADIMISFVRGDHRDNSPFDGPGGNLAHAFQPGPGIGGDAHFDEDERWTNNFREANLHRVAAHELGHSLGLSHSTDIGALMYPSYTFSGDVQLAQDDIDGIQAIYGRSQNPVQPIGPQTPKACDSKLTFDAITTIRGEVMFFKDRFYMRTNPFYPEVELNFISVFWPQLPNGLEAAYEFADRDEVRFFKGNKYWAVQGQNVLHGYPKDIYSSFGFPRTVKHIDAALSEENTGKTYFFVANKYWRYDEYKRSMDPGYPKMIAHDFPGIGHKVDAVFMKDGFFYFFHGTRQYKFDPKTKRILTLQKANSWFNCRKN

SEQ ID NO: 610 - protein, 450 aa, Artificial Sequence
  MMP-1 variant Y191P
FPATLETQEQDVDLVQKYLEKYYNLKNDGRQVEKRRNSGPVVEKLKQMQEFFGLKVTGKPDAETLKVMKQPRCGVPDVAQFVLTEGNPRWEQTHLTYRIENYTPDLPRADVDHAIEKAFQLWSNVTPLTFTKVSEGQADIMISFVRGDHRDNSPFDGPGGNLAHAFQPGPGIGGDAHFDEDERWTNNFREPNLHRVAAHELGHSLGLSHSTDIGALMYPSYTFSGDVQLAQDDIDGIQAIYGRSQNPVQPIGPQTPKACDSKLTFDAITTIRGEVMFFKDRFYMRTNPFYPEVELNFISVFWPQLPNGLEAAYEFADRDEVRFFKGNKYWAVQGQNVLHGYPKDIYSSFGFPRTVKHIDAALSEENTGKTYFFVANKYWRYDEYKRSMDPGYPKMIAHDFPGIGHKVDAVFMKDGFFYFFHGTRQYKFDPKTKRILTLQKANSWFNCRKN

SEQ ID NO: 611 - protein, 450 aa, Artificial Sequence
  MMP-1 variant N192D
FPATLETQEQDVDLVQKYLEKYYNLKNDGRQVEKRRNSGPVVEKLKQMQEFFGLKVTGKPDAETLKVMKQPRCGVPDVAQFVLTEGNPRWEQTHLTYRIENYTPDLPRADVDHAIEKAFQLWSNVTPLTFTKVSEGQADIMISFVRGDHRDNSPFDGPGGNLAHAFQPGPGIGGDAHFDEDERWTNNFREYDLHRVAAHELGHSLGLSHSTDIGALMYPSYTFSGDVQLAQDDIDGIQAIYGRSQNPVQPIGPQTPKACDSKLTFDAITTIRGEVMFFKDRFYMRTNPFYPEVELNFISVFWPQLPNGLEAAYEFADRDEVRFFKGNKYWAVQGQNVLHGYPKDIYSSFGFPRTVKHIDAALSEENTGKTYFFVANKYWRYDEYKRSMDPGYPKMIAHDFPGIGHKVDAVFMKDGFFYFFHGTRQYKFDPKTKRILTLQKANSWFNCRKN

SEQ ID NO: 612 - protein, 450 aa, Artificial Sequence
  MMP-1 variant N192E
FPATLETQEQDVDLVQKYLEKYYNLKNDGRQVEKRRNSGPVVEKLKQMQEFFGLKVTGKPDAETLKVMKQPRCGVPDVAQFVLTEGNPRWEQTHLTYRIENYTPDLPRADVDHAIEKAFQLWSNVTPLTFTKVSEGQADIMISFVRGDHRDNSPFDGPGGNLAHAFQPGPGIGGDAHFDEDERWTNNFREYELHRVAAHELGHSLGLSHSTDIGALMYPSYTFSGDVQLAQDDIDGIQAIYGRSQNPVQPIGPQTPKACDSKLTFDAITTIRGEVMFFKDRFYMRTNPFYPEVELNFISVFWPQLPNGLEAAYEFADRDEVRFFKGNKYWAVQGQNVLHGYPKDIYSSFGFPRTVKHIDAALSEENTGKTYFFVANKYWRYDEYKRSMDPGYPKMIAHDFPGIGHKVDAVFMKDGFFYFFHGTRQYKFDPKTKRILTLQKANSWFNCRKN

SEQ ID NO: 613 - protein, 450 aa, Artificial Sequence
  MMP-1 variant N192H
FPATLETQEQDVDLVQKYLEKYYNLKNDGRQVEKRRNSGPVVEKLKQMQEFFGLKVTGKPDAETLKVMKQPRCGVPDVAQFVLTEGNPRWEQTHLTYRIENYTPDLPRADVDHAIEKAFQLWSNVTPLTFTKVSEGQADIMISFVRGDHRDNSPFDGPGGNLAHAFQPGPGIGGDAHFDEDERWTNNFREYHLHRVAAHELGHSLGLSHSTDIGALMYPSYTFSGDVQLAQDDIDGIQAIYGRSQNPVQPIGPQTPKACDSKLTFDAITTIRGEVMFFKDRFYMRTNPFYPEVELNFISVFWPQLPNGLEAAYEFADRDEVRFFKGNKYWAVQGQNVLHGYPKDIYSSFGFPRTVKHIDAALSEENTGKTYFFVANKYWRYDEYKRSMDPGYPKMIAHDFPGIGHKVDAVFMKDGFFYFFHGTRQYKFDPKTKRILTLQKANSWFNCRKN

SEQ ID NO: 614 - protein, 450 aa, Artificial Sequence
  MMP-1 variant N192K
FPATLETQEQDVDLVQKYLEKYYNLKNDGRQVEKRRNSGPVVEKLKQMQEFFGLKVTGKPDAETLKVMKQPRCGVPDVAQFVLTEGNPRWEQTHLTYRIENYTPDLPRADVDHAIEKAFQLWSNVTPLTFTKVSEGQADIMISFVRGDHRDNSPFDGPGGNLAHAFQPGPGIGGDAHFDEDERWTNNFREYKLHRVAAHELGHSLGLSHSTDIGALMYPSYTFSGDVQLAQDDIDGIQAIYGRSQNPVQPIGPQTPKACDSKLTFDAITTIRGEVMFFKDRFYMRTNPFYPEVELNFISVFWPQLPNGLEAAYEFADRDEVRFFKGNKYWAVQGQNVLHGYPKDIYSSFGFPRTVKHIDAALSEENTGKTYFFVANKYWRYDEYKRSMDPGYPKMIAHDFPGIGHKVDAVFMKDGFFYFFHGTRQYKFDPKTKRILTLQKANSWFNCRKN

SEQ ID NO: 615 - protein, 450 aa, Artificial Sequence
  MMP-1 variant N192R
FPATLETQEQDVDLVQKYLEKYYNLKNDGRQVEKRRNSGPVVEKLKQMQEFFGLKVTGKPDAETLKVMKQPRCGVPDVAQFVLTEGNPRWEQTHLTYRIENYTPDLPRADVDHAIEKAFQLWSNVTPLTFTKVSEGQADIMISFVRGDHRDNSPFDGPGGNLAHAFQPGPGIGGDAHFDEDERWTNNFREYRLHRVAAHELGHSLGLSHSTDIGALMYPSYTFSGDVQLAQDDIDGIQAIYGRSQNPVQPIGPQTPKACDSKLTFDAITTIRGEVMFFKDRFYMRTNPFYPEVELNFISVFWPQLPNGLEAAYEFADRDEVRFFKGNKYWAVQGQNVLHGYPKDIYSSFGFPRTVKHIDAALSEENTGKTYFFVANKYWRYDEYKRSMDPGYPKMIAHDFPGIGHKVDAVFMKDGFFYFFHGTRQYKFDPKTKRILTLQKANSWFNCRKN

SEQ ID NO: 616 - protein, 450 aa, Artificial Sequence
  MMP-1 variant N192C
FPATLETQEQDVDLVQKYLEKYYNLKNDGRQVEKRRNSGPVVEKLKQMQEFFGLKVTGKPDAETLKVMKQPRCGVPDVAQFVLTEGNPRWEQTHLTYRIENYTPDLPRADVDHAIEKAFQLWSNVTPLTFTKVSEGQADIMISFVRGDHRDNSPFDGPGGNLAHAFQPGPGIGGDAHFDEDERWTNNFREYCLHRVAAHELGHSLGLSHSTDIGALMYPSYTFSGDVQLAQDDIDGIQAIYGRSQNPVQPIGPQTPKACDSKLTFDAITTIRGEVMFFKDRFYMRTNPFYPEVELNFISVFWPQLPNGLEAAYEFADRDEVRFFKGNKYWAVQGQNVLHGYPKDIYSSFGFPRTVKHIDAALSEENTGKTYFFVANKYWRYDEYKRSMDPGYPKMIAHDFPGIGHKVDAVFMKDGFFYFFHGTRQYKFDPKTKRILTLQKANSWFNCRKN

SEQ ID NO: 617 - protein, 450 aa, Artificial Sequence
  MMP-1 variant N192Q
FPATLETQEQDVDLVQKYLEKYYNLKNDGRQVEKRRNSGPVVEKLKQMQEFFGLKVTGKPDAETLKVMKQPRCGVPDVAQFVLTEGNPRWEQTHLTYRIENYTPDLPRADVDHAIEKAFQLWSNVTPLTFTKVSEGQADIMISFVRGDHRDNSPFDGPGGNLAHAFQPGPGIGGDAHFDEDERWTNNFREYQLHRVAAHELGHSLGLSHSTDIGALMYPSYTFSGDVQLAQDDIDGIQAIYGRSQNPVQPIGPQTPKACDSKLTFDAITTIRGEVMFFKDRFYMRTNPFYPEVELNFISVFWPQLPNGLEAAYEFADRDEVRFFKGNKYWAVQGQNVLHGYPKDIYSSFGFPRTVKHIDAALSEENTGKTYFFVANKYWRYDEYKRSMDPGYPKMIAHDFPGIGHKVDAVFMKDGFFYFFHGTRQYKFDPKTKRILTLQKANSWFNCRKN

SEQ ID NO: 618 - protein, 450 aa, Artificial Sequence
  MMP-1 variant N192T
FPATLETQEQDVDLVQKYLEKYYNLKNDGRQVEKRRNSGPVVEKLKQMQEFFGLKVTGKPDAETLKVMKQPRCGVPDVAQFVLTEGNPRWEQTHLTYRIENYTPDLPRADVDHAIEKAFQLWSNVTPLTFTKVSEGQADIMISFVRGDHRDNSPFDGPGGNLAHAFQPGPGIGGDAHFDEDERWTNNFREYTLHRVAAHELGHSLGLSHSTDIGALMYPSYTFSGDVQLAQDDIDGIQAIYGRSQNPVQPIGPQTPKACDSKLTFDAITTIRGEVMFFKDRFYMRTNPFYPEVELNFISVFWPQLPNGLEAAYEFADRDEVRFFKGNKYWAVQGQNVLHGYPKDIYSSFGFPRTVKHIDAALSEENTGKTYFFVANKYWRYDEYKRSMDPGYPKMIAHDFPGIGHKVDAVFMKDGFFYFFHGTRQYKFDPKTKRILTLQKANSWFNCRKN

SEQ ID NO: 619 - protein, 450 aa, Artificial Sequence
  MMP-1 variant N192Y
FPATLETQEQDVDLVQKYLEKYYNLKNDGRQVEKRRNSGPVVEKLKQMQEFFGLKVTGKPDAETLKVMKQPRCGVPDVAQFVLTEGNPRWEQTHLTYRIENYTPDLPRADVDHAIEKAFQLWSNVTPLTFTKVSEGQADIMISFVRGDHRDNSPFDGPGGNLAHAFQPGPGIGGDAHFDEDERWTNNFREYYLHRVAAHELGHSLGLSHSTDIGALMYPSYTFSGDVQLAQDDIDGIQAIYGRSQNPVQPIGPQTPKACDSKLTFDAITTIRGEVMFFKDRFYMRTNPFYPEVELNFISVFWPQLPNGLEAAYEFADRDEVRFFKGNKYWAVQGQNVLHGYPKDIYSSFGFPRTVKHIDAALSEENTGKTYFFVANKYWRYDEYKRSMDPGYPKMIAHDFPGIGHKVDAVFMKDGFFYFFHGTRQYKFDPKTKRILTLQKANSWFNCRKN

SEQ ID NO: 620 - protein, 450 aa, Artificial Sequence
  MMP-1 variant N192S
FPATLETQEQDVDLVQKYLEKYYNLKNDGRQVEKRRNSGPVVEKLKQMQEFFGLKVTGKPDAETLKVMKQPRCGVPDVAQFVLTEGNPRWEQTHLTYRIENYTPDLPRADVDHAIEKAFQLWSNVTPLTFTKVSEGQADIMISFVRGDHRDNSPFDGPGGNLAHAFQPGPGIGGDAHFDEDERWTNNFREYSLHRVAAHELGHSLGLSHSTDIGALMYPSYTFSGDVQLAQDDIDGIQAIYGRSQNPVQPIGPQTPKACDSKLTFDAITTIRGEVMFFKDRFYMRTNPFYPEVELNFISVFWPQLPNGLEAAYEFADRDEVRFFKGNKYWAVQGQNVLHGYPKDIYSSFGFPRTVKHIDAALSEENTGKTYFFVANKYWRYDEYKRSMDPGYPKMIAHDFPGIGHKVDAVFMKDGFFYFFHGTRQYKFDPKTKRILTLQKANSWFNCRKN

SEQ ID NO: 621 - protein, 450 aa, Artificial Sequence
  MMP-1 variant N192G
FPATLETQEQDVDLVQKYLEKYYNLKNDGRQVEKRRNSGPVVEKLKQMQEFFGLKVTGKPDAETLKVMKQPRCGVPDVAQFVLTEGNPRWEQTHLTYRIENYTPDLPRADVDHAIEKAFQLWSNVTPLTFTKVSEGQADIMISFVRGDHRDNSPFDGPGGNLAHAFQPGPGIGGDAHFDEDERWTNNFREYGLHRVAAHELGHSLGLSHSTDIGALMYPSYTFSGDVQLAQDDIDGIQAIYGRSQNPVQPIGPQTPKACDSKLTFDAITTIRGEVMFFKDRFYMRTNPFYPEVELNFISVFWPQLPNGLEAAYEFADRDEVRFFKGNKYWAVQGQNVLHGYPKDIYSSFGFPRTVKHIDAALSEENTGKTYFFVANKYWRYDEYKRSMDPGYPKMIAHDFPGIGHKVDAVFMKDGFFYFFHGTRQYKFDPKTKRILTLQKANSWFNCRKN

SEQ ID NO: 622 - protein, 450 aa, Artificial Sequence
  MMP-1 variant N192F
FPATLETQEQDVDLVQKYLEKYYNLKNDGRQVEKRRNSGPVVEKLKQMQEFFGLKVTGKPDAETLKVMKQPRCGVPDVAQFVLTEGNPRWEQTHLTYRIENYTPDLPRADVDHAIEKAFQLWSNVTPLTFTKVSEGQADIMISFVRGDHRDNSPFDGPGGNLAHAFQPGPGIGGDAHFDEDERWTNNFREYFLHRVAAHELGHSLGLSHSTDIGALMYPSYTFSGDVQLAQDDIDGIQAIYGRSQNPVQPIGPQTPKACDSKLTFDAITTIRGEVMFFKDRFYMRTNPFYPEVELNFISVFWPQLPNGLEAAYEFADRDEVRFFKGNKYWAVQGQNVLHGYPKDIYSSFGFPRTVKHIDAALSEENTGKTYFFVANKYWRYDEYKRSMDPGYPKMIAHDFPGIGHKVDAVFMKDGFFYFFHGTRQYKFDPKTKRILTLQKANSWFNCRKN

SEQ ID NO: 623 - protein, 450 aa, Artificial Sequence
  MMP-1 variant N192M
FPATLETQEQDVDLVQKYLEKYYNLKNDGRQVEKRRNSGPVVEKLKQMQEFFGLKVTGKPDAETLKVMKQPRCGVPDVAQFVLTEGNPRWEQTHLTYRIENYTPDLPRADVDHAIEKAFQLWSNVTPLTFTKVSEGQADIMISFVRGDHRDNSPFDGPGGNLAHAFQPGPGIGGDAHFDEDERWTNNFREYMLHRVAAHELGHSLGLSHSTDIGALMYPSYTFSGDVQLAQDDIDGIQAIYGRSQNPVQPIGPQTPKACDSKLTFDAITTIRGEVMFFKDRFYMRTNPFYPEVELNFISVFWPQLPNGLEAAYEFADRDEVRFFKGNKYWAVQGQNVLHGYPKDIYSSFGFPRTVKHIDAALSEENTGKTYFFVANKYWRYDEYKRSMDPGYPKMIAHDFPGIGHKVDAVFMKDGFFYFFHGTRQYKFDPKTKRILTLQKANSWFNCRKN

SEQ ID NO: 624 - protein, 450 aa, Artificial Sequence
  MMP-1 variant N192W
FPATLETQEQDVDLVQKYLEKYYNLKNDGRQVEKRRNSGPVVEKLKQMQEFFGLKVTGKPDAETLKVMKQPRCGVPDVAQFVLTEGNPRWEQTHLTYRIENYTPDLPRADVDHAIEKAFQLWSNVTPLTFTKVSEGQADIMISFVRGDHRDNSPFDGPGGNLAHAFQPGPGIGGDAHFDEDERWTNNFREYWLHRVAAHELGHSLGLSHSTDIGALMYPSYTFSGDVQLAQDDIDGIQAIYGRSQNPVQPIGPQTPKACDSKLTFDAITTIRGEVMFFKDRFYMRTNPFYPEVELNFISVFWPQLPNGLEAAYEFADRDEVRFFKGNKYWAVQGQNVLHGYPKDIYSSFGFPRTVKHIDAALSEENTGKTYFFVANKYWRYDEYKRSMDPGYPKMIAHDFPGIGHKVDAVFMKDGFFYFFHGTRQYKFDPKTKRILTLQKANSWFNCRKN

SEQ ID NO: 625 - protein, 450 aa, Artificial Sequence
  MMP-1 variant N192I
FPATLETQEQDVDLVQKYLEKYYNLKNDGRQVEKRRNSGPVVEKLKQMQEFFGLKVTGKPDAETLKVMKQPRCGVPDVAQFVLTEGNPRWEQTHLTYRIENYTPDLPRADVDHAIEKAFQLWSNVTPLTFTKVSEGQADIMISFVRGDHRDNSPFDGPGGNLAHAFQPGPGIGGDAHFDEDERWTNNFREYILHRVAAHELGHSLGLSHSTDIGALMYPSYTFSGDVQLAQDDIDGIQAIYGRSQNPVQPIGPQTPKACDSKLTFDAITTIRGEVMFFKDRFYMRTNPFYPEVELNFISVFWPQLPNGLEAAYEFADRDEVRFFKGNKYWAVQGQNVLHGYPKDIYSSFGFPRTVKHIDAALSEENTGKTYFFVANKYWRYDEYKRSMDPGYPKMIAHDFPGIGHKVDAVFMKDGFFYFFHGTRQYKFDPKTKRILTLQKANSWFNCRKN

SEQ ID NO: 626 - protein, 450 aa, Artificial Sequence
  MMP-1 variant N192V
FPATLETQEQDVDLVQKYLEKYYNLKNDGRQVEKRRNSGPVVEKLKQMQEFFGLKVTGKPDAETLKVMKQPRCGVPDVAQFVLTEGNPRWEQTHLTYRIENYTPDLPRADVDHAIEKAFQLWSNVTPLTFTKVSEGQADIMISFVRGDHRDNSPFDGPGGNLAHAFQPGPGIGGDAHFDEDERWTNNFREYVLHRVAAHELGHSLGLSHSTDIGALMYPSYTFSGDVQLAQDDIDGIQAIYGRSQNPVQPIGPQTPKACDSKLTFDAITTIRGEVMFFKDRFYMRTNPFYPEVELNFISVFWPQLPNGLEAAYEFADRDEVRFFKGNKYWAVQGQNVLHGYPKDIYSSFGFPRTVKHIDAALSEENTGKTYFFVANKYWRYDEYKRSMDPGYPKMIAHDFPGIGHKVDAVFMKDGFFYFFHGTRQYKFDPKTKRILTLQKANSWFNCRKN

SEQ ID NO: 627 - protein, 450 aa, Artificial Sequence
  MMP-1 variant N192L
FPATLETQEQDVDLVQKYLEKYYNLKNDGRQVEKRRNSGPVVEKLKQMQEFFGLKVTGKPDAETLKVMKQPRCGVPDVAQFVLTEGNPRWEQTHLTYRIENYTPDLPRADVDHAIEKAFQLWSNVTPLTFTKVSEGQADIMISFVRGDHRDNSPFDGPGGNLAHAFQPGPGIGGDAHFDEDERWTNNFREYLLHRVAAHELGHSLGLSHSTDIGALMYPSYTFSGDVQLAQDDIDGIQAIYGRSQNPVQPIGPQTPKACDSKLTFDAITTIRGEVMFFKDRFYMRTNPFYPEVELNFISVFWPQLPNGLEAAYEFADRDEVRFFKGNKYWAVQGQNVLHGYPKDIYSSFGFPRTVKHIDAALSEENTGKTYFFVANKYWRYDEYKRSMDPGYPKMIAHDFPGIGHKVDAVFMKDGFFYFFHGTRQYKFDPKTKRILTLQKANSWFNCRKN

SEQ ID NO: 628 - protein, 450 aa, Artificial Sequence
  MMP-1 variant N192A
FPATLETQEQDVDLVQKYLEKYYNLKNDGRQVEKRRNSGPVVEKLKQMQEFFGLKVTGKPDAETLKVMKQPRCGVPDVAQFVLTEGNPRWEQTHLTYRIENYTPDLPRADVDHAIEKAFQLWSNVTPLTFTKVSEGQADIMISFVRGDHRDNSPFDGPGGNLAHAFQPGPGIGGDAHFDEDERWTNNFREYALHRVAAHELGHSLGLSHSTDIGALMYPSYTFSGDVQLAQDDIDGIQAIYGRSQNPVQPIGPQTPKACDSKLTFDAITTIRGEVMFFKDRFYMRTNPFYPEVELNFISVFWPQLPNGLEAAYEFADRDEVRFFKGNKYWAVQGQNVLHGYPKDIYSSFGFPRTVKHIDAALSEENTGKTYFFVANKYWRYDEYKRSMDPGYPKMIAHDFPGIGHKVDAVFMKDGFFYFFHGTRQYKFDPKTKRILTLQKANSWFNCRKN

SEQ ID NO: 629 - protein, 450 aa, Artificial Sequence
  MMP-1 variant N192P
FPATLETQEQDVDLVQKYLEKYYNLKNDGRQVEKRRNSGPVVEKLKQMQEFFGLKVTGKPDAETLKVMKQPRCGVPDVAQFVLTEGNPRWEQTHLTYRIENYTPDLPRADVDHAIEKAFQLWSNVTPLTFTKVSEGQADIMISFVRGDHRDNSPFDGPGGNLAHAFQPGPGIGGDAHFDEDERWTNNFREYPLHRVAAHELGHSLGLSHSTDIGALMYPSYTFSGDVQLAQDDIDGIQAIYGRSQNPVQPIGPQTPKACDSKLTFDAITTIRGEVMFFKDRFYMRTNPFYPEVELNFISVFWPQLPNGLEAAYEFADRDEVRFFKGNKYWAVQGQNVLHGYPKDIYSSFGFPRTVKHIDAALSEENTGKTYFFVANKYWRYDEYKRSMDPGYPKMIAHDFPGIGHKVDAVFMKDGFFYFFHGTRQYKFDPKTKRILTLQKANSWFNCRKN

SEQ ID NO: 630 - protein, 450 aa, Artificial Sequence
  MMP-1 variant H194D
FPATLETQEQDVDLVQKYLEKYYNLKNDGRQVEKRRNSGPVVEKLKQMQEFFGLKVTGKPDAETLKVMKQPRCGVPDVAQFVLTEGNPRWEQTHLTYRIENYTPDLPRADVDHAIEKAFQLWSNVTPLTFTKVSEGQADIMISFVRGDHRDNSPFDGPGGNLAHAFQPGPGIGGDAHFDEDERWTNNFREYNLDRVAAHELGHSLGLSHSTDIGALMYPSYTFSGDVQLAQDDIDGIQAIYGRSQNPVQPIGPQTPKACDSKLTFDAITTIRGEVMFFKDRFYMRTNPFYPEVELNFISVFWPQLPNGLEAAYEFADRDEVRFFKGNKYWAVQGQNVLHGYPKDIYSSFGFPRTVKHIDAALSEENTGKTYFFVANKYWRYDEYKRSMDPGYPKMIAHDFPGIGHKVDAVFMKDGFFYFFHGTRQYKFDPKTKRILTLQKANSWFNCRKN

SEQ ID NO: 631 - protein, 450 aa, Artificial Sequence
  MMP-1 variant H194E
FPATLETQEQDVDLVQKYLEKYYNLKNDGRQVEKRRNSGPVVEKLKQMQEFFGLKVTGKPDAETLKVMKQPRCGVPDVAQFVLTEGNPRWEQTHLTYRIENYTPDLPRADVDHAIEKAFQLWSNVTPLTFTKVSEGQADIMISFVRGDHRDNSPFDGPGGNLAHAFQPGPGIGGDAHFDEDERWTNNFREYNLERVAAHELGHSLGLSHSTDIGALMYPSYTFSGDVQLAQDDIDGIQAIYGRSQNPVQPIGPQTPKACDSKLTFDAITTIRGEVMFFKDRFYMRTNPFYPEVELNFISVFWPQLPNGLEAAYEFADRDEVRFFKGNKYWAVQGQNVLHGYPKDIYSSFGFPRTVKHIDAALSEENTGKTYFFVANKYWRYDEYKRSMDPGYPKMIAHDFPGIGHKVDAVFMKDGFFYFFHGTRQYKFDPKTKRILTLQKANSWFNCRKN

SEQ ID NO: 632 - protein, 450 aa, Artificial Sequence
  MMP-1 variant H194K
FPATLETQEQDVDLVQKYLEKYYNLKNDGRQVEKRRNSGPVVEKLKQMQEFFGLKVTGKPDAETLKVMKQPRCGVPDVAQFVLTEGNPRWEQTHLTYRIENYTPDLPRADVDHAIEKAFQLWSNVTPLTFTKVSEGQADIMISFVRGDHRDNSPFDGPGGNLAHAFQPGPGIGGDAHFDEDERWTNNFREYNLKRVAAHELGHSLGLSHSTDIGALMYPSYTFSGDVQLAQDDIDGIQAIYGRSQNPVQPIGPQTPKACDSKLTFDAITTIRGEVMFFKDRFYMRTNPFYPEVELNFISVFWPQLPNGLEAAYEFADRDEVRFFKGNKYWAVQGQNVLHGYPKDIYSSFGFPRTVKHIDAALSEENTGKTYFFVANKYWRYDEYKRSMDPGYPKMIAHDFPGIGHKVDAVFMKDGFFYFFHGTRQYKFDPKTKRILTLQKANSWFNCRKN

SEQ ID NO: 633 - protein, 450 aa, Artificial Sequence
  MMP-1 variant H194R
FPATLETQEQDVDLVQKYLEKYYNLKNDGRQVEKRRNSGPVVEKLKQMQEFFGLKVTGKPDAETLKVMKQPRCGVPDVAQFVLTEGNPRWEQTHLTYRIENYTPDLPRADVDHAIEKAFQLWSNVTPLTFTKVSEGQADIMISFVRGDHRDNSPFDGPGGNLAHAFQPGPGIGGDAHFDEDERWTNNFREYNLRRVAAHELGHSLGLSHSTDIGALMYPSYTFSGDVQLAQDDIDGIQAIYGRSQNPVQPIGPQTPKACDSKLTFDAITTIRGEVMFFKDRFYMRTNPFYPEVELNFISVFWPQLPNGLEAAYEFADRDEVRFFKGNKYWAVQGQNVLHGYPKDIYSSFGFPRTVKHIDAALSEENTGKTYFFVANKYWRYDEYKRSMDPGYPKMIAHDFPGIGHKVDAVFMKDGFFYFFHGTRQYKFDPKTKRILTLQKANSWFNCRKN

SEQ ID NO: 634 - protein, 450 aa, Artificial Sequence
  MMP-1 variant H194C
FPATLETQEQDVDLVQKYLEKYYNLKNDGRQVEKRRNSGPVVEKLKQMQEFFGLKVTGKPDAETLKVMKQPRCGVPDVAQFVLTEGNPRWEQTHLTYRIENYTPDLPRADVDHAIEKAFQLWSNVTPLTFTKVSEGQADIMISFVRGDHRDNSPFDGPGGNLAHAFQPGPGIGGDAHFDEDERWTNNFREYNLCRVAAHELGHSLGLSHSTDIGALMYPSYTFSGDVQLAQDDIDGIQAIYGRSQNPVQPIGPQTPKACDSKLTFDAITTIRGEVMFFKDRFYMRTNPFYPEVELNFISVFWPQLPNGLEAAYEFADRDEVRFFKGNKYWAVQGQNVLHGYPKDIYSSFGFPRTVKHIDAALSEENTGKTYFFVANKYWRYDEYKRSMDPGYPKMIAHDFPGIGHKVDAVFMKDGFFYFFHGTRQYKFDPKTKRILTLQKANSWFNCRKN

SEQ ID NO: 635 - protein, 450 aa, Artificial Sequence
  MMP-1 variant H194N
FPATLETQEQDVDLVQKYLEKYYNLKNDGRQVEKRRNSGPVVEKLKQMQEFFGLKVTGKPDAETLKVMKQPRCGVPDVAQFVLTEGNPRWEQTHLTYRIENYTPDLPRADVDHAIEKAFQLWSNVTPLTFTKVSEGQADIMISFVRGDHRDNSPFDGPGGNLAHAFQPGPGIGGDAHFDEDERWTNNFREYNLNRVAAHELGHSLGLSHSTDIGALMYPSYTFSGDVQLAQDDIDGIQAIYGRSQNPVQPIGPQTPKACDSKLTFDAITTIRGEVMFFKDRFYMRTNPFYPEVELNFISVFWPQLPNGLEAAYEFADRDEVRFFKGNKYWAVQGQNVLHGYPKDIYSSFGFPRTVKHIDAALSEENTGKTYFFVANKYWRYDEYKRSMDPGYPKMIAHDFPGIGHKVDAVFMKDGFFYFFHGTRQYKFDPKTKRILTLQKANSWFNCRKN

SEQ ID NO: 636 - protein, 450 aa, Artificial Sequence
  MMP-1 variant H194Q
FPATLETQEQDVDLVQKYLEKYYNLKNDGRQVEKRRNSGPVVEKLKQMQEFFGLKVTGKPDAETLKVMKQPRCGVPDVAQFVLTEGNPRWEQTHLTYRIENYTPDLPRADVDHAIEKAFQLWSNVTPLTFTKVSEGQADIMISFVRGDHRDNSPFDGPGGNLAHAFQPGPGIGGDAHFDEDERWTNNFREYNLQRVAAHELGHSLGLSHSTDIGALMYPSYTFSGDVQLAQDDIDGIQAIYGRSQNPVQPIGPQTPKACDSKLTFDAITTIRGEVMFFKDRFYMRTNPFYPEVELNFISVFWPQLPNGLEAAYEFADRDEVRFFKGNKYWAVQGQNVLHGYPKDIYSSFGFPRTVKHIDAALSEENTGKTYFFVANKYWRYDEYKRSMDPGYPKMIAHDFPGIGHKVDAVFMKDGFFYFFHGTRQYKFDPKTKRILTLQKANSWFNCRKN

SEQ ID NO: 637 - protein, 450 aa, Artificial Sequence
  MMP-1 variant H194T
FPATLETQEQDVDLVQKYLEKYYNLKNDGRQVEKRRNSGPVVEKLKQMQEFFGLKVTGKPDAETLKVMKQPRCGVPDVAQFVLTEGNPRWEQTHLTYRIENYTPDLPRADVDHAIEKAFQLWSNVTPLTFTKVSEGQADIMISFVRGDHRDNSPFDGPGGNLAHAFQPGPGIGGDAHFDEDERWTNNFREYNLTRVAAHELGHSLGLSHSTDIGALMYPSYTFSGDVQLAQDDIDGIQAIYGRSQNPVQPIGPQTPKACDSKLTFDAITTIRGEVMFFKDRFYMRTNPFYPEVELNFISVFWPQLPNGLEAAYEFADRDEVRFFKGNKYWAVQGQNVLHGYPKDIYSSFGFPRTVKHIDAALSEENTGKTYFFVANKYWRYDEYKRSMDPGYPKMIAHDFPGIGHKVDAVFMKDGFFYFFHGTRQYKFDPKTKRILTLQKANSWFNCRKN

SEQ ID NO: 638 - protein, 450 aa, Artificial Sequence
  MMP-1 variant H194Y
FPATLETQEQDVDLVQKYLEKYYNLKNDGRQVEKRRNSGPVVEKLKQMQEFFGLKVTGKPDAETLKVMKQPRCGVPDVAQFVLTEGNPRWEQTHLTYRIENYTPDLPRADVDHAIEKAFQLWSNVTPLTFTKVSEGQADIMISFVRGDHRDNSPFDGPGGNLAHAFQPGPGIGGDAHFDEDERWTNNFREYNLYRVAAHELGHSLGLSHSTDIGALMYPSYTFSGDVQLAQDDIDGIQAIYGRSQNPVQPIGPQTPKACDSKLTFDAITTIRGEVMFFKDRFYMRTNPFYPEVELNFISVFWPQLPNGLEAAYEFADRDEVRFFKGNKYWAVQGQNVLHGYPKDIYSSFGFPRTVKHIDAALSEENTGKTYFFVANKYWRYDEYKRSMDPGYPKMIAHDFPGIGHKVDAVFMKDGFFYFFHGTRQYKFDPKTKRILTLQKANSWFNCRKN

SEQ ID NO: 639 - protein, 450 aa, Artificial Sequence
  MMP-1 variant H194S
FPATLETQEQDVDLVQKYLEKYYNLKNDGRQVEKRRNSGPVVEKLKQMQEFFGLKVTGKPDAETLKVMKQPRCGVPDVAQFVLTEGNPRWEQTHLTYRIENYTPDLPRADVDHAIEKAFQLWSNVTPLTFTKVSEGQADIMISFVRGDHRDNSPFDGPGGNLAHAFQPGPGIGGDAHFDEDERWTNNFREYNLSRVAAHELGHSLGLSHSTDIGALMYPSYTFSGDVQLAQDDIDGIQAIYGRSQNPVQPIGPQTPKACDSKLTFDAITTIRGEVMFFKDRFYMRTNPFYPEVELNFISVFWPQLPNGLEAAYEFADRDEVRFFKGNKYWAVQGQNVLHGYPKDIYSSFGFPRTVKHIDAALSEENTGKTYFFVANKYWRYDEYKRSMDPGYPKMIAHDFPGIGHKVDAVFMKDGFFYFFHGTRQYKFDPKTKRILTLQKANSWFNCRKN

SEQ ID NO: 640 - protein, 450 aa, Artificial Sequence
  MMP-1 variant H194G
FPATLETQEQDVDLVQKYLEKYYNLKNDGRQVEKRRNSGPVVEKLKQMQEFFGLKVTGKPDAETLKVMKQPRCGVPDVAQFVLTEGNPRWEQTHLTYRIENYTPDLPRADVDHAIEKAFQLWSNVTPLTFTKVSEGQADIMISFVRGDHRDNSPFDGPGGNLAHAFQPGPGIGGDAHFDEDERWTNNFREYNLGRVAAHELGHSLGLSHSTDIGALMYPSYTFSGDVQLAQDDIDGIQAIYGRSQNPVQPIGPQTPKACDSKLTFDAITTIRGEVMFFKDRFYMRTNPFYPEVELNFISVFWPQLPNGLEAAYEFADRDEVRFFKGNKYWAVQGQNVLHGYPKDIYSSFGFPRTVKHIDAALSEENTGKTYFFVANKYWRYDEYKRSMDPGYPKMIAHDFPGIGHKVDAVFMKDGFFYFFHGTRQYKFDPKTKRILTLQKANSWFNCRKN

SEQ ID NO: 641 - protein, 450 aa, Artificial Sequence
  MMP-1 variant H194F
FPATLETQEQDVDLVQKYLEKYYNLKNDGRQVEKRRNSGPVVEKLKQMQEFFGLKVTGKPDAETLKVMKQPRCGVPDVAQFVLTEGNPRWEQTHLTYRIENYTPDLPRADVDHAIEKAFQLWSNVTPLTFTKVSEGQADIMISFVRGDHRDNSPFDGPGGNLAHAFQPGPGIGGDAHFDEDERWTNNFREYNLFRVAAHELGHSLGLSHSTDIGALMYPSYTFSGDVQLAQDDIDGIQAIYGRSQNPVQPIGPQTPKACDSKLTFDAITTIRGEVMFFKDRFYMRTNPFYPEVELNFISVFWPQLPNGLEAAYEFADRDEVRFFKGNKYWAVQGQNVLHGYPKDIYSSFGFPRTVKHIDAALSEENTGKTYFFVANKYWRYDEYKRSMDPGYPKMIAHDFPGIGHKVDAVFMKDGFFYFFHGTRQYKFDPKTKRILTLQKANSWFNCRKN

SEQ ID NO: 642 - protein, 450 aa, Artificial Sequence
  MMP-1 variant H194M
FPATLETQEQDVDLVQKYLEKYYNLKNDGRQVEKRRNSGPVVEKLKQMQEFFGLKVTGKPDAETLKVMKQPRCGVPDVAQFVLTEGNPRWEQTHLTYRIENYTPDLPRADVDHAIEKAFQLWSNVTPLTFTKVSEGQADIMISFVRGDHRDNSPFDGPGGNLAHAFQPGPGIGGDAHFDEDERWTNNFREYNLMRVAAHELGHSLGLSHSTDIGALMYPSYTFSGDVQLAQDDIDGIQAIYGRSQNPVQPIGPQTPKACDSKLTFDAITTIRGEVMFFKDRFYMRTNPFYPEVELNFISVFWPQLPNGLEAAYEFADRDEVRFFKGNKYWAVQGQNVLHGYPKDIYSSFGFPRTVKHIDAALSEENTGKTYFFVANKYWRYDEYKRSMDPGYPKMIAHDFPGIGHKVDAVFMKDGFFYFFHGTRQYKFDPKTKRILTLQKANSWFNCRKN

SEQ ID NO: 643 - protein, 450 aa, Artificial Sequence
  MMP-1 variant H194W
FPATLETQEQDVDLVQKYLEKYYNLKNDGRQVEKRRNSGPVVEKLKQMQEFFGLKVTGKPDAETLKVMKQPRCGVPDVAQFVLTEGNPRWEQTHLTYRIENYTPDLPRADVDHAIEKAFQLWSNVTPLTFTKVSEGQADIMISFVRGDHRDNSPFDGPGGNLAHAFQPGPGIGGDAHFDEDERWTNNFREYNLWRVAAHELGHSLGLSHSTDIGALMYPSYTFSGDVQLAQDDIDGIQAIYGRSQNPVQPIGPQTPKACDSKLTFDAITTIRGEVMFFKDRFYMRTNPFYPEVELNFISVFWPQLPNGLEAAYEFADRDEVRFFKGNKYWAVQGQNVLHGYPKDIYSSFGFPRTVKHIDAALSEENTGKTYFFVANKYWRYDEYKRSMDPGYPKMIAHDFPGIGHKVDAVFMKDGFFYFFHGTRQYKFDPKTKRILTLQKANSWFNCRKN

SEQ ID NO: 644 - protein, 450 aa, Artificial Sequence
  MMP-1 variant H194I
FPATLETQEQDVDLVQKYLEKYYNLKNDGRQVEKRRNSGPVVEKLKQMQEFFGLKVTGKPDAETLKVMKQPRCGVPDVAQFVLTEGNPRWEQTHLTYRIENYTPDLPRADVDHAIEKAFQLWSNVTPLTFTKVSEGQADIMISFVRGDHRDNSPFDGPGGNLAHAFQPGPGIGGDAHFDEDERWTNNFREYNLIRVAAHELGHSLGLSHSTDIGALMYPSYTFSGDVQLAQDDIDGIQAIYGRSQNPVQPIGPQTPKACDSKLTFDAITTIRGEVMFFKDRFYMRTNPFYPEVELNFISVFWPQLPNGLEAAYEFADRDEVRFFKGNKYWAVQGQNVLHGYPKDIYSSFGFPRTVKHIDAALSEENTGKTYFFVANKYWRYDEYKRSMDPGYPKMIAHDFPGIGHKVDAVFMKDGFFYFFHGTRQYKFDPKTKRILTLQKANSWFNCRKN

SEQ ID NO: 645 - protein, 450 aa, Artificial Sequence
  MMP-1 variant H194V
FPATLETQEQDVDLVQKYLEKYYNLKNDGRQVEKRRNSGPVVEKLKQMQEFFGLKVTGKPDAETLKVMKQPRCGVPDVAQFVLTEGNPRWEQTHLTYRIENYTPDLPRADVDHAIEKAFQLWSNVTPLTFTKVSEGQADIMISFVRGDHRDNSPFDGPGGNLAHAFQPGPGIGGDAHFDEDERWTNNFREYNLVRVAAHELGHSLGLSHSTDIGALMYPSYTFSGDVQLAQDDIDGIQAIYGRSQNPVQPIGPQTPKACDSKLTFDAITTIRGEVMFFKDRFYMRTNPFYPEVELNFISVFWPQLPNGLEAAYEFADRDEVRFFKGNKYWAVQGQNVLHGYPKDIYSSFGFPRTVKHIDAALSEENTGKTYFFVANKYWRYDEYKRSMDPGYPKMIAHDFPGIGHKVDAVFMKDGFFYFFHGTRQYKFDPKTKRILTLQKANSWFNCRKN

SEQ ID NO: 646 - protein, 450 aa, Artificial Sequence
  MMP-1 variant H194L
FPATLETQEQDVDLVQKYLEKYYNLKNDGRQVEKRRNSGPVVEKLKQMQEFFGLKVTGKPDAETLKVMKQPRCGVPDVAQFVLTEGNPRWEQTHLTYRIENYTPDLPRADVDHAIEKAFQLWSNVTPLTFTKVSEGQADIMISFVRGDHRDNSPFDGPGGNLAHAFQPGPGIGGDAHFDEDERWTNNFREYNLLRVAAHELGHSLGLSHSTDIGALMYPSYTFSGDVQLAQDDIDGIQAIYGRSQNPVQPIGPQTPKACDSKLTFDAITTIRGEVMFFKDRFYMRTNPFYPEVELNFISVFWPQLPNGLEAAYEFADRDEVRFFKGNKYWAVQGQNVLHGYPKDIYSSFGFPRTVKHIDAALSEENTGKTYFFVANKYWRYDEYKRSMDPGYPKMIAHDFPGIGHKVDAVFMKDGFFYFFHGTRQYKFDPKTKRILTLQKANSWFNCRKN

SEQ ID NO: 647 - protein, 450 aa, Artificial Sequence
  MMP-1 variant H194A
FPATLETQEQDVDLVQKYLEKYYNLKNDGRQVEKRRNSGPVVEKLKQMQEFFGLKVTGKPDAETLKVMKQPRCGVPDVAQFVLTEGNPRWEQTHLTYRIENYTPDLPRADVDHAIEKAFQLWSNVTPLTFTKVSEGQADIMISFVRGDHRDNSPFDGPGGNLAHAFQPGPGIGGDAHFDEDERWTNNFREYNLARVAAHELGHSLGLSHSTDIGALMYPSYTFSGDVQLAQDDIDGIQAIYGRSQNPVQPIGPQTPKACDSKLTFDAITTIRGEVMFFKDRFYMRTNPFYPEVELNFISVFWPQLPNGLEAAYEFADRDEVRFFKGNKYWAVQGQNVLHGYPKDIYSSFGFPRTVKHIDAALSEENTGKTYFFVANKYWRYDEYKRSMDPGYPKMIAHDFPGIGHKVDAVFMKDGFFYFFHGTRQYKFDPKTKRILTLQKANSWFNCRKN

SEQ ID NO: 648 - protein, 450 aa, Artificial Sequence
  MMP-1 variant H194P
FPATLETQEQDVDLVQKYLEKYYNLKNDGRQVEKRRNSGPVVEKLKQMQEFFGLKVTGKPDAETLKVMKQPRCGVPDVAQFVLTEGNPRWEQTHLTYRIENYTPDLPRADVDHAIEKAFQLWSNVTPLTFTKVSEGQADIMISFVRGDHRDNSPFDGPGGNLAHAFQPGPGIGGDAHFDEDERWTNNFREYNLPRVAAHELGHSLGLSHSTDIGALMYPSYTFSGDVQLAQDDIDGIQAIYGRSQNPVQPIGPQTPKACDSKLTFDAITTIRGEVMFFKDRFYMRTNPFYPEVELNFISVFWPQLPNGLEAAYEFADRDEVRFFKGNKYWAVQGQNVLHGYPKDIYSSFGFPRTVKHIDAALSEENTGKTYFFVANKYWRYDEYKRSMDPGYPKMIAHDFPGIGHKVDAVFMKDGFFYFFHGTRQYKFDPKTKRILTLQKANSWFNCRKN

SEQ ID NO: 649 - protein, 450 aa, Artificial Sequence
  MMP-1 variant L207D
FPATLETQEQDVDLVQKYLEKYYNLKNDGRQVEKRRNSGPVVEKLKQMQEFFGLKVTGKPDAETLKVMKQPRCGVPDVAQFVLTEGNPRWEQTHLTYRIENYTPDLPRADVDHAIEKAFQLWSNVTPLTFTKVSEGQADIMISFVRGDHRDNSPFDGPGGNLAHAFQPGPGIGGDAHFDEDERWTNNFREYNLHRVAAHELGHSLGDSHSTDIGALMYPSYTFSGDVQLAQDDIDGIQAIYGRSQNPVQPIGPQTPKACDSKLTFDAITTIRGEVMFFKDRFYMRTNPFYPEVELNFISVFWPQLPNGLEAAYEFADRDEVRFFKGNKYWAVQGQNVLHGYPKDIYSSFGFPRTVKHIDAALSEENTGKTYFFVANKYWRYDEYKRSMDPGYPKMIAHDFPGIGHKVDAVFMKDGFFYFFHGTRQYKFDPKTKRILTLQKANSWFNCRKN

SEQ ID NO: 650 - protein, 450 aa, Artificial Sequence
  MMP-1 variant L207E
FPATLETQEQDVDLVQKYLEKYYNLKNDGRQVEKRRNSGPVVEKLKQMQEFFGLKVTGKPDAETLKVMKQPRCGVPDVAQFVLTEGNPRWEQTHLTYRIENYTPDLPRADVDHAIEKAFQLWSNVTPLTFTKVSEGQADIMISFVRGDHRDNSPFDGPGGNLAHAFQPGPGIGGDAHFDEDERWTNNFREYNLHRVAAHELGHSLGESHSTDIGALMYPSYTFSGDVQLAQDDIDGIQAIYGRSQNPVQPIGPQTPKACDSKLTFDAITTIRGEVMFFKDRFYMRTNPFYPEVELNFISVFWPQLPNGLEAAYEFADRDEVRFFKGNKYWAVQGQNVLHGYPKDIYSSFGFPRTVKHIDAALSEENTGKTYFFVANKYWRYDEYKRSMDPGYPKMIAHDFPGIGHKVDAVFMKDGFFYFFHGTRQYKFDPKTKRILTLQKANSWFNCRKN

SEQ ID NO: 651 - protein, 450 aa, Artificial Sequence
  MMP-1 variant L207H
FPATLETQEQDVDLVQKYLEKYYNLKNDGRQVEKRRNSGPVVEKLKQMQEFFGLKVTGKPDAETLKVMKQPRCGVPDVAQFVLTEGNPRWEQTHLTYRIENYTPDLPRADVDHAIEKAFQLWSNVTPLTFTKVSEGQADIMISFVRGDHRDNSPFDGPGGNLAHAFQPGPGIGGDAHFDEDERWTNNFREYNLHRVAAHELGHSLGHSHSTDIGALMYPSYTFSGDVQLAQDDIDGIQAIYGRSQNPVQPIGPQTPKACDSKLTFDAITTIRGEVMFFKDRFYMRTNPFYPEVELNFISVFWPQLPNGLEAAYEFADRDEVRFFKGNKYWAVQGQNVLHGYPKDIYSSFGFPRTVKHIDAALSEENTGKTYFFVANKYWRYDEYKRSMDPGYPKMIAHDFPGIGHKVDAVFMKDGFFYFFHGTRQYKFDPKTKRILTLQKANSWFNCRKN

SEQ ID NO: 652 - protein, 450 aa, Artificial Sequence
  MMP-1 variant L207K
FPATLETQEQDVDLVQKYLEKYYNLKNDGRQVEKRRNSGPVVEKLKQMQEFFGLKVTGKPDAETLKVMKQPRCGVPDVAQFVLTEGNPRWEQTHLTYRIENYTPDLPRADVDHAIEKAFQLWSNVTPLTFTKVSEGQADIMISFVRGDHRDNSPFDGPGGNLAHAFQPGPGIGGDAHFDEDERWTNNFREYNLHRVAAHELGHSLGKSHSTDIGALMYPSYTFSGDVQLAQDDIDGIQAIYGRSQNPVQPIGPQTPKACDSKLTFDAITTIRGEVMFFKDRFYMRTNPFYPEVELNFISVFWPQLPNGLEAAYEFADRDEVRFFKGNKYWAVQGQNVLHGYPKDIYSSFGFPRTVKHIDAALSEENTGKTYFFVANKYWRYDEYKRSMDPGYPKMIAHDFPGIGHKVDAVFMKDGFFYFFHGTRQYKFDPKTKRILTLQKANSWFNCRKN

SEQ ID NO: 653 - protein, 450 aa, Artificial Sequence
  MMP-1 variant L207R
FPATLETQEQDVDLVQKYLEKYYNLKNDGRQVEKRRNSGPVVEKLKQMQEFFGLKVTGKPDAETLKVMKQPRCGVPDVAQFVLTEGNPRWEQTHLTYRIENYTPDLPRADVDHAIEKAFQLWSNVTPLTFTKVSEGQADIMISFVRGDHRDNSPFDGPGGNLAHAFQPGPGIGGDAHFDEDERWTNNFREYNLHRVAAHELGHSLGRSHSTDIGALMYPSYTFSGDVQLAQDDIDGIQAIYGRSQNPVQPIGPQTPKACDSKLTFDAITTIRGEVMFFKDRFYMRTNPFYPEVELNFISVFWPQLPNGLEAAYEFADRDEVRFFKGNKYWAVQGQNVLHGYPKDIYSSFGFPRTVKHIDAALSEENTGKTYFFVANKYWRYDEYKRSMDPGYPKMIAHDFPGIGHKVDAVFMKDGFFYFFHGTRQYKFDPKTKRILTLQKANSWFNCRKN

SEQ ID NO: 654 - protein, 450 aa, Artificial Sequence
  MMP-1 variant L207C
FPATLETQEQDVDLVQKYLEKYYNLKNDGRQVEKRRNSGPVVEKLKQMQEFFGLKVTGKPDAETLKVMKQPRCGVPDVAQFVLTEGNPRWEQTHLTYRIENYTPDLPRADVDHAIEKAFQLWSNVTPLTFTKVSEGQADIMISFVRGDHRDNSPFDGPGGNLAHAFQPGPGIGGDAHFDEDERWTNNFREYNLHRVAAHELGHSLGCSHSTDIGALMYPSYTFSGDVQLAQDDIDGIQAIYGRSQNPVQPIGPQTPKACDSKLTFDAITTIRGEVMFFKDRFYMRTNPFYPEVELNFISVFWPQLPNGLEAAYEFADRDEVRFFKGNKYWAVQGQNVLHGYPKDIYSSFGFPRTVKHIDAALSEENTGKTYFFVANKYWRYDEYKRSMDPGYPKMIAHDFPGIGHKVDAVFMKDGFFYFFHGTRQYKFDPKTKRILTLQKANSWFNCRKN

SEQ ID NO: 655 - protein, 450 aa, Artificial Sequence
  MMP-1 variant L207N
FPATLETQEQDVDLVQKYLEKYYNLKNDGRQVEKRRNSGPVVEKLKQMQEFFGLKVTGKPDAETLKVMKQPRCGVPDVAQFVLTEGNPRWEQTHLTYRIENYTPDLPRADVDHAIEKAFQLWSNVTPLTFTKVSEGQADIMISFVRGDHRDNSPFDGPGGNLAHAFQPGPGIGGDAHFDEDERWTNNFREYNLHRVAAHELGHSLGNSHSTDIGALMYPSYTFSGDVQLAQDDIDGIQAIYGRSQNPVQPIGPQTPKACDSKLTFDAITTIRGEVMFFKDRFYMRTNPFYPEVELNFISVFWPQLPNGLEAAYEFADRDEVRFFKGNKYWAVQGQNVLHGYPKDIYSSFGFPRTVKHIDAALSEENTGKTYFFVANKYWRYDEYKRSMDPGYPKMIAHDFPGIGHKVDAVFMKDGFFYFFHGTRQYKFDPKTKRILTLQKANSWFNCRKN

SEQ ID NO: 656 - protein, 450 aa, Artificial Sequence
  MMP-1 variant L207Q
FPATLETQEQDVDLVQKYLEKYYNLKNDGRQVEKRRNSGPVVEKLKQMQEFFGLKVTGKPDAETLKVMKQPRCGVPDVAQFVLTEGNPRWEQTHLTYRIENYTPDLPRADVDHAIEKAFQLWSNVTPLTFTKVSEGQADIMISFVRGDHRDNSPFDGPGGNLAHAFQPGPGIGGDAHFDEDERWTNNFREYNLHRVAAHELGHSLGQSHSTDIGALMYPSYTFSGDVQLAQDDIDGIQAIYGRSQNPVQPIGPQTPKACDSKLTFDAITTIRGEVMFFKDRFYMRTNPFYPEVELNFISVFWPQLPNGLEAAYEFADRDEVRFFKGNKYWAVQGQNVLHGYPKDIYSSFGFPRTVKHIDAALSEENTGKTYFFVANKYWRYDEYKRSMDPGYPKMIAHDFPGIGHKVDAVFMKDGFFYFFHGTRQYKFDPKTKRILTLQKANSWFNCRKN

SEQ ID NO: 657 - protein, 450 aa, Artificial Sequence
  MMP-1 variant L207T
FPATLETQEQDVDLVQKYLEKYYNLKNDGRQVEKRRNSGPVVEKLKQMQEFFGLKVTGKPDAETLKVMKQPRCGVPDVAQFVLTEGNPRWEQTHLTYRIENYTPDLPRADVDHAIEKAFQLWSNVTPLTFTKVSEGQADIMISFVRGDHRDNSPFDGPGGNLAHAFQPGPGIGGDAHFDEDERWTNNFREYNLHRVAAHELGHSLGTSHSTDIGALMYPSYTFSGDVQLAQDDIDGIQAIYGRSQNPVQPIGPQTPKACDSKLTFDAITTIRGEVMFFKDRFYMRTNPFYPEVELNFISVFWPQLPNGLEAAYEFADRDEVRFFKGNKYWAVQGQNVLHGYPKDIYSSFGFPRTVKHIDAALSEENTGKTYFFVANKYWRYDEYKRSMDPGYPKMIAHDFPGIGHKVDAVFMKDGFFYFFHGTRQYKFDPKTKRILTLQKANSWFNCRKN

SEQ ID NO: 658 - protein, 450 aa, Artificial Sequence
  MMP-1 variant L207Y
FPATLETQEQDVDLVQKYLEKYYNLKNDGRQVEKRRNSGPVVEKLKQMQEFFGLKVTGKPDAETLKVMKQPRCGVPDVAQFVLTEGNPRWEQTHLTYRIENYTPDLPRADVDHAIEKAFQLWSNVTPLTFTKVSEGQADIMISFVRGDHRDNSPFDGPGGNLAHAFQPGPGIGGDAHFDEDERWTNNFREYNLHRVAAHELGHSLGYSHSTDIGALMYPSYTFSGDVQLAQDDIDGIQAIYGRSQNPVQPIGPQTPKACDSKLTFDAITTIRGEVMFFKDRFYMRTNPFYPEVELNFISVFWPQLPNGLEAAYEFADRDEVRFFKGNKYWAVQGQNVLHGYPKDIYSSFGFPRTVKHIDAALSEENTGKTYFFVANKYWRYDEYKRSMDPGYPKMIAHDFPGIGHKVDAVFMKDGFFYFFHGTRQYKFDPKTKRILTLQKANSWFNCRKN

SEQ ID NO: 659 - protein, 450 aa, Artificial Sequence
  MMP-1 variant L207S
FPATLETQEQDVDLVQKYLEKYYNLKNDGRQVEKRRNSGPVVEKLKQMQEFFGLKVTGKPDAETLKVMKQPRCGVPDVAQFVLTEGNPRWEQTHLTYRIENYTPDLPRADVDHAIEKAFQLWSNVTPLTFTKVSEGQADIMISFVRGDHRDNSPFDGPGGNLAHAFQPGPGIGGDAHFDEDERWTNNFREYNLHRVAAHELGHSLGSSHSTDIGALMYPSYTFSGDVQLAQDDIDGIQAIYGRSQNPVQPIGPQTPKACDSKLTFDAITTIRGEVMFFKDRFYMRTNPFYPEVELNFISVFWPQLPNGLEAAYEFADRDEVRFFKGNKYWAVQGQNVLHGYPKDIYSSFGFPRTVKHIDAALSEENTGKTYFFVANKYWRYDEYKRSMDPGYPKMIAHDFPGIGHKVDAVFMKDGFFYFFHGTRQYKFDPKTKRILTLQKANSWFNCRKN

SEQ ID NO: 660 - protein, 450 aa, Artificial Sequence
  MMP-1 variant L207G
FPATLETQEQDVDLVQKYLEKYYNLKNDGRQVEKRRNSGPVVEKLKQMQEFFGLKVTGKPDAETLKVMKQPRCGVPDVAQFVLTEGNPRWEQTHLTYRIENYTPDLPRADVDHAIEKAFQLWSNVTPLTFTKVSEGQADIMISFVRGDHRDNSPFDGPGGNLAHAFQPGPGIGGDAHFDEDERWTNNFREYNLHRVAAHELGHSLGGSHSTDIGALMYPSYTFSGDVQLAQDDIDGIQAIYGRSQNPVQPIGPQTPKACDSKLTFDAITTIRGEVMFFKDRFYMRTNPFYPEVELNFISVFWPQLPNGLEAAYEFADRDEVRFFKGNKYWAVQGQNVLHGYPKDIYSSFGFPRTVKHIDAALSEENTGKTYFFVANKYWRYDEYKRSMDPGYPKMIAHDFPGIGHKVDAVFMKDGFFYFFHGTRQYKFDPKTKRILTLQKANSWFNCRKN

SEQ ID NO: 661 - protein, 450 aa, Artificial Sequence
  MMP-1 variant L207F
FPATLETQEQDVDLVQKYLEKYYNLKNDGRQVEKRRNSGPVVEKLKQMQEFFGLKVTGKPDAETLKVMKQPRCGVPDVAQFVLTEGNPRWEQTHLTYRIENYTPDLPRADVDHAIEKAFQLWSNVTPLTFTKVSEGQADIMISFVRGDHRDNSPFDGPGGNLAHAFQPGPGIGGDAHFDEDERWTNNFREYNLHRVAAHELGHSLGFSHSTDIGALMYPSYTFSGDVQLAQDDIDGIQAIYGRSQNPVQPIGPQTPKACDSKLTFDAITTIRGEVMFFKDRFYMRTNPFYPEVELNFISVFWPQLPNGLEAAYEFADRDEVRFFKGNKYWAVQGQNVLHGYPKDIYSSFGFPRTVKHIDAALSEENTGKTYFFVANKYWRYDEYKRSMDPGYPKMIAHDFPGIGHKVDAVFMKDGFFYFFHGTRQYKFDPKTKRILTLQKANSWFNCRKN

SEQ ID NO: 662 - protein, 450 aa, Artificial Sequence
  MMP-1 variant L207M
FPATLETQEQDVDLVQKYLEKYYNLKNDGRQVEKRRNSGPVVEKLKQMQEFFGLKVTGKPDAETLKVMKQPRCGVPDVAQFVLTEGNPRWEQTHLTYRIENYTPDLPRADVDHAIEKAFQLWSNVTPLTFTKVSEGQADIMISFVRGDHRDNSPFDGPGGNLAHAFQPGPGIGGDAHFDEDERWTNNFREYNLHRVAAHELGHSLGMSHSTDIGALMYPSYTFSGDVQLAQDDIDGIQAIYGRSQNPVQPIGPQTPKACDSKLTFDAITTIRGEVMFFKDRFYMRTNPFYPEVELNFISVFWPQLPNGLEAAYEFADRDEVRFFKGNKYWAVQGQNVLHGYPKDIYSSFGFPRTVKHIDAALSEENTGKTYFFVANKYWRYDEYKRSMDPGYPKMIAHDFPGIGHKVDAVFMKDGFFYFFHGTRQYKFDPKTKRILTLQKANSWFNCRKN

SEQ ID NO: 663 - protein, 450 aa, Artificial Sequence
  MMP-1 variant L207W
FPATLETQEQDVDLVQKYLEKYYNLKNDGRQVEKRRNSGPVVEKLKQMQEFFGLKVTGKPDAETLKVMKQPRCGVPDVAQFVLTEGNPRWEQTHLTYRIENYTPDLPRADVDHAIEKAFQLWSNVTPLTFTKVSEGQADIMISFVRGDHRDNSPFDGPGGNLAHAFQPGPGIGGDAHFDEDERWTNNFREYNLHRVAAHELGHSLGWSHSTDIGALMYPSYTFSGDVQLAQDDIDGIQAIYGRSQNPVQPIGPQTPKACDSKLTFDAITTIRGEVMFFKDRFYMRTNPFYPEVELNFISVFWPQLPNGLEAAYEFADRDEVRFFKGNKYWAVQGQNVLHGYPKDIYSSFGFPRTVKHIDAALSEENTGKTYFFVANKYWRYDEYKRSMDPGYPKMIAHDFPGIGHKVDAVFMKDGFFYFFHGTRQYKFDPKTKRILTLQKANSWFNCRKN

SEQ ID NO: 664 - protein, 450 aa, Artificial Sequence
  MMP-1 variant L207I
FPATLETQEQDVDLVQKYLEKYYNLKNDGRQVEKRRNSGPVVEKLKQMQEFFGLKVTGKPDAETLKVMKQPRCGVPDVAQFVLTEGNPRWEQTHLTYRIENYTPDLPRADVDHAIEKAFQLWSNVTPLTFTKVSEGQADIMISFVRGDHRDNSPFDGPGGNLAHAFQPGPGIGGDAHFDEDERWTNNFREYNLHRVAAHELGHSLGISHSTDIGALMYPSYTFSGDVQLAQDDIDGIQAIYGRSQNPVQPIGPQTPKACDSKLTFDAITTIRGEVMFFKDRFYMRTNPFYPEVELNFISVFWPQLPNGLEAAYEFADRDEVRFFKGNKYWAVQGQNVLHGYPKDIYSSFGFPRTVKHIDAALSEENTGKTYFFVANKYWRYDEYKRSMDPGYPKMIAHDFPGIGHKVDAVFMKDGFFYFFHGTRQYKFDPKTKRILTLQKANSWFNCRKN

SEQ ID NO: 665 - protein, 450 aa, Artificial Sequence
  MMP-1 variant L207V
FPATLETQEQDVDLVQKYLEKYYNLKNDGRQVEKRRNSGPVVEKLKQMQEFFGLKVTGKPDAETLKVMKQPRCGVPDVAQFVLTEGNPRWEQTHLTYRIENYTPDLPRADVDHAIEKAFQLWSNVTPLTFTKVSEGQADIMISFVRGDHRDNSPFDGPGGNLAHAFQPGPGIGGDAHFDEDERWTNNFREYNLHRVAAHELGHSLGVSHSTDIGALMYPSYTFSGDVQLAQDDIDGIQAIYGRSQNPVQPIGPQTPKACDSKLTFDAITTIRGEVMFFKDRFYMRTNPFYPEVELNFISVFWPQLPNGLEAAYEFADRDEVRFFKGNKYWAVQGQNVLHGYPKDIYSSFGFPRTVKHIDAALSEENTGKTYFFVANKYWRYDEYKRSMDPGYPKMIAHDFPGIGHKVDAVFMKDGFFYFFHGTRQYKFDPKTKRILTLQKANSWFNCRKN

SEQ ID NO: 666 - protein, 450 aa, Artificial Sequence
  MMP-1 variant L207A
FPATLETQEQDVDLVQKYLEKYYNLKNDGRQVEKRRNSGPVVEKLKQMQEFFGLKVTGKPDAETLKVMKQPRCGVPDVAQFVLTEGNPRWEQTHLTYRIENYTPDLPRADVDHAIEKAFQLWSNVTPLTFTKVSEGQADIMISFVRGDHRDNSPFDGPGGNLAHAFQPGPGIGGDAHFDEDERWTNNFREYNLHRVAAHELGHSLGASHSTDIGALMYPSYTFSGDVQLAQDDIDGIQAIYGRSQNPVQPIGPQTPKACDSKLTFDAITTIRGEVMFFKDRFYMRTNPFYPEVELNFISVFWPQLPNGLEAAYEFADRDEVRFFKGNKYWAVQGQNVLHGYPKDIYSSFGFPRTVKHIDAALSEENTGKTYFFVANKYWRYDEYKRSMDPGYPKMIAHDFPGIGHKVDAVFMKDGFFYFFHGTRQYKFDPKTKRILTLQKANSWFNCRKN

SEQ ID NO: 667 - protein, 450 aa, Artificial Sequence
  MMP-1 variant L207P
FPATLETQEQDVDLVQKYLEKYYNLKNDGRQVEKRRNSGPVVEKLKQMQEFFGLKVTGKPDAETLKVMKQPRCGVPDVAQFVLTEGNPRWEQTHLTYRIENYTPDLPRADVDHAIEKAFQLWSNVTPLTFTKVSEGQADIMISFVRGDHRDNSPFDGPGGNLAHAFQPGPGIGGDAHFDEDERWTNNFREYNLHRVAAHELGHSLGPSHSTDIGALMYPSYTFSGDVQLAQDDIDGIQAIYGRSQNPVQPIGPQTPKACDSKLTFDAITTIRGEVMFFKDRFYMRTNPFYPEVELNFISVFWPQLPNGLEAAYEFADRDEVRFFKGNKYWAVQGQNVLHGYPKDIYSSFGFPRTVKHIDAALSEENTGKTYFFVANKYWRYDEYKRSMDPGYPKMIAHDFPGIGHKVDAVFMKDGFFYFFHGTRQYKFDPKTKRILTLQKANSWFNCRKN

SEQ ID NO: 668 - protein, 450 aa, Artificial Sequence
  MMP-1 variant D212E
FPATLETQEQDVDLVQKYLEKYYNLKNDGRQVEKRRNSGPVVEKLKQMQEFFGLKVTGKPDAETLKVMKQPRCGVPDVAQFVLTEGNPRWEQTHLTYRIENYTPDLPRADVDHAIEKAFQLWSNVTPLTFTKVSEGQADIMISFVRGDHRDNSPFDGPGGNLAHAFQPGPGIGGDAHFDEDERWTNNFREYNLHRVAAHELGHSLGLSHSTEIGALMYPSYTFSGDVQLAQDDIDGIQAIYGRSQNPVQPIGPQTPKACDSKLTFDAITTIRGEVMFFKDRFYMRTNPFYPEVELNFISVFWPQLPNGLEAAYEFADRDEVRFFKGNKYWAVQGQNVLHGYPKDIYSSFGFPRTVKHIDAALSEENTGKTYFFVANKYWRYDEYKRSMDPGYPKMIAHDFPGIGHKVDAVFMKDGFFYFFHGTRQYKFDPKTKRILTLQKANSWFNCRKN

SEQ ID NO: 669 - protein, 450 aa, Artificial Sequence
  MMP-1 variant D212H
FPATLETQEQDVDLVQKYLEKYYNLKNDGRQVEKRRNSGPVVEKLKQMQEFFGLKVTGKPDAETLKVMKQPRCGVPDVAQFVLTEGNPRWEQTHLTYRIENYTPDLPRADVDHAIEKAFQLWSNVTPLTFTKVSEGQADIMISFVRGDHRDNSPFDGPGGNLAHAFQPGPGIGGDAHFDEDERWTNNFREYNLHRVAAHELGHSLGLSHSTHIGALMYPSYTFSGDVQLAQDDIDGIQAIYGRSQNPVQPIGPQTPKACDSKLTFDAITTIRGEVMFFKDRFYMRTNPFYPEVELNFISVFWPQLPNGLEAAYEFADRDEVRFFKGNKYWAVQGQNVLHGYPKDIYSSFGFPRTVKHIDAALSEENTGKTYFFVANKYWRYDEYKRSMDPGYPKMIAHDFPGIGHKVDAVFMKDGFFYFFHGTRQYKFDPKTKRILTLQKANSWFNCRKN

SEQ ID NO: 670 - protein, 450 aa, Artificial Sequence
  MMP-1 variant D212K
FPATLETQEQDVDLVQKYLEKYYNLKNDGRQVEKRRNSGPVVEKLKQMQEFFGLKVTGKPDAETLKVMKQPRCGVPDVAQFVLTEGNPRWEQTHLTYRIENYTPDLPRADVDHAIEKAFQLWSNVTPLTFTKVSEGQADIMISFVRGDHRDNSPFDGPGGNLAHAFQPGPGIGGDAHFDEDERWTNNFREYNLHRVAAHELGHSLGLSHSTKIGALMYPSYTFSGDVQLAQDDIDGIQAIYGRSQNPVQPIGPQTPKACDSKLTFDAITTIRGEVMFFKDRFYMRTNPFYPEVELNFISVFWPQLPNGLEAAYEFADRDEVRFFKGNKYWAVQGQNVLHGYPKDIYSSFGFPRTVKHIDAALSEENTGKTYFFVANKYWRYDEYKRSMDPGYPKMIAHDFPGIGHKVDAVFMKDGFFYFFHGTRQYKFDPKTKRILTLQKANSWFNCRKN

SEQ ID NO: 671 - protein, 450 aa, Artificial Sequence
  MMP-1 variant D212R
FPATLETQEQDVDLVQKYLEKYYNLKNDGRQVEKRRNSGPVVEKLKQMQEFFGLKVTGKPDAETLKVMKQPRCGVPDVAQFVLTEGNPRWEQTHLTYRIENYTPDLPRADVDHAIEKAFQLWSNVTPLTFTKVSEGQADIMISFVRGDHRDNSPFDGPGGNLAHAFQPGPGIGGDAHFDEDERWTNNFREYNLHRVAAHELGHSLGLSHSTRIGALMYPSYTFSGDVQLAQDDIDGIQAIYGRSQNPVQPIGPQTPKACDSKLTFDAITTIRGEVMFFKDRFYMRTNPFYPEVELNFISVFWPQLPNGLEAAYEFADRDEVRFFKGNKYWAVQGQNVLHGYPKDIYSSFGFPRTVKHIDAALSEENTGKTYFFVANKYWRYDEYKRSMDPGYPKMIAHDFPGIGHKVDAVFMKDGFFYFFHGTRQYKFDPKTKRILTLQKANSWFNCRKN

SEQ ID NO: 672 - protein, 450 aa, Artificial Sequence
  MMP-1 variant D212C
FPATLETQEQDVDLVQKYLEKYYNLKNDGRQVEKRRNSGPVVEKLKQMQEFFGLKVTGKPDAETLKVMKQPRCGVPDVAQFVLTEGNPRWEQTHLTYRIENYTPDLPRADVDHAIEKAFQLWSNVTPLTFTKVSEGQADIMISFVRGDHRDNSPFDGPGGNLAHAFQPGPGIGGDAHFDEDERWTNNFREYNLHRVAAHELGHSLGLSHSTCIGALMYPSYTFSGDVQLAQDDIDGIQAIYGRSQNPVQPIGPQTPKACDSKLTFDAITTIRGEVMFFKDRFYMRTNPFYPEVELNFISVFWPQLPNGLEAAYEFADRDEVRFFKGNKYWAVQGQNVLHGYPKDIYSSFGFPRTVKHIDAALSEENTGKTYFFVANKYWRYDEYKRSMDPGYPKMIAHDFPGIGHKVDAVFMKDGFFYFFHGTRQYKFDPKTKRILTLQKANSWFNCRKN

SEQ ID NO: 673 - protein, 450 aa, Artificial Sequence
  MMP-1 variant D212N
FPATLETQEQDVDLVQKYLEKYYNLKNDGRQVEKRRNSGPVVEKLKQMQEFFGLKVTGKPDAETLKVMKQPRCGVPDVAQFVLTEGNPRWEQTHLTYRIENYTPDLPRADVDHAIEKAFQLWSNVTPLTFTKVSEGQADIMISFVRGDHRDNSPFDGPGGNLAHAFQPGPGIGGDAHFDEDERWTNNFREYNLHRVAAHELGHSLGLSHSTNIGALMYPSYTFSGDVQLAQDDIDGIQAIYGRSQNPVQPIGPQTPKACDSKLTFDAITTIRGEVMFFKDRFYMRTNPFYPEVELNFISVFWPQLPNGLEAAYEFADRDEVRFFKGNKYWAVQGQNVLHGYPKDIYSSFGFPRTVKHIDAALSEENTGKTYFFVANKYWRYDEYKRSMDPGYPKMIAHDFPGIGHKVDAVFMKDGFFYFFHGTRQYKFDPKTKRILTLQKANSWFNCRKN

SEQ ID NO: 674 - protein, 450 aa, Artificial Sequence
  MMP-1 variant D212Q
FPATLETQEQDVDLVQKYLEKYYNLKNDGRQVEKRRNSGPVVEKLKQMQEFFGLKVTGKPDAETLKVMKQPRCGVPDVAQFVLTEGNPRWEQTHLTYRIENYTPDLPRADVDHAIEKAFQLWSNVTPLTFTKVSEGQADIMISFVRGDHRDNSPFDGPGGNLAHAFQPGPGIGGDAHFDEDERWTNNFREYNLHRVAAHELGHSLGLSHSTQIGALMYPSYTFSGDVQLAQDDIDGIQAIYGRSQNPVQPIGPQTPKACDSKLTFDAITTIRGEVMFFKDRFYMRTNPFYPEVELNFISVFWPQLPNGLEAAYEFADRDEVRFFKGNKYWAVQGQNVLHGYPKDIYSSFGFPRTVKHIDAALSEENTGKTYFFVANKYWRYDEYKRSMDPGYPKMIAHDFPGIGHKVDAVFMKDGFFYFFHGTRQYKFDPKTKRILTLQKANSWFNCRKN

SEQ ID NO: 675 - protein, 450 aa, Artificial Sequence
  MMP-1 variant D212T
FPATLETQEQDVDLVQKYLEKYYNLKNDGRQVEKRRNSGPVVEKLKQMQEFFGLKVTGKPDAETLKVMKQPRCGVPDVAQFVLTEGNPRWEQTHLTYRIENYTPDLPRADVDHAIEKAFQLWSNVTPLTFTKVSEGQADIMISFVRGDHRDNSPFDGPGGNLAHAFQPGPGIGGDAHFDEDERWTNNFREYNLHRVAAHELGHSLGLSHSTTIGALMYPSYTFSGDVQLAQDDIDGIQAIYGRSQNPVQPIGPQTPKACDSKLTFDAITTIRGEVMFFKDRFYMRTNPFYPEVELNFISVFWPQLPNGLEAAYEFADRDEVRFFKGNKYWAVQGQNVLHGYPKDIYSSFGFPRTVKHIDAALSEENTGKTYFFVANKYWRYDEYKRSMDPGYPKMIAHDFPGIGHKVDAVFMKDGFFYFFHGTRQYKFDPKTKRILTLQKANSWFNCRKN

SEQ ID NO: 676 - protein, 450 aa, Artificial Sequence
  MMP-1 variant D212Y
FPATLETQEQDVDLVQKYLEKYYNLKNDGRQVEKRRNSGPVVEKLKQMQEFFGLKVTGKPDAETLKVMKQPRCGVPDVAQFVLTEGNPRWEQTHLTYRIENYTPDLPRADVDHAIEKAFQLWSNVTPLTFTKVSEGQADIMISFVRGDHRDNSPFDGPGGNLAHAFQPGPGIGGDAHFDEDERWTNNFREYNLHRVAAHELGHSLGLSHSTYIGALMYPSYTFSGDVQLAQDDIDGIQAIYGRSQNPVQPIGPQTPKACDSKLTFDAITTIRGEVMFFKDRFYMRTNPFYPEVELNFISVFWPQLPNGLEAAYEFADRDEVRFFKGNKYWAVQGQNVLHGYPKDIYSSFGFPRTVKHIDAALSEENTGKTYFFVANKYWRYDEYKRSMDPGYPKMIAHDFPGIGHKVDAVFMKDGFFYFFHGTRQYKFDPKTKRILTLQKANSWFNCRKN

SEQ ID NO: 677 - protein, 450 aa, Artificial Sequence
  MMP-1 variant D212S
FPATLETQEQDVDLVQKYLEKYYNLKNDGRQVEKRRNSGPVVEKLKQMQEFFGLKVTGKPDAETLKVMKQPRCGVPDVAQFVLTEGNPRWEQTHLTYRIENYTPDLPRADVDHAIEKAFQLWSNVTPLTFTKVSEGQADIMISFVRGDHRDNSPFDGPGGNLAHAFQPGPGIGGDAHFDEDERWTNNFREYNLHRVAAHELGHSLGLSHSTSIGALMYPSYTFSGDVQLAQDDIDGIQAIYGRSQNPVQPIGPQTPKACDSKLTFDAITTIRGEVMFFKDRFYMRTNPFYPEVELNFISVFWPQLPNGLEAAYEFADRDEVRFFKGNKYWAVQGQNVLHGYPKDIYSSFGFPRTVKHIDAALSEENTGKTYFFVANKYWRYDEYKRSMDPGYPKMIAHDFPGIGHKVDAVFMKDGFFYFFHGTRQYKFDPKTKRILTLQKANSWFNCRKN

SEQ ID NO: 678 - protein, 450 aa, Artificial Sequence
  MMP-1 variant D212G
FPATLETQEQDVDLVQKYLEKYYNLKNDGRQVEKRRNSGPVVEKLKQMQEFFGLKVTGKPDAETLKVMKQPRCGVPDVAQFVLTEGNPRWEQTHLTYRIENYTPDLPRADVDHAIEKAFQLWSNVTPLTFTKVSEGQADIMISFVRGDHRDNSPFDGPGGNLAHAFQPGPGIGGDAHFDEDERWTNNFREYNLHRVAAHELGHSLGLSHSTGIGALMYPSYTFSGDVQLAQDDIDGIQAIYGRSQNPVQPIGPQTPKACDSKLTFDAITTIRGEVMFFKDRFYMRTNPFYPEVELNFISVFWPQLPNGLEAAYEFADRDEVRFFKGNKYWAVQGQNVLHGYPKDIYSSFGFPRTVKHIDAALSEENTGKTYFFVANKYWRYDEYKRSMDPGYPKMIAHDFPGIGHKVDAVFMKDGFFYFFHGTRQYKFDPKTKRILTLQKANSWFNCRKN

SEQ ID NO: 679 - protein, 450 aa, Artificial Sequence
  MMP-1 variant D212F
FPATLETQEQDVDLVQKYLEKYYNLKNDGRQVEKRRNSGPVVEKLKQMQEFFGLKVTGKPDAETLKVMKQPRCGVPDVAQFVLTEGNPRWEQTHLTYRIENYTPDLPRADVDHAIEKAFQLWSNVTPLTFTKVSEGQADIMISFVRGDHRDNSPFDGPGGNLAHAFQPGPGIGGDAHFDEDERWTNNFREYNLHRVAAHELGHSLGLSHSTFIGALMYPSYTFSGDVQLAQDDIDGIQAIYGRSQNPVQPIGPQTPKACDSKLTFDAITTIRGEVMFFKDRFYMRTNPFYPEVELNFISVFWPQLPNGLEAAYEFADRDEVRFFKGNKYWAVQGQNVLHGYPKDIYSSFGFPRTVKHIDAALSEENTGKTYFFVANKYWRYDEYKRSMDPGYPKMIAHDFPGIGHKVDAVFMKDGFFYFFHGTRQYKFDPKTKRILTLQKANSWFNCRKN

SEQ ID NO: 680 - protein, 450 aa, Artificial Sequence
  MMP-1 variant D212M
FPATLETQEQDVDLVQKYLEKYYNLKNDGRQVEKRRNSGPVVEKLKQMQEFFGLKVTGKPDAETLKVMKQPRCGVPDVAQFVLTEGNPRWEQTHLTYRIENYTPDLPRADVDHAIEKAFQLWSNVTPLTFTKVSEGQADIMISFVRGDHRDNSPFDGPGGNLAHAFQPGPGIGGDAHFDEDERWTNNFREYNLHRVAAHELGHSLGLSHSTMIGALMYPSYTFSGDVQLAQDDIDGIQAIYGRSQNPVQPIGPQTPKACDSKLTFDAITTIRGEVMFFKDRFYMRTNPFYPEVELNFISVFWPQLPNGLEAAYEFADRDEVRFFKGNKYWAVQGQNVLHGYPKDIYSSFGFPRTVKHIDAALSEENTGKTYFFVANKYWRYDEYKRSMDPGYPKMIAHDFPGIGHKVDAVFMKDGFFYFFHGTRQYKFDPKTKRILTLQKANSWFNCRKN

SEQ ID NO: 681 - protein, 450 aa, Artificial Sequence
  MMP-1 variant D212W
FPATLETQEQDVDLVQKYLEKYYNLKNDGRQVEKRRNSGPVVEKLKQMQEFFGLKVTGKPDAETLKVMKQPRCGVPDVAQFVLTEGNPRWEQTHLTYRIENYTPDLPRADVDHAIEKAFQLWSNVTPLTFTKVSEGQADIMISFVRGDHRDNSPFDGPGGNLAHAFQPGPGIGGDAHFDEDERWTNNFREYNLHRVAAHELGHSLGLSHSTWIGALMYPSYTFSGDVQLAQDDIDGIQAIYGRSQNPVQPIGPQTPKACDSKLTFDAITTIRGEVMFFKDRFYMRTNPFYPEVELNFISVFWPQLPNGLEAAYEFADRDEVRFFKGNKYWAVQGQNVLHGYPKDIYSSFGFPRTVKHIDAALSEENTGKTYFFVANKYWRYDEYKRSMDPGYPKMIAHDFPGIGHKVDAVFMKDGFFYFFHGTRQYKFDPKTKRILTLQKANSWFNCRKN

SEQ ID NO: 682 - protein, 450 aa, Artificial Sequence
  MMP-1 variant D212I
FPATLETQEQDVDLVQKYLEKYYNLKNDGRQVEKRRNSGPVVEKLKQMQEFFGLKVTGKPDAETLKVMKQPRCGVPDVAQFVLTEGNPRWEQTHLTYRIENYTPDLPRADVDHAIEKAFQLWSNVTPLTFTKVSEGQADIMISFVRGDHRDNSPFDGPGGNLAHAFQPGPGIGGDAHFDEDERWTNNFREYNLHRVAAHELGHSLGLSHSTIIGALMYPSYTFSGDVQLAQDDIDGIQAIYGRSQNPVQPIGPQTPKACDSKLTFDAITTIRGEVMFFKDRFYMRTNPFYPEVELNFISVFWPQLPNGLEAAYEFADRDEVRFFKGNKYWAVQGQNVLHGYPKDIYSSFGFPRTVKHIDAALSEENTGKTYFFVANKYWRYDEYKRSMDPGYPKMIAHDFPGIGHKVDAVFMKDGFFYFFHGTRQYKFDPKTKRILTLQKANSWFNCRKN

SEQ ID NO: 683 - protein, 450 aa, Artificial Sequence
  MMP-1 variant D212V
FPATLETQEQDVDLVQKYLEKYYNLKNDGRQVEKRRNSGPVVEKLKQMQEFFGLKVTGKPDAETLKVMKQPRCGVPDVAQFVLTEGNPRWEQTHLTYRIENYTPDLPRADVDHAIEKAFQLWSNVTPLTFTKVSEGQADIMISFVRGDHRDNSPFDGPGGNLAHAFQPGPGIGGDAHFDEDERWTNNFREYNLHRVAAHELGHSLGLSHSTVIGALMYPSYTFSGDVQLAQDDIDGIQAIYGRSQNPVQPIGPQTPKACDSKLTFDAITTIRGEVMFFKDRFYMRTNPFYPEVELNFISVFWPQLPNGLEAAYEFADRDEVRFFKGNKYWAVQGQNVLHGYPKDIYSSFGFPRTVKHIDAALSEENTGKTYFFVANKYWRYDEYKRSMDPGYPKMIAHDFPGIGHKVDAVFMKDGFFYFFHGTRQYKFDPKTKRILTLQKANSWFNCRKN

SEQ ID NO: 684 - protein, 450 aa, Artificial Sequence
  MMP-1 variant D212L
FPATLETQEQDVDLVQKYLEKYYNLKNDGRQVEKRRNSGPVVEKLKQMQEFFGLKVTGKPDAETLKVMKQPRCGVPDVAQFVLTEGNPRWEQTHLTYRIENYTPDLPRADVDHAIEKAFQLWSNVTPLTFTKVSEGQADIMISFVRGDHRDNSPFDGPGGNLAHAFQPGPGIGGDAHFDEDERWTNNFREYNLHRVAAHELGHSLGLSHSTLIGALMYPSYTFSGDVQLAQDDIDGIQAIYGRSQNPVQPIGPQTPKACDSKLTFDAITTIRGEVMFFKDRFYMRTNPFYPEVELNFISVFWPQLPNGLEAAYEFADRDEVRFFKGNKYWAVQGQNVLHGYPKDIYSSFGFPRTVKHIDAALSEENTGKTYFFVANKYWRYDEYKRSMDPGYPKMIAHDFPGIGHKVDAVFMKDGFFYFFHGTRQYKFDPKTKRILTLQKANSWFNCRKN

SEQ ID NO: 685 - protein, 450 aa, Artificial Sequence
  MMP-1 variant D212A
FPATLETQEQDVDLVQKYLEKYYNLKNDGRQVEKRRNSGPVVEKLKQMQEFFGLKVTGKPDAETLKVMKQPRCGVPDVAQFVLTEGNPRWEQTHLTYRIENYTPDLPRADVDHAIEKAFQLWSNVTPLTFTKVSEGQADIMISFVRGDHRDNSPFDGPGGNLAHAFQPGPGIGGDAHFDEDERWTNNFREYNLHRVAAHELGHSLGLSHSTAIGALMYPSYTFSGDVQLAQDDIDGIQAIYGRSQNPVQPIGPQTPKACDSKLTFDAITTIRGEVMFFKDRFYMRTNPFYPEVELNFISVFWPQLPNGLEAAYEFADRDEVRFFKGNKYWAVQGQNVLHGYPKDIYSSFGFPRTVKHIDAALSEENTGKTYFFVANKYWRYDEYKRSMDPGYPKMIAHDFPGIGHKVDAVFMKDGFFYFFHGTRQYKFDPKTKRILTLQKANSWFNCRKN

SEQ ID NO: 686 - protein, 450 aa, Artificial Sequence
  MMP-1 variant D212P
FPATLETQEQDVDLVQKYLEKYYNLKNDGRQVEKRRNSGPVVEKLKQMQEFFGLKVTGKPDAETLKVMKQPRCGVPDVAQFVLTEGNPRWEQTHLTYRIENYTPDLPRADVDHAIEKAFQLWSNVTPLTFTKVSEGQADIMISFVRGDHRDNSPFDGPGGNLAHAFQPGPGIGGDAHFDEDERWTNNFREYNLHRVAAHELGHSLGLSHSTPIGALMYPSYTFSGDVQLAQDDIDGIQAIYGRSQNPVQPIGPQTPKACDSKLTFDAITTIRGEVMFFKDRFYMRTNPFYPEVELNFISVFWPQLPNGLEAAYEFADRDEVRFFKGNKYWAVQGQNVLHGYPKDIYSSFGFPRTVKHIDAALSEENTGKTYFFVANKYWRYDEYKRSMDPGYPKMIAHDFPGIGHKVDAVFMKDGFFYFFHGTRQYKFDPKTKRILTLQKANSWFNCRKN

SEQ ID NO: 687 - protein, 450 aa, Artificial Sequence
  MMP-1 variant A230D
FPATLETQEQDVDLVQKYLEKYYNLKNDGRQVEKRRNSGPVVEKLKQMQEFFGLKVTGKPDAETLKVMKQPRCGVPDVAQFVLTEGNPRWEQTHLTYRIENYTPDLPRADVDHAIEKAFQLWSNVTPLTFTKVSEGQADIMISFVRGDHRDNSPFDGPGGNLAHAFQPGPGIGGDAHFDEDERWTNNFREYNLHRVAAHELGHSLGLSHSTDIGALMYPSYTFSGDVQLDQDDIDGIQAIYGRSQNPVQPIGPQTPKACDSKLTFDAITTIRGEVMFFKDRFYMRTNPFYPEVELNFISVFWPQLPNGLEAAYEFADRDEVRFFKGNKYWAVQGQNVLHGYPKDIYSSFGFPRTVKHIDAALSEENTGKTYFFVANKYWRYDEYKRSMDPGYPKMIAHDFPGIGHKVDAVFMKDGFFYFFHGTRQYKFDPKTKRILTLQKANSWFNCRKN

SEQ ID NO: 688 - protein, 450 aa, Artificial Sequence
  MMP-1 variant A230E
FPATLETQEQDVDLVQKYLEKYYNLKNDGRQVEKRRNSGPVVEKLKQMQEFFGLKVTGKPDAETLKVMKQPRCGVPDVAQFVLTEGNPRWEQTHLTYRIENYTPDLPRADVDHAIEKAFQLWSNVTPLTFTKVSEGQADIMISFVRGDHRDNSPFDGPGGNLAHAFQPGPGIGGDAHFDEDERWTNNFREYNLHRVAAHELGHSLGLSHSTDIGALMYPSYTFSGDVQLEQDDIDGIQAIYGRSQNPVQPIGPQTPKACDSKLTFDAITTIRGEVMFFKDRFYMRTNPFYPEVELNFISVFWPQLPNGLEAAYEFADRDEVRFFKGNKYWAVQGQNVLHGYPKDIYSSFGFPRTVKHIDAALSEENTGKTYFFVANKYWRYDEYKRSMDPGYPKMIAHDFPGIGHKVDAVFMKDGFFYFFHGTRQYKFDPKTKRILTLQKANSWFNCRKN

SEQ ID NO: 689 - protein, 450 aa, Artificial Sequence
  MMP-1 variant A230H
FPATLETQEQDVDLVQKYLEKYYNLKNDGRQVEKRRNSGPVVEKLKQMQEFFGLKVTGKPDAETLKVMKQPRCGVPDVAQFVLTEGNPRWEQTHLTYRIENYTPDLPRADVDHAIEKAFQLWSNVTPLTFTKVSEGQADIMISFVRGDHRDNSPFDGPGGNLAHAFQPGPGIGGDAHFDEDERWTNNFREYNLHRVAAHELGHSLGLSHSTDIGALMYPSYTFSGDVQLHQDDIDGIQAIYGRSQNPVQPIGPQTPKACDSKLTFDAITTIRGEVMFFKDRFYMRTNPFYPEVELNFISVFWPQLPNGLEAAYEFADRDEVRFFKGNKYWAVQGQNVLHGYPKDIYSSFGFPRTVKHIDAALSEENTGKTYFFVANKYWRYDEYKRSMDPGYPKMIAHDFPGIGHKVDAVFMKDGFFYFFHGTRQYKFDPKTKRILTLQKANSWFNCRKN

SEQ ID NO: 690 - protein, 450 aa, Artificial Sequence
  MMP-1 variant A230K
FPATLETQEQDVDLVQKYLEKYYNLKNDGRQVEKRRNSGPVVEKLKQMQEFFGLKVTGKPDAETLKVMKQPRCGVPDVAQFVLTEGNPRWEQTHLTYRIENYTPDLPRADVDHAIEKAFQLWSNVTPLTFTKVSEGQADIMISFVRGDHRDNSPFDGPGGNLAHAFQPGPGIGGDAHFDEDERWTNNFREYNLHRVAAHELGHSLGLSHSTDIGALMYPSYTFSGDVQLKQDDIDGIQAIYGRSQNPVQPIGPQTPKACDSKLTFDAITTIRGEVMFFKDRFYMRTNPFYPEVELNFISVFWPQLPNGLEAAYEFADRDEVRFFKGNKYWAVQGQNVLHGYPKDIYSSFGFPRTVKHIDAALSEENTGKTYFFVANKYWRYDEYKRSMDPGYPKMIAHDFPGIGHKVDAVFMKDGFFYFFHGTRQYKFDPKTKRILTLQKANSWFNCRKN

SEQ ID NO: 691 - protein, 450 aa, Artificial Sequence
  MMP-1 variant A230R
FPATLETQEQDVDLVQKYLEKYYNLKNDGRQVEKRRNSGPVVEKLKQMQEFFGLKVTGKPDAETLKVMKQPRCGVPDVAQFVLTEGNPRWEQTHLTYRIENYTPDLPRADVDHAIEKAFQLWSNVTPLTFTKVSEGQADIMISFVRGDHRDNSPFDGPGGNLAHAFQPGPGIGGDAHFDEDERWTNNFREYNLHRVAAHELGHSLGLSHSTDIGALMYPSYTFSGDVQLRQDDIDGIQAIYGRSQNPVQPIGPQTPKACDSKLTFDAITTIRGEVMFFKDRFYMRTNPFYPEVELNFISVFWPQLPNGLEAAYEFADRDEVRFFKGNKYWAVQGQNVLHGYPKDIYSSFGFPRTVKHIDAALSEENTGKTYFFVANKYWRYDEYKRSMDPGYPKMIAHDFPGIGHKVDAVFMKDGFFYFFHGTRQYKFDPKTKRILTLQKANSWFNCRKN

SEQ ID NO: 692 - protein, 450 aa, Artificial Sequence
  MMP-1 variant A230C
FPATLETQEQDVDLVQKYLEKYYNLKNDGRQVEKRRNSGPVVEKLKQMQEFFGLKVTGKPDAETLKVMKQPRCGVPDVAQFVLTEGNPRWEQTHLTYRIENYTPDLPRADVDHAIEKAFQLWSNVTPLTFTKVSEGQADIMISFVRGDHRDNSPFDGPGGNLAHAFQPGPGIGGDAHFDEDERWTNNFREYNLHRVAAHELGHSLGLSHSTDIGALMYPSYTFSGDVQLCQDDIDGIQAIYGRSQNPVQPIGPQTPKACDSKLTFDAITTIRGEVMFFKDRFYMRTNPFYPEVELNFISVFWPQLPNGLEAAYEFADRDEVRFFKGNKYWAVQGQNVLHGYPKDIYSSFGFPRTVKHIDAALSEENTGKTYFFVANKYWRYDEYKRSMDPGYPKMIAHDFPGIGHKVDAVFMKDGFFYFFHGTRQYKFDPKTKRILTLQKANSWFNCRKN

SEQ ID NO: 693 - protein, 450 aa, Artificial Sequence
  MMP-1 variant A230N
FPATLETQEQDVDLVQKYLEKYYNLKNDGRQVEKRRNSGPVVEKLKQMQEFFGLKVTGKPDAETLKVMKQPRCGVPDVAQFVLTEGNPRWEQTHLTYRIENYTPDLPRADVDHAIEKAFQLWSNVTPLTFTKVSEGQADIMISFVRGDHRDNSPFDGPGGNLAHAFQPGPGIGGDAHFDEDERWTNNFREYNLHRVAAHELGHSLGLSHSTDIGALMYPSYTFSGDVQLNQDDIDGIQAIYGRSQNPVQPIGPQTPKACDSKLTFDAITTIRGEVMFFKDRFYMRTNPFYPEVELNFISVFWPQLPNGLEAAYEFADRDEVRFFKGNKYWAVQGQNVLHGYPKDIYSSFGFPRTVKHIDAALSEENTGKTYFFVANKYWRYDEYKRSMDPGYPKMIAHDFPGIGHKVDAVFMKDGFFYFFHGTRQYKFDPKTKRILTLQKANSWFNCRKN

SEQ ID NO: 694 - protein, 450 aa, Artificial Sequence
  MMP-1 variant A230Q
FPATLETQEQDVDLVQKYLEKYYNLKNDGRQVEKRRNSGPVVEKLKQMQEFFGLKVTGKPDAETLKVMKQPRCGVPDVAQFVLTEGNPRWEQTHLTYRIENYTPDLPRADVDHAIEKAFQLWSNVTPLTFTKVSEGQADIMISFVRGDHRDNSPFDGPGGNLAHAFQPGPGIGGDAHFDEDERWTNNFREYNLHRVAAHELGHSLGLSHSTDIGALMYPSYTFSGDVQLQQDDIDGIQAIYGRSQNPVQPIGPQTPKACDSKLTFDAITTIRGEVMFFKDRFYMRTNPFYPEVELNFISVFWPQLPNGLEAAYEFADRDEVRFFKGNKYWAVQGQNVLHGYPKDIYSSFGFPRTVKHIDAALSEENTGKTYFFVANKYWRYDEYKRSMDPGYPKMIAHDFPGIGHKVDAVFMKDGFFYFFHGTRQYKFDPKTKRILTLQKANSWFNCRKN

SEQ ID NO: 695 - protein, 450 aa, Artificial Sequence
  MMP-1 variant A230T
FPATLETQEQDVDLVQKYLEKYYNLKNDGRQVEKRRNSGPVVEKLKQMQEFFGLKVTGKPDAETLKVMKQPRCGVPDVAQFVLTEGNPRWEQTHLTYRIENYTPDLPRADVDHAIEKAFQLWSNVTPLTFTKVSEGQADIMISFVRGDHRDNSPFDGPGGNLAHAFQPGPGIGGDAHFDEDERWTNNFREYNLHRVAAHELGHSLGLSHSTDIGALMYPSYTFSGDVQLTQDDIDGIQAIYGRSQNPVQPIGPQTPKACDSKLTFDAITTIRGEVMFFKDRFYMRTNPFYPEVELNFISVFWPQLPNGLEAAYEFADRDEVRFFKGNKYWAVQGQNVLHGYPKDIYSSFGFPRTVKHIDAALSEENTGKTYFFVANKYWRYDEYKRSMDPGYPKMIAHDFPGIGHKVDAVFMKDGFFYFFHGTRQYKFDPKTKRILTLQKANSWFNCRKN

SEQ ID NO: 696 - protein, 450 aa, Artificial Sequence
  MMP-1 variant A230Y
FPATLETQEQDVDLVQKYLEKYYNLKNDGRQVEKRRNSGPVVEKLKQMQEFFGLKVTGKPDAETLKVMKQPRCGVPDVAQFVLTEGNPRWEQTHLTYRIENYTPDLPRADVDHAIEKAFQLWSNVTPLTFTKVSEGQADIMISFVRGDHRDNSPFDGPGGNLAHAFQPGPGIGGDAHFDEDERWTNNFREYNLHRVAAHELGHSLGLSHSTDIGALMYPSYTFSGDVQLYQDDIDGIQAIYGRSQNPVQPIGPQTPKACDSKLTFDAITTIRGEVMFFKDRFYMRTNPFYPEVELNFISVFWPQLPNGLEAAYEFADRDEVRFFKGNKYWAVQGQNVLHGYPKDIYSSFGFPRTVKHIDAALSEENTGKTYFFVANKYWRYDEYKRSMDPGYPKMIAHDFPGIGHKVDAVFMKDGFFYFFHGTRQYKFDPKTKRILTLQKANSWFNCRKN

SEQ ID NO: 697 - protein, 450 aa, Artificial Sequence
  MMP-1 variant A230S
FPATLETQEQDVDLVQKYLEKYYNLKNDGRQVEKRRNSGPVVEKLKQMQEFFGLKVTGKPDAETLKVMKQPRCGVPDVAQFVLTEGNPRWEQTHLTYRIENYTPDLPRADVDHAIEKAFQLWSNVTPLTFTKVSEGQADIMISFVRGDHRDNSPFDGPGGNLAHAFQPGPGIGGDAHFDEDERWTNNFREYNLHRVAAHELGHSLGLSHSTDIGALMYPSYTFSGDVQLSQDDIDGIQAIYGRSQNPVQPIGPQTPKACDSKLTFDAITTIRGEVMFFKDRFYMRTNPFYPEVELNFISVFWPQLPNGLEAAYEFADRDEVRFFKGNKYWAVQGQNVLHGYPKDIYSSFGFPRTVKHIDAALSEENTGKTYFFVANKYWRYDEYKRSMDPGYPKMIAHDFPGIGHKVDAVFMKDGFFYFFHGTRQYKFDPKTKRILTLQKANSWFNCRKN

SEQ ID NO: 698 - protein, 450 aa, Artificial Sequence
  MMP-1 variant A230G
FPATLETQEQDVDLVQKYLEKYYNLKNDGRQVEKRRNSGPVVEKLKQMQEFFGLKVTGKPDAETLKVMKQPRCGVPDVAQFVLTEGNPRWEQTHLTYRIENYTPDLPRADVDHAIEKAFQLWSNVTPLTFTKVSEGQADIMISFVRGDHRDNSPFDGPGGNLAHAFQPGPGIGGDAHFDEDERWTNNFREYNLHRVAAHELGHSLGLSHSTDIGALMYPSYTFSGDVQLGQDDIDGIQAIYGRSQNPVQPIGPQTPKACDSKLTFDAITTIRGEVMFFKDRFYMRTNPFYPEVELNFISVFWPQLPNGLEAAYEFADRDEVRFFKGNKYWAVQGQNVLHGYPKDIYSSFGFPRTVKHIDAALSEENTGKTYFFVANKYWRYDEYKRSMDPGYPKMIAHDFPGIGHKVDAVFMKDGFFYFFHGTRQYKFDPKTKRILTLQKANSWFNCRKN

SEQ ID NO: 699 - protein, 450 aa, Artificial Sequence
  MMP-1 variant A230F
FPATLETQEQDVDLVQKYLEKYYNLKNDGRQVEKRRNSGPVVEKLKQMQEFFGLKVTGKPDAETLKVMKQPRCGVPDVAQFVLTEGNPRWEQTHLTYRIENYTPDLPRADVDHAIEKAFQLWSNVTPLTFTKVSEGQADIMISFVRGDHRDNSPFDGPGGNLAHAFQPGPGIGGDAHFDEDERWTNNFREYNLHRVAAHELGHSLGLSHSTDIGALMYPSYTFSGDVQLFQDDIDGIQAIYGRSQNPVQPIGPQTPKACDSKLTFDAITTIRGEVMFFKDRFYMRTNPFYPEVELNFISVFWPQLPNGLEAAYEFADRDEVRFFKGNKYWAVQGQNVLHGYPKDIYSSFGFPRTVKHIDAALSEENTGKTYFFVANKYWRYDEYKRSMDPGYPKMIAHDFPGIGHKVDAVFMKDGFFYFFHGTRQYKFDPKTKRILTLQKANSWFNCRKN

SEQ ID NO: 700 - protein, 450 aa, Artificial Sequence
  MMP-1 variant A230M
FPATLETQEQDVDLVQKYLEKYYNLKNDGRQVEKRRNSGPVVEKLKQMQEFFGLKVTGKPDAETLKVMKQPRCGVPDVAQFVLTEGNPRWEQTHLTYRIENYTPDLPRADVDHAIEKAFQLWSNVTPLTFTKVSEGQADIMISFVRGDHRDNSPFDGPGGNLAHAFQPGPGIGGDAHFDEDERWTNNFREYNLHRVAAHELGHSLGLSHSTDIGALMYPSYTFSGDVQLMQDDIDGIQAIYGRSQNPVQPIGPQTPKACDSKLTFDAITTIRGEVMFFKDRFYMRTNPFYPEVELNFISVFWPQLPNGLEAAYEFADRDEVRFFKGNKYWAVQGQNVLHGYPKDIYSSFGFPRTVKHIDAALSEENTGKTYFFVANKYWRYDEYKRSMDPGYPKMIAHDFPGIGHKVDAVFMKDGFFYFFHGTRQYKFDPKTKRILTLQKANSWFNCRKN

SEQ ID NO: 701 - protein, 450 aa, Artificial Sequence
  MMP-1 variant A230W
FPATLETQEQDVDLVQKYLEKYYNLKNDGRQVEKRRNSGPVVEKLKQMQEFFGLKVTGKPDAETLKVMKQPRCGVPDVAQFVLTEGNPRWEQTHLTYRIENYTPDLPRADVDHAIEKAFQLWSNVTPLTFTKVSEGQADIMISFVRGDHRDNSPFDGPGGNLAHAFQPGPGIGGDAHFDEDERWTNNFREYNLHRVAAHELGHSLGLSHSTDIGALMYPSYTFSGDVQLWQDDIDGIQAIYGRSQNPVQPIGPQTPKACDSKLTFDAITTIRGEVMFFKDRFYMRTNPFYPEVELNFISVFWPQLPNGLEAAYEFADRDEVRFFKGNKYWAVQGQNVLHGYPKDIYSSFGFPRTVKHIDAALSEENTGKTYFFVANKYWRYDEYKRSMDPGYPKMIAHDFPGIGHKVDAVFMKDGFFYFFHGTRQYKFDPKTKRILTLQKANSWFNCRKN

SEQ ID NO: 702 - protein, 450 aa, Artificial Sequence
  MMP-1 variant A230I
FPATLETQEQDVDLVQKYLEKYYNLKNDGRQVEKRRNSGPVVEKLKQMQEFFGLKVTGKPDAETLKVMKQPRCGVPDVAQFVLTEGNPRWEQTHLTYRIENYTPDLPRADVDHAIEKAFQLWSNVTPLTFTKVSEGQADIMISFVRGDHRDNSPFDGPGGNLAHAFQPGPGIGGDAHFDEDERWTNNFREYNLHRVAAHELGHSLGLSHSTDIGALMYPSYTFSGDVQLIQDDIDGIQAIYGRSQNPVQPIGPQTPKACDSKLTFDAITTIRGEVMFFKDRFYMRTNPFYPEVELNFISVFWPQLPNGLEAAYEFADRDEVRFFKGNKYWAVQGQNVLHGYPKDIYSSFGFPRTVKHIDAALSEENTGKTYFFVANKYWRYDEYKRSMDPGYPKMIAHDFPGIGHKVDAVFMKDGFFYFFHGTRQYKFDPKTKRILTLQKANSWFNCRKN

SEQ ID NO: 703 - protein, 450 aa, Artificial Sequence
  MMP-1 variant A230V
FPATLETQEQDVDLVQKYLEKYYNLKNDGRQVEKRRNSGPVVEKLKQMQEFFGLKVTGKPDAETLKVMKQPRCGVPDVAQFVLTEGNPRWEQTHLTYRIENYTPDLPRADVDHAIEKAFQLWSNVTPLTFTKVSEGQADIMISFVRGDHRDNSPFDGPGGNLAHAFQPGPGIGGDAHFDEDERWTNNFREYNLHRVAAHELGHSLGLSHSTDIGALMYPSYTFSGDVQLVQDDIDGIQAIYGRSQNPVQPIGPQTPKACDSKLTFDAITTIRGEVMFFKDRFYMRTNPFYPEVELNFISVFWPQLPNGLEAAYEFADRDEVRFFKGNKYWAVQGQNVLHGYPKDIYSSFGFPRTVKHIDAALSEENTGKTYFFVANKYWRYDEYKRSMDPGYPKMIAHDFPGIGHKVDAVFMKDGFFYFFHGTRQYKFDPKTKRILTLQKANSWFNCRKN

SEQ ID NO: 704 - protein, 450 aa, Artificial Sequence
  MMP-1 variant A230L
FPATLETQEQDVDLVQKYLEKYYNLKNDGRQVEKRRNSGPVVEKLKQMQEFFGLKVTGKPDAETLKVMKQPRCGVPDVAQFVLTEGNPRWEQTHLTYRIENYTPDLPRADVDHAIEKAFQLWSNVTPLTFTKVSEGQADIMISFVRGDHRDNSPFDGPGGNLAHAFQPGPGIGGDAHFDEDERWTNNFREYNLHRVAAHELGHSLGLSHSTDIGALMYPSYTFSGDVQLLQDDIDGIQAIYGRSQNPVQPIGPQTPKACDSKLTFDAITTIRGEVMFFKDRFYMRTNPFYPEVELNFISVFWPQLPNGLEAAYEFADRDEVRFFKGNKYWAVQGQNVLHGYPKDIYSSFGFPRTVKHIDAALSEENTGKTYFFVANKYWRYDEYKRSMDPGYPKMIAHDFPGIGHKVDAVFMKDGFFYFFHGTRQYKFDPKTKRILTLQKANSWFNCRKN

SEQ ID NO: 705 - protein, 450 aa, Artificial Sequence
  MMP-1 variant A230P
FPATLETQEQDVDLVQKYLEKYYNLKNDGRQVEKRRNSGPVVEKLKQMQEFFGLKVTGKPDAETLKVMKQPRCGVPDVAQFVLTEGNPRWEQTHLTYRIENYTPDLPRADVDHAIEKAFQLWSNVTPLTFTKVSEGQADIMISFVRGDHRDNSPFDGPGGNLAHAFQPGPGIGGDAHFDEDERWTNNFREYNLHRVAAHELGHSLGLSHSTDIGALMYPSYTFSGDVQLPQDDIDGIQAIYGRSQNPVQPIGPQTPKACDSKLTFDAITTIRGEVMFFKDRFYMRTNPFYPEVELNFISVFWPQLPNGLEAAYEFADRDEVRFFKGNKYWAVQGQNVLHGYPKDIYSSFGFPRTVKHIDAALSEENTGKTYFFVANKYWRYDEYKRSMDPGYPKMIAHDFPGIGHKVDAVFMKDGFFYFFHGTRQYKFDPKTKRILTLQKANSWFNCRKN

SEQ ID NO: 706 - DNA, 1353 bp, Artificial Sequence
  hMMP-1
  CDS (1)...(1353): Pro MMP-1
  CDS (241)...(726): Catalytic Domain
  CDS (727)...(774): Linker Region
ttcccagcgactctagaaacacaagagcaagatgtggacttagtccagaaatacctggaaaaatactacaacctgaagaatgatgggaggcaagttgaaaagcggagaaatagtggcccagtggttgaaaaattgaagcaaatgcaggaattctttgggctgaaagtgactgggaaaccagatgctgaaaccctgaaggtgatgaagcagcccagatgtggagtgcctgatgtggctcagtttgtcctcactgaggggaaccctcgctgggagcaaacacatctgacctacaggattgaaaattacacgccagatttgccaagagcagatgtggaccatgccattgagaaagccttccaactctggagtaatgtcacacctctgacattcaccaaggtctctgagggtcaagcagacatcatgatatcttttgtcaggggagatcatcgggacaactctccttttgatggacctggaggaaatcttgctcatgcttttcaaccaggcccaggtattggaggggatgctcattttgatgaagatgaaaggtggaccaacaatttcagagagtacaacttacatcgtgttgcggctcatgaactcggccattctcttggactctcccattctactgatatcggggctttgatgtaccctagctacaccttcagtggtgatgttcagctagctcaggatgacattgatggcatccaagccatatatggacgttcccaaaatcctgtccagcccatcggcccacaaaccccaaaagcgtgtgacagtaagctaacctttgatgctataactacgattcggggagaagtgatgttctttaaagacagattctacatgcgcacaaatcccttctacccggaagttgagctcaatttcatttctgttttctggccacaactgccaaatgggcttgaagctgcttacgaatttgccgacagagatgaagtccggtttttcaaagggaataagtactgggctgttcagggacagaatgtgctacacggataccccaaggacatctacagctcctttggcttccctagaactgtgaagcatatcgatgctgctctttctgaggaaaacactggaaaaacctacttctttgttgctaacaaatactggaggtatgatgaatataaacgatctatggatccaggttatcccaaaatgatagcacatgactttcctggaattggccacaaagttgatgcagttttcatgaaagatggatttttctatttctttcatggaacaagacaatacaaatttgatcctaaaacgaagagaattttgactctccagaaagctaatagctggttcaactgcaggaaaaattga

SEQ ID NO: 707 - protein, 7 aa, Artificial Sequence
  fluorescence substrate
  MOD_RES 1: Lys modified with 7-Methoxycoumarin-4-yl)acetyl
  MOD_RES 6: Ala modified with 2,4,-Dinitrophenyl)-L-2,3-diaminopropionyl
KPLGLAR

SEQ ID NO: 708 - DNA, 1973 bp, Homo sapiens
  MMP-1
gggatattggagtagcaagaggctgggaagccatcacttaccttgcactgagaaagaagacaaaggccagtatgcacagctttcctccactgctgctgctgctgttctggggtgtggtgtctcacagcttcccagcgactctagaaacacaagagcaagatgtggacttagtccagaaatacctggaaaaatactacaacctgaagaatgatgggaggcaagttgaaaagcggagaaatagtggcccagtggttgaaaaattgaagcaaatgcaggaattctttgggctgaaagtgactgggaaaccagatgctgaaaccctgaaggtgatgaagcagcccagatgtggagtgcctgatgtggctcagtttgtcctcactgaggggaaccctcgctgggagcaaacacatctgacctacaggattgaaaattacacgccagatttgccaagagcagatgtggaccatgccattgagaaagccttccaactctggagtaatgtcacacctctgacattcaccaaggtctctgagggtcaagcagacatcatgatatcttttgtcaggggagatcatcgggacaactctccttttgatggacctggaggaaatcttgctcatgcttttcaaccaggcccaggtattggaggggatgctcattttgatgaagatgaaaggtggaccaacaatttcagagagtacaacttacatcgtgttgcggctcatgaactcggccattctcttggactctcccattctactgatatcggggctttgatgtaccctagctacaccttcagtggtgatgttcagctagctcaggatgacattgatggcatccaagccatatatggacgttcccaaaatcctgtccagcccatcggcccacaaaccccaaaagcgtgtgacagtaagctaacctttgatgctataactacgattcggggagaagtgatgttctttaaagacagattctacatgcgcacaaatcccttctacccggaagttgagctcaatttcatttctgttttctggccacaactgccaaatgggcttgaagctgcttacgaatttgccgacagagatgaagtccggtttttcaaagggaataagtactgggctgttcagggacagaatgtgctacacggataccccaaggacatctacagctcctttggcttccctagaactgtgaagcatatcgatgctgctctttctgaggaaaacactggaaaaacctacttctttgttgctaacaaatactggaggtatgatgaatataaacgatctatggatccaggttatcccaaaatgatagcacatgactttcctggaattggccacaaagttgatgcagttttcatgaaagatggatttttctatttctttcatggaacaagacaatacaaatttgatcctaaaacgaagagaattttgactctccagaaagctaatagctggttcaactgcaggaaaaattgaacattactaatttgaatggaaaacacatggtgtgagtccaaagaaggtgttttcctgaagaactgtctattttctcagtcatttttaacctctagagtcactgatacacagaatataatcttatttatacctcagtttgcatatttttttactatttagaatgtagccctttttgtactgatataatttagttccacaaatggtgggtacaaaaagtcaagtttgtggcttatggattcatataggccagagttgcaaagatcttttccagagtatgcaactctgacgttgatcccagagagcagcttcagtgacaaacatatcctttcaagacagaaagagacaggagacatgagtctttgccggaggaaaagcagctcaagaacacatgtgcagtcactggtgtcaccctggataggcaagggataactcttctaacacaaaataagtgttttatgtttggaataaagtcaaccttgtttctactgtttt

SEQ ID NO: 709 - protein, 370 aa, Homo sapiens
  MMP-1 (mature)
FVLTEGNPRWEQTHLTYRIENYTPDLPRADVDHAIEKAFQLWSNVTPLTFTKVSEGQADIMISFVRGDHRDNSPFDGPGGNLAHAFQPGPGIGGDAHFDEDERWTNNFREYNLHRVAAHELGHSLGLSHSTDIGALMYPSYTFSGDVQLAQDDIDGIQAIYGRSQNPVQPIGPQTPKACDSKLTFDAITTIRGEVMFFKDRFYMRTNPFYPEVELNFISVFWPQLPNGLEAAYEFADRDEVRFFKGNKYWAVQGQNVLHGYPKDIYSSFGFPRTVKHIDAALSEENTGKTYFFVANKYWRYDEYKRSMDPGYPKMIAHDFPGIGHKVDAVFMKDGFFYFFHGTRQYKFDPKTKRILTLQKANSWFNCRKN

SEQ ID NO: 710 - DNA, 2223 bp, Homo sapiens
  MMP-8
gctcgccagggaagggccctacccagaggacagaaagaaagccaggaggggtagagtttgaagagaagatcatgttctccctgaagacgcttccatttctgctcttactccatgtgcagatttccaaggcctttcctgtatcttctaaagagaaaaatacaaaaactgttcaggactacctggaaaagttctaccaattaccaagcaaccagtatcagtctacaaggaagaatggcactaatgtgatcgttgaaaagcttaaagaaatgcagcgattttttgggttgaatgtgacggggaagccaaatgaggaaactctggacatgatgaaaaagcctcgctgtggagtgcctgacagtggtggttttatgttaaccccaggaaaccccaagtgggaacgcactaacttgacctacaggattcgaaactataccccacagctgtcagaggctgaggtagaaagagctatcaaggatgcctttgaactctggagtgttgcatcacctctcatcttcaccaggatctcacagggagaggcagatatcaacattgctttttaccaaagagatcacggtgacaattctccatttgatggacccaatggaatccttgctcatgcctttcagccaggccaaggtattggaggagatgctcattttgatgccgaagaaacatggaccaacacctccgcaaattacaacttgtttcttgttgctgctcatgaatttggccattctttggggctcgctcactcctctgaccctggtgccttgatgtatcccaactatgctttcagggaaaccagcaactactcactccctcaagatgacatcgatggcattcaggccatctatggactttcaagcaaccctatccaacctactggaccaagcacacccaaaccctgtgaccccagtttgacatttgatgctatcaccacactccgtggagaaatacttttctttaaagacaggtacttctggagaaggcatcctcagctacaaagagtcgaaatgaattttatttctctattctggccatcccttccaactggtatacaggctgcttatgaagattttgacagagacctcattttcctatttaaaggcaaccaatactgggctctgagtggctatgatattctgcaaggttatcccaaggatatatcaaactatggcttccccagcagcgtccaagcaattgacgcagctgttttctacagaagtaaaacatacttctttgtaaatgaccaattctggagatatgataaccaaagacaattcatggagccaggttatcccaaaagcatatcaggtgcctttccaggaatagagagtaaagttgatgcagttttccagcaagaacatttcttccatgtcttcagtggaccaagatattacgcatttgatcttattgctcagagagttaccagagttgcaagaggcaataaatggcttaactgtagatatggctgaagcaaaatcaaatgtggctgtatccactttcagaatgttgaagggaagttcagcatgcattttcgttacattgtgtcctgcttatacttttctcaatattaagtcattgtttcccatcactgtatccattctacctgtcctccgtgaaaatatgtttggaatattccactatttgcagaggcttattcagttcttacacattccatcttacattagtgattccatcaaagagaaggaaagtaagcctttttgtcacctcaatatttactatttcaatacttacatatctgacttctaggatttattgttatattacttgcctatctgacttcatacatccctcagtttcttaaaatgtcctatgtatatcttctacatgcaatttagaactagattttggttagaagtaaggattataaacaacctagacagtacccttggcctttacagaaaatatggtgctgttttctacccttggaaagaaatgtagatgatatgtttcgtgggttgaattgtgtcccccataaaagatatgttgaagttctaaccccaggtacccatgaatgtgagcttaccagggtctttgcagatgtaattagttaagttaaggtgagatcacactgaattagggtgggctctaaatccattatgactgttgttcttataagaagaagagagcatagccacctaggggaggaggccgtgtgaagacagaggcagagattggagtgacgcatctccaagccaa

SEQ ID NO: 711 - protein, 467 aa, Homo sapiens [sequence omitted]

SEQ ID NO: 712 - protein, 367 aa, Homo sapiens
  MMP-8 mature
LTPGNPKWERTNLTYRIRNYTPQLSEAEVERAIKDAFELWSVASPLIFTRISQGEADINIAFYQRDHGDNSPFDGPNGILAHAFQPGQGIGGDAHFDAEETWTNTSANYNLFLVAAHEFGHSLGLAHSSDPGALMYPNYAFRETSNYSLPQDDIDGIQAIYGLSSNPIQPTGPSTPKPCDPSLTFDAITTLRGEILFFKDRYFWRRHPQLQRVEMNFISLFWPSLPTGIQAAYEDFDRDLIFLFKGNQYWALSGYDILQGYPKDISNYGFPSSVQAIDAAVFYRSKTYFFVNDQFWRYDNQRQFMEPGYPKSISGAFPGIESKVDAVFQQEHFFHVFSGPRYYAFDLIAQRVTRVARGNKWLNCRYG

SEQ ID NO: 713 - DNA, 2722 bp, Homo sapiens
  MMP-13
caacagtccccaggcatcaccattcaagatgcatccaggggtcctggctgccttcctcttcttgagctggactcattgtcgggccctgccccttcccagtggtggtgatgaagatgatttgtctgaggaagacctccagtttgcagagcgctacctgagatcatactaccatcctacaaatctcgcgggaatcctgaaggagaatgcagcaagctccatgactgagaggctccgagaaatgcagtctttcttcggcttagaggtgactggcaaacttgacgataacaccttagatgtcatgaaaaagccaagatgcggggttcctgatgtgggtgaatacaatgttttccctcgaactcttaaatggtccaaaatgaatttaacctacagaattgtgaattacacccctgatatgactcattctgaagtcgaaaaggcattcaaaaaagccttcaaagtttggtccgatgtaactcctctgaattttaccagacttcacgatggcattgctgacatcatgatctcttttggaattaaggagcatggcgacttctacccatttgatgggccctctggcctgctggctcatgcttttcctcctgggccaaattatggaggagatgcccattttgatgatgatgaaacctggacaagtagttccaaaggctacaacttgtttcttgttgctgcgcatgagttcggccactccttaggtcttgaccactccaaggaccctggagcactcatgtttcctatctacacctacaccggcaaaagccactttatgcttcctgatgacgatgtacaagggatccagtctctctatggtccaggagatgaagaccccaaccctaaacatccaaaaacgccagacaaatgtgacccttccttatcccttgatgccattaccagtctccgaggagaaacaatgatctttaaagacagattcttctggcgcctgcatcctcagcaggttgatgcggagctgtttttaacgaaatcattttggccagaacttcccaaccgtattgatgctgcatatgagcacccttctcatgacctcatcttcatcttcagaggtagaaaattttgggctcttaatggttatgacattctggaaggttatcccaaaaaaatatctgaactgggtcttccaaaagaagttaagaagataagtgcagctgttcactttgaggatacaggcaagactctcctgttctcaggaaaccaggtctggagatatgatgatactaaccatattatggataaagactatccgagactaatagaagaagacttcccaggaattggtgataaagtagatgctgtctatgagaaaaatggttatatctattttttcaacggacccatacagtttgaatacagcatctggagtaaccgtattgttcgcgtcatgccagcaaattccattttgtggtgttaagtgtctttttaaaaattgttatttaaatcctgaagagcatttggggtaatacttccagaagtgcggggtaggggaagaagagctatcaggagaaagcttggttctgtgaacaagcttcagtaagttatctttgaatatgtagtatctatatgactatgcgtggctggaaccacattgaagaatgttagagtaatgaaatggaggatctctaaagagcatctgattcttgttgctgtacaaaagcaatggttgatgatacttcccacaccacaaatgggacacatggtctgtcaatgagagcataatttaaaaatatatttataaggaaattttacaagggcataaagtaaatacatgcatataatgaataaatcattcttactaaaaagtataaaatagtatgaaaatggaaatttgggagagccatacataaaagaaataaaccaaaggaaaatgtctgtaataatagactgtaacttccaaataaataattttcattttgcactgaggatattcagatgtatgtgcccttcttcacacagacactaacgaaatatcaaagtcattaaagacaggagacaaaagagcagtggtaagaatagtagatgtggcctttgaattctgtttaattttcacttttggcaatgactcaaagtctgctctcatataagacaaatattcctttgcatattataaaggataaagaaggatgatgtctttttattaaaatatttcaggttcttcagaagtcacacattacaaagttaaaattgttatcaaaatagtctaaggccatggcatccctttttcataaattatttgattatttaagactaaaagttgcattttaaccctattttacctagctaattatttaattgtccggtttgtcttggatatataggctattttctaaagacttgtatagcatgaaataaaatatatcttataaagtggaagtatgtatattaaaaaagagacatccaaatttttttttaaagcagtctactagattgtgatcccttgagatatggaaggatgcctttttttctctgcatttaaaaaaatcccccagcacttcccacagtgcctattgatacttggggagggtgcttggcacttattgaatatatgatcggccatcaagggaagaactattgtgctcagagacactgttgataaaaactcaggcaaagaaaatgaaatgcatatttgcaaagtgtattaggaagtgtttatgttgtttataataaaaatatattttcaacagaaaaaaaa

SEQ ID NO: 714 - protein, 471 aa, Homo sapiens
  MMP-13 precursor
MHPGVLAAFLFLSWTHCRALPLPSGGDEDDLSEEDLQFAERYLRSYYHPTNLAGILKENAASSMTERLREMQSFFGLEVTGKLDDNTLDVMKKPRCGVPDVGEYNVFPRTLKWSKMNLTYRIVNYTPDMTHSEVEKAFKKAFKVWSDVTPLNFTRLHDGIADIMISFGIKEHGDFYPFDGPSGLLAHAFPPGPNYGGDAHFDDDETWTSSSKGYNLFLVAAHEFGHSLGLDHSKDPGALMFPIYTYTGKSHFMLPDDDVQGIQSLYGPGDEDPNPKHPKTPDKCDPSLSLDAITSLRGETMIFKDRFFWRLHPQQVDAELFLTKSFWPELPNRIDAAYEHPSHDLIFIFRGRKFWALNGYDILEGYPKKISELGLPKEVKKISAAVHFEDTGKTLLFSGNQVWRYDDTNHIMDKDYPRLIEEDFPGIGDKVDAVYEKNGYIYFFNGPIQFEYSIWSNRIVRVMPANSILWC

SEQ ID NO: 715 - protein, 368 aa, Homo sapiens
  MMP-13 mature
YNVFPRTLKWSKMNLTYRIVNYTPDMTHSEVEKAFKKAFKVWSDVTPLNFTRLHDGIADIMISFGIKEHGDFYPFDGPSGLLAHAFPPGPNYGGDAHFDDDETWTSSSKGYNLFLVAAHEFGHSLGLDHSKDPGALMFPIYTYTGKSHFMLPDDDVQGIQSLYGPGDEDPNPKHPKTPDKCDPSLSLDAITSLRGETMIFKDRFFWRLHPQQVDAELFLTKSFWPELPNRIDAAYEHPSHDLIFIFRGRKFWALNGYDILEGYPKKISELGLPKEVKKISAAVHFEDTGKTLLFSGNQVWRYDDTNHIMDKDYPRLIEEDFPGIGDKVDAVYEKNGYIYFFNGPIQFEYSIWSNRIVRVMPANSILWC

SEQ ID NO: 716 - DNA, 1609 bp, Xenopus laevis
  MMP-18
accttcaaatcctagaaagccttagaagaatgaacagcctcctgctaaagctgctactatgtgtagccattactgctgccttcccagcagataaacaagatgagcccccagcaacaaaggaagaaatggcagagaattacttgaagagattttacagtcttggaactgatgggggaccagttggaagaaagaaacacatccaacctttcactgaaaagctcgagcagatgcagaagttttttggcttaaaggtgacaggaacattggaccccaagactgtagaagtaatggagaaacccagatgtggagtctatgatgttggccagtacagcacagtcgcaaaaagttctgcatggcagaagaaggatctgacctacagaattctaaacttcactcctgacctgcctcaggctgatgtggagactgccatacaaagagctttcaaagtctggagtgacgtgacacctttgacctttaccagaatctacaatgaagtatcagatatagaaatctcctttacagctggagatcacaaagacaattctccttttgatggatctggtggcattttggcccatgcctttcagcccggcaatggcattggtggagatgcccattttgatgaagatgaaacctggacaaagaccagtgaaatatacaatctgtttcttgttgctgctcatgaatttggacactcgctggggctttctcattccactgatcagggtgctttgatgtatccaacatactcaaataccgaccccaagacatttcagcttcctcaagatgatatcaatgctatacagtatctatatggaaaatcctccaatccagtccaaccaaccggaccatccactccttccagatgtgatccaaatgttgttttcaatgctgtcaccaccatgagaggagaactgattttctttgtgaagaggtttttatggaggaagcatccccaagcatccgaggctgaactcatgtttgttcaagcattctggccatcgctgcccactaatattgatgcggcgtatgaaaatcctataacggagcagatccttgtgtttaaaggatcaaaatatacagctctggacggcttcgatgtagtacaaggttaccccaggaacatctacagcctgggatttccaaagaccgtgaaaagaattgatgcggctgttcatattgaacaactagggaaaacatatttctttgcagctaagaaatactggagttatgatgaagataaaaaacaaatggacaaaggctttccaaagcaaataagcaacgatttcccgggaattcctgataaaattgatgcagctttttattacagaggccgcctgtatttcttcattggaaggagccagtttgaatacaatatcaactctaaaagaatcgtacaggtcttaagaagcaacagctggttgggctgttaataagacggaccccaagctctgtaacaagggcaacgatgaatgtgatggcagctcatttctgcacctgccgtgtgaccaatattatttaaaatcatttcctttgaatgtttgactttatttaatctttatgaattaatattttgtactcatgttgttttaataaaaacgttttgttt

SEQ ID NO: 717 - protein, 467 aa, Xenopus laevis
  MMP-18 precursor
MNSLLLKLLLCVAITAAFPADKQDEPPATKEEMAENYLKRFYSLGTDGGPVGRKKHIQPFTEKLEQMQKFFGLKVTGTLDPKTVEVMEKPRCGVYDVGQYSTVAKSSAWQKKDLTYRILNFTPDLPQADVETAIQRAFKVWSDVTPLTFTRIYNEVSDIEISFTAGDHKDNSPFDGSGGILAHAFQPGNGIGGDAHFDEDETWTKTSEIYNLFLVAAHEFGHSLGLSHSTDQGALMYPTYSNTDPKTFQLPQDDINAIQYLYGKSSNPVQPTGPSTPSRCDPNVVFNAVTTMRGELIFFVKRFLWRKHPQASEAELMFVQAFWPSLPTNIDAAYENPITEQILVFKGSKYTALDGFDVVQGYPRNIYSLGFPKTVKRIDAAVHIEQLGKTYFFAAKKYWSYDEDKKQMDKGFPKQISNDFPGIPDKIDAAFYYRGRLYFFIGRSQFEYNINSKRIVQVLRSNSWLGC

SEQ ID NO: 718 - protein, 368 aa, Xenopus laevis
  MMP-18 mature
YSTVAKSSAWQKKDLTYRILNFTPDLPQADVETAIQRAFKVWSDVTPLTFTRIYNEVSDIEISFTAGDHKDNSPFDGSGGILAHAFQPGNGIGGDAHFDEDETWTKTSEIYNLFLVAAHEFGHSLGLSHSTDQGALMYPTYSNTDPKTFQLPQDDINAIQYLYGKSSNPVQPTGPSTPSRCDPNVVFNAVTTMRGELIFFVKRFLWRKHPQASEAELMFVQAFWPSLPTNIDAAYENPITEQILVFKGSKYTALDGFDVVQGYPRNIYSLGFPKTVKRIDAAVHIEQLGKTYFFAAKKYWSYDEDKKQMDKGFPKQISNDFPGIPDKIDAAFYYRGRLYFFIGRSQFEYNINSKRIVQVLRSNSWLGC

SEQ ID NO: 719 - DNA, 3546 bp, Homo sapiens
  MMP-2
gcggctgccctcccttgtttccgctgcatccagacttcctcaggcggtggctggaggctgcgcatctggggctttaaacatacaaagggattgccaggacctgcggcggcggcggcggcggcgggggctggggcgcgggggccggaccatgagccgctgagccgggcaaaccccaggccaccgagccagcggaccctcggagcgcagccctgcgccgcggagcaggctccaaccaggcggcgaggcggccacacgcaccgagccagcgacccccgggcgacgcgcggggccagggagcgctacgatggaggcgctaatggcccggggcgcgctcacgggtcccctgagggcgctctgtctcctgggctgcctgctgagccacgccgccgccgcgccgtcgcccatcatcaagttccccggcgatgtcgcccccaaaacggacaaagagttggcagtgcaatacctgaacaccttctatggctgccccaaggagagctgcaacctgtttgtgctgaaggacacactaaagaagatgcagaagttctttggactgccccagacaggtgatcttgaccagaataccatcgagaccatgcggaagccacgctgcggcaacccagatgtggccaactacaacttcttccctcgcaagcccaagtgggacaagaaccagatcacatacaggatcattggctacacacctgatctggacccagagacagtggatgatgcctttgctcgtgccttccaagtctggagcgatgtgaccccactgcggttttctcgaatccatgatggagaggcagacatcatgatcaactttggccgctgggagcatggcgatggatacccctttgacggtaaggacggactcctggctcatgccttcgccccaggcactggtgttgggggagactcccattttgatgacgatgagctatggaccttgggagaaggccaagtggtccgtgtgaagtatgggaacgccgatggggagtactgcaagttccccttcttgttcaatggcaaggagtacaacagctgcactgataccggccgcagcgatggcttcctctggtgctccaccacctacaactttgagaaggatggcaagtacggcttctgtccccatgaagccctgttcaccatgggcggcaacgctgaaggacagccctgcaagtttccattccgcttccagggcacatcctatgacagctgcaccactgagggccgcacggatggctaccgctggtgcggcaccactgaggactacgaccgcgacaagaagtatggcttctgccctgagaccgccatgtccactgttggtgggaactcagaaggtgccccctgtgtcttccccttcactttcctgggcaacaaatatgagagctgcaccagcgccggccgcagtgacggaaagatgtggtgtgcgaccacagccaactacgatgatgaccgcaagtggggcttctgccctgaccaagggtacagcctgttcctcgtggcagcccacgagtttggccacgccatggggctggagcactcccaagaccctggggccctgatggcacccatttacacctacaccaagaacttccgtctgtcccaggatgacatcaagggcattcaggagctctatggggcctctcctgacattgaccttggcaccggccccacccccacgctgggccctgtcactcctgagatctgcaaacaggacattgtatttgatggcatcgctcagatccgtggtgagatcttcttcttcaaggaccggttcatttggcggactgtgacgccacgtgacaagcccatggggcccctgctggtggccacattctggcctgagctcccggaaaagattgatgcggtatacgaggccccacaggaggagaaggctgtgttctttgcagggaatgaatactggatctactcagccagcaccctggagcgagggtaccccaagccactgaccagcctgggactgccccctgatgtccagcgagtggatgccgcctttaactggagcaaaaacaagaagacatacatctttgctggagacaaattctggagatacaatgaggtgaagaagaaaatggatcctggcttccccaagctcatcgcagatgcctggaatgccatccccgataacctggatgccgtcgtggacctgcagggcggcggtcacagctacttcttcaagggtgcctattacctgaagctggagaaccaaagtctgaagagcgtgaagtttggaagcatcaaatccgactggctaggctgctgagctggccctggctcccacaggcccttcctctccactgccttcgatacaccgggcctggagaactagagaaggacccggaggggcctggcagccgtgccttcagctctacagctaatcagcattctcactcctacctggtaatttaagattccagagagtggctcctcccggtgcccaagaatagatgctgactgtactcctcccaggcgccccttccccctccaatcccaccaaccctcagagccacccctaaagagatactttgatattttcaacgcagccctgctttgggctgccctggtgctgccacacttcaggctcttctcctttcacaaccttctgtggctcacagaacccttggagccaatggagactgtctcaagagggcactggtggcccgacagcctggcacagggcagtgggacagggcatggccaggtggccactccagacccctggcttttcactgctggctgccttagaacctttcttacattagcagtttgctttgtatgcactttgtttttttctttgggtcttgttttttttttccacttagaaattgcatttcctgacagaaggactcaggttgtctgaagtcactgcacagtgcatctcagcccacatagtgatggttcccctgttcactctacttagcatgtccctaccgagtctcttctccactggatggaggaaaaccaagccgtggcttcccgctcagccctccctgcccctcccttcaaccattccccatgggaaatgtcaacaagtatgaataaagacacctactgagtggccgtgtttgccatctgttttagcagagcctagacaagggccacagacccagccagaagcggaaacttaaaaagtccgaatctctgctccctgcagggcacaggtgatggtgtctgctggaaaggtcagagcttccaaagtaaacagcaagagaacctcagggagagtaagctctagtccctctgtcctgtagaaagagccctgaagaatcagcaattttgttgctttattgtggcatctgttcgaggtttgcttcctctttaagtctgtttcttcattagcaatcatatcagttttaatgctactactaacaatgaacagtaacaataatatccccctcaattaatagagtgctttctatgtgcaaggcacttttcacgtgtcacctattttaacctttccaaccacataaataaaaaaggccattattagttgaatcttattgatgaagagaaaaaaaaaaa

SEQ ID NO: 720 - protein, 660 aa, Homo sapiens
  MMP-2 precursor
MEALMARGALTGPLRALCLLGCLLSHAAAAPSPIIKFPGDVAPKTDKELAVQYLNTFYGCPKESCNLFVLKDTLKKMQKFFGLPQTGDLDQNTIETMRKPRCGNPDVANYNFFPRKPKWDKNQITYRIIGYTPDLDPETVDDAFARAFQVWSDVTPLRFSRIHDGEADIMINFGRWEHGDGYPFDGKDGLLAHAFAPGTGVGGDSHFDDDELWTLGEGQVVRVKYGNADGEYCKFPFLFNGKEYNSCTDTGRSDGFLWCSTTYNFEKDGKYGFCPHEALFTMGGNAEGQPCKFPFRFQGTSYDSCTTEGRTDGYRWCGTTEDYDRDKKYGFCPETAMSTVGGNSEGAPCVFPFTFLGNKYESCTSAGRSDGKMWCATTANYDDDRKWGFCPDQGYSLFLVAAHEFGHAMGLEHSQDPGALMAPIYTYTKNFRLSQDDIKGIQELYGASPDIDLGTGPTPTLGPVTPEICKQDIVFDGIAQIRGEIFFFKDRFIWRTVTPRDKPMGPLLVATFWPELPEKIDAVYEAPQEEKAVFFAGNEYWIYSASTLERGYPKPLTSLGLPPDVQRVDAAFNWSKNKKTYIFAGDKFWRYNEVKKKMDPGFPKLIADAWNAIPDNLDAVVDLQGGGHSYFFKGAYYLKLENQSLKSVKFGSIKSDWLGC

SEQ ID NO: 721 - protein, 551 aa, Homo sapiens
  MMP-2 mature
YNFFPRKPKWDKNQITYRIIGYTPDLDPETVDDAFARAFQVWSDVTPLRFSRIHDGEADIMINFGRWEHGDGYPFDGKDGLLAHAFAPGTGVGGDSHFDDDELWTLGEGQVVRVKYGNADGEYCKFPFLFNGKEYNSCTDTGRSDGFLWCSTTYNFEKDGKYGFCPHEALFTMGGNAEGQPCKFPFRFQGTSYDSCTTEGRTDGYRWCGTTEDYDRDKKYGFCPETAMSTVGGNSEGAPCVFPFTFLGNKYESCTSAGRSDGKMWCATTANYDDDRKWGFCPDQGYSLFLVAAHEFGHAMGLEHSQDPGALMAPIYTYTKNFRLSQDDIKGIQELYGASPDIDLGTGPTPTLGPVTPEICKQDIVFDGIAQIRGEIFFFKDRFIWRTVTPRDKPMGPLLVATFWPELPEKIDAVYEAPQEEKAVFFAGNEYWIYSASTLERGYPKPLTSLGLPPDVQRVDAAFNWSKNKKTYIFAGDKFWRYNEVKKKMDPGFPKLIADAWNAIPDNLDAVVDLQGGGHSYFFKGAYYLKLENQSLKSVKFGSIKSDWLGC

SEQ ID NO: 722 - DNA, 2387 bp, Homo sapiens
  MMP-9
agacacctctgccctcaccatgagcctctggcagcccctggtcctggtgctcctggtgctgggctgctgctttgctgcccccagacagcgccagtccacccttgtgctcttccctggagacctgagaaccaatctcaccgacaggcagctggcagaggaatacctgtaccgctatggttacactcgggtggcagagatgcgtggagagtcgaaatctctggggcctgcgctgctgcttctccagaagcaactgtccctgcccgagaccggtgagctggatagcgccacgctgaaggccatgcgaaccccacggtgcggggtcccagacctgggcagattccaaacctttgagggcgacctcaagtggcaccaccacaacatcacctattggatccaaaactactcggaagacttgccgcgggcggtgattgacgacgcctttgcccgcgccttcgcactgtggagcgcggtgacgccgctcaccttcactcgcgtgtacagccgggacgcagacatcgtcatccagtttggtgtcgcggagcacggagacgggtatcccttcgacgggaaggacgggctcctggcacacgcctttcctcctggccccggcattcagggagacgcccatttcgacgatgacgagttgtggtccctgggcaagggcgtcgtggttccaactcggtttggaaacgcagatggcgcggcctgccacttccccttcatcttcgagggccgctcctactctgcctgcaccaccgacggtcgctccgacggcttgccctggtgcagtaccacggccaactacgacaccgacgaccggtttggcttctgccccagcgagagactctacacccaggacggcaatgctgatgggaaaccctgccagtttccattcatcttccaaggccaatcctactccgcctgcaccacggacggtcgctccgacggctaccgctggtgcgccaccaccgccaactacgaccgggacaagctcttcggcttctgcccgacccgagctgactcgacggtgatggggggcaactcggcgggggagctgtgcgtcttccccttcactttcctgggtaaggagtactcgacctgtaccagcgagggccgcggagatgggcgcctctggtgcgctaccacctcgaactttgacagcgacaagaagtggggcttctgcccggaccaaggatacagtttgttcctcgtggcggcgcatgagttcggccacgcgctgggcttagatcattcctcagtgccggaggcgctcatgtaccctatgtaccgcttcactgaggggccccccttgcataaggacgacgtgaatggcatccggcacctctatggtcctcgccctgaacctgagccacggcctccaaccaccaccacaccgcagcccacggctcccccgacggtctgccccaccggaccccccactgtccacccctcagagcgccccacagctggccccacaggtcccccctcagctggccccacaggtccccccactgctggcccttctacggccactactgtgcctttgagtccggtggacgatgcctgcaacgtgaacatcttcgacgccatcgcggagattgggaaccagctgtatttgttcaaggatgggaagtactggcgattctctgagggcagggggagccggccgcagggccccttccttatcgccgacaagtggcccgcgctgccccgcaagctggactcggtctttgaggagcggctctccaagaagcttttcttcttctctgggcgccaggtgtgggtgtacacaggcgcgtcggtgctgggcccgaggcgtctggacaagctgggcctgggagccgacgtggcccaggtgaccggggccctccggagtggcagggggaagatgctgctgttcagcgggcggcgcctctggaggttcgacgtgaaggcgcagatggtggatccccggagcgccagcgaggtggaccggatgttccccggggtgcctttggacacgcacgacgtcttccagtaccgagagaaagcctatttctgccaggaccgcttctactggcgcgtgagttcccggagtgagttgaaccaggtggaccaagtgggctacgtgacctatgacatcctgcagtgccctgaggactagggctcccgtcctgctttggcagtgccatgtaaatccccactgggaccaaccctggggaaggagccagtttgccggatacaaactggtattctgttctggaggaaagggaggagtggaggtgggctgggccctctcttctcacctttgttttttgttggagtgtttctaataaacttggattctctaacctttaaaaaaaaaaaaaaaaaaaaaaaaaaaaaaaaaaaaaaaaaaaaaaaaaaaa

SEQ ID NO: 723 - protein, 707 aa, Homo sapiens
  MMP-9 precursor
MSLWQPLVLVLLVLGCCFAAPRQRQSTLVLFPGDLRTNLTDRQLAEEYLYRYGYTRVAEMRGESKSLGPALLLLQKQLSLPETGELDSATLKAMRTPRCGVPDLGRFQTFEGDLKWHHHNITYWIQNYSEDLPRAVIDDAFARAFALWSAVTPLTFTRVYSRDADIVIQFGVAEHGDGYPFDGKDGLLAHAFPPGPGIQGDAHFDDDELWSLGKGVVVPTRFGNADGAACHFPFIFEGRSYSACTTDGRSDGLPWCSTTANYDTDDRFGFCPSERLYTQDGNADGKPCQFPFIFQGQSYSACTTDGRSDGYRWCATTANYDRDKLFGFCPTRADSTVMGGNSAGELCVFPFTFLGKEYSTCTSEGRGDGRLWCATTSNFDSDKKWGFCPDQGYSLFLVAAHEFGHALGLDHSSVPEALMYPMYRFTEGPPLHKDDVNGIRHLYGPRPEPEPRPPTTTTPQPTAPPTVCPTGPPTVHPSERPTAGPTGPPSAGPTGPPTAGPSTATTVPLSPVDDACNVNIFDAIAEIGNQLYLFKDGKYWRFSEGRGSRPQGPFLIADKWPALPRKLDSVFEERLSKKLFFFSGRQVWVYTGASVLGPRRLDKLGLGADVAQVTGALRSGRGKMLLFSGRRLWRFDVKAQMVDPRSASEVDRMFPGVPLDTHDVFQYREKAYFCQDRFYWRVSSRSELNQVDQVGYVTYDILQCPED

SEQ ID NO: 724 - protein, 614 aa, Homo sapiens
  MMP-9 mature
MRTPRCGVPDLGRFQTFEGDLKWHHHNITYWIQNYSEDLPRAVIDDAFARAFALWSAVTPLTFTRVYSRDADIVIQFGVAEHGDGYPFDGKDGLLAHAFPPGPGIQGDAHFDDDELWSLGKGVVVPTRFGNADGAACHFPFIFEGRSYSACTTDGRSDGLPWCSTTANYDTDDRFGFCPSERLYTRDGNADGKPCQFPFIFQGQSYSACTTDGRSDGYRWCATTANYDRDKLFGFCPTRADSTVMGGNSAGELCVFPFTFLGKEYSTCTSEGRGDGRLWCATTSNFDSDKKWGFCPDQGYSLFLVAAHEFGHALGLDHSSVPEALMYPMYRFTEGPPLHKDDVNGIRHLYGPRPEPEPRPPTTTTPQPTAPPTVCPTGPPTVHPSERPTAGPTGPPSAGPTGPPTAGPSTATTVPLSPVDDACNVNIFDAIAEIGNQLYLFKDGKYWRFSEGRGSRPQGPFLIADKWPALPRKLDSVFEEPLSKKLFFFSGRQVWVYTGASVLGPRRLDKLGLGADVAQVTGALRSGRGKMLLFSGRRLWRFDVKAQMVDPRSASEVDRMFPGVPLDTHDVFQYREKAYFCQDRFYWRVSSRSELNQVDQVGYVTYDILQCPED

SEQ ID NO: 725 - DNA, 1828 bp, Homo sapiens
  MMP-3
ctacaaggaggcaggcaagacagcaaggcatagagacaacatagagctaagtaaagccagtggaaatgaagagtcttccaatcctactgttgctgtgcgtggcagtttgctcagcctatccattggatggagctgcaaggggtgaggacaccagcatgaaccttgttcagaaatatctagaaaactactacgacctcaaaaaagatgtgaaacagtttgttaggagaaaggacagtggtcctgttgttaaaaaaatccgagaaatgcagaagttccttggattggaggtgacggggaagctggactccgacactctggaggtgatgcgcaagcccaggtgtggagttcctgatgttggtcacttcagaacctttcctggcatcccgaagtggaggaaaacccaccttacatacaggattgtgaattatacaccagatttgccaaaagatgctgttgattctgctgttgagaaagctctgaaagtctgggaagaggtgactccactcacattctccaggctgtatgaaggagaggctgatataatgatctcttttgcagttagagaacatggagacttttacccttttgatggacctggaaatgttttggcccatgcctatgcccctgggccagggattaatggagatgcccactttgatgatgatgaacaatggacaaaggatacaacagggaccaatttatttctcgttgctgctcatgaaattggccactccctgggtctctttcactcagccaacactgaagctttgatgtacccactctatcactcactcacagacctgactcggttccgcctgtctcaagatgatataaatggcattcagtccctctatggacctccccctgactcccctgagacccccctggtacccacggaacctgtccctccagaacctgggacgccagccaactgtgatcctgctttgtcctttgatgctgtcagcactctgaggggagaaatcctgatctttaaagacaggcacttttggcgcaaatccctcaggaagcttgaacctgaattgcatttgatctcttcattttggccatctcttccttcaggcgtggatgccgcatatgaagttactagcaaggacctcgttttcatttttaaaggaaatcaattctgggctatcagaggaaatgaggtacgagctggatacccaagaggcatccacaccctaggtttccctccaaccgtgaggaaaatcgatgcagccatttctgataaggaaaagaacaaaacatatttctttgtagaggacaaatactggagatttgatgagaagagaaattccatggagccaggctttcccaagcaaatagctgaagactttccagggattgactcaaagattgatgctgtttttgaagaatttgggttcttttatttctttactggatcttcacagttggagtttgacccaaatgcaaagaaagtgacacacactttgaagagtaacagctggcttaattgttgaaagagatatgtagaaggcacaatatgggcactttaaatgaagctaataattcttcacctaagtctctgtgaattgaaatgttcgttttctcctgcctgtgctgtgactcgagtcacactcaagggaacttgagcgtgaatctgtatcttgccggtcatttttatgttattacagggcattcaaatgggctgctgcttagcttgcaccttgtcacatagagtgatctttcccaagagaaggggaagcactcgtgtgcaacagacaagtgactgtatctgtgtagactatttgcttatttaataaagacgatttgtcagttattttatctt

SEQ ID NO: 726 - protein, 477 aa, Homo sapiens
  MMP-3 precursor
MKSLPILLLLCVAVCSAYPLDGAARGEDTSMNLVQKYLENYYDLKKDVKQFVRRKDSGPVVKKIREMQKFLGLEVTGKLDSDTLEVMRKPRCGVPDVGHFRTFPGIPKWRKTHLTYRIVNYTPDLPKDAVDSAVEKALKVWEEVTPLTFSRLYEGEADIMISFAVREHGDFYPFDGPGNVLAHAYAPGPGINGDAHFDDDEQWTKDTTGTNLFLVAAHEIGHSLGLFHSANTEALMYPLYHSLTDLTRFRLSQDDINGIQSLYGPPPDSPETPLVPTEPVPPEPGTPANCDPALSFDAVSTLRGEILIFKDRHFWRKSLRKLEPELHLISSFWPSLPSGVDAAYEVTSKDLVFIFKGNQFWAIRGNEVRAGYPRGIHTLGFPPTVRKIDAAISDKEKNKTYFFVEDKYWRFDEKRNSMEPGFPKQIAEDFPGIDSKIDAVFEEFGFFYFFTGSSQLEFDPNAKKVTHTLKSNSWLNC

SEQ ID NO: 727 - protein, 378 aa, Homo sapiens
  MMP-3 mature
FRTFPGIPKWRKTHLTYRIVNYTPDLPKDAVDSAVEKALKVWEEVTPLTFSRLYEGEADIMISFAVREHGDFYPFDGPGNVLAHAYAPGPGINGDAHFDDDEQWTKDTTGTNLFLVAAHEIGHSLGLFHSANTEALMYPLYHSLTDLTRFRLSQDDINGIQSLYGPPPDSPETPLVPTEPVPPEPGTPANCDPALSFDAVSTLRGEILIFKDRHFWRKSLRKLEPELHLISSFWPSLPSGVDAAYEVTSKDLVFIFKGNQFWAIRGNEVRAGYPRGIHTLGFPPTVRKIDAAISDKEKNKTYFFVEDKYWRFDEKRNSMEPGFPKQIAEDFPGIDSKIDAVFEEFGFFYFFTGSSQLEFDPNAKKVTHTLKSNSWLNC

SEQ ID NO: 728 - DNA, 1743 bp, Homo sapiens
  MMP-10
aaagaaggtaagggcagtgagaatgatgcatcttgcattccttgtgctgttgtgtctgccagtctgctctgcctatcctctgagtggggcagcaaaagaggaggactccaacaaggatcttgcccagcaatacctagaaaagtactacaacctcgaaaaggatgtgaaacagtttagaagaaaggacagtaatctcattgttaaaaaaatccaaggaatgcagaagttccttgggttggaggtgacagggaagctagacactgacactctggaggtgatgcgcaagcccaggtgtggagttcctgacgttggtcacttcagctcctttcctggcatgccgaagtggaggaaaacccaccttacatacaggattgtgaattatacaccagatttgccaagagatgctgttgattctgccattgagaaagctctgaaagtctgggaagaggtgactccactcacattctccaggctgtatgaaggagaggctgatataatgatctctttcgcagttaaagaacatggagacttttactcttttgatggcccaggacacagtttggctcatgcctacccacctggacctgggctttatggagatattcactttgatgatgatgaaaaatggacagaagatgcatcaggcaccaatttattcctcgttgctgctcatgaacttggccactccctggggctctttcactcagccaacactgaagctttgatgtacccactctacaactcattcacagagctcgcccagttccgcctttcgcaagatgatgtgaatggcattcagtctctctacggacctccccctgcctctactgaggaacccctggtgcccacaaaatctgttccttcgggatctgagatgccagccaagtgtgatcctgctttgtccttcgatgccatcagcactctgaggggagaatatctgttctttaaagacagatatttttggcgaagatcccactggaaccctgaacctgaatttcatttgatttctgcattttggccctctcttccatcatatttggatgctgcatatgaagttaacagcagggacaccgtttttatttttaaaggaaatgagttctgggccatcagaggaaatgaggtacaagcaggttatccaagaggcatccataccctgggttttcctccaaccataaggaaaattgatgcagctgtttctgacaaggaaaagaagaaaacatacttctttgcagcggacaaatactggagatttgatgaaaatagccagtccatggagcaaggcttccctagactaatagctgatgactttccaggagttgagcctaaggttgatgctgtattacaggcatttggatttttctacttcttcagtggatcatcacagtttgagtttgaccccaatgccaggatggtgacacacatattaaagagtaacagctggttacattgctaggcgagatagggggaagacagatatgggtgtttttaataaatctaataattattcatctaatgtattatgagccaaaatggttaatttttcctgcatgttctgtgactgaagaagatgagccttgcagatatctgcatgtgtcatgaagaatgtttctggaattcttcacttgcttttgaattgcactgaacagaattaagaaatactcatgtgcaataggtgagagaatgtattttcatagatgtgttattacttcctcaataaaaagttttattttgggcctgttcctt

SEQ ID NO: 729 - protein, 476 aa, Homo sapiens
  MMP-10 precursor
MMHLAFLVLLCLPVCSAYPLSGAAKEEDSNKDLAQQYLEKYYNLEKDVKQFRRKDSNLIVKKIQGMQKFLGLEVTGKLDTDTLEVMRKPRCGVPDVGHFSSFPGMPKWRKTHLTYRIVNYTPDLPRDAVDSAIEKALKVWEEVTPLTFSRLYEGEADIMISFAVKEHGDFYSFDGPGHSLAHAYPPGPGLYGDIHFDDDEKWTEDASGTNLFLVAAHELGHSLGLFHSANTEALMYPLYNSFTELAQFRLSQDDVNGIQSLYGPPPASTEEPLVPTKSVPSGSEMPAKCDPALSFDAISTLRGEYLFFKDRYFWRRSHWNPEPEFHLISAFWPSLPSYLDAAYEVNSRDTVFIFKGNEFWAIRGNEVQAGYPRGIHTLGFPPTIRKIDAAVSDKEKKKTYFFAADKYWRFDENSQSMEQGFPRLIADDFPGVEPKVDAVLQAFGFFYFFSGSSQFEFDPNARMVTHILKSNSWLHC

SEQ ID NO: 730 - protein, 378 aa, Homo sapiens
  MMP-10 mature
FSSFPGMPKWRKTHLTYRIVNYTPDLPRDAVDSAIEKALKVWEEVTPLTFSRLYEGEADIMISFAVKEHGDFYSFDGPGHSLAHAYPPGPGLYGDIHFDDDEKWTEDASGTNLFLVAAHELGHSLGLFHSANTEALMYPLYNSFTELAQFRLSQDDVNGIQSLYGPPPASTEEPLVPTKSVPSGSEMPAKCDPALSFDAISTLRGEYLFFKDRYFWRRSHWNPEPEFHLISAFWPSLPSYLDAAYEVNSRDTVFIFKGNEFWAIRGNEVQAGYPRGIHTLGFPPTIRKIDAAVSDKEKKKTYFFAADKYWRFDENSQSMEQGFPRLIADDFPGVEPKVDAVLQAFGFFYFFSGSSQFEFDPNARMVTHILKSNSWLHC

SEQ ID NO: 731 - DNA, 2247 bp, Homo sapiens
  MMP-11
ccggggcggatggctccggccgcctggctccgcagcgcggccgcgcgcgccctcctgcccccgatgctgctgctgctgctccagccgccgccgctgctggcccgggctctgccgccggacgtccaccacctccatgccgagaggagggggccacagccctggcatgcagccctgcccagtagcccggcacctgcccctgccacgcaggaagccccccggcctgccagcagcctcaggcctccccgctgtggcgtgcccgacccatctgatgggctgagtgcccgcaaccgacagaagaggttcgtgctttctggcgggcgctgggagaagacggacctcacctacaggatccttcggttcccatggcagttggtgcaggagcaggtgcggcagacgatggcagaggccctaaaggtatggagcgatgtgacgccactcacctttactgaggtgcacgagggccgtgctgacatcatgatcgacttcgccaggtactggcatggggacgacctgccgtttgatgggcctgggggcatcctggcccatgccttcttccccaagactcaccgagaaggggatgtccacttcgactatgatgagacctggactatcggggatgaccagggcacagacctgctgcaggtggcagcccatgaatttggccacgtgctggggctgcagcacacaacagcagccaaggccctgatgtccgccttctacacctttcgctacccactgagtctcagcccagatgactgcaggggcgttcaacacctatatggccagccctggcccactgtcacctccaggaccccagccctgggcccccaggctgggatagacaccaatgagattgcaccgctggagccagacgccccgccagatgcctgtgaggcctcctttgacgcggtctccaccatccgaggcgagctctttttcttcaaagcgggctttgtgtggcgcctccgtgggggccagctgcagcccggctacccagcattggcctctcgccactggcagggactgcccagccctgtggacgctgccttcgaggatgcccagggccacatttggttcttccaaggtgctcagtactgggtgtacgacggtgaaaagccagtcctgggccccgcacccctcaccgagctgggcctggtgaggttcccggtccatgctgccttggtctggggtcccgagaagaacaagatctacttcttccgaggcagggactactggcgtttccaccccagcacccggcgtgtagacagtcccgtgccccgcagggccactgactggagaggggtgccctctgagatcgacgctgccttccaggatgctgatggctatgcctacttcctgcgcggccgcctctactggaagtttgaccctgtgaaggtgaaggctctggaaggcttcccccgtctcgtgggtcctgacttctttggctgtgccgagcctgccaacactttcctctgaccatggcttggatgccctcaggggtgctgacccctgccaggccacgaatatcaggctagagacccatggccatctttgtggctgtgggcaccaggcatgggactgagcccatgtctcctgcagggggatggggtggggtacaaccaccatgacaactgccgggagggccacgcaggtcgtggtcacctgccagcgactgtctcagactgggcagggaggctttggcatgacttaagaggaagggcagtcttgggacccgctatgcaggtcctggcaaacctggctgccctgtctcatccctgtccctcagggtagcaccatggcaggactgggggaactggagtgtccttgctgtatccctgttgtgaggttccttccaggggctggcactgaagcaagggtgctggggccccatggccttcagccctggctgagcaactgggctgtagggcagggccacttcctgaggtcaggtcttggtaggtgcctgcatctgtctgccttctggctgacaatcctggaaatctgttctccagaatccaggccaaaaagttcacagtcaaatggggaggggtattcttcatgcaggagaccccaggccctggaggctgcaacatacctcaatcctgtcccaggccggatcctcctgaagcccttttcgcagcactgctatcctccaaagccattgtaaatgtgtgtacagtgtgtataaaccttcttcttcttttttttttttaaactgaggattgtcattaaacacagttgttttct

SEQ ID NO: 732 - protein, 488 aa, Homo sapiens
  MMP-11 precursor
MAPAAWLRSAAARALLPPMLLLLLQPPPLLARALPPDVHHLHAERRGPQPWHAALPSSPAPAPATQEAPRPASSLRPPRCGVPDPSDGLSARNRQKRFVLSGGRWEKTDLTYRILRFPWQLVQEQVRQTMAEALKVWSDVTPLTFTEVHEGRADIMIDFARYWHGDDLPFDGPGGILAHAFFPKTHREGDVHFDYDETWTIGDDQGTDLLQVAAHEFGHVLGLQHTTAAKALMSAFYTFRYPLSLSPDDCRGVQHLYGQPWPTVTSRTPALGPQAGIDTNEIAPLEPDAPPDACEASFDAVSTIRGELFFFKAGFVWRLRGGQLQPGYPALASRHWQGLPSPVDAAFEDAQGHIWFFQGAQYWVYDGEKPVLGPAPLTELGLVRFPVHAALVWGPEKNKIYFFRGRDYWRFHPSTRRVDSPVPRRATDWRGVPSEIDAAFQDADGYAYFLRGRLYWKFDPVKVKALEGFPRLVGPDFFGCAEPANTFL

SEQ ID NO: 733 - protein, 391 aa, Homo sapiens
  MMP-11 mature
FVLSGGRWEKTDLTYRILRFPWQLVQEQVRQTMAEALKVWSDVTPLTFTEVHEGRADIMIDFARYWHGDDLPFDGPGGILAHAFFPKTHREGDVHFDYDETWTIGDDQGTDLLQVAAHEFGHVLGLQHTTAAKALMSAFYTFRYPLSLSPDDCRGVQHLYGQPWPTVTSRTPALGPQAGIDTNEIAPLEPDAPPDACEASFDAVSTIRGELFFFKAGFVWRLRGGQLQPGYPALASRHWQGLPSPVDAAFEDAQGHIWFFQGAQYWVYDGEKPVLGPAPLTELGLVRFPVHAALVWGPEKNKIYFFRGRDYWRFHPSTRRVDSPVPRRATDWRGVPSEIDAAFQDADGYAYFLRGRLYWKFDPVKVKALEGFPRLVGPDFFGCAEPANTFL

SEQ ID NO: 734 - DNA, 1147 bp, Homo sapiens
  MMP-7
accaaatcaaccataggtccaagaacaattgtctctggacggcagctatgcgactcaccgtgctgtgtgctgtgtgcctgctgcctggcagcctggccctgccgctgcctcaggaggcgggaggcatgagtgagctacagtgggaacaggctcaggactatctcaagagattttatctctatgactcagaaacaaaaaatgccaacagtttagaagccaaactcaaggagatgcaaaaattctttggcctacctataactggaatgttaaactcccgcgtcatagaaataatgcagaagcccagatgtggagtgccagatgttgcagaatactcactatttccaaatagcccaaaatggacttccaaagtggtcacctacaggatcgtatcatatactcgagacttaccgcatattacagtggatcgattagtgtcaaaggctttaaacatgtggggcaaagagatccccctgcatttcaggaaagttgtatggggaactgctgacatcatgattggctttgcgcgaggagctcatggggactcctacccatttgatgggccaggaaacacgctggctcatgcctttgcgcctgggacaggtctcggaggagatgctcacttcgatgaggatgaacgctggacggatggtagcagtctagggattaacttcctgtatgctgcaactcatgaacttggccattctttgggtatgggacattcctctgatcctaatgcagtgatgtatccaacctatggaaatggagatccccaaaattttaaactttcccaggatgatattaaaggcattcagaaactatatggaaagagaagtaattcaagaaagaaatagaaacttcaggcagaacatccattcattcattcattggattgtatatcattgttgcacaatcagaattgataagcactgttcctccactccatttagcaattatgtcacccttttttattgcagttggtttttgaatgtctttcactccttttaaggataaactcctttatggtgtgactgtgtcttattcatctatacttgcagtgggtagatgtcaataaatgttacatacacaaataaataaaatgtttattccatggtaaatttaaaaaaaaaaaaaaaaaaaaaaaaaaaaa

SEQ ID NO: 735 - protein, 267 aa, Homo sapiens
  MMP-7 precursor
MRLTVLCAVCLLPGSLALPLPQEAGGMSELQWEQAQDYLKRFYLYDSETKNANSLEAKLKEMQKFFGLPITGMLNSRVIEIMQKPRCGVPDVAEYSLFPNSPKWTSKVVTYRIVSYTRDLPHITVDRLVSKALNMWGKEIPLHFRKVVWGTADIMIGFARGAHGDSYPFDGPGNTLAHAFAPGTGLGGDAHFDEDERWTDGSSLGINFLYAATHELGHSLGMGHSSDPNAVMYPTYGNGDPQNFKLSQDDIKGIQKLYGKRSNSRKK

SEQ ID NO: 736 - protein, 173 aa, Homo sapiens
  MMP-7 mature
YSLFPNSPKWTSKVVTYRIVSYTRDLPHITVDRLVSKALNMWGKEIPLHFRKVVWGTADIMIGFARGAHGDSYPFDGPGNTLAHAFAPGTGLGGDAHFDEDERWTDGSSLGINFLYAATHELGHSLGMGHSSDPNAVMYPTYGNGDPQNFKLSQDDIKGIQKLYGKRSNSRKK

SEQ ID NO: 737 - DNA, 998 bp, Homo sapiens
  MMP-26
gacaaatgagggtttggcatgcagctcgtcatcttaagagttactatcttcttgccctggtgtttcgccgttccagtgccccctgctgcagaccataaaggatgggactttgttgagggctatttccatcaatttttcctgaccaagaaggagtcgccactccttacccaggagacacaaacacagctcctgcaacaattccatcggaatgggacagacctacttgacatgcagatgcatgctctgctacaccagccccactgtggggtgcctgatgggtccgacacctccatctcgccaggaagatgcaagtggaataagcacactctaacttacaggattatcaattacccacatgatatgaagccatccgcagtgaaagacagtatatataatgcagtttccatctggagcaatgtgacccctttgatattccagcaagtgcagaatggagatgcagacatcaaggtttctttctggcagtgggcccatgaagatggttggccctttgatgggccaggtggtatcttaggccatgcctttttaccaaattctggaaatcctggagttgtccattttgacaagaatgaacactggtcagcttcagacactggatataatctgttcctggttgcaactcatgagattgggcattctttgggcctgcagcactctgggaatcagagctccataatgtaccccacttactggtatcacgaccctagaaccttccagctcagtgccgatgatatccaaaggatccagcatttgtatggagaaaaatgttcatctgacataccttaatgttagcacagaggacttattcaacctgtcctttcagggagtttattggaggatcaaagaactgaaagcactagagcagccttggggactgctaggatgaagccctaaagaatgcaacctagtcaggttagctgaaccgacactcaaaacgctactgagtcacaataaagattgttttaaagagtaaaaaaaaa

SEQ ID NO: 738 - protein, 261 aa, Homo sapiens
  MMP-26 precursor
MQLVILRVTIFLPWCFAVPVPPAADHKGWDFVEGYFHQFFLTKKESPLLTQETQTQLLQQFHRNGTDLLDMQMHALLHQPHCGVPDGSDTSISPGRCKWNKHTLTYRIINYPHDMKPSAVKDSIYNAVSIWSNVTPLIFQQVQNGDADIKVSFWQWAHEDGWPFDGPGGILGHAFLPNSGNPGVVHFDKNEHWSASDTGYNLFLVATHEIGHSLGLQHSGNQSSIMYPTYWYHDPRTFQLSADDIQRIQHLYGEKCSSDIP

SEQ ID NO: 739 - protein, 172 aa, Homo sapiens
  MMP-26 precursor
TSISPGRCKWNKHTLTYRIINYPHDMKPSAVKDSIYNAVSIWSNVTPLIFQQVQNGDADIKVSFWQWAHEDGWPFDGPGGILGHAFLPNSGNPGVVHFDKNEHWSASDTGYNLFLVATHEIGHSLGLQHSGNQSSIMYPTYWYHDPRTFQLSADDIQRIQHLYGEKCSSDIP

SEQ ID NO: 740 - DNA, 1825 bp, Homo sapiens
  MMP-12
agaaaggaacacagtaaactgaattgatccgtttagaagtttacaatgaagtttcttctaatactgctcctgcaggccactgcttctggagctcttcccctgaacagctctacaagcctggaaaaaaataatgtgctatttggtgaaagatacttagaaaaattttatggccttgagataaacaaacttccagtgacaaaaatgaaatatagtggaaacttaatgaaggaaaaaatccaagaaatgcagcacttcttgggtctgaaagtgaccgggcaactggacacatctaccctggagatgatgcacgcacctcgatgtggagtccccgatgtccatcatttcagggaaatgccaggggggcccgtatggaggaaacattatatcacctacagaatcaataattacacacctgacatgaaccgtgaggatgttgactacgcaatccggaaagctttccaagtatggagtaatgttacccccttgaaattcagcaagattaacacaggcatggctgacattttggtggtttttgcccgtggagctcatggagacttccatgcttttgatggcaaaggtggaatcctagcccatgcttttggacctggatctggcattggaggggatgcacatttcgatgaggacgaattctggactacacattcaggaggcaccaacttgttcctcactgctgttcacgagattggccattccttaggtcttggccattctagtgatccaaaggccgtaatgttccccacctacaaatatgttgacatcaacacatttcgcctctctgctgatgacatacgtggcattcagtccctgtatggagacccaaaagagaaccaacgcttgccaaatcctgacaattcagaaccagctctctgtgaccccaatttgagttttgatgctgtcactaccgtgggaaataagatctttttcttcaaagacaggttcttctggctgaaggtttctgagagaccaaagaccagtgttaatttaatttcttccttatggccaaccttgccatctggcattgaagctgcttatgaaattgaagccagaaatcaagtttttctttttaaagatgacaaatactggttaattagcaatttaagaccagagccaaattatcccaagagcatacattcttttggttttcctaactttgtgaaaaaaattgatgcagctgtttttaacccacgtttttataggacctacttctttgtagataaccagtattggaggtatgatgaaaggagacagatgatggaccctggttatcccaaactgattaccaagaacttccaaggaatcgggcctaaaattgatgcagtcttctactctaaaaacaaatactactatttcttccaaggatctaaccaatttgaatatgacttcctactccaacgtatcaccaaaacactgaaaagcaatagctggtttggttgttagaaatggtgtaattaatggtttttgttagttcacttcagcttaataagtatttattgcatatttgctatgtcctcagtgtaccactacttagagatatgtatcataaaaataaaatctgtaaaccataggtaatgattatataaaatacataatatttttcaattttgaaaactctaattgtccattcttgcttgactctactattaagtttgaaaatagttaccttcaaaggccaagagaattctatttgaagcatgctctgtaagttgcttcctaacatccttggactgagaaattatacttacttctggcataactaaaattaagtatatatattttggctcaaataaaattgaaaaaaaaatca

SEQ ID NO: 741 - protein, 470 aa, Homo sapiens
  MMP-12 precursor
MKFLLILLLQATASGALPLNSSTSLEKNNVLFGERYLEKFYGLEINKLPVTKMKYSGNLMKEKIQEMQHFLGLKVTGQLDTSTLEMMHAPRCGVPDVHHFREMPGGPVWRKHYITYRINNYTPDMNREDVDYAIRKAFQVWSNVTPLKFSKINTGMADILVVFARGAHGDFHAFDGKGGILAHAFGPGSGIGGDAHFDEDEFWTTHSGGTNLFLTAVHEIGHSLGLGHSSDPKAVMFPTYKYVDINTFRLSADDIRGIQSLYGDPKENQRLPNPDNSEPALCDPNLSFDAVTTVGNKIFFFKDRFFWLKVSERPKTSVNLISSLWPTLPSGIEAAYEIEARNQVFLFKDDKYWLISNLRPEPNYPKSIHSFGFPNFVKKIDAAVFNPRFYRTYFFVDNQYWRYDERRQMMDPGYPKLITKNFQGIGPKIDAVFYSKNKYYYFFQGSNQFEYDFLLQRITKTLKSNSWFGC

SEQ ID NO: 742 - protein, 365 aa, Homo sapiens
  MMP-12 mature
GPVWRKHYITYRINNYTPDMNREDVDYAIRKAFQVWSNVTPLKFSKINTGMADILVVFARGAHGDFHAFDGKGGILAHAFGPGSGIGGDAHFDEDEFWTTHSGGTNLFLTAVHEIGHSLGLGHSSDPKAVMFPTYKYVDINTFRLSADDIRGIQSLYGDPKENQRLPNPDNSEPALCDPNLSFDAVTTVGNKIFFFKDRFFWLKVSERPKTSVNLISSLWPTLPSGIEAAYEIEARNQVFLFKDDKYWLISNLRPEPNYPKSIHSFGFPNFVKKIDAAVFNPRFYRTYFFVDNQYWRYDERRQMMDPGYPKLITKNFQGIGPKIDAVFYSKNKYYYFFQGSNQFEYDFLLQRITKTLKSNSWFGC

SEQ ID NO: 743 - DNA, 3558 bp, Homo sapiens
  MMP-14
cagaccccagttcgccgactaagcagaagaaagatcaaaaaccggaaaagaggagaagagcaaacaggcactttgaggaacaatcccctttaactccaagccgacagcggtctaggaattcaagttcagtgcctaccgaagacaaaggcgccccgagggagtggcggtgcgaccccagggcgtgggcccggccgcggagcccacactgcccggctgacccggtggtctcggaccatgtctcccgccccaagacccccccgttgtctcctgctccccctgctcacgctcggcaccgcgctcgcctccctcggctcggcccaaagcagcagcttcagccccgaagcctggctacagcaatatggctacctgcctcccggggacctacgtacccacacacagcgctcaccccagtcactctcagcggccatcgctgccatgcagaagttttacggcttgcaagtaacaggcaaagctgatgcagacaccatgaaggccatgaggcgcccccgatgtggtgttccagacaagtttggggctgagatcaaggccaatgttcgaaggaagcgctacgccatccagggtctcaaatggcaacataatgaaatcactttctgcatccagaattacacccccaaggtgggcgagtatgccacatacgaggccattcgcaaggcgttccgcgtgtgggagagtgccacaccactgcgcttccgcgaggtgccctatgcctacatccgtgagggccatgagaagcaggccgacatcatgatcttctttgccgagggcttccatggcgacagcacgcccttcgatggtgagggcggcttcctggcccatgcctacttcccaggccccaacattggaggagacacccactttgactctgccgagccttggactgtcaggaatgaggatctgaatggaaatgacatcttcctggtggctgtgcacgagctgggccatgccctggggctcgagcattccagtgacccctcggccatcatggcacccttttaccagtggatggacacggagaattttgtgctgcccgatgatgaccgccggggcatccagcaactttatgggggtgagtcagggttccccaccaagatgccccctcaacccaggactacctcccggccttctgttcctgataaacccaaaaaccccacctatgggcccaacatctgtgacgggaactttgacaccgtggccatgctccgaggggagatgtttgtcttcaaggagcgctggttctggcgggtgaggaataaccaagtgatggatggatacccaatgcccattggccagttctggcggggcctgcctgcgtccatcaacactgcctacgagaggaaggatggcaaattcgtcttcttcaaaggagacaagcattgggtgtttgatgaggcgtccctggaacctggctaccccaagcacattaaggagctgggccgagggctgcctaccgacaagattgatgctgctctcttctggatgcccaatggaaagacctacttcttccgtggaaacaagtactaccgtttcaacgaagagctcagggcagtggatagcgagtaccccaagaacatcaaagtctgggaagggatccctgagtctcccagagggtcattcatgggcagcgatgaagtcttcacttacttctacaaggggaacaaatactggaaattcaacaaccagaagctgaaggtagaaccgggctaccccaagtcagccctgagggactggatgggctgcccatcgggaggccggccggatgaggggactgaggaggagacggaggtgatcatcattgaggtggacgaggagggcggcggggcggtgagcgcggctgccgtggtgctgcccgtgctgctgctgctcctggtgctggcggtgggccttgcagtcttcttcttcagacgccatgggacccccaggcgactgctctactgccagcgttccctgctggacaaggtctgacgcccaccgccggcccgcccactcctaccacaaggactttgcctctgaaggccagtggcagcaggtggtggtgggtgggctgctcccatcgtcccgagccccctccccgcagcctccttgcttctctctgtcccctggctggcctccttcaccctgaccgcctccctccctcctgccccggcattgcatcttccctagataggtcccctgagggctgagtgggagggcggccctttccagcctctgcccctcaggggaaccctgtagctttgtgtctgtccagccccatctgaatgtgttgggggctctgcacttgaaggcaggaccctcagacctcgctggtaaaggtcaaatggggtcatctgctccttttccatcccctgacataccttaacctctgaactctgacctcaggaggctctgggcactccagccctgaaagccccaggtgtacccaattggcagcctctcactactctttctggctaaaaggaatctaatcttgttgagggtagagaccctgagacagtgtgagggggtggggactgccaagccaccctaagaccttgggaggaaaactcagagagggtcttcgttgctcagtcagtcaagttcctcggagatctgcctctgcctcacctaccccagggaacttccaaggaaggagcctgagccactggggactaagtgggcagaagaaacccttggcagccctgtgcctctcgaatgttagccttggatggggctttcacagttagaagagctgaaaccaggggtgcagctgtcaggtagggtggggccggtgggagaggcccgggtcagagccctgggggtgagcctgaaggccacagagaaagaaccttgcccaaactcaggcagctggggctgaggcccaaaggcagaacagccagagggggcaggaggggaccaaaaaggaaaatgaggacgtgcagcagcattggaaggctggggccgggcaggccaggccaagccaagcagggggccacagggtgggctgtggagctctcaggaagggccctgaggaaggcacacttgctcctgttggtccctgtccttgctgcccaggcagcgtggaggggaagggtagggcagccagagaaaggagcagagaaggcacacaaacgaggaatgaggggcttcacgagaggccacagggcctggctggccacgctgtcccggcctgctcaccatctcagtgaggggcaggagctggggctcgcttaggctgggtccacgcttccctggtgccagcacccctcaagcctgtctcaccagtggcctgccctctcgctcccccacccagcccacccattgaagtctccttgggccaccaaaggtggtggccatggtaccggggacttgggagagtgagacccagtggagggagcaagaggagagggatgtcgggggggtggggcacggggtaggggaaatggggtgaacggtgctggcagttcggctagatttctgtcttgtttgtttttttgttttgtttaatgtatatttttattataattattatatatgaattccaaaaaaaaaaaaaaaaaaaaa

SEQ ID NO: 744 - protein, 582 aa, Homo sapiens
  MMP-14 precursor
MSPAPRPPRCLLLPLLTLGTALASLGSAQSSSFSPEAWLQQYGYLPPGDLRTHTQRSPQSLSAAIAAMQKFYGLQVTGKADADTMKAMRRPRCGVPDKFGAEIKANVRRKRYAIQGLKWQHNEITFCIQNYTPKVGEYATYEAIRKAFRVWESATPLRFREVPYAYIREGHEKQADIMIFFAEGFHGDSTPFDGEGGFLAHAYFPGPNIGGDTHFDSAEPWTVRNEDLNGNDIFLVAVHELGHALGLEHSSDPSAIMAPFYQWMDTENFVLPDDDRRGIQQLYGGESGFPTKMPPQPRTTSRPSVPDKPKNPTYGPNICDGNFDTVAMLRGEMFVFKERWFWRVRNNQVMDGYPMPIGQFWRGLPASINTAYERKDGKFVFFKGDKHWVFDEASLEPGYPKHIKELGRGLPTDKIDAALFWMPNGKTYFFRGNKYYRFNEELRAVDSEYPKNIKVWEGIPESPRGSFMGSDEVFTYFYKGNKYWKFNNQKLKVEPGYPKSALRDWMGCPSGGRPDEGTEEETEVIIIEVDEEGGGAVSAAAVVLPVLLLLLVLAVGLAVFFFRRHGTPRRLLYCQRSLLDKV

SEQ ID NO: 745 - protein, 471 aa, Homo sapiens
  MMP-14 mature
YAIQGLKWQHNEITFCIQNYTPKVGEYATYEAIRKAFRVWESATPLRFREVPYAYIREGHEKQADIMIFFAEGFHGDSTPFDGEGGFLAHAYFPGPNIGGDTHFDSAEPWTVRNEDLNGNDIFLVAVHELGHALGLEHSSDPSAIMAPFYQWMDTENFVLPDDDRRGIQQLYGGESGFPTKMPPQPRTTSRPSVPDKPKNPTYGPNICDGNFDTVAMLRGEMFVFKERWFWRVRNNQVMDGYPMPIGQFWRGLPASINTAYERKDGKFVFFKGDKHWVFDEASLEPGYPKHIKELGRGLPTDKIDAALFWMPNGKTYFFRGNKYYRFNEELRAVDSEYPKNIKVWEGIPESPRGSFMGSDEVFTYFYKGNKYWKFNNQKLKVEPGYPKSALRDWMGCPSGGRPDEGTEEETEVIIIEVDEEGGGAVSAAAVVLPVLLLLLVLAVGLAVFFFRRHGTPRRLLYCQRSLLDKV

SEQ ID NO: 746 - DNA, 4456 bp, Homo sapiens
  MMP-15
acgactctttgatccctcccctaagacctccttcccgtccgcctaggcctcggtatcccccaccaggtatgagaaggaggagtcttcattcttcccaggcggggagaccacgccttccctgcctcctccctccgcggggggtcgcgttggaggtcacccccgccccctaggcgctgggttgggagtgacgcggggtgggctggagaggtttcctgccgtctgggaagcgtaaacggaccgcccacctgtcgggcctcggccgcccgcacctgcttgtgagaagcctgcggctggggcaccgcccccggtccccgcccgggtccgcgcattgggagcacactggccctttaagagcgcggcggccgcggcgcgcggggaggagggctgggagcgcccggagccgcgctgaactcgccggggacgtcgggcgcccgctccttggctggctcgcttgctctctcgctcgctctctcgggtcggctccctgcgcctcctcccgggactgcttggggacccgggcccggtcgggcgcggcggcgagcagaatccccgtgcaggaggcgcgcgctccgggcagcgcccggccccgggcatggacagagggagctgggcgcgcagggagcgccgcgggaccgggcggccggagcgctgagccagacaaaggctccggagttgcgcttgctctcgggagccgggccccaggcgctgggcgccgaggctgcggaacctcgccgggggcagctccggtcggccccctttcccgccggctggttccgagctcccggacctgccctgcccgcttctcctcgggcttgggaatttgccgaggcgacctaggcggctccggcggggaccgggagcccgaggtccgcggcgcgcctgccgggccaggagccagggagcgtcgcaagtttccaaggcgcgtgcgaggatccggcgtgcagtgttccgagctgggctgggcgccgagagcatgggcagcgacccgagcgcgcccggacggccgggctggacgggcagcctcctcggcgaccgggaggaggcggcgcggccgcgactgctgccgctgctcctggtgcttctgggctgcctgggccttggcgtagcggccgaagacgcggaggtccatgccgagaactggctgcggctttatggctacctgcctcagcccagccgccatatgtccaccatgcgttccgcccagatcttggcctcggcccttgcagagatgcagcgcttctacgggatcccagtcaccggtgtgctcgacgaagagaccaaggagtggatgaagcggccccgctgtggggtgccagaccagttcggggtacgagtgaaagccaacctgcggcggcgtcggaagcgctacgccctcaccgggaggaagtggaacaaccaccatctgacctttagcatccagaactacacggagaagttgggctggtaccactcgatggaggcggtgcgcagggccttccgcgtgtgggagcaggccacgcccctggtcttccaggaggtgccctatgaggacatccggctgcggcgacagaaggaggccgacatcatggtactctttgcctctggcttccacggcgacagctcgccgtttgatggcaccggtggctttctggcccacgcctatttccctggccccggcctaggcggggacacccattttgacgcagatgagccctggaccttctccagcactgacctgcatggaaacaacctcttcctggtggcagtgcatgagctgggccacgcgctggggctggagcactccagcaaccccaatgccatcatggcgccgttctaccagtggaaggacgttgacaacttcaagctgcccgaggacgatctccgtggcatccagcagctctacggtaccccagacggtcagccacagcctacccagcctctccccactgtgacgccacggcggccaggccggcctgaccaccggccgccccggcctccccagccaccacccccaggtgggaagccagagcggcccccaaagccgggccccccagtccagccccgagccacagagcggcccgaccagtatggccccaacatctgcgacggggactttgacacagtggccatgcttcgcggggagatgttcgtgttcaagggccgctggttctggcgagtccggcacaaccgcgtcctggacaactatcccatgcccatcgggcacttctggcgtggtctgcccggtgacatcagtgctgcctacgagcgccaagacggtcgttttgtctttttcaaaggtgaccgctactggctctttcgagaagcgaacctggagcccggctacccacagccgctgaccagctatggcctgggcatcccctatgaccgcattgacacggccatctggtgggagcccacaggccacaccttcttcttccaagaggacaggtactggcgcttcaacgaggagacacagcgtggagaccctgggtaccccaagcccatcagtgtctggcaggggatccctgcctcccctaaaggggccttcctgagcaatgacgcagcctacacctacttctacaagggcaccaaatactggaaattcgacaatgagcgcctgcggatggagcccggctaccccaagtccatcctgcgggacttcatgggctgccaggagcacgtggagccaggcccccgatggcccgacgtggcccggccgcccttcaacccccacgggggtgcagagcccggggcggacagcgcagagggcgacgtgggggatggggatggggactttggggccggggtcaacaaggacgggggcagccgcgtggtggtgcagatggaggaggtggcacggacggtgaacgtggtgatggtgctggtgccactgctgctgctgctctgcgtcctgggcctcacctacgcgctggtgcagatgcagcgcaagggtgcgccacgtgtcctgctttactgcaagcgctcgctgcaggagtgggtctgaccacccagcgctcctgctaacggtgctcagggggcgcctgtggttctgagatggctcccaggggctccctccgcccccaggtaggggcccctctcagccctcacacaccctgtctgccccgccctcattatttatgtccaggtgtttgttttgttttgtttttggcaccttacttgaccatttgtttctgtttccccgactggggcagggtgtttagaattttctaaatgtagttctgctccagacagggaattaggcccccatcatcctctggcttggccacagccaggggagcagaggggcagaggcccacattggaagagcagcacctcctcagcctgaaccccagggctgtaactgccaggctctctttgcccagttggagactgtctggcccccctggtcccctccttcccaagtgagtctctctgggccttaggaagagccttccacccaggggcagccccaggccaaaggggacctggaagggaggtgggccgtggcccttgagtccccattgaggcttggttccttcccaatccagtggacttcgcagtccacttctgacagcctcagtgaccctggctccttgtgccagagaacccagcccacccccggcagcagcccccagctcccacctccccttgggcccacacctccttccctctctggagaaagggccctgggcctgcctcaccacggaccaaagggagtctgccagggcccctctccccagggaagcagcagcctcgcccctggcagagatgcctccctgagctagaaccctctgttccttccctgtgcctcctccctccctctccgactcacaccactagcctcaggggtctgagctccagctcctttgggcttcagctgccagtgtcctgagccccagggagagggggctggtgggtgcctaggcctgggcagtggatggccgtgaatgggtgcccacagtgtcaggcactgggcatgaggggttcctcccctccagctccctgtgcccccagggtcctgggaggagagacactggtggggataggccagccgcgcatcagactgtgaaccccacgaaggagcccattgtggcctaagaggctgccctcctgtgctcagccctgaggacagatgcctccttcctcttttccttcccaaagcaagcaagaggccgtggctgctgtgggaaatggtactgtacagctggctctacttccccatggccctgagcgagtggagtctgccacccaggatccccaaggcacttgagggggaaggattctgctggcctctgcgagtggtttcttgtgcactggcaccaagtgcgggtccggcagcttctgccccctgcagaaccggagagccagctaaggggtggggctgcgggggttccgtgtccacccccatacatttatttctgtaaataatgtgcactgaataaattgtacagccggcaaaaaaaaaaaaaaaaaaaaa

SEQ ID NO: 747 - protein, 669 aa, Homo sapiens
  MMP-15 precursor
MGSDPSAPGRPGWTGSLLGDREEAARPRLLPLLLVLLGCLGLGVAAEDAEVHAENWLRLYGYLPQPSRHMSTMRSAQILASALAEMQRFYGIPVTGVLDEETKEWMKRPRCGVPDQFGVRVKANLRRRRKRYALTGRKWNNHHLTFSIQNYTEKLGWYHSMEAVRRAFRVWEQATPLVFQEVPYEDIRLRRQKEADIMVLFASGFHGDSSPFDGTGGFLAHAYFPGPGLGGDTHFDADEPWTFSSTDLHGNNLFLVAVHELGHALGLEHSSNPNAIMAPFYQWKDVDNFKLPEDDLRGIQQLYGTPDGQPQPTQPLPTVTPRRPGRPDHRPPRPPQPPPPGGKPERPPKPGPPVQPRATERPDQYGPNICDGDFDTVAMLRGEMFVFKGRWFWRVRHNRVLDNYPMPIGHFWRGLPGDISAAYERQDGRFVFFKGDRYWLFREANLEPGYPQPLTSYGLGIPYDRIDTAIWWEPTGHTFFFQEDRYWRFNEETQRGDPGYPKPISVWQGIPASPKGAFLSNDAAYTYFYKGTKYWKFDNERLRMEPGYPKSILRDFMGCQEHVEPGPRWPDVARPPFNPHGGAEPGADSAEGDVGDGDGDFGAGVNKDGGSRVVVQMEEVARTVNVVMVLVPLLLLLCVLGLTYALVQMQRKGAPRVLLYCKRSLQEWV

SEQ ID NO: 748 - protein, 529 aa, Homo sapiens
  MMP-15 mature
YALTGRKWNNHHLTFSIQNYTEKLGWYHSMEAVRRAFRVWEQATPLVFQEVPYEDIRLRRQKEADIMVLFASGFHGDSSPFDGTGGFLAHAYFPGPGLGGDTHFDADEPWTFSSTDLHGNNLFLVAVHELGHALGLEHSSNPNAIMAPFYQWKDVDNFKLPEDDLRGIQQLYGTPDGQPQPTQPLPTVTPRRPGRPDHRPPRPPQPPPPGGKPERPPKPGPPVQPRATERPDQYGPNICDGDFDTVAMLRGEMFVFKGRWFWRVRHNRVLDNYPMPIGHFWRGLPGDISAAYERQDGRFVFFKGDRYWLFREANLEPGYPQPLTSYGLGIPYDRIDTAIWWEPTGHTFFFQEDRYWRFNEETQRGDPGYPKPISVWQGIPASPKGAFLSNDAAYTYFYKGTKYWKFDNERLRMEPGYPKSILRDFMGCQEHVEPGPRWPDVARPPFNPHGGAEPGADSAEGDVGDGDGDFGAGVNKDGGSRVVVQMEEVARTVNVVMVLVPLLLLLCVLGLTYALVQMQRKGAPRVLLY

SEQ ID NO: 749 - DNA, 6347 bp, Homo sapiens
  MMP-16
tctttgagccggaaccgccggtgaacttaggcgccacgttcccggtgactgaccccggaggatggtgaacaggaactactgctgaccctgtcttcgccgctgcctctcgggggctgccgagcgcggggcccctgtctcctccccttgcccggctgtgggtgaacctgcaggctccttacccacccggaggacttttttttgaaaggaaacgagggagggagggagagggagagagggagaaaacgaaggggagctcgtccatccattgaagcacagttcactatgatcttactcacattcagcactggaagacggttggatttcgtgcatcattcgggggtgtttttcttgcaaaccttgctttggattttatgtgctacagtctgcggaacggagcagtatttcaatgtggaggtttggttacaaaagtacggctaccttccaccgactgaccccagaatgtcagtgctgcgctctgcagagaccatgcagtctgccctagctgccatgcagcagttctatggcattaacatgacaggaaaagtggacagaaacacaattgactggatgaagaagccccgatgcggtgtacctgaccagacaagaggtagctccaaatttcatattcgtcgaaagcgatatgcattgacaggacagaaatggcagcacaagcacatcacttacagtataaagaacgtaactccaaaagtaggagaccctgagactcgtaaagctattcgccgtgcctttgatgtgtggcagaatgtaactcctctgacatttgaagaagttccctacagtgaattagaaaatggcaaacgtgatgtggatataaccattatttttgcatctggtttccatggggacagctctccctttgatggagagggaggatttttggcacatgcctacttccctggaccaggaattggaggagatacccattttgactcagatgagccatggacactaggaaatcctaatcatgatggaaatgacttatttcttgtagcagtccatgaactgggacatgctctgggattggagcattccaatgaccccactgccatcatggctccattttaccagtacatggaaacagacaacttcaaactacctaatgatgatttacagggcatccagaagatatatggtccacctgacaagattcctccacctacaagacctctaccgacagtgcccccacaccgctctattcctccggctgacccaaggaaaaatgacaggccaaaacctcctcggcctccaaccggcagaccctcctatcccggagccaaacccaacatctgtgatgggaactttaacactctagctattcttcgtcgtgagatgtttgttttcaaggaccagtggttttggcgagtgagaaacaacagggtgatggatggatacccaatgcaaattacttacttctggcggggcttgcctcctagtatcgatgcagtttatgaaaatagcgacgggaattttgtgttctttaaaggtaacaaatattgggtgttcaaggatacaactcttcaacctggttaccctcatgacttgataacccttggaagtggaattccccctcatggtattgattcagccatttggtgggaggacgtcgggaaaacctatttcttcaagggagacagatattggagatatagtgaagaaatgaaaacaatggaccctggctatcccaagccaatcacagtctggaaagggatccctgaatctcctcagggagcatttgtacacaaagaaaatggctttacgtatttctacaaaggaaaggagtattggaaattcaacaaccagatactcaaggtagaacctggatatccaagatccatcctcaaggattttatgggctgtgatggaccaacagacagagttaaagaaggacacagcccaccagatgatgtagacattgtcatcaaactggacaacacagccagcactgtgaaagccatagctattgtcattccctgcatcttggccttatgcctccttgtattggtttacactgtgttccagttcaagaggaaaggaacaccccgccacatactgtactgtaaacgctctatgcaagagtgggtgtgatgtagggttttttcttctttctttcttttgcaggagtttgtggtaacttgagattcaagacaagagctgttatgctgtttcctagctaggagcaggcttgtggcagcctgattcggggctgacctttcaaacccagagggttgctggtcctgcacatgagtggaaatacactcatggggaagcttccatgatgcacagtatctgctgttcttcagtcctttgtctttctttgtcattcagttctaggcctttcctctgcacgctcaatgcccagtaaaatttcaggattaactaaagaagaggagaaaaagaagaaaagattcttcttaaaagtttctaatgttattttccttctgaagtctgagcccatttctggggggagaaaaaaaaagcaaatcagaaaacccacggtttttctttttttctttttttctttttttctttttttgctttaaaacaaagggaaaaaagagtttaaacaaaaaacccacaattgaacttccaggaaagtgtgaagacccaaaacagctttgtctccaaagaagatagctctctgactgctttggatagtctcctacgcaccattttgtcaggtgggagatttggaatacacatgcaggacgttagactgttgggacagccattttccaacaaccaaggggccaaaatatctgcaatatagtaacagccttaataatacatccatttttcgttttatacagctgttctcagctatgtcctcagtgtttcatcgcatttatattcatagctattttcaaacacgaccttttaattgtttttgaagtatttctaaaccccttctttccaccttactcctccatcattgtgataatcttcccaagttgtattaggccattgccccaggccttccatgggtctgtcaggaatattcgttacaaagcagagcaagaagcagtatgtctctgaagtggattacagtggcagttattttacaaggatttgtgacactagtaacatacccgtgtaaccctttgagaactatcagaccagctttcagagtcttaggattgtcggtcttgcgatctgataaattatagaactgggcaatggtaaaaacagtcacaagttcaagaagttcaggtttttaaaacagatatcctataatgtcatataatttttaaatgatttacaagactacataaatgtgtttataacaaacagaaatgatgttacttgccaaaatttttctggcaaataaaaaaggtattttattaagattctcataaatctgaaattttatttgaaaaactgataatagcctaagtcttcttttcttttttttaggcatactgaatttctgttttaaaatccattgcatgaaaattcaatttgccttggtatatgcagttagcattgccattttaaaaatgaattaaaacggtgactctgaagttgcatgaatatcctccagtgcattacctattgcatgtccaccatagttctcaaagggttagtgtggcttctggcatttagccgtccatttgatcactgacagagccaagagaccaccaaagcatttcattgttgagtgtaatttgtcctaacagcagtattgtcattttcatgtgacctgcagagcaggtttgtatcaatatttttttcctagagaaaagtcagcaactgacagacctctttattgatttttaggagctgcttcttgcagtgaaaggctttacagccactgggctgtgaacttattagagatggtcagaatgaatgcaccccatgagtcagacattggctttgtgtgaaagccagctttgaggggattagcttttgaaacaatgaacagcttgccttgaacttgattattgatctattgactgtcattaacaacaacttaaacattgtcttctgtgaaaattttccttgaagagtcctgttctatgtctttgccctttgacctttaacttgcaaactggcacaaactgaaggaaatctggtgttgcttctccattggattagttgttctctaaaacctagtaagcatgagctgtttccttagagtggagagagtggtgatggcagatctgcagatggacactttgctctttacatgcacactctgaaaatgccctataggtagaagtgaattttaatttcattttaatataatttcaagtctaaattcatcattttagtacaaattacaaaaactataggaaaaaaaaaacctcaaatacttgaatggccagtgtggcttttatataaagcaggaattttatactagtaaaaatttcttactcatttgctaatacacatttccagatgatttttaatgagtgtaggtatacattcttatttggaaatggatagtttggctgccttgaatttatatttatactcaacgtagcatgaaaattagaatgccttttggttaaactacatgtttatgatttggttggggaaaatattttataattgtgggtggcatgctgcaaagccttgcagattgttatttcttacaacctgagcgtatatagtatgagcctaagaaaaaagaagagtaagaaaagaagaatggctttacagtaaaatatcatacaatgcagacaatattttaagaggatattggagattatgtacgcaagggccaagaaagcaagaaatgagaaccagagtcagccctgtagctttacttcagtgcttccattctagatgatgctgatattataaagagttagtcactgctgctaagcatggaggactatatacataagctcgtttatacagtgtttgcttgtgggagggtttaatccttttagggccttgatgtcaagaaaaaaataactggaaactatattttgctaaagatagaaatgaggaactgtgtcattttgggacatgtgcaaatcattgaggaactccatcaccctgcattgaaaattgatttttttttcctctaaaatgagaaagaaactgaataagcaatctgttgcctctttactcattcatcacaatatcctgattcgtcataaggctatcagtatataagggctagaaaataatcatagcattaagaaggaaggagtctatcattatgcttgaattctggcaaatgtcatgaataagggttgggtcatatttactttaatatgagacaagatttatgtgataagcaaaggcatataaggctgctcttttgaacagaacatttcagttatcaggctgtactattacaagagataagaagacaataaggacaatgtaatcacaaacagtgggattccatttgtttattgtacaccagctactttgtgggtatggttcctgactcctcttctacatgaggtttgggaaaaaagtctcaaaccaaatggaacagtgaaagggaaagtaattcatctagcacataagaatagtgattcaaaaccaatgcagaataaatttccatgggtcaataacataaggtgtcagttcagtgttactagagatatgcaaggcataaaatattttcatcaccccatcactaataacatgaaaagctcagacataggatttcccaaattgaaatgaaaacacattcatgcctgcaaaaataattctccttctgcttcatttctcattactttatctaatataaacacaaatgtaaacaaggtaatggtcttcatgtaaaatgaccatatagttaagaattttagtaaaatattgttgttctgtgtattattaaacaaatgcaatgaagtattaaaatagctgatcagtttgaatttcctgtaaagcagtaattccgcatcagaattgtagataaggttgtgaatttattgactcatttcagaacagtgtctgttgacatggcagtcagagcaggtgaatacagatgctctttctgattgcaaaggttatagagctaaattagacagcattatgtgatactagcaaagacaacttctgttataaatcagagggcaaggcttttctgaatcgatgtgataaattactaagtaatgattaccaaaaataattactaagtaataaaagatacagactggtttactgaaataagcaagtgttacatttaataattacctataatctttttttgttaacacataagcaagtgttacctttaataattacctataatctttttttgttaacacataatttggccatttcatatactgtgtacctattttcattccctctctgtgggtcattaaaaaacacaatgtggtggataaaaaaaaaaaaaa

SEQ ID NO: 750 - protein, 607 aa, Homo sapiens
  MMP-16 precursor
MILLTFSTGRRLDFVHHSGVFFLQTLLWILCATVCGTEQYFNVEVWLQKYGYLPPTDPRMSVLRSAETMQSALAAMQQFYGINMTGKVDRNTIDWMKKPRCGVPDQTRGSSKFHIRRKRYALTGQKWQHKHITYSIKNVTPKVGDPETRKAIRRAFDVWQNVTPLTFEEVPYSELENGKRDVDITIIFASGFHGDSSPFDGEGGFLAHAYFPGPGIGGDTHFDSDEPWTLGNPNHDGNDLFLVAVHELGHALGLEHSNDPTAIMAPFYQYMETDNFKLPNDDLQGIQKIYGPPDKIPPPTRPLPTVPPHRSIPPADPRKNDRPKPPRPPTGRPSYPGAKPNICDGNFNTLAILRREMFVFKDQWFWRVRNNRVMDGYPMQITYFWRGLPPSIDAVYENSDGNFVFFKGNKYWVFKDTTLQPGYPHDLITLGSGIPPHGIDSAIWWEDVGKTYFFKGDRYWRYSEEMKTMDPGYPKPITVWKGIPESPQGAFVHKENGFTYFYKGKEYWKFNNQILKVEPGYPRSILKDFMGCDGPTDRVKEGHSPPDDVDIVIKLDNTASTVKAIAIVIPCILALCLLVLVYTVFQFKRKGTPRHILYCKRSMQEWV

SEQ ID NO: 751 - protein, 481 aa, Homo sapiens
  MMP-16 mature
YALTGQKWQHKHITYSIKNVTPKVGDPETRKAIRRAFDVWQNVTPLTFEEVPYSELENGKRDVDITIIFASGFHGDSSPFDGEGGFLAHAYFPGPGIGGDTHFDSDEPWTLGNPNHDGNDLFLVAVHELGHALGLEHSNDPTAIMAPFYQYMETDNFKLPNDDLQGIQKIYGPPDKIPPPTRPLPTVPPHRSIPPADPRKNDRPKPPRPPTGRPSYPGAKPNICDGNFNTLAILRREMFVFKDQWFWRVRNNRVMDGYPMQITYFWRGLPPSIDAVYENSDGNFVFFKGNKYWVFKDTTLQPGYPHDLITLGSGIPPHGIDSAIWWEDVGKTYFFKGDRYWRYSEEMKTMDPGYPKPITVWKGIPESPQGAFVHKENGFTYFYKGKEYWKFNNQILKVEPGYPRSILKDFMGCDGPTDRVKEGHSPPDDVDIVIKLDNTASTVKAIAIVIPCILALCLLVLVYTVFQFKRKGTPRHILYCK

SEQ ID NO: 752 - DNA, 2438 bp, Homo sapiens
  MMP-17
ccggcgggggcgccgcggagagcggagggcgccgggctgcggaacgcgaagcggagggcgcgggaccctgcacgccgcccgcgggcccatgtgagcgccatgcggcgccgcgcagcccggggacccggcccgccgcccccagggcccggactctcgcggttgccgctgctgccgctgccgctgctgctgctgctggcgctggggacccgcgggggctgcgccgcgcccgcacccgcgccgcgcgccgaggacctcagcctgggagtggagtggctaagcaggttcggttacctgcccccggctgaccccacaacagggcagctgcagacgcaagaggagctgtctaaggccatcacagccatgcagcagtttggtggcctggaggccaccggcatcctggacgaggccaccctggccctgatgaaaaccccacgctgctccctgccagacctccctgtcctgacccaggctcgcaggagacgccaggctccagcccccaccaagtggaacaagaggaacctgtcgtggagggtccggacgttcccacgggactcaccactggggcacgacacggtgcgtgcactcatgtactacgccctcaaggtctggagcgacattgcgcccctgaacttccacgaggtggcgggcagcaccgccgacatccagatcgacttctccaaggccgaccataacgacggctaccccttcgacggccccggcggcaccgtggcccacgccttcttccccggccaccaccacaccgccggggacacccactttgacgatgacgaggcctggaccttccgctcctcggatgcccacgggatggacctgtttgcagtggctgtccacgagtttggccacgccattgggttaagccatgtggccgctgcacactccatcatgcggccgtactaccagggcccggtgggtgacccgctgcgctacgggctcccctacgaggacaaggtgcgcgtctggcagctgtacggtgtgcgggagtctgtgtctcccacggcgcagcccgaggagcctcccctgctgccggagcccccagacaaccggtccagcgccccgcccaggaaggacgtgccccacagatgcagcactcactttgacgcggtggcccagatccgcggtgaagctttcttcttcaaaggcaagtacttctggcggctgacgcgggaccggcacctggtgtccctgcagccggcacagatgcaccgcttctggcggggcctgccgctgcacctggacagcgtggacgccgtgtacgagcgcaccagcgaccacaagatcgtcttctttaaaggagacaggtactgggtgttcaaggacaataacgtagaggaaggatacccgcgccccgtctccgacttcagcctcccgcctggcggcatcgacgctgccttctcctgggcccacaatgacaggacttatttctttaaggaccagctgtactggcgctacgatgaccacacgaggcacatggaccccggctaccccgcccagagccccctgtggaggggtgtccccagcacgctggacgacgccatgcgctggtccgacggtgcctcctacttcttccgtggccaggagtactggaaagtgctggatggcgagctggaggtggcacccgggtacccacagtccacggcccgggactggctggtgtgtggagactcacaggccgatggatctgtggctgcgggcgtggacgcggcagaggggccccgcgcccctccaggacaacatgaccagagccgctcggaggacggttacgaggtctgctcatgcacctctggggcatcctctcccccgggggccccaggcccactggtggctgccaccatgctgctgctgctgccgccactgtcaccaggcgccctgtggacagcggcccaggccctgacgctatgacacacagcgcgagcccatgagaggacagaggcggtgggacagcctggccacagagggcaaggactgtgccggagtccctgggggaggtgctggcgcgggatgaggacgggccaccctggcaccggaaggccagcagagggcacggcccgccagggctgggcaggctcaggtggcaaggacggagctgtcccctagtgagggactgtgttgactgacgagccgaggggtggccgctccagaagggtgcccagtcaggccgcaccgccgccagcctcctccggccctggagggagcatctcgggctgggggcccacccctctctgtgccggcgccaccaaccccacccacactgctgcctggtgctcccgccggcccacagggcctccgtccccaggtccccagtggggcagccctccccacagacgagccccccacatggtgccgcggcacgtcccccctgtgacgcgttccagaccaacatgacctctccctgctttgtaaaaaaaaaaaaaaaaaaa

SEQ ID NO: 753 - protein, 606 aa, Homo sapiens
  MMP-17 precursor
MRRRAARGPGPPPPGPGLSRLPLLPLPLLLLLALGTRGGCAAPAPAPRAEDLSLGVEWLSRFGYLPPADPTTGQLQTQEELSKAITAMQQFGGLEATGILDEATLALMKTPRCSLPDLPVLTQARRRRQAPAPTKWNKRNLSWRVRTFPRDSPLGHDTVRALMYYALKVWSDIAPLNFHEVAGSTADIQIDFSKADHNDGYPFDGPGGTVAHAFFPGHHHTAGDTHFDDDEAWTFRSSDAHGMDLFAVAVHEFGHAIGLSHVAAAHSIMRPYYQGPVGDPLRYGLPYEDKVRVWQLYGVRESVSPTAQPEEPPLLPEPPDNRSSAPPRKDVPHRCSTHFDAVAQIRGEAFFFKGKYFWRLTRDRHLVSLQPAQMHRFWRGLPLHLDSVDAVYERTSDHKIVFFKGDRYWVFKDNNVEEGYPRPVSDFSLPPGGIDAAFSWAHNDRTYFFKDQLYWRYDDHTRHMDPGYPAQSPLWRGVPSTLDDAMRWSDGASYFFRGQEYWKVLDGELEVAPGYPQSTARDWLVCGDSQADGSVAAGVDAAEGPRAPPGQHDQSRSEDGYEVCSCTSGASSPPGAPGPLVAATMLLLLPPLSPGALWTAAQALTL

SEQ ID NO: 754 - protein, 478 aa, Homo sapiens
  MMP-17 mature
QAPAPTKWNKRNLSWRVRTFPRDSPLGHDTVRALMYYALKVWSDIAPLNFHEVAGSTADIQIDFSKADHNDGYPFDGPGGTVAHAFFPGHHHTAGDTHFDDDEAWTFRSSDAHGMDLFAVAVHEFGHAIGLSHVAAAHSIMRPYYQGPVGDPLRYGLPYEDKVRVWQLYGVRESVSPTAQPEEPPLLPEPPDNRSSAPPRKDVPHRCSTHFDAVAQIRGEAFFFKGKYFWRLTRDRHLVSLQPAQMHRFWRGLPLHLDSVDAVYERTSDHKIVFFKGDRYWVFKDNNVEEGYPRPVSDFSLPPGGIDAAFSWAHNDRTYFFKDQLYWRYDDHTRHMDPGYPAQSPLWRGVPSTLDDAMRWSDGASYFFRGQEYWKVLDGELEVAPGYPQSTARDWLVCGDSQADGSVAAGVDAAEGPRAPPGQHDQSRSEDGYEVCSCTSGASSPPGAPGPLVAATMLLLLPPLSPGALWTAAQALTL

SEQ ID NO: 755 - DNA, 4344 bp, Homo sapiens
  MMP-24
gggatgccgaggagccggggcggccgcgccgcgccggggccgccgccgccgccgccgccgccgggccaggccccgcgctggagccgctggcgggtccctgggcggctgctgctgctgctgctgcccgcgctctgctgcctcccgggcgccgcgcgggcggcggcggcggcggcgggggcagggaaccgggcagcggtggcggtggcggtggcgcgggcggacgaggcggaggcgcccttcgccgggcagaactggttaaagtcctatggctatctgcttccctatgactcacgggcatctgcgctgcactcagcgaaggccttgcagtcggcagtctccactatgcagcagttttacgggatcccggtcaccggtgtgttggatcagacaacgatcgagtggatgaagaaaccccgatgtggtgtccctgatcacccccacttaagccgtaggcggagaaacaagcgctatgccctgactggacagaagtggaggcaaaaacacatcacctacagcattcacaactataccccaaaagtgggtgagctagacacgcggaaagctattcgccaggctttcgatgtgtggcagaaggtgaccccactgacctttgaagaggtgccataccatgagatcaaaagtgaccggaaggaggcagacatcatgatcttttttgcttctggtttccatggcgacagctccccatttgatggagaagggggattcctggcccatgcctacttccctggcccagggattggaggagacacccactttgactccgatgagccatggacgctaggaaatgccaaccatgacgggaacgacctcttcctggtggctgtgcatgagctgggccacgcgctgggactggagcactccagcgaccccagcgccatcatggcgcccttctaccagtacatggagacgcacaacttcaagctgccccaggacgatctccagggcatccagaagatctatggacccccagccgagcctctggagcccacaaggccactccctacactccccgtccgcaggatccactcaccatcggagaggaaacacgagcgccagcccaggccccctcggccgcccctcggggaccggccatccacaccaggcaccaaacccaacatctgtgacggcaacttcaacacagtggccctcttccggggcgagatgtttgtctttaaggatcgctggttctggcgtctgcgcaataaccgagtgcaggagggctaccccatgcagatcgagcagttctggaagggcctgcctgcccgcatcgacgcagcctatgaaagggccgatgggagatttgtcttcttcaaaggtgacaagtattgggtgtttaaggaggtgacggtggagcctgggtacccccacagcctgggggagctgggcagctgtttgccccgtgaaggcattgacacagctctgcgctgggaacctgtgggcaagacctactttttcaaaggcgagcggtactggcgctacagcgaggagcggcgggccacggaccctggctaccctaagcccatcaccgtgtggaagggcatcccacaggctccccaaggagccttcatcagcaaggaaggatattacacctatttctacaagggccgggactactggaagtttgacaaccagaaactgagcgtggagccaggctacccgcgcaacatcctgcgtgactggatgggctgcaaccagaaggaggtggagcggcggaaggagcggcggctgccccaggacgacgtggacatcatggtgaccatcaacgatgtgccgggctccgtgaacgccgtggccgtggtcatcccctgcatcctgtccctctgcatcctggtgctggtctacaccatcttccagttcaagaacaagacaggccctcagcctgtcacctactataagcggccagtccaggaatgggtgtgagcagcccagagccctctctatccacttggtctggccagccaggcccttcctcaccagggtctgaggggcagctctggccagtgctcaccagggccagcagggccctaggctggggtcgtacagctgaagtggtgggtgcattggcctaggctgagcgtggggcagggaattatgggggctgtgccccagggtgggtgtctggcacccagctgccagccttctgtcctgggcaaactactccctacttaagggaataggccaggctccatccggaggcagggaccatgccaggaggagcccctgtggtcacggcatcctgtggtgtccatgaggtaccacagctccactcctggctggaacccagcaccctctgtgggaagccagcactagctctcatcccccatccgggagataccaccagtcctggtccccttttgccaacacctgctggtcagatgtccccctacccccaccccactgtcctccaaggctacaggacccctgcttctgacacagtgagcaacaagcctgggtttccctgctggcagacggcagatccctcaggaaacctgctccacttgtcagggtctcttcggagacccaggatttagggtcacatgctgcaggcagggctgtggcccagctgggtctgacaaggacccagctgtcacatcgtgaatatttaaatgtcctgtcactactgtcccattttgcaaaggctgcttgaggctttaggtgaactagaggtgactgtcttggtgatgaggccagcatagcggccctcccccaggcgacaaggaccaaggtgctgctaaggccactctagcgcccagacaccccagtagctgagctctgctcctatggctacagagctggggcagaagctgaccccatttctggaggaagatccgagtttgtgaccgtcctccactcccctctattgtcactgtccccagctttgctccagtctgtcacttgcagcctggagctcagcctcaccagttaggtgaggcagagatggctgcagggccaacactggcagagcctgggagtccttcggaaggggaccagggcgtctgaagtgctcagtgcccccactactctgaggccgactccagctactctgaggccgactcaatctctcggctggaagcagtgttttcccagagcttggcccttgctgacctcgctcactgggcccatcttcccacactgctcttagaaggacacccctaccggtagcagccccaagctgagggggctccctttttgaccttcactggcccgcccttcactgtctccagcaggagttcctagggcttggcctgccttgctccacagtacggcggaggcagccctgcttgtcactgaggagccctagacaaggccaatgggttcatcaatgcccactggctctctgccaaagccaaaaaggtgtcaggcagtctccagcgtgctggccgggtctcggatgccacccctgctcactgagcctgcatgggccttgcccccgaccctgtggtctctgggattggggtcggcttaccctgtagcacagacagggactcctgctgccctgggagctgtctcaagcaaaatctcttgtcccagaggtgcccatgtgggtccgctgtgtcccctgtcatcatccttgttttttctcattttggccaagggcaggctccctgggacaggcagggaacaactgcggagatattagtgattcataggtttgtacagtgttttatactttgcaaagcactttattagctcacacctgtccactcacatgaaactcgtgttaggccctgggaggccgacggtaactctcaccgtgccctcagatgaagcacagagaggttgttacttgcccgggccatccagtgggctggctgggtcttgtgtccccatctgtggacccctctagggtctgagatgagatgagaagtgtctcctgtatccacctcttcctggcctcccttcccccacttcctggtccctgtccactcctcaggttggtgctctcacttcttgaaagctctaggcacccccgcctcccgccaggctccccattggctcctggcaggccagctgagaatgaacaggagatggaggcaggcagcccaggctgcagaggtgagggatgtggggccaggcccagagggctcagcctagaggcttccaatctcagattctcctgcctgtggtcatctgtttgtccatcaccccaggacagggcagacagaggggcaaagcactgggggccccagagcctagcttcccctcagcctgggggacatcacagcatttcagtgtcagtcacattttaaactgatcagcctttgtataatgttttttaaatcatttctaaataaaacagaaatacagagtgaaaaaaaaaaa

SEQ ID NO: 756 - protein, 645 aa, Homo sapiens
  MMP-24 precursor
MPRSRGGRAAPGPPPPPPPPGQAPRWSRWRVPGRLLLLLLPALCCLPGAARAAAAAAGAGNRAAVAVAVARADEAEAPFAGQNWLKSYGYLLPYDSRASALHSAKALQSAVSTMQQFYGIPVTGVLDQTTIEWMKKPRCGVPDHPHLSRRRRNKRYALTGQKWRQKHITYSIHNYTPKVGELDTRKAIRQAFDVWQKVTPLTFEEVPYHEIKSDRKEADIMIFFASGFHGDSSPFDGEGGFLAHAYFPGPGIGGDTHFDSDEPWTLGNANHDGNDLFLVAVHELGHALGLEHSSDPSAIMAPFYQYMETHNFKLPQDDLQGIQKIYGPPAEPLEPTRPLPTLPVRRIHSPSERKHERQPRPPRPPLGDRPSTPGTKPNICDGNFNTVALFRGEMFVFKDRWFWRLRNNRVQEGYPMQIEQFWKGLPARIDAAYERADGRFVFFKGDKYWVFKEVTVEPGYPHSLGELGSCLPREGIDTALRWEPVGKTYFFKGERYWRYSEERRATDPGYPKPITVWKGIPQAPQGAFISKEGYYTYFYKGRDYWKFDNQKLSVEPGYPRNILRDWMGCNQKEVERRKERRLPQDDVDIMVTINDVPGSVNAVAVVIPCILSLCILVLVYTIFQFKNKTGPQPVTYYKRPVQEWV

SEQ ID NO: 757 - protein, 490 aa, Homo sapiens
  MMP-24 mature
YALTGQKWRQKHITYSIHNYTPKVGELDTRKAIRQAFDVWQKVTPLTFEEVPYHEIKSDRKEADIMIFFASGFHGDSSPFDGEGGFLAHAYFPGPGIGGDTHFDSDEPWTLGNANHDGNDLFLVAVHELGHALGLEHSSDPSAIMAPFYQYMETHNFKLPQDDLQGIQKIYGPPAEPLEPTRPLPTLPVRRIHSPSERKHERQPRPPRPPLGDRPSTPGTKPNICDGNFNTVALFRGEMFVFKDRWFWRLRNNRVQEGYPMQIEQFWKGLPARIDAAYERADGRFVFFKGDKYWVFKEVTVEPGYPHSLGELGSCLPREGIDTALRWEPVGKTYFFKGERYWRYSEERRATDPGYPKPITVWKGIPQAPQGAFISKEGYYTYFYKGRDYWKFDNQKLSVEPGYPRNILRDWMGCNQKEVERRKERRLPQDDVDIMVTINDVPGSVNAVAVVIPCILSLCILVLVYTIFQFKNKTGPQPVTYYKRPVQEWV

SEQ ID NO: 758 - DNA, 3565 bp, Homo sapiens
  MMP-25
gattcccgggcccacccgacccagcggcgcgaccctggccctccgggaccctccgctgactccaccgcgcacttcccgggacccccacacacatcccagccctccggccgatccctccctactcggtgccgggtgccccccgccctctccaggcccggatctcctcccccaggtccccggggcggccccagccaggcccccttcgaaccccgccggcggcccgggctggggcgcaccatgcggctgcggctccggcttctggcgctgctgcttctgctgctggcaccgcccgcgcgcgccccgaagccctcggcgcaggacgtgagcctgggcgtggactggctgactcgctatggttacctgccgccaccccaccctgcccaggcccagctgcagagccctgagaagttgcgcgatgccatcaaagtcatgcagaggttcgcggggctgccggagaccggccgcatggacccagggacagtggccaccatgcgtaagccccgctgctccctgcctgacgtgctgggggtggcggggctggtcaggcggcgtcgccggtacgctctgagcggcagcgtgtggaagaagcgaaccctgacatggagggtacgttccttcccccagagctcccagctgagccaggagaccgtgcgggtcctcatgagctatgccctgatggcctggggcatggagtcaggcctcacatttcatgaggtggattccccccagggccaggagcccgacatcctcatcgactttgcccgcgccttccaccaggacagctaccccttcgacgggttggggggcaccctagcccatgccttcttccctggggagcaccccatctccggggacactcactttgacgatgaggagacctggacttttgggtcaaaagacggcgaggggaccgacctgtttgccgtggctgtccatgagtttggccacgccctgggcctgggccactcctcagcccccaactccattatgaggcccttctaccagggtccggtgggcgaccctgacaagtaccgcctgtctcaggatgaccgcgatggcctgcagcaactctatgggaaggcgccccaaaccccatatgacaagcccacaaggaaacccctggctcctccgccccagcccccggcctcgcccacacacagcccatccttccccatccctgatcgatgtgagggcaattttgacgccatcgccaacatccgaggggaaactttcttcttcaaaggcccctggttctggcgcctccagccctccggacagctggtgtccccgcgacccgcacggctgcaccgcttctgggaggggctgcccgcccaggtgagggtggtgcaggccgcctatgctcggcaccgagacggccgaatcctcctctttagcgggccccagttctgggtgttccaggaccggcagctggagggcggggcgcggccgctcacggagctggggctgcccccgggagaggaggtggacgccgtgttctcgtggccacagaacgggaagacctacctggtccgcggccggcagtactggcgctacgacgaggcggcggcgcgcccggaccccggctaccctcgcgacctgagcctctgggaaggcgcgcccccctcccctgacgatgtcaccgtcagcaacgcaggtgacacctacttcttcaagggcgcccactactggcgcttccccaagaacagcatcaagaccgagccggacgccccccagcccatggggcccaactggctggactgccccgccccgagctctggtccccgcgcccccaggccccccaaagcgacccccgtgtccgaaacctgcgattgtcagtgcgagctcaaccaggccgcaggacgttggcctgctcccatcccgctgctcctcttgcccctgctggtggggggtgtagcctcccgctgatggggggagccatccagaccgaacagcgccctccacggccgagtcccccgccgctggacctggtcgggggttgtgaggcgctgcggaggccccttgtctgttcccacggacgggggctcgggcgcggactaagcaggggggatctcccgcgcaggggcggcggcggcggggaccggtcgcctggcgctgggctcagtctcctcagggtctgagaccccggcgctgccaccggaacccgccttcaggggcgcacgcgcgctgggaccatgcgtcggtcgtcgcccccgtcgttccctcccggctgccgccagggggcggtcggaccccgcctcccgagcccggggaggggcggggaggacaaggggcgggcccgcggcctcacccggagggacggcagccccggtcgcgcgctggccccgcaggaccttccttttccaggaagagccagcttttctcggagcgcagtcctgggactctccgcagccccgccccgcctggccactgcgtctggcattcctgggtcgttagaggacaggcctgactgcgaagctgtgccttgcccctctcccacccgcagtttctcaccccgttctgctcccacaaggcccccctacagtcactgccacactggtggggacctgggacccagacccggaaccagcccagatatcacccctgaggacccatgcgccacgtcctgggtggtggaatcagtggctggagggacgacccttgctctccaggctgttaaccttttccgttgctcccccgccacccacctcctcctccccaggccacccaacttgggcacctccctgggcccagaactgccttccattcaatggggaacccttctatccccaagaaccccttccctgcttgcaccctggagagaacagcttgactcccatcaactcaacgctggtggaaagacagggaccgaaccctggctcaggcctggtcattgcctcctcagcactccctcctgggaggccttagctctagagtgaggggtgggtggaacctgggggcacctcgttcaccctgtccccactccccacagttttaggatctaaatgattgcctctggaactattcttctagactatcccacatcagaatcactgggaaatttaagtttgcagatcccacactcaccctgaatcctcactcagggtggggtcaggaatctgcattttaactagtcgcggggattgtggggggcagtagctggctgtttcgtggcatttctgtggctctgcagtgttcctccaccccaggaccaatatgttcaggccacaccgatggcctgaaccccatgggtagagtcacttaggggccacttcctaagttgctgtccagcctcagtgaccccctagtgcttcctggagctgaggctgtgggcggctgtcccagcaaccatgcgaggggttgccccagttgctcatacaaacagatcagcatgaggacagaaggcaggagactttggtcagttacctgggaattctgggctgccaggaaacgatttgggcctctgtcagtttcttttccatgtatgaggagggggaaatttgtatattagaaacttattcatcccactcaggacaataaaaacgaatgtacaaaaaaaaaaaaaaaa

SEQ ID NO: 759 - protein, 562 aa, Homo sapiens
  MMP-25 precursor
MRLRLRLLALLLLLLAPPARAPKPSAQDVSLGVDWLTRYGYLPPPHPAQAQLQSPEKLRDAIKVMQRFAGLPETGRMDPGTVATMRKPRCSLPDVLGVAGLVRRRRRYALSGSVWKKRTLTWRVRSFPQSSQLSQETVRVLMSYALMAWGMESGLTFHEVDSPQGQEPDILIDFARAFHQDSYPFDGLGGTLAHAFFPGEHPISGDTHFDDEETWTFGSKDGEGTDLFAVAVHEFGHALGLGHSSAPNSIMRPFYQGPVGDPDKYRLSQDDRDGLQQLYGKAPQTPYDKPTRKPLAPPPQPPASPTHSPSFPIPDRCEGNFDAIANIRGETFFFKGPWFWRLQPSGQLVSPRPARLHRFWEGLPAQVRVVQAAYARHRDGRILLFSGPQFWVFQDRQLEGGARPLTELGLPPGEEVDAVFSWPQNGKTYLVRGRQYWRYDEAAARPDPGYPRDLSLWEGAPPSPDDVTVSNAGDTYFFKGAHYWRFPKNSIKTEPDAPQPMGPNWLDCPAPSSGPRAPRPPKATPVSETCDCQCELNQAAGRWPAPIPLLLLPLLVGGVASR

SEQ ID NO: 760 - protein, 455 aa, Homo sapiens
  MMP-25 mature
YALSGSVWKKRTLTWRVRSFPQSSQLSQETVRVLMSYALMAWGMESGLTFHEVDSPQGQEPDILIDFARAFHQDSYPFDGLGGTLAHAFFPGEHPISGDTHFDDEETWTFGSKDGEGTDLFAVAVHEFGHALGLGHSSAPNSIMRPFYQGPVGDPDKYRLSQDDRDGLQQLYGKAPQTPYDKPTRKPLAPPPQPPASPTHSPSFPIPDRCEGNFDAIANIRGETFFFKGPWFWRLQPSGQLVSPRPARLHRFWEGLPAQVRVVQAAYARHRDGRILLFSGPQFWVFQDRQLEGGARPLTELGLPPGEEVDAVFSWPQNGKTYLVRGRQYWRYDEAAARPDPGYPRDLSLWEGAPPSPDDVTVSNAGDTYFFKGAHYWRFPKNSIKTEPDAPQPMGPNWLDCPAPSSGPRAPRPPKATPVSETCDCQCELNQAAGRWPAPIPLLLLPLLVGGVASR

SEQ ID NO: 761 - DNA, 1674 bp, Homo sapiens
  MMP-20
ctactgtgaggggatgaaggtgctccctgcatctggccttgctgtcttcctcatcatggctttgaagttttccactgcagccccctccctagttgcagcctcccccaggacctggaggaacaactaccgcctcgcacaggcgtatcttgacaaatattacacaaataaagaaggacaccagattggtgagatggttgcaagaggaagcaattccatgataaggaagattaaggagctacaagcgttctttggcctccaagtcaccgggaagttagaccagaccacaatgaacgtgatcaagaagcctcgctgtggagttcctgatgtggccaattatcgcctcttccctggtgaacccaaatggaaaaaaaatactttgacatacagaatatctaaatacacaccttccatgagttctgtcgaggtggacaaagcagtggagatggccttgcaggcctggagtagcgccgtccctctgagctttgtcagaataaactcaggagaagcggatattatgatatcttttgaaaatggagatcacggggattcctatccattcgatgggcctcgggggactctagcccatgcatttgctcctggagaaggcctgggaggagatacacatttcgacaatcctgagaagtggactatgggaacgaatggttttaatttgtttaccgttgctgctcatgaatttggccatgccctgggcctggcccattccacagacccatcagcactgatgtacccaacttataagtacaagaatccctatggattccacctccccaaagatgatgtgaaagggatccaggcattatacggacctcggaaagtattcctggggaagcccactctgccccatgccccccatcacaagccatccatccctgacctctgtgactccagctcatcctttgacgctgtgacaatgctggggaaggagctcctgctcttcaaggaccggattttctggagacggcaggttcacttgcggacaggaattcggcccagcactattaccagctccttcccccagctcatgtccaatgtggatgcagcttacgaagtggctgagaggggcactgcttacttcttcaaaggtccccactactggataacaagaggattccaaatgcaaggtcctcctcggactatttatgactttggatttccaaggcacgtgcagcaaatagatgctgctgtctacctcagggagccacagaagacccttttctttgtgggagatgaatactacagctacgacgaaaggaaaaggaaaatggaaaaagactatccaaagaatactgaagaagaattttcaggagtaaatggccaaatcgatgctgctgtagaattaaatggctacatttacttcttttcaggaccaaaaacatacaagtatgacacagagaaggaagatgtggttagtgtggtgaaatctagttcctggattggttgctaaatagaaaagcctagtcttctcaagcaatgaggatgactacaagcagcctctaactggatcttaaggactaaagcagaatgtaggagagggattcttccaaaggccttcaaatcaaattagaattcactgagaataataatacttccaatttttttcatagttgtataatcagaatttcaatccacattagaaaagtttttatatgggca

SEQ ID NO: 762 - protein, 483 aa, Homo sapiens [sequence omitted]

SEQ ID NO: 763 - protein, 373 aa, Homo sapiens
  MMP-20 mature
YRLFPGEPKWKKNTLTYRISKYTPSMSSVEVDKAVEMALQAWSSAVPLSFVRINSGEADIMISFENGDHGDSYPFDGPRGTLAHAFAPGEGLGGDTHFDNAEKWTMGTNGFNLFTVAAHEFGHALGLAHSTDPSALMYPTYKYKNPYGFHLPKDDVKGIQALYGPRKVFLGKPTLPHAPHHKPSIPDLCDSSSSFDAVTMLGKELLLFKDRIFWRRQVHLRTGIRPSTITSSFPQLMSNVDAAYEVAERGTAYFFKGPHYWITRGFQMQGPPRTIYDFGFPRHVQQIDAAVYLREPQKTLFFVGDEYYSYDERKRKMEKDYPKNTEEEFSGVNGQIDAAVELNGYIYFFSGPKTYKYDTEKEDVVSVVKSSSW

SEQ ID NO: 764 - DNA, 3262 bp, Homo sapiens
  MMP-19
ggctggagagtaaaaagaactgggggtaagagcccctctgcctagcactgctcccccaaggctcccagaaatctcaggtcagaggcacggacagcctctggagctctcgtctggtgggaccatgaactgccagcagctgtggctgggcttcctactccccatgacagtctcaggccgggtcctggggcttgcagaggtggcgcccgtggactacctgtcacaatatgggtacctacagaagcctctagaaggatctaataacttcaagccagaagatatcaccgaggctctgagagcttttcaggaagcatctgaacttccagtctcaggtcagctggatgatgccacaagggcccgcatgaggcagcctcgttgtggcctagaggatcccttcaaccagaagacccttaaatacctgttgctgggccgctggagaaagaagcacctgactttccgcatcttgaacctgccctccacccttccaccccacacagcccgggcagccctgcgtcaagccttccaggactggagcaatgtggctcccttgaccttccaagaggtgcaggctggtgcggctgacatccgcctctccttccatggccgccaaagctcgtactgttccaatacttttgatgggcctgggagagtcctggcccatgccgacatcccagagctgggcagtgtgcacttcgacgaagacgagttctggactgaggggacctaccgtggggtgaacctgcgcatcattgcagcccatgaagtgggccatgctctggggcttgggcactcccgatattcccaggccctcatggccccagtctacgagggctaccggccccactttaagctgcacccagatgatgtggcagggatccaggctctctatggcaagaagagtccagtgataagggatgaggaagaagaagagacagagctgcccactgtgcccccagtgcccacagaacccagtcccatgccagacccttgcagtagtgaactggatgccatgatgctggggccccgtgggaagacctatgctttcaagggggactatgtgtggactgtatcagattcaggaccgggccccttgttccgagtgtctgccctttgggaggggctccccggaaacctggatgctgctgtctactcgcctcgaacacaatggattcacttctttaagggagacaaggtgtggcgctacattaatttcaagatgtctcctggcttccccaagaagctgaatagggtagaacctaacctggatgcagctctctattggcctctcaaccaaaaggtgttcctctttaagggctccgggtactggcagtgggacgagctagcccgaactgacttcagcagctaccccaaaccaatcaagggtttgtttacgggagtgccaaaccagccctcggctgctatgagttggcaagatggccgagtctacttcttcaagggcaaagtctactggcgcctcaaccagcagcttcgagtagagaaaggctatcccagaaatatttcccacaactggatgcactgtcgtccccggactatagacactaccccatcaggtgggaataccactccctcaggtacgggcataaccttggataccactctctcagccacagaaaccacgtttgaatactgactgctcacccacagacacaatcttggacattaacccctgaggctccaccacccaccctttcatttcccccccagaagcctaaggcctaatagctgaatgaaatacctgtctgctcagtagaaccttgcaggtgctgtagcaggcgcaagaccgtagatctcaggcctctaacacttccaactccagccaccactttcctgtgcattttcactcctgagaagtgctcccctaactcagatcccctaacttagatttggcccccaactccatttcctgtctgtcttagacagcccttccaactgtgtcatctcttctctggaggtcaatggtggagggagatgcctgggtcctgttcttcctacataaaatgcaagaaaacagcatggccagtaaactgagcaagggccttggaatccttgagaatcacatttatgtgcttatgattacgggcaagctaattaaccttgttgaatctcagattccccatttgcaacattaggttaagaccagtactgcaggattgttgcactaaatgaaatactgtatgtgaagtgcctggcacagtgtctggtacatttgtgtttaataaaagctaactccatgttcataagagaggactgaacagctcttcctctagctgtctggctgtataactcttacagtagtctgtataataagggcatctctattagatctttaggggacagaggatttgtcaagatggttagctctttgttttggggtgcagagaaagaaaagagcagcaacagcagaggctggactccctggttcagtatttaatgccattttattcacatgctcccatgttctccctccctcccattgtagccttgctgcccaggggagggatatgtcttcctttatgcatctgggaaaccaggaacagaccctgcgcaggagagtcagagggggaagagttagaatgggtcagtggctggaacaaagttctggttaaggaggaaattagtgccacccacggtgagaagcagagaaggcacttgcatcctatgcagccctgaagaccaggctcctttgggcaaaaggcaagactctggcaggtgggtcaatgctctctccttggagcaagaagccagcttttggggaaggcaggtcctgaggcaggcactgccctgtggtcttccccaggttgaggagagaagtggaagccccatggaagacagtgctcccagctgaggtaggaggcggaggtgggggtgggggtagtttaagcctatggggcccagggggaaaggccaaacagaaacccaactaccccctaatgaagggcctggaggttggggtatcttggagctcctcagagcccttcttcccatcaaaaaggtatcaaatgccttggaagctccctgatcctacaaaacaaaaaaatgcttatttttaccactgtgaggcaagctgaggtgaacatttaaaaggctatttcaagacgaggtgcggtggctataatcctagcactttgggaggctgaagcaggaggatcacttgagcccaggagttcaagaccagcttgggcaacatagggagaccctgtctctgcaaaaaaataaaaacgaatacataaaaattaaaaaaaaa

SEQ ID NO: 765 - protein, 508 aa, Homo sapiens
  MMP-19 precursor
MNCQQLWLGFLLPMTVSGRVLGLAEVAPVDYLSQYGYLQKPLEGSNNFKPEDITEALRAFQEASELPVSGQLDDATRARMRQPRCGLEDPFNQKTLKYLLLGRWRKKHLTFRILNLPSTLPPHTARAALRQAFQDWSNVAPLTFQEVQAGAADIRLSFHGRQSSYCSNTFDGPGRVLAHADIPELGSVHFDEDEFWTEGTYRGVNLRIIAAHEVGHALGLGHSRYSQALMAPVYEGYRPHFKLHPDDVAGIQALYGKKSPVIRDEEEEETELPTVPPVPTEPSPMPDPCSSELDAMMLGPRGKTYAFKGDYVWTVSDSGPGPLFRVSALWEGLPGNLDAAVYSPRTQWIHFFKGDKVWRYINFKMSPGFPKKLNRVEPNLDAALYWPLNQKVFLFKGSGYWQWDELARTDFSSYPKPIKGLFTGVPNQPSAAMSWQDGRVYFFKGKVYWRLNQQLRVEKGYPRNISHNWMHCRPRTIDTTPSGGNTTPSGTGITLDTTLSATETTFEY

SEQ ID NO: 766 - protein, 411 aa, Homo sapiens
  MMP-19 mature
YLLLGRWRKKHLTFRILNLPSTLPPHTARAALRQAFQDWSNVAPLTFQEVQAGAADIRLSFHGRQSSYCSNTFDGPGRVLAHADIPELGSVHFDEDEFWTEGTYRGVNLRIIAAHEVGHALGLGHSRYSQALMAPVYEGYRPHFKLHPDDVAGIQALYGKKSPVIRDEEEEETELPTVPPVPTEPSPMPDPCSSELDAMMLGPRGKTYAFKGDYVWTVSDSGPGPLFRVSALWEGLPGNLDAAVYSPRTQWIHFFKGDKVWRYINFKMSPGFPKKLNRVEPNLDAALYWPLNQKVFLFKGSGYWQWDELARTDFSSYPKPIKGLFTGVPNQPSAAMSWQDGRVYFFKGKVYWRLNQQLRVEKGYPRNISHNWMHCRPRTIDTTPSGGNTTPSGTGITLDTTLSATETTFEY

SEQ ID NO: 767 - DNA, 1919 bp, Homo sapiens
  MMP-21
atgctcgccgcctccatcttccgtccgacactgctgctctgctggctggctgctccctggcccacccagcccgagagtctcttccacagccgggaccgctcggacctggagccgtccccactgcgccaggccaagcccattgccgacctccacgctgctcagcggttcctgtccagatacggctggtcaggggtgtgggcggcctgggggcccagtcccgaggggccgccggagacccccaagggcgccgccctggccgaggcggtgcgcaggttccagcgggcgaacgcgctgccggccagcggggagctggacgcggccaccctagcggccatgaaccggccgcgctgcggggtcccggacatgcgcccaccgcccccctccgccccgccttcgcccccgggcccgccccccagagcccgctccaggcgctccccgcgggcgccgctgtccttgtcccggcggggttggcagccccggggctaccccgacggcggagctgcccaggccttctccaagaggacgctgagctggcggctgctgggcgaggccctgagcagccaactgtccgtggccgaccagcggcgcattgtggcgctggccttcaggatgtggagcgaggtgacgccgctggacttccgcgaggacctggccgcccccggggccgcggtcgacatcaagctgggctttgggagaggccggcacctgggctgtccgcgggccttcgatgggagcgggcaggagtttgcacacgcctggcgcctaggtgacattcactttgacgacgacgagcacttcacacctcccaccagtgacacgggcatcagccttctcaaggtggccgtccatgaaattggccatgtcctgggcttgcctcacacctacaggacgggatccataatgcaaccaaattacattccccaggagcctgcctttgagttggactggtcagacaggaaagcaattcaaaagctgtatggctcctgtgagggatcatttgatactgcgtttgactggattcgcaaagagagaaaccaatatggagaggtgatggtgagatttagcacatatttcttccgtaacagctggtactggctttatgaaaatcgaaacaataggacacgctatggggaccctatccaaatcctcactggctggcctggaatcccaacacacaacatagatgcctttgttcacatctggacatggaaaagagatgaacgttatttttttcaaggaaatcaatactggagatatgacagtgacaaggatcaggccctcacagaagatgaacaaggaaaaagctatcccaaattgatttcagaaggatttcctggcatcccaagtcccctagacacggcgttttatgaccgaagacagaagttaatttacttcttcaaggagtcccttgtatttgcatttgatgtcaacagaaatcgagtacttaattcttatccaaagaggattactgaagtttttccagcagtaataccacaaaatcatcctttcagaaatatagattccgcttattactcctatgcatacaactccattttctttttcaaaggcaatgcatactggaaggtagttaatgacaaggacaaacaacagaattcctggcttcctgctaatggcttatttccaaaaaagtttatttcagagaagtggtttgatgtttgtgacgtccatatctccacactgaacatgtaataagaaaaagtaggaaatggagggtcataggacttcgctaaaattctgatactgtttacaaagaaaaccggattttcagtagctgaagaaaatatggcactgtaagttaaaacccaatgggaaaagccttagttgaacttttaaaatacttgatttaaaaacaattgctcaggcaaaacataattcataaactaaaaggtttaaaaaaa

SEQ ID NO: 768 - protein, 569 aa, Homo sapiens [sequence omitted]

SEQ ID NO: 769 - protein, 425 aa, Homo sapiens
  MMP-21 mature
SPRAPLSLSRRGWQPRGYPDGGAAQAFSKRTLSWRLLGEALSSQLSAADQRRIVALAFRMWSEVTPLDFREDLAAPGAAVDIKLGFGRGRHLGCPRAFDGSGQEFAHAWRLGDIHFDDDEHFTPPTSDTGISLLKVAVHEIGHVLGLPHTYRTGSIMQPNYIPQEPAFELDWSDRKAIQKLYGSCEGSFDTAFDWIRKERNQYGEVMVRFSTYFFRNSWYWLYENRNNRTRYGDPIQILTGWPGIPTHNIDAFVHIWTWKRDERYFFQGNQYWRYDSDKDQALTEDEQGKSYPKLISEGFPGIPSPLDTAFYDRRQKLIYFFKESLVFAFDVNRNRVLNSYPKRITEVFPAVIPQNHPFRNIDSAYYSYAYNSIFFFKGNAYWKVVNDKDKQQNSWLPANGLFPKKFISEKWFDVCDVHISTLNM

SEQ ID NO: 770 - DNA, 1246 bp, Homo sapiens
  MMP-23
ctgccccatgcagccctgagccccacagcaagtctgccatgggccgcggggcccgtgtcccctcggaggccccgggggcaggcgtcgagcgccgctggcttggagccgcgctggtcgccctgtgcctcctccccgcgctggtgctgctggcccggctgggggccccggcggtgccggcctggagcgcagcgcagggagacgtcgctgcgctgggcctctcggcggtcccccccacccgggtcccgggcccactggccccccgcagacgccgctacacgctgactccagccaggctgcgctgggaccacttcaacctcacctacaggatcctctccttcccgcggaacctgctgagcccgcgggagacgcggcgggccctagctgccgccttccgcatgtggagcgacgtgtcccccttcagcttccgcgaggtggcccccgagcagcccagcgacctccggataggcttctacccgatcaaccacacggactgcctggtctccgcgctgcaccactgcttcgacggccccacgggggagctggcccacgccttcttccccccgcacggcggcatccacttcgacgacagcgagtactgggtcctgggccccacgcgctacagctggaagaaaggcgtgtggctcacggacctggtgcacgtggcggcccacgagatcggccacgcgctgggcctgatgcactcacaacacggccgggcgctcatgcacctgaacgccacgctgcgcggctggaaggcgttgtcccaggacgagctgtgggggctgcaccggctctacggatgcctcgacaggctgttcgtgtgcgcgtcctgggcgcggaggggcttctgcgacgctcgccggcggctcatgaagaggctctgccccagcagctgcgacttctgctacgaattccccttccccacggtggccaccaccccaccgccccccaggaccaaaaccaggctggtgcccgagggcaggaacgtgaccttccgctgcggccagaagatcctccacaagaaagggaaagtgtactggtacaaggaccaggagcccctggagttctcctaccccggctacctggccctgggcgaggcgcacctgagcatcatcgccaacgccgtcaatgagggcacctacacctgcgtggtgcgccgccagcagcgcgtgctgaccacctactcctggcgagtccgtgtgcggggctgagcccggctgataaagcactttctctctgaaaaaaa

SEQ ID NO: 771 - protein, 390 aa, Homo sapiens
  MMP-23 precursor
MGRGARVPSEAPGAGVERRWLGAALVALCLLPALVLLARLGAPAVPAWSAAQGDVAALGLSAVPPTRVPGPLAPRRRRYTLTPARLRWDHFNLTYRILSFPRNLLSPRETRRALAAAFRMWSDVSPFSFREVAPEQPSDLRIGFYPINHTDCLVSALHHCFDGPTGELAHAFFPPHGGIHFDDSEYWVLGPTRYSWKKGVWLTDLVHVAAHEIGHALGLMHSQHGRALMHLNATLRGWKALSQDELWGLHRLYGCLDRLFVCASWARRGFCDARRRLMKRLCPSSCDFCYEFPFPTVATTPPPPRTKTRLVPEGRNVTFRCGQKILHKKGKVYWYKDQEPLEFSYPGYLALGEAHLSIIANAVNEGTYTCVVRRQQRVLTTYSWRVRVRG

SEQ ID NO: 772 - protein, 312 aa, Homo sapiens
  MMP-23 mature
YTLTPARLRWDHFNLTYRILSFPRNLLSPRETRRALAAAFRMWSDVSPFSFREVAPEQPSDLRIGFYPINHTDCLVSALHHCFDGPTGELAHAFFPPHGGIHFDDSEYWVLGPTRYSWKKGVWLTDLVHVAAHEIGHALGLMHSQHGRALMHLNATLRGWKALSQDELWGLHRLYGCLDRLFVCASWARRGFCDARRRLMKRLCPSSCDFCYEFPFPTVATTPPPPRTKTRLVPEGRNVTFRCGQKILHKKGKVYWYKDQEPLEFSYPGYLALGEAHLSIIANAVNEGTYTCVVRRQQRVLTTYSWRVRVRG

SEQ ID NO: 773 - DNA, 1647 bp, Homo sapiens
  MMP-27
gcttcagctgaagaaagagaggaatgaagcgccttctgcttctgtttttgttctttataacattttcttctgcatttcccttagtccggatgacggaaaatgaagaaaatatgcaactggctcaggcatatctcaaccagttctactctcttgaaatagaagggaatcatcttgttcaaagcaagaataggagtctcatagatgacaaaattcgggaaatgcaagcattttttggattgacagtgactggaaaactggactcaaacacccttgagatcatgaagacacccaggtgtggggtgcctgatgtgggccagtatggctacaccctccctgggtggagaaaatacaacctcacctacagaataataaactatactccggatatggcacgagctgctgtggatgaggctatccaagaaggtttagaagtgtggagcaaagtcactccactaaaattcaccaagatttcaaaggggattgcagacatcatgattgcctttaggactcgagtccatggtcggtgtcctcgctattttgatggtcccttgggagtgcttggccatgcctttcctcctggtccgggtctgggtggtgacactcattttgatgaggatgaaaactggaccaaggatggagcaggattcaacttgtttcttgtggctgctcatgaatttggtcatgcactggggctctctcactccaatgatcaaacagccttgatgttcccaaattatgtctccctggatcccagaaaatacccactttctcaggatgatatcaatggaatccagtccatctatggaggtctgcctaaggaacctgctaagccaaaggaacccactataccccatgcctgtgaccctgacttgacttttgacgctatcacaactttccgcagagaagtaatgttctttaaaggcaggcacctatggaggatctattatgatatcacggatgttgagtttgaattaattgcttcattctggccatctctgccagctgatctgcaagctgcatacgagaaccccagagataagattctggtttttaaagatgaaaacttctggatgatcagaggatatgctgtcttgccagattatcccaaatccatccatacattaggttttccaggacgtgtgaagaaaatagatgcagccgtctgtgataagaccacaagaaaaacctacttctttgtgggcatttggtgctggaggtttgatgaaatgacccaaaccatggacaaagggttcccgcagagagtggtaaaacactttcctggaatcagtatccgtgttgatgctgctttccagtacaaaggattcttctttttcagccgtggatcaaagcaatttgaatacgacattaagacaaagaatattacccgaatcatgagaactaatacttggtttcaatgcaaagaaccaaagaactcctcatttggttttgatatcaacaaggaaaaagcacattcaggaggcataaagatattgtatcataagagtttaagcttgtttatttttggtattgttcatttgctgaaaaacacttctatttatcaataaattcatagacctaaaataaacctcaacaggtcttttaatataaattctgcttcaaaatagaataaaaccattctttaacaac

SEQ ID NO: 774 - protein, 513 aa, Homo sapiens
  MMP-27 precursor
MKRLLLLFLFFITFSSAFPLVRMMENEENVQLAQAYLNQFYSLEIEGNHLVQSKNRSLIDDKIREMQAFFGLTVTGKLDSNTLEIMKTPRCGVPDVGQYGYTLPGWRKYNLTYRIINYTPDMARAAVDEAIQEGLEVWSKVTPLKFTKISKGIADIMIAFRTRVHGRCPRYFDGPLGVLGHAFPPGPGLGGDTHFDEDENWTKDGAGFNLFLVAAHEFGHALGLSHSNDQTALMFPNYVSLDPRKYPLSQDDINGIQSIYGGLPKEPAKPKEPTIPHACDPDLTFDAITTFRREVMFFKGRHLWRIYYDITDVEFELIASFWPSLPADLQAAYENPRDKILVFKDENFWMIRGYAVLPDYPKSIHTLGFPGRVKKIDAAVCDKTTRKTYFFVGIWCWRFDEMTQTMDKGFPQRVVKHFPGISIRVDAAFQYKGFFFFSRGSKQFEYDIKTKNITRIMRTNTWFQCKEPKNSSFGFDINKEKAHSGGIKILYHKSLSLFIFGIVHLLKNTSIYQ

SEQ ID NO: 775 - protein, 415 aa, Homo sapiens
  MMP-27 mature
YGYTLPGWRKYNLTYRIINYTPDMARAAVDEAIQEGLEVWSKVTPLKFTKISKGIADIMIAFRTRVHGRCPRYFDGPLGVLGHAFPPGPGLGGDTHFDEDENWTKDGAGFNLFLVAAHEFGHALGLSHSNDQTALMFPNYVSLDPRKYPLSQDDINGIQSIYGGLPKEPAKPKEPTIPHACDPDLTFDAITTFRREVMFFKGRHLWRIYYDITDVEFELIASFWPSLPADLQAAYENPRDKILVFKDENFWMIRGYAVLPDYPKSIHTLGFPGRVKKIDAAVCDKTTRKTYFFVGIWCWRFDEMTQTMDKGFPQRVVKHFPGISIRVDAAFQYKGFFFFSRGSKQFEYDIKTKNITRIMRTNTWFQCKEPKNSSFGFDINKEKAHSGGIKILYHKSLSLFIFGIVHLLKNTSIYQ

SEQ ID NO: 776 - DNA, 2480 bp, Homo sapiens
  MMP-28
tccctcggtccccggggccggcggacccgcgggcaggcactgcccgggctggacgacgtctggccggctcccggcgaagggcagcggaggagcggcccagagcgcgcagctagggcactggcgaaaccccgggacagtccctctccgtgcgggggcggcgcagagcagtcccatccccggggtcccgggcgcggctgactgccggctggttccctgcgcgcagtagctccccgagccgggctgcaccggaggcggcgagatggtcgcgcgcgtcggcctcctgctgcgcgccctgcagctgctactgtggggccacctggacgcccagcccgcggagcgcggaggccaggagctgcgcaaggaggcggaggcattcctagagaagtacggatacctcaatgaacaggtccccaaagctcccacctccactcgattcagcgatgccatcagagcgtttcagtgggtgtcccagctacctgtcagcggcgtgttggaccgcgccaccctgcgccagatgactcgtccccgctgcggggttacagataccaacagttatgcggcctgggctgagaggatcagtgacttgtttgctagacaccggaccaaaatgaggcgtaagaaacgctttgcaaagcaaggtaacaaatggtacaagcagcacctctcctaccgcctggtgaactggcctgagcatctgccggagccggcagttcggggcgccgtgcgcgccgccttccagttgtggagcaacgtctcagcgctggagttctgggaggccccagccacaggccccgctgacatccggctcaccttcttccaaggggaccacaacgatgggctgggcaatgcctttgatggcccagggggcgccctggcgcacgccttcctgccccgccgcggcgaagcgcacttcgaccaagatgagcgctggtccctgagccgccgccgcgggcgcaacctgttcgtggtgctggcgcacgagatcggtcacacgcttggcctcacccactcgcccgcgccgcgcgcgctcatggcgccctactacaagaggctgggccgcgacgcgctgctcagctgggacgacgtgctggccgtgcagagcctgtatgggaagcccctagggggctcagtggccgtccagctcccaggaaagctgttcactgactttgagacctgggactcctacagcccccaaggaaggcgccctgaaacgcagggccctaaatactgccactcttccttcgatgccatcactgtagacaggcaacagcaactgtacatttttaaagggagccatttctgggaggtggcagctgatggcaacgtctcagagccccgtccactgcaggaaagatgggtcgggctgccccccaacattgaggctgcggcagtgtcattgaatgatggagatttctacttcttcaaagggggtcgatgctggaggttccggggccccaagccagtgtggggtctcccacagctgtgccgggcagggggcctgccccgccatcctgacgccgccctcttcttccctcctctgcgccgcctcatcctcttcaagggtgcccgctactacgtgctggcccgagggggactgcaagtggagccctactacccccgaagtctgcaggactggggaggcatccctgaggaggtcagcggcgccctgccgaggcccgatggctccatcatcttcttccgagatgaccgctactggcgcctcgaccaggccaaactgcaggcaaccacctcgggccgctgggccaccgagctgccctggatgggctgctggcatgccaactcggggagcgccctgttctgaaggcacctcctcacctcagaaactggtggtgctctcagggcaaaatcatgttccccacccccggggcagaacccctcttagaagcctctgagtccctctgcagaagaccgggcagcaaagcctccatctggaagtctgtctgcctttgttccttgaagaatgcagcattgtctttgtctgtccccaccacatggaggtgggggtgggatcaatcttaggaaaagcaaaaaagggtcccagatcccttggccctttcctccgaggacttctatcctccccaggcctttgtttcttcggctaaaggtacagttcctttcaagaggtaacagcactgggatccaagcagggggatgaaaaactcagcagagaaattcgagaccattttgcaagactgtgcccttctcctcaggaccccctggctcagttcttgaaaaacggtgtcatatttagtcagaggccccacccccaggaagcatggatggggatgaaggcacaggcgtctccaacctcagaggccctttgtggggtcaggacacagagtgggagggagactgatgcaggcctaccagtccctggctttttgtctggggctggaataaagaggtgccttcagctggtgggccgagaggcaggaagcagccttaaaaaaaaaaaaaaa

SEQ ID NO: 777 - protein, 520 aa, Homo sapiens
  MMP-28 precursor
MVARVGLLLRALQLLLWGHLDAQPAERGGQELRKEAEAFLEKYGYLNEQVPKAPTSTRFSDAIRAFQWVSQLPVSGVLDRATLRQMTRPRCGVTDTNSYAAWAERISDLFARHRTKMRRKKRFAKQGNKWYKQHLSYRLVNWPEHLPEPAVRGAVRAAFQLWSNVSALEFWEAPATGPADIRLTFFQGDHNDGLGNAFDGPGGALAHAFLPRRGEAHFDQDERWSLSRRRGRNLFVVLAHEIGHTLGLTHSPAPRALMAPYYKRLGRDALLSWDDVLAVQSLYGKPLGGSVAVQLPGKLFTDFETWDSYSPQGRRPETQGPKYCHSSFDAITVDRQQQLYIFKGSHFWEVAADGNVSEPRPLQERWVGLPPNIEAAAVSLNDGDFYFFKGGRCWRFRGPKPVWGLPQLCRAGGLPRHPDAALFFPPLRRLILFKGARYYVLARGGLQVEPYYPRSLQDWGGIPEEVSGALPRPDGSIIFFRDDRYWRLDQAKLQATTSGRWATELPWMGCWHANSGSALF

SEQ ID NO: 778 - protein, 398 aa, Homo sapiens
  MMP-28 mature
FAKQGNKWYKQHLSYRLVNWPEHLPEPAVRGAVRAAFQLWSNVSALEFWEAPATGPADIRLTFFQGDHNDGLGNAFDGPGGALAHAFLPRRGEAHFDQDERWSLSRRRGRNLFVVLAHEIGHTLGLTHSPAPRALMAPYYKRLGRDALLSWDDVLAVQSLYGKPLGGSVAVQLPGKLFTDFETWDSYSPQGRRPETQGPKYCHSSFDAITVDRQQQLYIFKGSHFWEVAADGNVSEPRPLQERWVGLPPNIEAAAVSLNDGDFYFFKGGRCWRFRGPKPVWGLPQLCRAGGLPRHPDAALFFPPLRRLILFKGARYYVLARGGLQVEPYYPRSLQDWGGIPEEVSGALPRPDGSIIFFRDDRYWRLDQAKLQATTSGRWATELPWMGCWHANSGSALF

SEQ ID NO: 779 - protein, 450 aa, Artificial Sequence
  MMP-1 variant F81D
FPATLETQEQDVDLVQKYLEKYYNLKNDGRQVEKRRNSGPVVEKLKQMQEFFGLKVTGKPDAETLKVMKQPRCGVPDVAQDVLTEGNPRWEQTHLTYRIENYTPDLPRADVDHAIEKAFQLWSNVTPLTFTKVSEGQADIMISFVRGDHRDNSPFDGPGGNLAHAFQPGPGIGGDAHFDEDERWTNNFREYNLHRVAAHELGHSLGLSHSTDIGALMYPSYTFSGDVQLAQDDIDGIQAIYGRSQNPVQPIGPQTPKACDSKLTFDAITTIRGEVMFFKDRFYMRTNPFYPEVELNFISVFWPQLPNGLEAAYEFADRDEVRFFKGNKYWAVQGQNVLHGYPKDIYSSFGFPRTVKHIDAALSEENTGKTYFFVANKYWRYDEYKRSMDPGYPKMIAHDFPGIGHKVDAVFMKDGFFYFFHGTRQYKFDPKTKRILTLQKANSWFNCRKN

SEQ ID NO: 780 - protein, 450 aa, Artificial Sequence
  MMP-1 variant F81E
FPATLETQEQDVDLVQKYLEKYYNLKNDGRQVEKRRNSGPVVEKLKQMQEFFGLKVTGKPDAETLKVMKQPRCGVPDVAQEVLTEGNPRWEQTHLTYRIENYTPDLPRADVDHAIEKAFQLWSNVTPLTFTKVSEGQADIMISFVRGDHRDNSPFDGPGGNLAHAFQPGPGIGGDAHFDEDERWTNNFREYNLHRVAAHELGHSLGLSHSTDIGALMYPSYTFSGDVQLAQDDIDGIQAIYGRSQNPVQPIGPQTPKACDSKLTFDAITTIRGEVMFFKDRFYMRTNPFYPEVELNFISVFWPQLPNGLEAAYEFADRDEVRFFKGNKYWAVQGQNVLHGYPKDIYSSFGFPRTVKHIDAALSEENTGKTYFFVANKYWRYDEYKRSMDPGYPKMIAHDFPGIGHKVDAVFMKDGFFYFFHGTRQYKFDPKTKRILTLQKANSWFNCRKN

SEQ ID NO: 781 - protein, 450 aa, Artificial Sequence
  MMP-1 variant F81H
FPATLETQEQDVDLVQKYLEKYYNLKNDGRQVEKRRNSGPVVEKLKQMQEFFGLKVTGKPDAETLKVMKQPRCGVPDVAQHVLTEGNPRWEQTHLTYRIENYTPDLPRADVDHAIEKAFQLWSNVTPLTFTKVSEGQADIMISFVRGDHRDNSPFDGPGGNLAHAFQPGPGIGGDAHFDEDERWTNNFREYNLHRVAAHELGHSLGLSHSTDIGALMYPSYTFSGDVQLAQDDIDGIQAIYGRSQNPVQPIGPQTPKACDSKLTFDAITTIRGEVMFFKDRFYMRTNPFYPEVELNFISVFWPQLPNGLEAAYEFADRDEVRFFKGNKYWAVQGQNVLHGYPKDIYSSFGFPRTVKHIDAALSEENTGKTYFFVANKYWRYDEYKRSMDPGYPKMIAHDFPGIGHKVDAVFMKDGFFYFFHGTRQYKFDPKTKRILTLQKANSWFNCRKN

SEQ ID NO: 782 - protein, 450 aa, Artificial Sequence
  MMP-1 variant F81K
FPATLETQEQDVDLVQKYLEKYYNLKNDGRQVEKRRNSGPVVEKLKQMQEFFGLKVTGKPDAETLKVMKQPRCGVPDVAQKVLTEGNPRWEQTHLTYRIENYTPDLPRADVDHAIEKAFQLWSNVTPLTFTKVSEGQADIMISFVRGDHRDNSPFDGPGGNLAHAFQPGPGIGGDAHFDEDERWTNNFREYNLHRVAAHELGHSLGLSHSTDIGALMYPSYTFSGDVQLAQDDIDGIQAIYGRSQNPVQPIGPQTPKACDSKLTFDAITTIRGEVMFFKDRFYMRTNPFYPEVELNFISVFWPQLPNGLEAAYEFADRDEVRFFKGNKYWAVQGQNVLHGYPKDIYSSFGFPRTVKHIDAALSEENTGKTYFFVANKYWRYDEYKRSMDPGYPKMIAHDFPGIGHKVDAVFMKDGFFYFFHGTRQYKFDPKTKRILTLQKANSWFNCRKN

SEQ ID NO: 783 - protein, 450 aa, Artificial Sequence
  MMP-1 variant F81R
FPATLETQEQDVDLVQKYLEKYYNLKNDGRQVEKRRNSGPVVEKLKQMQEFFGLKVTGKPDAETLKVMKQPRCGVPDVAQRVLTEGNPRWEQTHLTYRIENYTPDLPRADVDHAIEKAFQLWSNVTPLTFTKVSEGQADIMISFVRGDHRDNSPFDGPGGNLAHAFQPGPGIGGDAHFDEDERWTNNFREYNLHRVAAHELGHSLGLSHSTDIGALMYPSYTFSGDVQLAQDDIDGIQAIYGRSQNPVQPIGPQTPKACDSKLTFDAITTIRGEVMFFKDRFYMRTNPFYPEVELNFISVFWPQLPNGLEAAYEFADRDEVRFFKGNKYWAVQGQNVLHGYPKDIYSSFGFPRTVKHIDAALSEENTGKTYFFVANKYWRYDEYKRSMDPGYPKMIAHDFPGIGHKVDAVFMKDGFFYFFHGTRQYKFDPKTKRILTLQKANSWFNCRKN

SEQ ID NO: 784 - protein, 450 aa, Artificial Sequence
  MMP-1 variant F81C
FPATLETQEQDVDLVQKYLEKYYNLKNDGRQVEKRRNSGPVVEKLKQMQEFFGLKVTGKPDAETLKVMKQPRCGVPDVAQCVLTEGNPRWEQTHLTYRIENYTPDLPRADVDHAIEKAFQLWSNVTPLTFTKVSEGQADIMISFVRGDHRDNSPFDGPGGNLAHAFQPGPGIGGDAHFDEDERWTNNFREYNLHRVAAHELGHSLGLSHSTDIGALMYPSYTFSGDVQLAQDDIDGIQAIYGRSQNPVQPIGPQTPKACDSKLTFDAITTIRGEVMFFKDRFYMRTNPFYPEVELNFISVFWPQLPNGLEAAYEFADRDEVRFFKGNKYWAVQGQNVLHGYPKDIYSSFGFPRTVKHIDAALSEENTGKTYFFVANKYWRYDEYKRSMDPGYPKMIAHDFPGIGHKVDAVFMKDGFFYFFHGTRQYKFDPKTKRILTLQKANSWFNCRKN

SEQ ID NO: 785 - protein, 450 aa, Artificial Sequence
  MMP-1 variant F81N
FPATLETQEQDVDLVQKYLEKYYNLKNDGRQVEKRRNSGPVVEKLKQMQEFFGLKVTGKPDAETLKVMKQPRCGVPDVAQNVLTEGNPRWEQTHLTYRIENYTPDLPRADVDHAIEKAFQLWSNVTPLTFTKVSEGQADIMISFVRGDHRDNSPFDGPGGNLAHAFQPGPGIGGDAHFDEDERWTNNFREYNLHRVAAHELGHSLGLSHSTDIGALMYPSYTFSGDVQLAQDDIDGIQAIYGRSQNPVQPIGPQTPKACDSKLTFDAITTIRGEVMFFKDRFYMRTNPFYPEVELNFISVFWPQLPNGLEAAYEFADRDEVRFFKGNKYWAVQGQNVLHGYPKDIYSSFGFPRTVKHIDAALSEENTGKTYFFVANKYWRYDEYKRSMDPGYPKMIAHDFPGIGHKVDAVFMKDGFFYFFHGTRQYKFDPKTKRILTLQKANSWFNCRKN

SEQ ID NO: 786 - protein, 450 aa, Artificial Sequence
  MMP-1 variant F81Q
FPATLETQEQDVDLVQKYLEKYYNLKNDGRQVEKRRNSGPVVEKLKQMQEFFGLKVTGKPDAETLKVMKQPRCGVPDVAQQVLTEGNPRWEQTHLTYRIENYTPDLPRADVDHAIEKAFQLWSNVTPLTFTKVSEGQADIMISFVRGDHRDNSPFDGPGGNLAHAFQPGPGIGGDAHFDEDERWTNNFREYNLHRVAAHELGHSLGLSHSTDIGALMYPSYTFSGDVQLAQDDIDGIQAIYGRSQNPVQPIGPQTPKACDSKLTFDAITTIRGEVMFFKDRFYMRTNPFYPEVELNFISVFWPQLPNGLEAAYEFADRDEVRFFKGNKYWAVQGQNVLHGYPKDIYSSFGFPRTVKHIDAALSEENTGKTYFFVANKYWRYDEYKRSMDPGYPKMIAHDFPGIGHKVDAVFMKDGFFYFFHGTRQYKFDPKTKRILTLQKANSWFNCRKN

SEQ ID NO: 787 - protein, 450 aa, Artificial Sequence
  MMP-1 variant F81T
FPATLETQEQDVDLVQKYLEKYYNLKNDGRQVEKRRNSGPVVEKLKQMQEFFGLKVTGKPDAETLKVMKQPRCGVPDVAQTVLTEGNPRWEQTHLTYRIENYTPDLPRADVDHAIEKAFQLWSNVTPLTFTKVSEGQADIMISFVRGDHRDNSPFDGPGGNLAHAFQPGPGIGGDAHFDEDERWTNNFREYNLHRVAAHELGHSLGLSHSTDIGALMYPSYTFSGDVQLAQDDIDGIQAIYGRSQNPVQPIGPQTPKACDSKLTFDAITTIRGEVMFFKDRFYMRTNPFYPEVELNFISVFWPQLPNGLEAAYEFADRDEVRFFKGNKYWAVQGQNVLHGYPKDIYSSFGFPRTVKHIDAALSEENTGKTYFFVANKYWRYDEYKRSMDPGYPKMIAHDFPGIGHKVDAVFMKDGFFYFFHGTRQYKFDPKTKRILTLQKANSWFNCRKN

SEQ ID NO: 788 - protein, 450 aa, Artificial Sequence
  MMP-1 variant F81Y
FPATLETQEQDVDLVQKYLEKYYNLKNDGRQVEKRRNSGPVVEKLKQMQEFFGLKVTGKPDAETLKVMKQPRCGVPDVAQYVLTEGNPRWEQTHLTYRIENYTPDLPRADVDHAIEKAFQLWSNVTPLTFTKVSEGQADIMISFVRGDHRDNSPFDGPGGNLAHAFQPGPGIGGDAHFDEDERWTNNFREYNLHRVAAHELGHSLGLSHSTDIGALMYPSYTFSGDVQLAQDDIDGIQAIYGRSQNPVQPIGPQTPKACDSKLTFDAITTIRGEVMFFKDRFYMRTNPFYPEVELNFISVFWPQLPNGLEAAYEFADRDEVRFFKGNKYWAVQGQNVLHGYPKDIYSSFGFPRTVKHIDAALSEENTGKTYFFVANKYWRYDEYKRSMDPGYPKMIAHDFPGIGHKVDAVFMKDGFFYFFHGTRQYKFDPKTKRILTLQKANSWFNCRKN

SEQ ID NO: 789 - protein, 450 aa, Artificial Sequence
  MMP-1 variant F81S
FPATLETQEQDVDLVQKYLEKYYNLKNDGRQVEKRRNSGPVVEKLKQMQEFFGLKVTGKPDAETLKVMKQPRCGVPDVAQSVLTEGNPRWEQTHLTYRIENYTPDLPRADVDHAIEKAFQLWSNVTPLTFTKVSEGQADIMISFVRGDHRDNSPFDGPGGNLAHAFQPGPGIGGDAHFDEDERWTNNFREYNLHRVAAHELGHSLGLSHSTDIGALMYPSYTFSGDVQLAQDDIDGIQAIYGRSQNPVQPIGPQTPKACDSKLTFDAITTIRGEVMFFKDRFYMRTNPFYPEVELNFISVFWPQLPNGLEAAYEFADRDEVRFFKGNKYWAVQGQNVLHGYPKDIYSSFGFPRTVKHIDAALSEENTGKTYFFVANKYWRYDEYKRSMDPGYPKMIAHDFPGIGHKVDAVFMKDGFFYFFHGTRQYKFDPKTKRILTLQKANSWFNCRKN

SEQ ID NO: 790 - protein, 450 aa, Artificial Sequence
  MMP-1 variant F81G
FPATLETQEQDVDLVQKYLEKYYNLKNDGRQVEKRRNSGPVVEKLKQMQEFFGLKVTGKPDAETLKVMKQPRCGVPDVAQGVLTEGNPRWEQTHLTYRIENYTPDLPRADVDHAIEKAFQLWSNVTPLTFTKVSEGQADIMISFVRGDHRDNSPFDGPGGNLAHAFQPGPGIGGDAHFDEDERWTNNFREYNLHRVAAHELGHSLGLSHSTDIGALMYPSYTFSGDVQLAQDDIDGIQAIYGRSQNPVQPIGPQTPKACDSKLTFDAITTIRGEVMFFKDRFYMRTNPFYPEVELNFISVFWPQLPNGLEAAYEFADRDEVRFFKGNKYWAVQGQNVLHGYPKDIYSSFGFPRTVKHIDAALSEENTGKTYFFVANKYWRYDEYKRSMDPGYPKMIAHDFPGIGHKVDAVFMKDGFFYFFHGTRQYKFDPKTKRILTLQKANSWFNCRKN

SEQ ID NO: 791 - protein, 450 aa, Artificial Sequence
  MMP-1 variant F81M
FPATLETQEQDVDLVQKYLEKYYNLKNDGRQVEKRRNSGPVVEKLKQMQEFFGLKVTGKPDAETLKVMKQPRCGVPDVAQMVLTEGNPRWEQTHLTYRIENYTPDLPRADVDHAIEKAFQLWSNVTPLTFTKVSEGQADIMISFVRGDHRDNSPFDGPGGNLAHAFQPGPGIGGDAHFDEDERWTNNFREYNLHRVAAHELGHSLGLSHSTDIGALMYPSYTFSGDVQLAQDDIDGIQAIYGRSQNPVQPIGPQTPKACDSKLTFDAITTIRGEVMFFKDRFYMRTNPFYPEVELNFISVFWPQLPNGLEAAYEFADRDEVRFFKGNKYWAVQGQNVLHGYPKDIYSSFGFPRTVKHIDAALSEENTGKTYFFVANKYWRYDEYKRSMDPGYPKMIAHDFPGIGHKVDAVFMKDGFFYFFHGTRQYKFDPKTKRILTLQKANSWFNCRKN

SEQ ID NO: 792 - protein, 450 aa, Artificial Sequence
  MMP-1 variant F81W
FPATLETQEQDVDLVQKYLEKYYNLKNDGRQVEKRRNSGPVVEKLKQMQEFFGLKVTGKPDAETLKVMKQPRCGVPDVAQWVLTEGNPRWEQTHLTYRIENYTPDLPRADVDHAIEKAFQLWSNVTPLTFTKVSEGQADIMISFVRGDHRDNSPFDGPGGNLAHAFQPGPGIGGDAHFDEDERWTNNFREYNLHRVAAHELGHSLGLSHSTDIGALMYPSYTFSGDVQLAQDDIDGIQAIYGRSQNPVQPIGPQTPKACDSKLTFDAITTIRGEVMFFKDRFYMRTNPFYPEVELNFISVFWPQLPNGLEAAYEFADRDEVRFFKGNKYWAVQGQNVLHGYPKDIYSSFGFPRTVKHIDAALSEENTGKTYFFVANKYWRYDEYKRSMDPGYPKMIAHDFPGIGHKVDAVFMKDGFFYFFHGTRQYKFDPKTKRILTLQKANSWFNCRKN

SEQ ID NO: 793 - protein, 450 aa, Artificial Sequence
  MMP-1 variant F81I
FPATLETQEQDVDLVQKYLEKYYNLKNDGRQVEKRRNSGPVVEKLKQMQEFFGLKVTGKPDAETLKVMKQPRCGVPDVAQIVLTEGNPRWEQTHLTYRIENYTPDLPRADVDHAIEKAFQLWSNVTPLTFTKVSEGQADIMISFVRGDHRDNSPFDGPGGNLAHAFQPGPGIGGDAHFDEDERWTNNFREYNLHRVAAHELGHSLGLSHSTDIGALMYPSYTFSGDVQLAQDDIDGIQAIYGRSQNPVQPIGPQTPKACDSKLTFDAITTIRGEVMFFKDRFYMRTNPFYPEVELNFISVFWPQLPNGLEAAYEFADRDEVRFFKGNKYWAVQGQNVLHGYPKDIYSSFGFPRTVKHIDAALSEENTGKTYFFVANKYWRYDEYKRSMDPGYPKMIAHDFPGIGHKVDAVFMKDGFFYFFHGTRQYKFDPKTKRILTLQKANSWFNCRKN

SEQ ID NO: 794 - protein, 450 aa, Artificial Sequence
  MMP-1 variant F81V
FPATLETQEQDVDLVQKYLEKYYNLKNDGRQVEKRRNSGPVVEKLKQMQEFFGLKVTGKPDAETLKVMKQPRCGVPDVAQVVLTEGNPRWEQTHLTYRIENYTPDLPRADVDHAIEKAFQLWSNVTPLTFTKVSEGQADIMISFVRGDHRDNSPFDGPGGNLAHAFQPGPGIGGDAHFDEDERWTNNFREYNLHRVAAHELGHSLGLSHSTDIGALMYPSYTFSGDVQLAQDDIDGIQAIYGRSQNPVQPIGPQTPKACDSKLTFDAITTIRGEVMFFKDRFYMRTNPFYPEVELNFISVFWPQLPNGLEAAYEFADRDEVRFFKGNKYWAVQGQNVLHGYPKDIYSSFGFPRTVKHIDAALSEENTGKTYFFVANKYWRYDEYKRSMDPGYPKMIAHDFPGIGHKVDAVFMKDGFFYFFHGTRQYKFDPKTKRILTLQKANSWFNCRKN

SEQ ID NO: 795 - protein, 450 aa, Artificial Sequence
  MMP-1 variant F81L
FPATLETQEQDVDLVQKYLEKYYNLKNDGRQVEKRRNSGPVVEKLKQMQEFFGLKVTGKPDAETLKVMKQPRCGVPDVAQLVLTEGNPRWEQTHLTYRIENYTPDLPRADVDHAIEKAFQLWSNVTPLTFTKVSEGQADIMISFVRGDHRDNSPFDGPGGNLAHAFQPGPGIGGDAHFDEDERWTNNFREYNLHRVAAHELGHSLGLSHSTDIGALMYPSYTFSGDVQLAQDDIDGIQAIYGRSQNPVQPIGPQTPKACDSKLTFDAITTIRGEVMFFKDRFYMRTNPFYPEVELNFISVFWPQLPNGLEAAYEFADRDEVRFFKGNKYWAVQGQNVLHGYPKDIYSSFGFPRTVKHIDAALSEENTGKTYFFVANKYWRYDEYKRSMDPGYPKMIAHDFPGIGHKVDAVFMKDGFFYFFHGTRQYKFDPKTKRILTLQKANSWFNCRKN

SEQ ID NO: 796 - protein, 450 aa, Artificial Sequence
  MMP-1 variant F81A
FPATLETQEQDVDLVQKYLEKYYNLKNDGRQVEKRRNSGPVVEKLKQMQEFFGLKVTGKPDAETLKVMKQPRCGVPDVAQAVLTEGNPRWEQTHLTYRIENYTPDLPRADVDHAIEKAFQLWSNVTPLTFTKVSEGQADIMISFVRGDHRDNSPFDGPGGNLAHAFQPGPGIGGDAHFDEDERWTNNFREYNLHRVAAHELGHSLGLSHSTDIGALMYPSYTFSGDVQLAQDDIDGIQAIYGRSQNPVQPIGPQTPKACDSKLTFDAITTIRGEVMFFKDRFYMRTNPFYPEVELNFISVFWPQLPNGLEAAYEFADRDEVRFFKGNKYWAVQGQNVLHGYPKDIYSSFGFPRTVKHIDAALSEENTGKTYFFVANKYWRYDEYKRSMDPGYPKMIAHDFPGIGHKVDAVFMKDGFFYFFHGTRQYKFDPKTKRILTLQKANSWFNCRKN

SEQ ID NO: 797 - protein, 450 aa, Artificial Sequence
  MMP-1 variant F81P
FPATLETQEQDVDLVQKYLEKYYNLKNDGRQVEKRRNSGPVVEKLKQMQEFFGLKVTGKPDAETLKVMKQPRCGVPDVAQPVLTEGNPRWEQTHLTYRIENYTPDLPRADVDHAIEKAFQLWSNVTPLTFTKVSEGQADIMISFVRGDHRDNSPFDGPGGNLAHAFQPGPGIGGDAHFDEDERWTNNFREYNLHRVAAHELGHSLGLSHSTDIGALMYPSYTFSGDVQLAQDDIDGIQAIYGRSQNPVQPIGPQTPKACDSKLTFDAITTIRGEVMFFKDRFYMRTNPFYPEVELNFISVFWPQLPNGLEAAYEFADRDEVRFFKGNKYWAVQGQNVLHGYPKDIYSSFGFPRTVKHIDAALSEENTGKTYFFVANKYWRYDEYKRSMDPGYPKMIAHDFPGIGHKVDAVFMKDGFFYFFHGTRQYKFDPKTKRILTLQKANSWFNCRKN

SEQ ID NO: 798 - protein, 450 aa, Artificial Sequence
  MMP-1 variant V82D
FPATLETQEQDVDLVQKYLEKYYNLKNDGRQVEKRRNSGPVVEKLKQMQEFFGLKVTGKPDAETLKVMKQPRCGVPDVAQFDLTEGNPRWEQTHLTYRIENYTPDLPRADVDHAIEKAFQLWSNVTPLTFTKVSEGQADIMISFVRGDHRDNSPFDGPGGNLAHAFQPGPGIGGDAHFDEDERWTNNFREYNLHRVAAHELGHSLGLSHSTDIGALMYPSYTFSGDVQLAQDDIDGIQAIYGRSQNPVQPIGPQTPKACDSKLTFDAITTIRGEVMFFKDRFYMRTNPFYPEVELNFISVFWPQLPNGLEAAYEFADRDEVRFFKGNKYWAVQGQNVLHGYPKDIYSSFGFPRTVKHIDAALSEENTGKTYFFVANKYWRYDEYKRSMDPGYPKMIAHDFPGIGHKVDAVFMKDGFFYFFHGTRQYKFDPKTKRILTLQKANSWFNCRKN

SEQ ID NO: 799 - protein, 450 aa, Artificial Sequence
  MMP-1 variant V82E
FPATLETQEQDVDLVQKYLEKYYNLKNDGRQVEKRRNSGPVVEKLKQMQEFFGLKVTGKPDAETLKVMKQPRCGVPDVAQFELTEGNPRWEQTHLTYRIENYTPDLPRADVDHAIEKAFQLWSNVTPLTFTKVSEGQADIMISFVRGDHRDNSPFDGPGGNLAHAFQPGPGIGGDAHFDEDERWTNNFREYNLHRVAAHELGHSLGLSHSTDIGALMYPSYTFSGDVQLAQDDIDGIQAIYGRSQNPVQPIGPQTPKACDSKLTFDAITTIRGEVMFFKDRFYMRTNPFYPEVELNFISVFWPQLPNGLEAAYEFADRDEVRFFKGNKYWAVQGQNVLHGYPKDIYSSFGFPRTVKHIDAALSEENTGKTYFFVANKYWRYDEYKRSMDPGYPKMIAHDFPGIGHKVDAVFMKDGFFYFFHGTRQYKFDPKTKRILTLQKANSWFNCRKN

SEQ ID NO: 800 - protein, 450 aa, Artificial Sequence
  MMP-1 variant V82H
FPATLETQEQDVDLVQKYLEKYYNLKNDGRQVEKRRNSGPVVEKLKQMQEFFGLKVTGKPDAETLKVMKQPRCGVPDVAQFHLTEGNPRWEQTHLTYRIENYTPDLPRADVDHAIEKAFQLWSNVTPLTFTKVSEGQADIMISFVRGDHRDNSPFDGPGGNLAHAFQPGPGIGGDAHFDEDERWTNNFREYNLHRVAAHELGHSLGLSHSTDIGALMYPSYTFSGDVQLAQDDIDGIQAIYGRSQNPVQPIGPQTPKACDSKLTFDAITTIRGEVMFFKDRFYMRTNPFYPEVELNFISVFWPQLPNGLEAAYEFADRDEVRFFKGNKYWAVQGQNVLHGYPKDIYSSFGFPRTVKHIDAALSEENTGKTYFFVANKYWRYDEYKRSMDPGYPKMIAHDFPGIGHKVDAVFMKDGFFYFFHGTRQYKFDPKTKRILTLQKANSWFNCRKN

SEQ ID NO: 801 - protein, 450 aa, Artificial Sequence
  MMP-1 variant V82K
FPATLETQEQDVDLVQKYLEKYYNLKNDGRQVEKRRNSGPVVEKLKQMQEFFGLKVTGKPDAETLKVMKQPRCGVPDVAQFKLTEGNPRWEQTHLTYRIENYTPDLPRADVDHAIEKAFQLWSNVTPLTFTKVSEGQADIMISFVRGDHRDNSPFDGPGGNLAHAFQPGPGIGGDAHFDEDERWTNNFREYNLHRVAAHELGHSLGLSHSTDIGALMYPSYTFSGDVQLAQDDIDGIQAIYGRSQNPVQPIGPQTPKACDSKLTFDAITTIRGEVMFFKDRFYMRTNPFYPEVELNFISVFWPQLPNGLEAAYEFADRDEVRFFKGNKYWAVQGQNVLHGYPKDIYSSFGFPRTVKHIDAALSEENTGKTYFFVANKYWRYDEYKRSMDPGYPKMIAHDFPGIGHKVDAVFMKDGFFYFFHGTRQYKFDPKTKRILTLQKANSWFNCRKN

SEQ ID NO: 802 - protein, 450 aa, Artificial Sequence
  MMP-1 variant V82R
FPATLETQEQDVDLVQKYLEKYYNLKNDGRQVEKRRNSGPVVEKLKQMQEFFGLKVTGKPDAETLKVMKQPRCGVPDVAQFRLTEGNPRWEQTHLTYRIENYTPDLPRADVDHAIEKAFQLWSNVTPLTFTKVSEGQADIMISFVRGDHRDNSPFDGPGGNLAHAFQPGPGIGGDAHFDEDERWTNNFREYNLHRVAAHELGHSLGLSHSTDIGALMYPSYTFSGDVQLAQDDIDGIQAIYGRSQNPVQPIGPQTPKACDSKLTFDAITTIRGEVMFFKDRFYMRTNPFYPEVELNFISVFWPQLPNGLEAAYEFADRDEVRFFKGNKYWAVQGQNVLHGYPKDIYSSFGFPRTVKHIDAALSEENTGKTYFFVANKYWRYDEYKRSMDPGYPKMIAHDFPGIGHKVDAVFMKDGFFYFFHGTRQYKFDPKTKRILTLQKANSWFNCRKN

SEQ ID NO: 803 - protein, 450 aa, Artificial Sequence
  MMP-1 variant V82C
FPATLETQEQDVDLVQKYLEKYYNLKNDGRQVEKRRNSGPVVEKLKQMQEFFGLKVTGKPDAETLKVMKQPRCGVPDVAQFCLTEGNPRWEQTHLTYRIENYTPDLPRADVDHAIEKAFQLWSNVTPLTFTKVSEGQADIMISFVRGDHRDNSPFDGPGGNLAHAFQPGPGIGGDAHFDEDERWTNNFREYNLHRVAAHELGHSLGLSHSTDIGALMYPSYTFSGDVQLAQDDIDGIQAIYGRSQNPVQPIGPQTPKACDSKLTFDAITTIRGEVMFFKDRFYMRTNPFYPEVELNFISVFWPQLPNGLEAAYEFADRDEVRFFKGNKYWAVQGQNVLHGYPKDIYSSFGFPRTVKHIDAALSEENTGKTYFFVANKYWRYDEYKRSMDPGYPKMIAHDFPGIGHKVDAVFMKDGFFYFFHGTRQYKFDPKTKRILTLQKANSWFNCRKN

SEQ ID NO: 804 - protein, 450 aa, Artificial Sequence
  MMP-1 variant V82N
FPATLETQEQDVDLVQKYLEKYYNLKNDGRQVEKRRNSGPVVEKLKQMQEFFGLKVTGKPDAETLKVMKQPRCGVPDVAQFNLTEGNPRWEQTHLTYRIENYTPDLPRADVDHAIEKAFQLWSNVTPLTFTKVSEGQADIMISFVRGDHRDNSPFDGPGGNLAHAFQPGPGIGGDAHFDEDERWTNNFREYNLHRVAAHELGHSLGLSHSTDIGALMYPSYTFSGDVQLAQDDIDGIQAIYGRSQNPVQPIGPQTPKACDSKLTFDAITTIRGEVMFFKDRFYMRTNPFYPEVELNFISVFWPQLPNGLEAAYEFADRDEVRFFKGNKYWAVQGQNVLHGYPKDIYSSFGFPRTVKHIDAALSEENTGKTYFFVANKYWRYDEYKRSMDPGYPKMIAHDFPGIGHKVDAVFMKDGFFYFFHGTRQYKFDPKTKRILTLQKANSWFNCRKN

SEQ ID NO: 805 - protein, 450 aa, Artificial Sequence
  MMP-1 variant V82Q
FPATLETQEQDVDLVQKYLEKYYNLKNDGRQVEKRRNSGPVVEKLKQMQEFFGLKVTGKPDAETLKVMKQPRCGVPDVAQFQLTEGNPRWEQTHLTYRIENYTPDLPRADVDHAIEKAFQLWSNVTPLTFTKVSEGQADIMISFVRGDHRDNSPFDGPGGNLAHAFQPGPGIGGDAHFDEDERWTNNFREYNLHRVAAHELGHSLGLSHSTDIGALMYPSYTFSGDVQLAQDDIDGIQAIYGRSQNPVQPIGPQTPKACDSKLTFDAITTIRGEVMFFKDRFYMRTNPFYPEVELNFISVFWPQLPNGLEAAYEFADRDEVRFFKGNKYWAVQGQNVLHGYPKDIYSSFGFPRTVKHIDAALSEENTGKTYFFVANKYWRYDEYKRSMDPGYPKMIAHDFPGIGHKVDAVFMKDGFFYFFHGTRQYKFDPKTKRILTLQKANSWFNCRKN

SEQ ID NO: 806 - protein, 450 aa, Artificial Sequence
  MMP-1 variant V82T
FPATLETQEQDVDLVQKYLEKYYNLKNDGRQVEKRRNSGPVVEKLKQMQEFFGLKVTGKPDAETLKVMKQPRCGVPDVAQFTLTEGNPRWEQTHLTYRIENYTPDLPRADVDHAIEKAFQLWSNVTPLTFTKVSEGQADIMISFVRGDHRDNSPFDGPGGNLAHAFQPGPGIGGDAHFDEDERWTNNFREYNLHRVAAHELGHSLGLSHSTDIGALMYPSYTFSGDVQLAQDDIDGIQAIYGRSQNPVQPIGPQTPKACDSKLTFDAITTIRGEVMFFKDRFYMRTNPFYPEVELNFISVFWPQLPNGLEAAYEFADRDEVRFFKGNKYWAVQGQNVLHGYPKDIYSSFGFPRTVKHIDAALSEENTGKTYFFVANKYWRYDEYKRSMDPGYPKMIAHDFPGIGHKVDAVFMKDGFFYFFHGTRQYKFDPKTKRILTLQKANSWFNCRKN

SEQ ID NO: 807 - protein, 450 aa, Artificial Sequence
  MMP-1 variant V82Y
FPATLETQEQDVDLVQKYLEKYYNLKNDGRQVEKRRNSGPVVEKLKQMQEFFGLKVTGKPDAETLKVMKQPRCGVPDVAQFYLTEGNPRWEQTHLTYRIENYTPDLPRADVDHAIEKAFQLWSNVTPLTFTKVSEGQADIMISFVRGDHRDNSPFDGPGGNLAHAFQPGPGIGGDAHFDEDERWTNNFREYNLHRVAAHELGHSLGLSHSTDIGALMYPSYTFSGDVQLAQDDIDGIQAIYGRSQNPVQPIGPQTPKACDSKLTFDAITTIRGEVMFFKDRFYMRTNPFYPEVELNFISVFWPQLPNGLEAAYEFADRDEVRFFKGNKYWAVQGQNVLHGYPKDIYSSFGFPRTVKHIDAALSEENTGKTYFFVANKYWRYDEYKRSMDPGYPKMIAHDFPGIGHKVDAVFMKDGFFYFFHGTRQYKFDPKTKRILTLQKANSWFNCRKN

SEQ ID NO: 808 - protein, 450 aa, Artificial Sequence
  MMP-1 variant V82S
FPATLETQEQDVDLVQKYLEKYYNLKNDGRQVEKRRNSGPVVEKLKQMQEFFGLKVTGKPDAETLKVMKQPRCGVPDVAQFSLTEGNPRWEQTHLTYRIENYTPDLPRADVDHAIEKAFQLWSNVTPLTFTKVSEGQADIMISFVRGDHRDNSPFDGPGGNLAHAFQPGPGIGGDAHFDEDERWTNNFREYNLHRVAAHELGHSLGLSHSTDIGALMYPSYTFSGDVQLAQDDIDGIQAIYGRSQNPVQPIGPQTPKACDSKLTFDAITTIRGEVMFFKDRFYMRTNPFYPEVELNFISVFWPQLPNGLEAAYEFADRDEVRFFKGNKYWAVQGQNVLHGYPKDIYSSFGFPRTVKHIDAALSEENTGKTYFFVANKYWRYDEYKRSMDPGYPKMIAHDFPGIGHKVDAVFMKDGFFYFFHGTRQYKFDPKTKRILTLQKANSWFNCRKN

SEQ ID NO: 809 - protein, 450 aa, Artificial Sequence
  MMP-1 variant V82G
FPATLETQEQDVDLVQKYLEKYYNLKNDGRQVEKRRNSGPVVEKLKQMQEFFGLKVTGKPDAETLKVMKQPRCGVPDVAQFGLTEGNPRWEQTHLTYRIENYTPDLPRADVDHAIEKAFQLWSNVTPLTFTKVSEGQADIMISFVRGDHRDNSPFDGPGGNLAHAFQPGPGIGGDAHFDEDERWTNNFREYNLHRVAAHELGHSLGLSHSTDIGALMYPSYTFSGDVQLAQDDIDGIQAIYGRSQNPVQPIGPQTPKACDSKLTFDAITTIRGEVMFFKDRFYMRTNPFYPEVELNFISVFWPQLPNGLEAAYEFADRDEVRFFKGNKYWAVQGQNVLHGYPKDIYSSFGFPRTVKHIDAALSEENTGKTYFFVANKYWRYDEYKRSMDPGYPKMIAHDFPGIGHKVDAVFMKDGFFYFFHGTRQYKFDPKTKRILTLQKANSWFNCRKN

SEQ ID NO: 810 - protein, 450 aa, Artificial Sequence
  MMP-1 variant V82F
FPATLETQEQDVDLVQKYLEKYYNLKNDGRQVEKRRNSGPVVEKLKQMQEFFGLKVTGKPDAETLKVMKQPRCGVPDVAQFFLTEGNPRWEQTHLTYRIENYTPDLPRADVDHAIEKAFQLWSNVTPLTFTKVSEGQADIMISFVRGDHRDNSPFDGPGGNLAHAFQPGPGIGGDAHFDEDERWTNNFREYNLHRVAAHELGHSLGLSHSTDIGALMYPSYTFSGDVQLAQDDIDGIQAIYGRSQNPVQPIGPQTPKACDSKLTFDAITTIRGEVMFFKDRFYMRTNPFYPEVELNFISVFWPQLPNGLEAAYEFADRDEVRFFKGNKYWAVQGQNVLHGYPKDIYSSFGFPRTVKHIDAALSEENTGKTYFFVANKYWRYDEYKRSMDPGYPKMIAHDFPGIGHKVDAVFMKDGFFYFFHGTRQYKFDPKTKRILTLQKANSWFNCRKN

SEQ ID NO: 811 - protein, 450 aa, Artificial Sequence
  MMP-1 variant V82M
FPATLETQEQDVDLVQKYLEKYYNLKNDGRQVEKRRNSGPVVEKLKQMQEFFGLKVTGKPDAETLKVMKQPRCGVPDVAQFMLTEGNPRWEQTHLTYRIENYTPDLPRADVDHAIEKAFQLWSNVTPLTFTKVSEGQADIMISFVRGDHRDNSPFDGPGGNLAHAFQPGPGIGGDAHFDEDERWTNNFREYNLHRVAAHELGHSLGLSHSTDIGALMYPSYTFSGDVQLAQDDIDGIQAIYGRSQNPVQPIGPQTPKACDSKLTFDAITTIRGEVMFFKDRFYMRTNPFYPEVELNFISVFWPQLPNGLEAAYEFADRDEVRFFKGNKYWAVQGQNVLHGYPKDIYSSFGFPRTVKHIDAALSEENTGKTYFFVANKYWRYDEYKRSMDPGYPKMIAHDFPGIGHKVDAVFMKDGFFYFFHGTRQYKFDPKTKRILTLQKANSWFNCRKN

SEQ ID NO: 812 - protein, 450 aa, Artificial Sequence
  MMP-1 variant V82W
FPATLETQEQDVDLVQKYLEKYYNLKNDGRQVEKRRNSGPVVEKLKQMQEFFGLKVTGKPDAETLKVMKQPRCGVPDVAQFWLTEGNPRWEQTHLTYRIENYTPDLPRADVDHAIEKAFQLWSNVTPLTFTKVSEGQADIMISFVRGDHRDNSPFDGPGGNLAHAFQPGPGIGGDAHFDEDERWTNNFREYNLHRVAAHELGHSLGLSHSTDIGALMYPSYTFSGDVQLAQDDIDGIQAIYGRSQNPVQPIGPQTPKACDSKLTFDAITTIRGEVMFFKDRFYMRTNPFYPEVELNFISVFWPQLPNGLEAAYEFADRDEVRFFKGNKYWAVQGQNVLHGYPKDIYSSFGFPRTVKHIDAALSEENTGKTYFFVANKYWRYDEYKRSMDPGYPKMIAHDFPGIGHKVDAVFMKDGFFYFFHGTRQYKFDPKTKRILTLQKANSWFNCRKN

SEQ ID NO: 813 - protein, 499 aa, Artificial Sequence
  MMP-1 variant V82I
FPATLETQEQDVDLVQKYLEKYYNLKNDGRQVEKRRNSGPVVEKLKQMQEFFGLKVTGKPDAETLKVMKQPRCGVPDVAQFILTEGNPRWEQTHLTYRIENYTPDLPRADVDHAIEKAFQLWSNVTPLTFTKVSEGQADIMISFVRGDHRDNSPFDGPGGNLAHAFQPGPGIGGDAHFDEDERWTNNFREYNLHRVAAHELGHSLGLSHSTDIGALMYPSYTFSGDVQLAQDDIDGIQAIYGRSQNPVQPIGPQTPKACDSKLTFDAITTIRGEVMFFKDRFYMRTNPFYPEVELNFISVFWPQLPNGLEAAYEFADRDEVRFFKGNKYWAVQGQNVLHGYPKDIYSSFGFPRTVKHIDAALSEENTGKTYFFVANKYWRYDEYKRSMDPGYPKMIAHDFPGIGHKVDAVFMKDGFFYFFHGTRQYKFDPKTKRILTLQKANSWFNCRKNGIGHKVDAVFMKDGFFYFFHGTRQYKFDPKTKRILTLQKANSWFNCRKN

SEQ ID NO: 814 - protein, 450 aa, Artificial Sequence
  MMP-1 variant V82L
FPATLETQEQDVDLVQKYLEKYYNLKNDGRQVEKRRNSGPVVEKLKQMQEFFGLKVTGKPDAETLKVMKQPRCGVPDVAQFLLTEGNPRWEQTHLTYRIENYTPDLPRADVDHAIEKAFQLWSNVTPLTFTKVSEGQADIMISFVRGDHRDNSPFDGPGGNLAHAFQPGPGIGGDAHFDEDERWTNNFREYNLHRVAAHELGHSLGLSHSTDIGALMYPSYTFSGDVQLAQDDIDGIQAIYGRSQNPVQPIGPQTPKACDSKLTFDAITTIRGEVMFFKDRFYMRTNPFYPEVELNFISVFWPQLPNGLEAAYEFADRDEVRFFKGNKYWAVQGQNVLHGYPKDIYSSFGFPRTVKHIDAALSEENTGKTYFFVANKYWRYDEYKRSMDPGYPKMIAHDFPGIGHKVDAVFMKDGFFYFFHGTRQYKFDPKTKRILTLQKANSWFNCRKN

SEQ ID NO: 815 - protein, 450 aa, Artificial Sequence
  MMP-1 variant V82A
FPATLETQEQDVDLVQKYLEKYYNLKNDGRQVEKRRNSGPVVEKLKQMQEFFGLKVTGKPDAETLKVMKQPRCGVPDVAQFALTEGNPRWEQTHLTYRIENYTPDLPRADVDHAIEKAFQLWSNVTPLTFTKVSEGQADIMISFVRGDHRDNSPFDGPGGNLAHAFQPGPGIGGDAHFDEDERWTNNFREYNLHRVAAHELGHSLGLSHSTDIGALMYPSYTFSGDVQLAQDDIDGIQAIYGRSQNPVQPIGPQTPKACDSKLTFDAITTIRGEVMFFKDRFYMRTNPFYPEVELNFISVFWPQLPNGLEAAYEFADRDEVRFFKGNKYWAVQGQNVLHGYPKDIYSSFGFPRTVKHIDAALSEENTGKTYFFVANKYWRYDEYKRSMDPGYPKMIAHDFPGIGHKVDAVFMKDGFFYFFHGTRQYKFDPKTKRILTLQKANSWFNCRKN

SEQ ID NO: 816 - protein, 450 aa, Artificial Sequence
  MMP-1 variant V82P
FPATLETQEQDVDLVQKYLEKYYNLKNDGRQVEKRRNSGPVVEKLKQMQEFFGLKVTGKPDAETLKVMKQPRCGVPDVAQFPLTEGNPRWEQTHLTYRIENYTPDLPRADVDHAIEKAFQLWSNVTPLTFTKVSEGQADIMISFVRGDHRDNSPFDGPGGNLAHAFQPGPGIGGDAHFDEDERWTNNFREYNLHRVAAHELGHSLGLSHSTDIGALMYPSYTFSGDVQLAQDDIDGIQAIYGRSQNPVQPIGPQTPKACDSKLTFDAITTIRGEVMFFKDRFYMRTNPFYPEVELNFISVFWPQLPNGLEAAYEFADRDEVRFFKGNKYWAVQGQNVLHGYPKDIYSSFGFPRTVKHIDAALSEENTGKTYFFVANKYWRYDEYKRSMDPGYPKMIAHDFPGIGHKVDAVFMKDGFFYFFHGTRQYKFDPKTKRILTLQKANSWFNCRKN

SEQ ID NO: 817 - protein, 450 aa, Artificial Sequence
  MMP-1 variant L83D
FPATLETQEQDVDLVQKYLEKYYNLKNDGRQVEKRRNSGPVVEKLKQMQEFFGLKVTGKPDAETLKVMKQPRCGVPDVAQFVDTEGNPRWEQTHLTYRIENYTPDLPRADVDHAIEKAFQLWSNVTPLTFTKVSEGQADIMISFVRGDHRDNSPFDGPGGNLAHAFQPGPGIGGDAHFDEDERWTNNFREYNLHRVAAHELGHSLGLSHSTDIGALMYPSYTFSGDVQLAQDDIDGIQAIYGRSQNPVQPIGPQTPKACDSKLTFDAITTIRGEVMFFKDRFYMRTNPFYPEVELNFISVFWPQLPNGLEAAYEFADRDEVRFFKGNKYWAVQGQNVLHGYPKDIYSSFGFPRTVKHIDAALSEENTGKTYFFVANKYWRYDEYKRSMDPGYPKMIAHDFPGIGHKVDAVFMKDGFFYFFHGTRQYKFDPKTKRILTLQKANSWFNCRKN

SEQ ID NO: 818 - protein, 450 aa, Artificial Sequence
  MMP-1 variant L83E
FPATLETQEQDVDLVQKYLEKYYNLKNDGRQVEKRRNSGPVVEKLKQMQEFFGLKVTGKPDAETLKVMKQPRCGVPDVAQFVETEGNPRWEQTHLTYRIENYTPDLPRADVDHAIEKAFQLWSNVTPLTFTKVSEGQADIMISFVRGDHRDNSPFDGPGGNLAHAFQPGPGIGGDAHFDEDERWTNNFREYNLHRVAAHELGHSLGLSHSTDIGALMYPSYTFSGDVQLAQDDIDGIQAIYGRSQNPVQPIGPQTPKACDSKLTFDAITTIRGEVMFFKDRFYMRTNPFYPEVELNFISVFWPQLPNGLEAAYEFADRDEVRFFKGNKYWAVQGQNVLHGYPKDIYSSFGFPRTVKHIDAALSEENTGKTYFFVANKYWRYDEYKRSMDPGYPKMIAHDFPGIGHKVDAVFMKDGFFYFFHGTRQYKFDPKTKRILTLQKANSWFNCRKN

SEQ ID NO: 819 - protein, 450 aa, Artificial Sequence
  MMP-1 variant L83H
FPATLETQEQDVDLVQKYLEKYYNLKNDGRQVEKRRNSGPVVEKLKQMQEFFGLKVTGKPDAETLKVMKQPRCGVPDVAQFVHTEGNPRWEQTHLTYRIENYTPDLPRADVDHAIEKAFQLWSNVTPLTFTKVSEGQADIMISFVRGDHRDNSPFDGPGGNLAHAFQPGPGIGGDAHFDEDERWTNNFREYNLHRVAAHELGHSLGLSHSTDIGALMYPSYTFSGDVQLAQDDIDGIQAIYGRSQNPVQPIGPQTPKACDSKLTFDAITTIRGEVMFFKDRFYMRTNPFYPEVELNFISVFWPQLPNGLEAAYEFADRDEVRFFKGNKYWAVQGQNVLHGYPKDIYSSFGFPRTVKHIDAALSEENTGKTYFFVANKYWRYDEYKRSMDPGYPKMIAHDFPGIGHKVDAVFMKDGFFYFFHGTRQYKFDPKTKRILTLQKANSWFNCRKN

SEQ ID NO: 820 - protein, 450 aa, Artificial Sequence
  MMP-1 variant L83K
FPATLETQEQDVDLVQKYLEKYYNLKNDGRQVEKRRNSGPVVEKLKQMQEFFGLKVTGKPDAETLKVMKQPRCGVPDVAQFVKTEGNPRWEQTHLTYRIENYTPDLPRADVDHAIEKAFQLWSNVTPLTFTKVSEGQADIMISFVRGDHRDNSPFDGPGGNLAHAFQPGPGIGGDAHFDEDERWTNNFREYNLHRVAAHELGHSLGLSHSTDIGALMYPSYTFSGDVQLAQDDIDGIQAIYGRSQNPVQPIGPQTPKACDSKLTFDAITTIRGEVMFFKDRFYMRTNPFYPEVELNFISVFWPQLPNGLEAAYEFADRDEVRFFKGNKYWAVQGQNVLHGYPKDIYSSFGFPRTVKHIDAALSEENTGKTYFFVANKYWRYDEYKRSMDPGYPKMIAHDFPGIGHKVDAVFMKDGFFYFFHGTRQYKFDPKTKRILTLQKANSWFNCRKN

SEQ ID NO: 821 - protein, 450 aa, Artificial Sequence
  MMP-1 variant L83R
FPATLETQEQDVDLVQKYLEKYYNLKNDGRQVEKRRNSGPVVEKLKQMQEFFGLKVTGKPDAETLKVMKQPRCGVPDVAQFVRTEGNPRWEQTHLTYRIENYTPDLPRADVDHAIEKAFQLWSNVTPLTFTKVSEGQADIMISFVRGDHRDNSPFDGPGGNLAHAFQPGPGIGGDAHFDEDERWTNNFREYNLHRVAAHELGHSLGLSHSTDIGALMYPSYTFSGDVQLAQDDIDGIQAIYGRSQNPVQPIGPQTPKACDSKLTFDAITTIRGEVMFFKDRFYMRTNPFYPEVELNFISVFWPQLPNGLEAAYEFADRDEVRFFKGNKYWAVQGQNVLHGYPKDIYSSFGFPRTVKHIDAALSEENTGKTYFFVANKYWRYDEYKRSMDPGYPKMIAHDFPGIGHKVDAVFMKDGFFYFFHGTRQYKFDPKTKRILTLQKANSWFNCRKN

SEQ ID NO: 822 - protein, 450 aa, Artificial Sequence
  MMP-1 variant L83C
FPATLETQEQDVDLVQKYLEKYYNLKNDGRQVEKRRNSGPVVEKLKQMQEFFGLKVTGKPDAETLKVMKQPRCGVPDVAQFVCTEGNPRWEQTHLTYRIENYTPDLPRADVDHAIEKAFQLWSNVTPLTFTKVSEGQADIMISFVRGDHRDNSPFDGPGGNLAHAFQPGPGIGGDAHFDEDERWTNNFREYNLHRVAAHELGHSLGLSHSTDIGALMYPSYTFSGDVQLAQDDIDGIQAIYGRSQNPVQPIGPQTPKACDSKLTFDAITTIRGEVMFFKDRFYMRTNPFYPEVELNFISVFWPQLPNGLEAAYEFADRDEVRFFKGNKYWAVQGQNVLHGYPKDIYSSFGFPRTVKHIDAALSEENTGKTYFFVANKYWRYDEYKRSMDPGYPKMIAHDFPGIGHKVDAVFMKDGFFYFFHGTRQYKFDPKTKRILTLQKANSWFNCRKN

SEQ ID NO: 823 - protein, 450 aa, Artificial Sequence
  MMP-1 variant L83N
FPATLETQEQDVDLVQKYLEKYYNLKNDGRQVEKRRNSGPVVEKLKQMQEFFGLKVTGKPDAETLKVMKQPRCGVPDVAQFVNTEGNPRWEQTHLTYRIENYTPDLPRADVDHAIEKAFQLWSNVTPLTFTKVSEGQADIMISFVRGDHRDNSPFDGPGGNLAHAFQPGPGIGGDAHFDEDERWTNNFREYNLHRVAAHELGHSLGLSHSTDIGALMYPSYTFSGDVQLAQDDIDGIQAIYGRSQNPVQPIGPQTPKACDSKLTFDAITTIRGEVMFFKDRFYMRTNPFYPEVELNFISVFWPQLPNGLEAAYEFADRDEVRFFKGNKYWAVQGQNVLHGYPKDIYSSFGFPRTVKHIDAALSEENTGKTYFFVANKYWRYDEYKRSMDPGYPKMIAHDFPGIGHKVDAVFMKDGFFYFFHGTRQYKFDPKTKRILTLQKANSWFNCRKN

SEQ ID NO: 824 - protein, 450 aa, Artificial Sequence
  MMP-1 variant L83Q
FPATLETQEQDVDLVQKYLEKYYNLKNDGRQVEKRRNSGPVVEKLKQMQEFFGLKVTGKPDAETLKVMKQPRCGVPDVAQFVQTEGNPRWEQTHLTYRIENYTPDLPRADVDHAIEKAFQLWSNVTPLTFTKVSEGQADIMISFVRGDHRDNSPFDGPGGNLAHAFQPGPGIGGDAHFDEDERWTNNFREYNLHRVAAHELGHSLGLSHSTDIGALMYPSYTFSGDVQLAQDDIDGIQAIYGRSQNPVQPIGPQTPKACDSKLTFDAITTIRGEVMFFKDRFYMRTNPFYPEVELNFISVFWPQLPNGLEAAYEFADRDEVRFFKGNKYWAVQGQNVLHGYPKDIYSSFGFPRTVKHIDAALSEENTGKTYFFVANKYWRYDEYKRSMDPGYPKMIAHDFPGIGHKVDAVFMKDGFFYFFHGTRQYKFDPKTKRILTLQKANSWFNCRKN

SEQ ID NO: 825 - protein, 450 aa, Artificial Sequence
  MMP-1 variant L83T
FPATLETQEQDVDLVQKYLEKYYNLKNDGRQVEKRRNSGPVVEKLKQMQEFFGLKVTGKPDAETLKVMKQPRCGVPDVAQFVTTEGNPRWEQTHLTYRIENYTPDLPRADVDHAIEKAFQLWSNVTPLTFTKVSEGQADIMISFVRGDHRDNSPFDGPGGNLAHAFQPGPGIGGDAHFDEDERWTNNFREYNLHRVAAHELGHSLGLSHSTDIGALMYPSYTFSGDVQLAQDDIDGIQAIYGRSQNPVQPIGPQTPKACDSKLTFDAITTIRGEVMFFKDRFYMRTNPFYPEVELNFISVFWPQLPNGLEAAYEFADRDEVRFFKGNKYWAVQGQNVLHGYPKDIYSSFGFPRTVKHIDAALSEENTGKTYFFVANKYWRYDEYKRSMDPGYPKMIAHDFPGIGHKVDAVFMKDGFFYFFHGTRQYKFDPKTKRILTLQKANSWFNCRKN

SEQ ID NO: 826 - protein, 450 aa, Artificial Sequence
  MMP-1 variant L83Y
FPATLETQEQDVDLVQKYLEKYYNLKNDGRQVEKRRNSGPVVEKLKQMQEFFGLKVTGKPDAETLKVMKQPRCGVPDVAQFVYTEGNPRWEQTHLTYRIENYTPDLPRADVDHAIEKAFQLWSNVTPLTFTKVSEGQADIMISFVRGDHRDNSPFDGPGGNLAHAFQPGPGIGGDAHFDEDERWTNNFREYNLHRVAAHELGHSLGLSHSTDIGALMYPSYTFSGDVQLAQDDIDGIQAIYGRSQNPVQPIGPQTPKACDSKLTFDAITTIRGEVMFFKDRFYMRTNPFYPEVELNFISVFWPQLPNGLEAAYEFADRDEVRFFKGNKYWAVQGQNVLHGYPKDIYSSFGFPRTVKHIDAALSEENTGKTYFFVANKYWRYDEYKRSMDPGYPKMIAHDFPGIGHKVDAVFMKDGFFYFFHGTRQYKFDPKTKRILTLQKANSWFNCRKN

SEQ ID NO: 827 - protein, 450 aa, Artificial Sequence
  MMP-1 variant L83S
FPATLETQEQDVDLVQKYLEKYYNLKNDGRQVEKRRNSGPVVEKLKQMQEFFGLKVTGKPDAETLKVMKQPRCGVPDVAQFVSTEGNPRWEQTHLTYRIENYTPDLPRADVDHAIEKAFQLWSNVTPLTFTKVSEGQADIMISFVRGDHRDNSPFDGPGGNLAHAFQPGPGIGGDAHFDEDERWTNNFREYNLHRVAAHELGHSLGLSHSTDIGALMYPSYTFSGDVQLAQDDIDGIQAIYGRSQNPVQPIGPQTPKACDSKLTFDAITTIRGEVMFFKDRFYMRTNPFYPEVELNFISVFWPQLPNGLEAAYEFADRDEVRFFKGNKYWAVQGQNVLHGYPKDIYSSFGFPRTVKHIDAALSEENTGKTYFFVANKYWRYDEYKRSMDPGYPKMIAHDFPGIGHKVDAVFMKDGFFYFFHGTRQYKFDPKTKRILTLQKANSWFNCRKN

SEQ ID NO: 828 - protein, 450 aa, Artificial Sequence
  MMP-1 variant L83G
FPATLETQEQDVDLVQKYLEKYYNLKNDGRQVEKRRNSGPVVEKLKQMQEFFGLKVTGKPDAETLKVMKQPRCGVPDVAQFVGTEGNPRWEQTHLTYRIENYTPDLPRADVDHAIEKAFQLWSNVTPLTFTKVSEGQADIMISFVRGDHRDNSPFDGPGGNLAHAFQPGPGIGGDAHFDEDERWTNNFREYNLHRVAAHELGHSLGLSHSTDIGALMYPSYTFSGDVQLAQDDIDGIQAIYGRSQNPVQPIGPQTPKACDSKLTFDAITTIRGEVMFFKDRFYMRTNPFYPEVELNFISVFWPQLPNGLEAAYEFADRDEVRFFKGNKYWAVQGQNVLHGYPKDIYSSFGFPRTVKHIDAALSEENTGKTYFFVANKYWRYDEYKRSMDPGYPKMIAHDFPGIGHKVDAVFMKDGFFYFFHGTRQYKFDPKTKRILTLQKANSWFNCRKN

SEQ ID NO: 829 - protein, 450 aa, Artificial Sequence
  MMP-1 variant L83F
FPATLETQEQDVDLVQKYLEKYYNLKNDGRQVEKRRNSGPVVEKLKQMQEFFGLKVTGKPDAETLKVMKQPRCGVPDVAQFVFTEGNPRWEQTHLTYRIENYTPDLPRADVDHAIEKAFQLWSNVTPLTFTKVSEGQADIMISFVRGDHRDNSPFDGPGGNLAHAFQPGPGIGGDAHFDEDERWTNNFREYNLHRVAAHELGHSLGLSHSTDIGALMYPSYTFSGDVQLAQDDIDGIQAIYGRSQNPVQPIGPQTPKACDSKLTFDAITTIRGEVMFFKDRFYMRTNPFYPEVELNFISVFWPQLPNGLEAAYEFADRDEVRFFKGNKYWAVQGQNVLHGYPKDIYSSFGFPRTVKHIDAALSEENTGKTYFFVANKYWRYDEYKRSMDPGYPKMIAHDFPGIGHKVDAVFMKDGFFYFFHGTRQYKFDPKTKRILTLQKANSWFNCRKN

SEQ ID NO: 830 - protein, 450 aa, Artificial Sequence
  MMP-1 variant L83M
FPATLETQEQDVDLVQKYLEKYYNLKNDGRQVEKRRNSGPVVEKLKQMQEFFGLKVTGKPDAETLKVMKQPRCGVPDVAQFVMTEGNPRWEQTHLTYRIENYTPDLPRADVDHAIEKAFQLWSNVTPLTFTKVSEGQADIMISFVRGDHRDNSPFDGPGGNLAHAFQPGPGIGGDAHFDEDERWTNNFREYNLHRVAAHELGHSLGLSHSTDIGALMYPSYTFSGDVQLAQDDIDGIQAIYGRSQNPVQPIGPQTPKACDSKLTFDAITTIRGEVMFFKDRFYMRTNPFYPEVELNFISVFWPQLPNGLEAAYEFADRDEVRFFKGNKYWAVQGQNVLHGYPKDIYSSFGFPRTVKHIDAALSEENTGKTYFFVANKYWRYDEYKRSMDPGYPKMIAHDFPGIGHKVDAVFMKDGFFYFFHGTRQYKFDPKTKRILTLQKANSWFNCRKN

SEQ ID NO: 831 - protein, 450 aa, Artificial Sequence
  MMP-1 variant L83W
FPATLETQEQDVDLVQKYLEKYYNLKNDGRQVEKRRNSGPVVEKLKQMQEFFGLKVTGKPDAETLKVMKQPRCGVPDVAQFVWTEGNPRWEQTHLTYRIENYTPDLPRADVDHAIEKAFQLWSNVTPLTFTKVSEGQADIMISFVRGDHRDNSPFDGPGGNLAHAFQPGPGIGGDAHFDEDERWTNNFREYNLHRVAAHELGHSLGLSHSTDIGALMYPSYTFSGDVQLAQDDIDGIQAIYGRSQNPVQPIGPQTPKACDSKLTFDAITTIRGEVMFFKDRFYMRTNPFYPEVELNFISVFWPQLPNGLEAAYEFADRDEVRFFKGNKYWAVQGQNVLHGYPKDIYSSFGFPRTVKHIDAALSEENTGKTYFFVANKYWRYDEYKRSMDPGYPKMIAHDFPGIGHKVDAVFMKDGFFYFFHGTRQYKFDPKTKRILTLQKANSWFNCRKN

SEQ ID NO: 832 - protein, 450 aa, Artificial Sequence
  MMP-1 variant L83I
FPATLETQEQDVDLVQKYLEKYYNLKNDGRQVEKRRNSGPVVEKLKQMQEFFGLKVTGKPDAETLKVMKQPRCGVPDVAQFVITEGNPRWEQTHLTYRIENYTPDLPRADVDHAIEKAFQLWSNVTPLTFTKVSEGQADIMISFVRGDHRDNSPFDGPGGNLAHAFQPGPGIGGDAHFDEDERWTNNFREYNLHRVAAHELGHSLGLSHSTDIGALMYPSYTFSGDVQLAQDDIDGIQAIYGRSQNPVQPIGPQTPKACDSKLTFDAITTIRGEVMFFKDRFYMRTNPFYPEVELNFISVFWPQLPNGLEAAYEFADRDEVRFFKGNKYWAVQGQNVLHGYPKDIYSSFGFPRTVKHIDAALSEENTGKTYFFVANKYWRYDEYKRSMDPGYPKMIAHDFPGIGHKVDAVFMKDGFFYFFHGTRQYKFDPKTKRILTLQKANSWFNCRKN

SEQ ID NO: 833 - protein, 450 aa, Artificial Sequence
  MMP-1 variant L83V
FPATLETQEQDVDLVQKYLEKYYNLKNDGRQVEKRRNSGPVVEKLKQMQEFFGLKVTGKPDAETLKVMKQPRCGVPDVAQFVVTEGNPRWEQTHLTYRIENYTPDLPRADVDHAIEKAFQLWSNVTPLTFTKVSEGQADIMISFVRGDHRDNSPFDGPGGNLAHAFQPGPGIGGDAHFDEDERWTNNFREYNLHRVAAHELGHSLGLSHSTDIGALMYPSYTFSGDVQLAQDDIDGIQAIYGRSQNPVQPIGPQTPKACDSKLTFDAITTIRGEVMFFKDRFYMRTNPFYPEVELNFISVFWPQLPNGLEAAYEFADRDEVRFFKGNKYWAVQGQNVLHGYPKDIYSSFGFPRTVKHIDAALSEENTGKTYFFVANKYWRYDEYKRSMDPGYPKMIAHDFPGIGHKVDAVFMKDGFFYFFHGTRQYKFDPKTKRILTLQKANSWFNCRKN

SEQ ID NO: 834 - protein, 450 aa, Artificial Sequence
  MMP-1 variant L83A
FPATLETQEQDVDLVQKYLEKYYNLKNDGRQVEKRRNSGPVVEKLKQMQEFFGLKVTGKPDAETLKVMKQPRCGVPDVAQFVATEGNPRWEQTHLTYRIENYTPDLPRADVDHAIEKAFQLWSNVTPLTFTKVSEGQADIMISFVRGDHRDNSPFDGPGGNLAHAFQPGPGIGGDAHFDEDERWTNNFREYNLHRVAAHELGHSLGLSHSTDIGALMYPSYTFSGDVQLAQDDIDGIQAIYGRSQNPVQPIGPQTPKACDSKLTFDAITTIRGEVMFFKDRFYMRTNPFYPEVELNFISVFWPQLPNGLEAAYEFADRDEVRFFKGNKYWAVQGQNVLHGYPKDIYSSFGFPRTVKHIDAALSEENTGKTYFFVANKYWRYDEYKRSMDPGYPKMIAHDFPGIGHKVDAVFMKDGFFYFFHGTRQYKFDPKTKRILTLQKANSWFNCRKN

SEQ ID NO: 835 - protein, 450 aa, Artificial Sequence
  MMP-1 variant L83P
FPATLETQEQDVDLVQKYLEKYYNLKNDGRQVEKRRNSGPVVEKLKQMQEFFGLKVTGKPDAETLKVMKQPRCGVPDVAQFVPTEGNPRWEQTHLTYRIENYTPDLPRADVDHAIEKAFQLWSNVTPLTFTKVSEGQADIMISFVRGDHRDNSPFDGPGGNLAHAFQPGPGIGGDAHFDEDERWTNNFREYNLHRVAAHELGHSLGLSHSTDIGALMYPSYTFSGDVQLAQDDIDGIQAIYGRSQNPVQPIGPQTPKACDSKLTFDAITTIRGEVMFFKDRFYMRTNPFYPEVELNFISVFWPQLPNGLEAAYEFADRDEVRFFKGNKYWAVQGQNVLHGYPKDIYSSFGFPRTVKHIDAALSEENTGKTYFFVANKYWRYDEYKRSMDPGYPKMIAHDFPGIGHKVDAVFMKDGFFYFFHGTRQYKFDPKTKRILTLQKANSWFNCRKN

SEQ ID NO: 836 - protein, 450 aa, Artificial Sequence
  MMP-1 variant T84D
FPATLETQEQDVDLVQKYLEKYYNLKNDGRQVEKRRNSGPVVEKLKQMQEFFGLKVTGKPDAETLKVMKQPRCGVPDVAQFVLDEGNPRWEQTHLTYRIENYTPDLPRADVDHAIEKAFQLWSNVTPLTFTKVSEGQADIMISFVRGDHRDNSPFDGPGGNLAHAFQPGPGIGGDAHFDEDERWTNNFREYNLHRVAAHELGHSLGLSHSTDIGALMYPSYTFSGDVQLAQDDIDGIQAIYGRSQNPVQPIGPQTPKACDSKLTFDAITTIRGEVMFFKDRFYMRTNPFYPEVELNFISVFWPQLPNGLEAAYEFADRDEVRFFKGNKYWAVQGQNVLHGYPKDIYSSFGFPRTVKHIDAALSEENTGKTYFFVANKYWRYDEYKRSMDPGYPKMIAHDFPGIGHKVDAVFMKDGFFYFFHGTRQYKFDPKTKRILTLQKANSWFNCRKN

SEQ ID NO: 837 - protein, 450 aa, Artificial Sequence
  MMP-1 variant T84E
FPATLETQEQDVDLVQKYLEKYYNLKNDGRQVEKRRNSGPVVEKLKQMQEFFGLKVTGKPDAETLKVMKQPRCGVPDVAQFVLEEGNPRWEQTHLTYRIENYTPDLPRADVDHAIEKAFQLWSNVTPLTFTKVSEGQADIMISFVRGDHRDNSPFDGPGGNLAHAFQPGPGIGGDAHFDEDERWTNNFREYNLHRVAAHELGHSLGLSHSTDIGALMYPSYTFSGDVQLAQDDIDGIQAIYGRSQNPVQPIGPQTPKACDSKLTFDAITTIRGEVMFFKDRFYMRTNPFYPEVELNFISVFWPQLPNGLEAAYEFADRDEVRFFKGNKYWAVQGQNVLHGYPKDIYSSFGFPRTVKHIDAALSEENTGKTYFFVANKYWRYDEYKRSMDPGYPKMIAHDFPGIGHKVDAVFMKDGFFYFFHGTRQYKFDPKTKRILTLQKANSWFNCRKN

SEQ ID NO: 838 - protein, 450 aa, Artificial Sequence
  MMP-1 variant T84H
FPATLETQEQDVDLVQKYLEKYYNLKNDGRQVEKRRNSGPVVEKLKQMQEFFGLKVTGKPDAETLKVMKQPRCGVPDVAQFVLHEGNPRWEQTHLTYRIENYTPDLPRADVDHAIEKAFQLWSNVTPLTFTKVSEGQADIMISFVRGDHRDNSPFDGPGGNLAHAFQPGPGIGGDAHFDEDERWTNNFREYNLHRVAAHELGHSLGLSHSTDIGALMYPSYTFSGDVQLAQDDIDGIQAIYGRSQNPVQPIGPQTPKACDSKLTFDAITTIRGEVMFFKDRFYMRTNPFYPEVELNFISVFWPQLPNGLEAAYEFADRDEVRFFKGNKYWAVQGQNVLHGYPKDIYSSFGFPRTVKHIDAALSEENTGKTYFFVANKYWRYDEYKRSMDPGYPKMIAHDFPGIGHKVDAVFMKDGFFYFFHGTRQYKFDPKTKRILTLQKANSWFNCRKN

SEQ ID NO: 839 - protein, 450 aa, Artificial Sequence
  MMP-1 variant T84K
FPATLETQEQDVDLVQKYLEKYYNLKNDGRQVEKRRNSGPVVEKLKQMQEFFGLKVTGKPDAETLKVMKQPRCGVPDVAQFVLKEGNPRWEQTHLTYRIENYTPDLPRADVDHAIEKAFQLWSNVTPLTFTKVSEGQADIMISFVRGDHRDNSPFDGPGGNLAHAFQPGPGIGGDAHFDEDERWTNNFREYNLHRVAAHELGHSLGLSHSTDIGALMYPSYTFSGDVQLAQDDIDGIQAIYGRSQNPVQPIGPQTPKACDSKLTFDAITTIRGEVMFFKDRFYMRTNPFYPEVELNFISVFWPQLPNGLEAAYEFADRDEVRFFKGNKYWAVQGQNVLHGYPKDIYSSFGFPRTVKHIDAALSEENTGKTYFFVANKYWRYDEYKRSMDPGYPKMIAHDFPGIGHKVDAVFMKDGFFYFFHGTRQYKFDPKTKRILTLQKANSWFNCRKN

SEQ ID NO: 840 - protein, 450 aa, Artificial Sequence
  MMP-1 variant T84R
FPATLETQEQDVDLVQKYLEKYYNLKNDGRQVEKRRNSGPVVEKLKQMQEFFGLKVTGKPDAETLKVMKQPRCGVPDVAQFVLREGNPRWEQTHLTYRIENYTPDLPRADVDHAIEKAFQLWSNVTPLTFTKVSEGQADIMISFVRGDHRDNSPFDGPGGNLAHAFQPGPGIGGDAHFDEDERWTNNFREYNLHRVAAHELGHSLGLSHSTDIGALMYPSYTFSGDVQLAQDDIDGIQAIYGRSQNPVQPIGPQTPKACDSKLTFDAITTIRGEVMFFKDRFYMRTNPFYPEVELNFISVFWPQLPNGLEAAYEFADRDEVRFFKGNKYWAVQGQNVLHGYPKDIYSSFGFPRTVKHIDAALSEENTGKTYFFVANKYWRYDEYKRSMDPGYPKMIAHDFPGIGHKVDAVFMKDGFFYFFHGTRQYKFDPKTKRILTLQKANSWFNCRKN

SEQ ID NO: 841 - protein, 450 aa, Artificial Sequence
  MMP-1 variant T84C
FPATLETQEQDVDLVQKYLEKYYNLKNDGRQVEKRRNSGPVVEKLKQMQEFFGLKVTGKPDAETLKVMKQPRCGVPDVAQFVLCEGNPRWEQTHLTYRIENYTPDLPRADVDHAIEKAFQLWSNVTPLTFTKVSEGQADIMISFVRGDHRDNSPFDGPGGNLAHAFQPGPGIGGDAHFDEDERWTNNFREYNLHRVAAHELGHSLGLSHSTDIGALMYPSYTFSGDVQLAQDDIDGIQAIYGRSQNPVQPIGPQTPKACDSKLTFDAITTIRGEVMFFKDRFYMRTNPFYPEVELNFISVFWPQLPNGLEAAYEFADRDEVRFFKGNKYWAVQGQNVLHGYPKDIYSSFGFPRTVKHIDAALSEENTGKTYFFVANKYWRYDEYKRSMDPGYPKMIAHDFPGIGHKVDAVFMKDGFFYFFHGTRQYKFDPKTKRILTLQKANSWFNCRKN

SEQ ID NO: 842 - protein, 450 aa, Artificial Sequence
  MMP-1 variant T84N
FPATLETQEQDVDLVQKYLEKYYNLKNDGRQVEKRRNSGPVVEKLKQMQEFFGLKVTGKPDAETLKVMKQPRCGVPDVAQFVLNEGNPRWEQTHLTYRIENYTPDLPRADVDHAIEKAFQLWSNVTPLTFTKVSEGQADIMISFVRGDHRDNSPFDGPGGNLAHAFQPGPGIGGDAHFDEDERWTNNFREYNLHRVAAHELGHSLGLSHSTDIGALMYPSYTFSGDVQLAQDDIDGIQAIYGRSQNPVQPIGPQTPKACDSKLTFDAITTIRGEVMFFKDRFYMRTNPFYPEVELNFISVFWPQLPNGLEAAYEFADRDEVRFFKGNKYWAVQGQNVLHGYPKDIYSSFGFPRTVKHIDAALSEENTGKTYFFVANKYWRYDEYKRSMDPGYPKMIAHDFPGIGHKVDAVFMKDGFFYFFHGTRQYKFDPKTKRILTLQKANSWFNCRKN

SEQ ID NO: 843 - protein, 450 aa, Artificial Sequence
  MMP-1 variant T84Q
FPATLETQEQDVDLVQKYLEKYYNLKNDGRQVEKRRNSGPVVEKLKQMQEFFGLKVTGKPDAETLKVMKQPRCGVPDVAQFVLQEGNPRWEQTHLTYRIENYTPDLPRADVDHAIEKAFQLWSNVTPLTFTKVSEGQADIMISFVRGDHRDNSPFDGPGGNLAHAFQPGPGIGGDAHFDEDERWTNNFREYNLHRVAAHELGHSLGLSHSTDIGALMYPSYTFSGDVQLAQDDIDGIQAIYGRSQNPVQPIGPQTPKACDSKLTFDAITTIRGEVMFFKDRFYMRTNPFYPEVELNFISVFWPQLPNGLEAAYEFADRDEVRFFKGNKYWAVQGQNVLHGYPKDIYSSFGFPRTVKHIDAALSEENTGKTYFFVANKYWRYDEYKRSMDPGYPKMIAHDFPGIGHKVDAVFMKDGFFYFFHGTRQYKFDPKTKRILTLQKANSWFNCRKN

SEQ ID NO: 844 - protein, 450 aa, Artificial Sequence
  MMP-1 variant T84Y
FPATLETQEQDVDLVQKYLEKYYNLKNDGRQVEKRRNSGPVVEKLKQMQEFFGLKVTGKPDAETLKVMKQPRCGVPDVAQFVLYEGNPRWEQTHLTYRIENYTPDLPRADVDHAIEKAFQLWSNVTPLTFTKVSEGQADIMISFVRGDHRDNSPFDGPGGNLAHAFQPGPGIGGDAHFDEDERWTNNFREYNLHRVAAHELGHSLGLSHSTDIGALMYPSYTFSGDVQLAQDDIDGIQAIYGRSQNPVQPIGPQTPKACDSKLTFDAITTIRGEVMFFKDRFYMRTNPFYPEVELNFISVFWPQLPNGLEAAYEFADRDEVRFFKGNKYWAVQGQNVLHGYPKDIYSSFGFPRTVKHIDAALSEENTGKTYFFVANKYWRYDEYKRSMDPGYPKMIAHDFPGIGHKVDAVFMKDGFFYFFHGTRQYKFDPKTKRILTLQKANSWFNCRKN

SEQ ID NO: 845 - protein, 450 aa, Artificial Sequence
  MMP-1 variant T84S
FPATLETQEQDVDLVQKYLEKYYNLKNDGRQVEKRRNSGPVVEKLKQMQEFFGLKVTGKPDAETLKVMKQPRCGVPDVAQFVLSEGNPRWEQTHLTYRIENYTPDLPRADVDHAIEKAFQLWSNVTPLTFTKVSEGQADIMISFVRGDHRDNSPFDGPGGNLAHAFQPGPGIGGDAHFDEDERWTNNFREYNLHRVAAHELGHSLGLSHSTDIGALMYPSYTFSGDVQLAQDDIDGIQAIYGRSQNPVQPIGPQTPKACDSKLTFDAITTIRGEVMFFKDRFYMRTNPFYPEVELNFISVFWPQLPNGLEAAYEFADRDEVRFFKGNKYWAVQGQNVLHGYPKDIYSSFGFPRTVKHIDAALSEENTGKTYFFVANKYWRYDEYKRSMDPGYPKMIAHDFPGIGHKVDAVFMKDGFFYFFHGTRQYKFDPKTKRILTLQKANSWFNCRKN

SEQ ID NO: 846 - protein, 450 aa, Artificial Sequence
  MMP-1 variant T84G
FPATLETQEQDVDLVQKYLEKYYNLKNDGRQVEKRRNSGPVVEKLKQMQEFFGLKVTGKPDAETLKVMKQPRCGVPDVAQFVLGEGNPRWEQTHLTYRIENYTPDLPRADVDHAIEKAFQLWSNVTPLTFTKVSEGQADIMISFVRGDHRDNSPFDGPGGNLAHAFQPGPGIGGDAHFDEDERWTNNFREYNLHRVAAHELGHSLGLSHSTDIGALMYPSYTFSGDVQLAQDDIDGIQAIYGRSQNPVQPIGPQTPKACDSKLTFDAITTIRGEVMFFKDRFYMRTNPFYPEVELNFISVFWPQLPNGLEAAYEFADRDEVRFFKGNKYWAVQGQNVLHGYPKDIYSSFGFPRTVKHIDAALSEENTGKTYFFVANKYWRYDEYKRSMDPGYPKMIAHDFPGIGHKVDAVFMKDGFFYFFHGTRQYKFDPKTKRILTLQKANSWFNCRKN

SEQ ID NO: 847 - protein, 450 aa, Artificial Sequence
  MMP-1 variant T84F
FPATLETQEQDVDLVQKYLEKYYNLKNDGRQVEKRRNSGPVVEKLKQMQEFFGLKVTGKPDAETLKVMKQPRCGVPDVAQFVLFEGNPRWEQTHLTYRIENYTPDLPRADVDHAIEKAFQLWSNVTPLTFTKVSEGQADIMISFVRGDHRDNSPFDGPGGNLAHAFQPGPGIGGDAHFDEDERWTNNFREYNLHRVAAHELGHSLGLSHSTDIGALMYPSYTFSGDVQLAQDDIDGIQAIYGRSQNPVQPIGPQTPKACDSKLTFDAITTIRGEVMFFKDRFYMRTNPFYPEVELNFISVFWPQLPNGLEAAYEFADRDEVRFFKGNKYWAVQGQNVLHGYPKDIYSSFGFPRTVKHIDAALSEENTGKTYFFVANKYWRYDEYKRSMDPGYPKMIAHDFPGIGHKVDAVFMKDGFFYFFHGTRQYKFDPKTKRILTLQKANSWFNCRKN

SEQ ID NO: 848 - protein, 450 aa, Artificial Sequence
  MMP-1 variant T84M
FPATLETQEQDVDLVQKYLEKYYNLKNDGRQVEKRRNSGPVVEKLKQMQEFFGLKVTGKPDAETLKVMKQPRCGVPDVAQFVLMEGNPRWEQTHLTYRIENYTPDLPRADVDHAIEKAFQLWSNVTPLTFTKVSEGQADIMISFVRGDHRDNSPFDGPGGNLAHAFQPGPGIGGDAHFDEDERWTNNFREYNLHRVAAHELGHSLGLSHSTDIGALMYPSYTFSGDVQLAQDDIDGIQAIYGRSQNPVQPIGPQTPKACDSKLTFDAITTIRGEVMFFKDRFYMRTNPFYPEVELNFISVFWPQLPNGLEAAYEFADRDEVRFFKGNKYWAVQGQNVLHGYPKDIYSSFGFPRTVKHIDAALSEENTGKTYFFVANKYWRYDEYKRSMDPGYPKMIAHDFPGIGHKVDAVFMKDGFFYFFHGTRQYKFDPKTKRILTLQKANSWFNCRKN

SEQ ID NO: 849 - protein, 450 aa, Artificial Sequence
  MMP-1 variant T84W
FPATLETQEQDVDLVQKYLEKYYNLKNDGRQVEKRRNSGPVVEKLKQMQEFFGLKVTGKPDAETLKVMKQPRCGVPDVAQFVLWEGNPRWEQTHLTYRIENYTPDLPRADVDHAIEKAFQLWSNVTPLTFTKVSEGQADIMISFVRGDHRDNSPFDGPGGNLAHAFQPGPGIGGDAHFDEDERWTNNFREYNLHRVAAHELGHSLGLSHSTDIGALMYPSYTFSGDVQLAQDDIDGIQAIYGRSQNPVQPIGPQTPKACDSKLTFDAITTIRGEVMFFKDRFYMRTNPFYPEVELNFISVFWPQLPNGLEAAYEFADRDEVRFFKGNKYWAVQGQNVLHGYPKDIYSSFGFPRTVKHIDAALSEENTGKTYFFVANKYWRYDEYKRSMDPGYPKMIAHDFPGIGHKVDAVFMKDGFFYFFHGTRQYKFDPKTKRILTLQKANSWFNCRKN

SEQ ID NO: 850 - protein, 450 aa, Artificial Sequence
  MMP-1 variant T84I
FPATLETQEQDVDLVQKYLEKYYNLKNDGRQVEKRRNSGPVVEKLKQMQEFFGLKVTGKPDAETLKVMKQPRCGVPDVAQFVLIEGNPRWEQTHLTYRIENYTPDLPRADVDHAIEKAFQLWSNVTPLTFTKVSEGQADIMISFVRGDHRDNSPFDGPGGNLAHAFQPGPGIGGDAHFDEDERWTNNFREYNLHRVAAHELGHSLGLSHSTDIGALMYPSYTFSGDVQLAQDDIDGIQAIYGRSQNPVQPIGPQTPKACDSKLTFDAITTIRGEVMFFKDRFYMRTNPFYPEVELNFISVFWPQLPNGLEAAYEFADRDEVRFFKGNKYWAVQGQNVLHGYPKDIYSSFGFPRTVKHIDAALSEENTGKTYFFVANKYWRYDEYKRSMDPGYPKMIAHDFPGIGHKVDAVFMKDGFFYFFHGTRQYKFDPKTKRILTLQKANSWFNCRKN

SEQ ID NO: 851 - protein, 450 aa, Artificial Sequence
  MMP-1 variant T84V
FPATLETQEQDVDLVQKYLEKYYNLKNDGRQVEKRRNSGPVVEKLKQMQEFFGLKVTGKPDAETLKVMKQPRCGVPDVAQFVLVEGNPRWEQTHLTYRIENYTPDLPRADVDHAIEKAFQLWSNVTPLTFTKVSEGQADIMISFVRGDHRDNSPFDGPGGNLAHAFQPGPGIGGDAHFDEDERWTNNFREYNLHRVAAHELGHSLGLSHSTDIGALMYPSYTFSGDVQLAQDDIDGIQAIYGRSQNPVQPIGPQTPKACDSKLTFDAITTIRGEVMFFKDRFYMRTNPFYPEVELNFISVFWPQLPNGLEAAYEFADRDEVRFFKGNKYWAVQGQNVLHGYPKDIYSSFGFPRTVKHIDAALSEENTGKTYFFVANKYWRYDEYKRSMDPGYPKMIAHDFPGIGHKVDAVFMKDGFFYFFHGTRQYKFDPKTKRILTLQKANSWFNCRKN

SEQ ID NO: 852 - protein, 450 aa, Artificial Sequence
  MMP-1 variant T84L
FPATLETQEQDVDLVQKYLEKYYNLKNDGRQVEKRRNSGPVVEKLKQMQEFFGLKVTGKPDAETLKVMKQPRCGVPDVAQFVLLEGNPRWEQTHLTYRIENYTPDLPRADVDHAIEKAFQLWSNVTPLTFTKVSEGQADIMISFVRGDHRDNSPFDGPGGNLAHAFQPGPGIGGDAHFDEDERWTNNFREYNLHRVAAHELGHSLGLSHSTDIGALMYPSYTFSGDVQLAQDDIDGIQAIYGRSQNPVQPIGPQTPKACDSKLTFDAITTIRGEVMFFKDRFYMRTNPFYPEVELNFISVFWPQLPNGLEAAYEFADRDEVRFFKGNKYWAVQGQNVLHGYPKDIYSSFGFPRTVKHIDAALSEENTGKTYFFVANKYWRYDEYKRSMDPGYPKMIAHDFPGIGHKVDAVFMKDGFFYFFHGTRQYKFDPKTKRILTLQKANSWFNCRKN

SEQ ID NO: 853 - protein, 450 aa, Artificial Sequence
  MMP-1 variant T84A
FPATLETQEQDVDLVQKYLEKYYNLKNDGRQVEKRRNSGPVVEKLKQMQEFFGLKVTGKPDAETLKVMKQPRCGVPDVAQFVLAEGNPRWEQTHLTYRIENYTPDLPRADVDHAIEKAFQLWSNVTPLTFTKVSEGQADIMISFVRGDHRDNSPFDGPGGNLAHAFQPGPGIGGDAHFDEDERWTNNFREYNLHRVAAHELGHSLGLSHSTDIGALMYPSYTFSGDVQLAQDDIDGIQAIYGRSQNPVQPIGPQTPKACDSKLTFDAITTIRGEVMFFKDRFYMRTNPFYPEVELNFISVFWPQLPNGLEAAYEFADRDEVRFFKGNKYWAVQGQNVLHGYPKDIYSSFGFPRTVKHIDAALSEENTGKTYFFVANKYWRYDEYKRSMDPGYPKMIAHDFPGIGHKVDAVFMKDGFFYFFHGTRQYKFDPKTKRILTLQKANSWFNCRKN

SEQ ID NO: 854 - protein, 450 aa, Artificial Sequence
  MMP-1 variant T84P
FPATLETQEQDVDLVQKYLEKYYNLKNDGRQVEKRRNSGPVVEKLKQMQEFFGLKVTGKPDAETLKVMKQPRCGVPDVAQFVLPEGNPRWEQTHLTYRIENYTPDLPRADVDHAIEKAFQLWSNVTPLTFTKVSEGQADIMISFVRGDHRDNSPFDGPGGNLAHAFQPGPGIGGDAHFDEDERWTNNFREYNLHRVAAHELGHSLGLSHSTDIGALMYPSYTFSGDVQLAQDDIDGIQAIYGRSQNPVQPIGPQTPKACDSKLTFDAITTIRGEVMFFKDRFYMRTNPFYPEVELNFISVFWPQLPNGLEAAYEFADRDEVRFFKGNKYWAVQGQNVLHGYPKDIYSSFGFPRTVKHIDAALSEENTGKTYFFVANKYWRYDEYKRSMDPGYPKMIAHDFPGIGHKVDAVFMKDGFFYFFHGTRQYKFDPKTKRILTLQKANSWFNCRKN

SEQ ID NO: 855 - protein, 450 aa, Artificial Sequence
  MMP-1 variant E85D
FPATLETQEQDVDLVQKYLEKYYNLKNDGRQVEKRRNSGPVVEKLKQMQEFFGLKVTGKPDAETLKVMKQPRCGVPDVAQFVLTDGNPRWEQTHLTYRIENYTPDLPRADVDHAIEKAFQLWSNVTPLTFTKVSEGQADIMISFVRGDHRDNSPFDGPGGNLAHAFQPGPGIGGDAHFDEDERWTNNFREYNLHRVAAHELGHSLGLSHSTDIGALMYPSYTFSGDVQLAQDDIDGIQAIYGRSQNPVQPIGPQTPKACDSKLTFDAITTIRGEVMFFKDRFYMRTNPFYPEVELNFISVFWPQLPNGLEAAYEFADRDEVRFFKGNKYWAVQGQNVLHGYPKDIYSSFGFPRTVKHIDAALSEENTGKTYFFVANKYWRYDEYKRSMDPGYPKMIAHDFPGIGHKVDAVFMKDGFFYFFHGTRQYKFDPKTKRILTLQKANSWFNCRKN

SEQ ID NO: 856 - protein, 450 aa, Artificial Sequence
  MMP-1 variant E85H
FPATLETQEQDVDLVQKYLEKYYNLKNDGRQVEKRRNSGPVVEKLKQMQEFFGLKVTGKPDAETLKVMKQPRCGVPDVAQFVLTHGNPRWEQTHLTYRIENYTPDLPRADVDHAIEKAFQLWSNVTPLTFTKVSEGQADIMISFVRGDHRDNSPFDGPGGNLAHAFQPGPGIGGDAHFDEDERWTNNFREYNLHRVAAHELGHSLGLSHSTDIGALMYPSYTFSGDVQLAQDDIDGIQAIYGRSQNPVQPIGPQTPKACDSKLTFDAITTIRGEVMFFKDRFYMRTNPFYPEVELNFISVFWPQLPNGLEAAYEFADRDEVRFFKGNKYWAVQGQNVLHGYPKDIYSSFGFPRTVKHIDAALSEENTGKTYFFVANKYWRYDEYKRSMDPGYPKMIAHDFPGIGHKVDAVFMKDGFFYFFHGTRQYKFDPKTKRILTLQKANSWFNCRKN

SEQ ID NO: 857 - protein, 450 aa, Artificial Sequence
  MMP-1 variant E85K
FPATLETQEQDVDLVQKYLEKYYNLKNDGRQVEKRRNSGPVVEKLKQMQEFFGLKVTGKPDAETLKVMKQPRCGVPDVAQFVLTKGNPRWEQTHLTYRIENYTPDLPRADVDHAIEKAFQLWSNVTPLTFTKVSEGQADIMISFVRGDHRDNSPFDGPGGNLAHAFQPGPGIGGDAHFDEDERWTNNFREYNLHRVAAHELGHSLGLSHSTDIGALMYPSYTFSGDVQLAQDDIDGIQAIYGRSQNPVQPIGPQTPKACDSKLTFDAITTIRGEVMFFKDRFYMRTNPFYPEVELNFISVFWPQLPNGLEAAYEFADRDEVRFFKGNKYWAVQGQNVLHGYPKDIYSSFGFPRTVKHIDAALSEENTGKTYFFVANKYWRYDEYKRSMDPGYPKMIAHDFPGIGHKVDAVFMKDGFFYFFHGTRQYKFDPKTKRILTLQKANSWFNCRKN

SEQ ID NO: 858 - protein, 450 aa, Artificial Sequence
  MMP-1 variant E85R
FPATLETQEQDVDLVQKYLEKYYNLKNDGRQVEKRRNSGPVVEKLKQMQEFFGLKVTGKPDAETLKVMKQPRCGVPDVAQFVLTRGNPRWEQTHLTYRIENYTPDLPRADVDHAIEKAFQLWSNVTPLTFTKVSEGQADIMISFVRGDHRDNSPFDGPGGNLAHAFQPGPGIGGDAHFDEDERWTNNFREYNLHRVAAHELGHSLGLSHSTDIGALMYPSYTFSGDVQLAQDDIDGIQAIYGRSQNPVQPIGPQTPKACDSKLTFDAITTIRGEVMFFKDRFYMRTNPFYPEVELNFISVFWPQLPNGLEAAYEFADRDEVRFFKGNKYWAVQGQNVLHGYPKDIYSSFGFPRTVKHIDAALSEENTGKTYFFVANKYWRYDEYKRSMDPGYPKMIAHDFPGIGHKVDAVFMKDGFFYFFHGTRQYKFDPKTKRILTLQKANSWFNCRKN

SEQ ID NO: 859 - protein, 450 aa, Artificial Sequence
  MMP-1 variant E85C
FPATLETQEQDVDLVQKYLEKYYNLKNDGRQVEKRRNSGPVVEKLKQMQEFFGLKVTGKPDAETLKVMKQPRCGVPDVAQFVLTCGNPRWEQTHLTYRIENYTPDLPRADVDHAIEKAFQLWSNVTPLTFTKVSEGQADIMISFVRGDHRDNSPFDGPGGNLAHAFQPGPGIGGDAHFDEDERWTNNFREYNLHRVAAHELGHSLGLSHSTDIGALMYPSYTFSGDVQLAQDDIDGIQAIYGRSQNPVQPIGPQTPKACDSKLTFDAITTIRGEVMFFKDRFYMRTNPFYPEVELNFISVFWPQLPNGLEAAYEFADRDEVRFFKGNKYWAVQGQNVLHGYPKDIYSSFGFPRTVKHIDAALSEENTGKTYFFVANKYWRYDEYKRSMDPGYPKMIAHDFPGIGHKVDAVFMKDGFFYFFHGTRQYKFDPKTKRILTLQKANSWFNCRKN

SEQ ID NO: 860 - protein, 450 aa, Artificial Sequence
  MMP-1 variant E85N
FPATLETQEQDVDLVQKYLEKYYNLKNDGRQVEKRRNSGPVVEKLKQMQEFFGLKVTGKPDAETLKVMKQPRCGVPDVAQFVLTNGNPRWEQTHLTYRIENYTPDLPRADVDHAIEKAFQLWSNVTPLTFTKVSEGQADIMISFVRGDHRDNSPFDGPGGNLAHAFQPGPGIGGDAHFDEDERWTNNFREYNLHRVAAHELGHSLGLSHSTDIGALMYPSYTFSGDVQLAQDDIDGIQAIYGRSQNPVQPIGPQTPKACDSKLTFDAITTIRGEVMFFKDRFYMRTNPFYPEVELNFISVFWPQLPNGLEAAYEFADRDEVRFFKGNKYWAVQGQNVLHGYPKDIYSSFGFPRTVKHIDAALSEENTGKTYFFVANKYWRYDEYKRSMDPGYPKMIAHDFPGIGHKVDAVFMKDGFFYFFHGTRQYKFDPKTKRILTLQKANSWFNCRKN

SEQ ID NO: 861 - protein, 450 aa, Artificial Sequence
  MMP-1 variant E85Q
FPATLETQEQDVDLVQKYLEKYYNLKNDGRQVEKRRNSGPVVEKLKQMQEFFGLKVTGKPDAETLKVMKQPRCGVPDVAQFVLTQGNPRWEQTHLTYRIENYTPDLPRADVDHAIEKAFQLWSNVTPLTFTKVSEGQADIMISFVRGDHRDNSPFDGPGGNLAHAFQPGPGIGGDAHFDEDERWTNNFREYNLHRVAAHELGHSLGLSHSTDIGALMYPSYTFSGDVQLAQDDIDGIQAIYGRSQNPVQPIGPQTPKACDSKLTFDAITTIRGEVMFFKDRFYMRTNPFYPEVELNFISVFWPQLPNGLEAAYEFADRDEVRFFKGNKYWAVQGQNVLHGYPKDIYSSFGFPRTVKHIDAALSEENTGKTYFFVANKYWRYDEYKRSMDPGYPKMIAHDFPGIGHKVDAVFMKDGFFYFFHGTRQYKFDPKTKRILTLQKANSWFNCRKN

SEQ ID NO: 862 - protein, 450 aa, Artificial Sequence
  MMP-1 variant E85T
FPATLETQEQDVDLVQKYLEKYYNLKNDGRQVEKRRNSGPVVEKLKQMQEFFGLKVTGKPDAETLKVMKQPRCGVPDVAQFVLTTGNPRWEQTHLTYRIENYTPDLPRADVDHAIEKAFQLWSNVTPLTFTKVSEGQADIMISFVRGDHRDNSPFDGPGGNLAHAFQPGPGIGGDAHFDEDERWTNNFREYNLHRVAAHELGHSLGLSHSTDIGALMYPSYTFSGDVQLAQDDIDGIQAIYGRSQNPVQPIGPQTPKACDSKLTFDAITTIRGEVMFFKDRFYMRTNPFYPEVELNFISVFWPQLPNGLEAAYEFADRDEVRFFKGNKYWAVQGQNVLHGYPKDIYSSFGFPRTVKHIDAALSEENTGKTYFFVANKYWRYDEYKRSMDPGYPKMIAHDFPGIGHKVDAVFMKDGFFYFFHGTRQYKFDPKTKRILTLQKANSWFNCRKN

SEQ ID NO: 863 - protein, 450 aa, Artificial Sequence
  MMP-1 variant E85Y
FPATLETQEQDVDLVQKYLEKYYNLKNDGRQVEKRRNSGPVVEKLKQMQEFFGLKVTGKPDAETLKVMKQPRCGVPDVAQFVLTYGNPRWEQTHLTYRIENYTPDLPRADVDHAIEKAFQLWSNVTPLTFTKVSEGQADIMISFVRGDHRDNSPFDGPGGNLAHAFQPGPGIGGDAHFDEDERWTNNFREYNLHRVAAHELGHSLGLSHSTDIGALMYPSYTFSGDVQLAQDDIDGIQAIYGRSQNPVQPIGPQTPKACDSKLTFDAITTIRGEVMFFKDRFYMRTNPFYPEVELNFISVFWPQLPNGLEAAYEFADRDEVRFFKGNKYWAVQGQNVLHGYPKDIYSSFGFPRTVKHIDAALSEENTGKTYFFVANKYWRYDEYKRSMDPGYPKMIAHDFPGIGHKVDAVFMKDGFFYFFHGTRQYKFDPKTKRILTLQKANSWFNCRKN

SEQ ID NO: 864 - protein, 450 aa, Artificial Sequence
  MMP-1 variant E85S
FPATLETQEQDVDLVQKYLEKYYNLKNDGRQVEKRRNSGPVVEKLKQMQEFFGLKVTGKPDAETLKVMKQPRCGVPDVAQFVLTSGNPRWEQTHLTYRIENYTPDLPRADVDHAIEKAFQLWSNVTPLTFTKVSEGQADIMISFVRGDHRDNSPFDGPGGNLAHAFQPGPGIGGDAHFDEDERWTNNFREYNLHRVAAHELGHSLGLSHSTDIGALMYPSYTFSGDVQLAQDDIDGIQAIYGRSQNPVQPIGPQTPKACDSKLTFDAITTIRGEVMFFKDRFYMRTNPFYPEVELNFISVFWPQLPNGLEAAYEFADRDEVRFFKGNKYWAVQGQNVLHGYPKDIYSSFGFPRTVKHIDAALSEENTGKTYFFVANKYWRYDEYKRSMDPGYPKMIAHDFPGIGHKVDAVFMKDGFFYFFHGTRQYKFDPKTKRILTLQKANSWFNCRKN

SEQ ID NO: 865 - protein, 450 aa, Artificial Sequence
  MMP-1 variant E85G
FPATLETQEQDVDLVQKYLEKYYNLKNDGRQVEKRRNSGPVVEKLKQMQEFFGLKVTGKPDAETLKVMKQPRCGVPDVAQFVLTGGNPRWEQTHLTYRIENYTPDLPRADVDHAIEKAFQLWSNVTPLTFTKVSEGQADIMISFVRGDHRDNSPFDGPGGNLAHAFQPGPGIGGDAHFDEDERWTNNFREYNLHRVAAHELGHSLGLSHSTDIGALMYPSYTFSGDVQLAQDDIDGIQAIYGRSQNPVQPIGPQTPKACDSKLTFDAITTIRGEVMFFKDRFYMRTNPFYPEVELNFISVFWPQLPNGLEAAYEFADRDEVRFFKGNKYWAVQGQNVLHGYPKDIYSSFGFPRTVKHIDAALSEENTGKTYFFVANKYWRYDEYKRSMDPGYPKMIAHDFPGIGHKVDAVFMKDGFFYFFHGTRQYKFDPKTKRILTLQKANSWFNCRKN

SEQ ID NO: 866 - protein, 450 aa, Artificial Sequence
  MMP-1 variant E85F
FPATLETQEQDVDLVQKYLEKYYNLKNDGRQVEKRRNSGPVVEKLKQMQEFFGLKVTGKPDAETLKVMKQPRCGVPDVAQFVLTFGNPRWEQTHLTYRIENYTPDLPRADVDHAIEKAFQLWSNVTPLTFTKVSEGQADIMISFVRGDHRDNSPFDGPGGNLAHAFQPGPGIGGDAHFDEDERWTNNFREYNLHRVAAHELGHSLGLSHSTDIGALMYPSYTFSGDVQLAQDDIDGIQAIYGRSQNPVQPIGPQTPKACDSKLTFDAITTIRGEVMFFKDRFYMRTNPFYPEVELNFISVFWPQLPNGLEAAYEFADRDEVRFFKGNKYWAVQGQNVLHGYPKDIYSSFGFPRTVKHIDAALSEENTGKTYFFVANKYWRYDEYKRSMDPGYPKMIAHDFPGIGHKVDAVFMKDGFFYFFHGTRQYKFDPKTKRILTLQKANSWFNCRKN

SEQ ID NO: 867 - protein, 450 aa, Artificial Sequence
  MMP-1 variant E85M
FPATLETQEQDVDLVQKYLEKYYNLKNDGRQVEKRRNSGPVVEKLKQMQEFFGLKVTGKPDAETLKVMKQPRCGVPDVAQFVLTMGNPRWEQTHLTYRIENYTPDLPRADVDHAIEKAFQLWSNVTPLTFTKVSEGQADIMISFVRGDHRDNSPFDGPGGNLAHAFQPGPGIGGDAHFDEDERWTNNFREYNLHRVAAHELGHSLGLSHSTDIGALMYPSYTFSGDVQLAQDDIDGIQAIYGRSQNPVQPIGPQTPKACDSKLTFDAITTIRGEVMFFKDRFYMRTNPFYPEVELNFISVFWPQLPNGLEAAYEFADRDEVRFFKGNKYWAVQGQNVLHGYPKDIYSSFGFPRTVKHIDAALSEENTGKTYFFVANKYWRYDEYKRSMDPGYPKMIAHDFPGIGHKVDAVFMKDGFFYFFHGTRQYKFDPKTKRILTLQKANSWFNCRKN

SEQ ID NO: 868 - protein, 450 aa, Artificial Sequence
  MMP-1 variant E85W
FPATLETQEQDVDLVQKYLEKYYNLKNDGRQVEKRRNSGPVVEKLKQMQEFFGLKVTGKPDAETLKVMKQPRCGVPDVAQFVLTWGNPRWEQTHLTYRIENYTPDLPRADVDHAIEKAFQLWSNVTPLTFTKVSEGQADIMISFVRGDHRDNSPFDGPGGNLAHAFQPGPGIGGDAHFDEDERWTNNFREYNLHRVAAHELGHSLGLSHSTDIGALMYPSYTFSGDVQLAQDDIDGIQAIYGRSQNPVQPIGPQTPKACDSKLTFDAITTIRGEVMFFKDRFYMRTNPFYPEVELNFISVFWPQLPNGLEAAYEFADRDEVRFFKGNKYWAVQGQNVLHGYPKDIYSSFGFPRTVKHIDAALSEENTGKTYFFVANKYWRYDEYKRSMDPGYPKMIAHDFPGIGHKVDAVFMKDGFFYFFHGTRQYKFDPKTKRILTLQKANSWFNCRKN

SEQ ID NO: 869 - protein, 450 aa, Artificial Sequence
  MMP-1 variant E85I
FPATLETQEQDVDLVQKYLEKYYNLKNDGRQVEKRRNSGPVVEKLKQMQEFFGLKVTGKPDAETLKVMKQPRCGVPDVAQFVLTIGNPRWEQTHLTYRIENYTPDLPRADVDHAIEKAFQLWSNVTPLTFTKVSEGQADIMISFVRGDHRDNSPFDGPGGNLAHAFQPGPGIGGDAHFDEDERWTNNFREYNLHRVAAHELGHSLGLSHSTDIGALMYPSYTFSGDVQLAQDDIDGIQAIYGRSQNPVQPIGPQTPKACDSKLTFDAITTIRGEVMFFKDRFYMRTNPFYPEVELNFISVFWPQLPNGLEAAYEFADRDEVRFFKGNKYWAVQGQNVLHGYPKDIYSSFGFPRTVKHIDAALSEENTGKTYFFVANKYWRYDEYKRSMDPGYPKMIAHDFPGIGHKVDAVFMKDGFFYFFHGTRQYKFDPKTKRILTLQKANSWFNCRKN

SEQ ID NO: 870 - protein, 450 aa, Artificial Sequence
  MMP-1 variant E85V
FPATLETQEQDVDLVQKYLEKYYNLKNDGRQVEKRRNSGPVVEKLKQMQEFFGLKVTGKPDAETLKVMKQPRCGVPDVAQFVLTVGNPRWEQTHLTYRIENYTPDLPRADVDHAIEKAFQLWSNVTPLTFTKVSEGQADIMISFVRGDHRDNSPFDGPGGNLAHAFQPGPGIGGDAHFDEDERWTNNFREYNLHRVAAHELGHSLGLSHSTDIGALMYPSYTFSGDVQLAQDDIDGIQAIYGRSQNPVQPIGPQTPKACDSKLTFDAITTIRGEVMFFKDRFYMRTNPFYPEVELNFISVFWPQLPNGLEAAYEFADRDEVRFFKGNKYWAVQGQNVLHGYPKDIYSSFGFPRTVKHIDAALSEENTGKTYFFVANKYWRYDEYKRSMDPGYPKMIAHDFPGIGHKVDAVFMKDGFFYFFHGTRQYKFDPKTKRILTLQKANSWFNCRKN

SEQ ID NO: 871 - protein, 450 aa, Artificial Sequence
  MMP-1 variant E85L
FPATLETQEQDVDLVQKYLEKYYNLKNDGRQVEKRRNSGPVVEKLKQMQEFFGLKVTGKPDAETLKVMKQPRCGVPDVAQFVLTLGNPRWEQTHLTYRIENYTPDLPRADVDHAIEKAFQLWSNVTPLTFTKVSEGQADIMISFVRGDHRDNSPFDGPGGNLAHAFQPGPGIGGDAHFDEDERWTNNFREYNLHRVAAHELGHSLGLSHSTDIGALMYPSYTFSGDVQLAQDDIDGIQAIYGRSQNPVQPIGPQTPKACDSKLTFDAITTIRGEVMFFKDRFYMRTNPFYPEVELNFISVFWPQLPNGLEAAYEFADRDEVRFFKGNKYWAVQGQNVLHGYPKDIYSSFGFPRTVKHIDAALSEENTGKTYFFVANKYWRYDEYKRSMDPGYPKMIAHDFPGIGHKVDAVFMKDGFFYFFHGTRQYKFDPKTKRILTLQKANSWFNCRKN

SEQ ID NO: 872 - protein, 450 aa, Artificial Sequence
  MMP-1 variant E85A
FPATLETQEQDVDLVQKYLEKYYNLKNDGRQVEKRRNSGPVVEKLKQMQEFFGLKVTGKPDAETLKVMKQPRCGVPDVAQFVLTAGNPRWEQTHLTYRIENYTPDLPRADVDHAIEKAFQLWSNVTPLTFTKVSEGQADIMISFVRGDHRDNSPFDGPGGNLAHAFQPGPGIGGDAHFDEDERWTNNFREYNLHRVAAHELGHSLGLSHSTDIGALMYPSYTFSGDVQLAQDDIDGIQAIYGRSQNPVQPIGPQTPKACDSKLTFDAITTIRGEVMFFKDRFYMRTNPFYPEVELNFISVFWPQLPNGLEAAYEFADRDEVRFFKGNKYWAVQGQNVLHGYPKDIYSSFGFPRTVKHIDAALSEENTGKTYFFVANKYWRYDEYKRSMDPGYPKMIAHDFPGIGHKVDAVFMKDGFFYFFHGTRQYKFDPKTKRILTLQKANSWFNCRKN

SEQ ID NO: 873 - protein, 450 aa, Artificial Sequence
  MMP-1 variant E85P
FPATLETQEQDVDLVQKYLEKYYNLKNDGRQVEKRRNSGPVVEKLKQMQEFFGLKVTGKPDAETLKVMKQPRCGVPDVAQFVLTPGNPRWEQTHLTYRIENYTPDLPRADVDHAIEKAFQLWSNVTPLTFTKVSEGQADIMISFVRGDHRDNSPFDGPGGNLAHAFQPGPGIGGDAHFDEDERWTNNFREYNLHRVAAHELGHSLGLSHSTDIGALMYPSYTFSGDVQLAQDDIDGIQAIYGRSQNPVQPIGPQTPKACDSKLTFDAITTIRGEVMFFKDRFYMRTNPFYPEVELNFISVFWPQLPNGLEAAYEFADRDEVRFFKGNKYWAVQGQNVLHGYPKDIYSSFGFPRTVKHIDAALSEENTGKTYFFVANKYWRYDEYKRSMDPGYPKMIAHDFPGIGHKVDAVFMKDGFFYFFHGTRQYKFDPKTKRILTLQKANSWFNCRKN

SEQ ID NO: 874 - protein, 450 aa, Artificial Sequence
  MMP-1 variant G86D
FPATLETQEQDVDLVQKYLEKYYNLKNDGRQVEKRRNSGPVVEKLKQMQEFFGLKVTGKPDAETLKVMKQPRCGVPDVAQFVLTEDNPRWEQTHLTYRIENYTPDLPRADVDHAIEKAFQLWSNVTPLTFTKVSEGQADIMISFVRGDHRDNSPFDGPGGNLAHAFQPGPGIGGDAHFDEDERWTNNFREYNLHRVAAHELGHSLGLSHSTDIGALMYPSYTFSGDVQLAQDDIDGIQAIYGRSQNPVQPIGPQTPKACDSKLTFDAITTIRGEVMFFKDRFYMRTNPFYPEVELNFISVFWPQLPNGLEAAYEFADRDEVRFFKGNKYWAVQGQNVLHGYPKDIYSSFGFPRTVKHIDAALSEENTGKTYFFVANKYWRYDEYKRSMDPGYPKMIAHDFPGIGHKVDAVFMKDGFFYFFHGTRQYKFDPKTKRILTLQKANSWFNCRKN

SEQ ID NO: 875 - protein, 450 aa, Artificial Sequence
  MMP-1 variant G86E
FPATLETQEQDVDLVQKYLEKYYNLKNDGRQVEKRRNSGPVVEKLKQMQEFFGLKVTGKPDAETLKVMKQPRCGVPDVAQFVLTEENPRWEQTHLTYRIENYTPDLPRADVDHAIEKAFQLWSNVTPLTFTKVSEGQADIMISFVRGDHRDNSPFDGPGGNLAHAFQPGPGIGGDAHFDEDERWTNNFREYNLHRVAAHELGHSLGLSHSTDIGALMYPSYTFSGDVQLAQDDIDGIQAIYGRSQNPVQPIGPQTPKACDSKLTFDAITTIRGEVMFFKDRFYMRTNPFYPEVELNFISVFWPQLPNGLEAAYEFADRDEVRFFKGNKYWAVQGQNVLHGYPKDIYSSFGFPRTVKHIDAALSEENTGKTYFFVANKYWRYDEYKRSMDPGYPKMIAHDFPGIGHKVDAVFMKDGFFYFFHGTRQYKFDPKTKRILTLQKANSWFNCRKN

SEQ ID NO: 876 - protein, 450 aa, Artificial Sequence
  MMP-1 variant G86H
FPATLETQEQDVDLVQKYLEKYYNLKNDGRQVEKRRNSGPVVEKLKQMQEFFGLKVTGKPDAETLKVMKQPRCGVPDVAQFVLTEHNPRWEQTHLTYRIENYTPDLPRADVDHAIEKAFQLWSNVTPLTFTKVSEGQADIMISFVRGDHRDNSPFDGPGGNLAHAFQPGPGIGGDAHFDEDERWTNNFREYNLHRVAAHELGHSLGLSHSTDIGALMYPSYTFSGDVQLAQDDIDGIQAIYGRSQNPVQPIGPQTPKACDSKLTFDAITTIRGEVMFFKDRFYMRTNPFYPEVELNFISVFWPQLPNGLEAAYEFADRDEVRFFKGNKYWAVQGQNVLHGYPKDIYSSFGFPRTVKHIDAALSEENTGKTYFFVANKYWRYDEYKRSMDPGYPKMIAHDFPGIGHKVDAVFMKDGFFYFFHGTRQYKFDPKTKRILTLQKANSWFNCRKN

SEQ ID NO: 877 - protein, 450 aa, Artificial Sequence
  MMP-1 variant G86K
FPATLETQEQDVDLVQKYLEKYYNLKNDGRQVEKRRNSGPVVEKLKQMQEFFGLKVTGKPDAETLKVMKQPRCGVPDVAQFVLTEKNPRWEQTHLTYRIENYTPDLPRADVDHAIEKAFQLWSNVTPLTFTKVSEGQADIMISFVRGDHRDNSPFDGPGGNLAHAFQPGPGIGGDAHFDEDERWTNNFREYNLHRVAAHELGHSLGLSHSTDIGALMYPSYTFSGDVQLAQDDIDGIQAIYGRSQNPVQPIGPQTPKACDSKLTFDAITTIRGEVMFFKDRFYMRTNPFYPEVELNFISVFWPQLPNGLEAAYEFADRDEVRFFKGNKYWAVQGQNVLHGYPKDIYSSFGFPRTVKHIDAALSEENTGKTYFFVANKYWRYDEYKRSMDPGYPKMIAHDFPGIGHKVDAVFMKDGFFYFFHGTRQYKFDPKTKRILTLQKANSWFNCRKN

SEQ ID NO: 878 - protein, 450 aa, Artificial Sequence
  MMP-1 variant G86R
FPATLETQEQDVDLVQKYLEKYYNLKNDGRQVEKRRNSGPVVEKLKQMQEFFGLKVTGKPDAETLKVMKQPRCGVPDVAQFVLTERNPRWEQTHLTYRIENYTPDLPRADVDHAIEKAFQLWSNVTPLTFTKVSEGQADIMISFVRGDHRDNSPFDGPGGNLAHAFQPGPGIGGDAHFDEDERWTNNFREYNLHRVAAHELGHSLGLSHSTDIGALMYPSYTFSGDVQLAQDDIDGIQAIYGRSQNPVQPIGPQTPKACDSKLTFDAITTIRGEVMFFKDRFYMRTNPFYPEVELNFISVFWPQLPNGLEAAYEFADRDEVRFFKGNKYWAVQGQNVLHGYPKDIYSSFGFPRTVKHIDAALSEENTGKTYFFVANKYWRYDEYKRSMDPGYPKMIAHDFPGIGHKVDAVFMKDGFFYFFHGTRQYKFDPKTKRILTLQKANSWFNCRKN

SEQ ID NO: 879 - protein, 450 aa, Artificial Sequence
  MMP-1 variant G86C
FPATLETQEQDVDLVQKYLEKYYNLKNDGRQVEKRRNSGPVVEKLKQMQEFFGLKVTGKPDAETLKVMKQPRCGVPDVAQFVLTECNPRWEQTHLTYRIENYTPDLPRADVDHAIEKAFQLWSNVTPLTFTKVSEGQADIMISFVRGDHRDNSPFDGPGGNLAHAFQPGPGIGGDAHFDEDERWTNNFREYNLHRVAAHELGHSLGLSHSTDIGALMYPSYTFSGDVQLAQDDIDGIQAIYGRSQNPVQPIGPQTPKACDSKLTFDAITTIRGEVMFFKDRFYMRTNPFYPEVELNFISVFWPQLPNGLEAAYEFADRDEVRFFKGNKYWAVQGQNVLHGYPKDIYSSFGFPRTVKHIDAALSEENTGKTYFFVANKYWRYDEYKRSMDPGYPKMIAHDFPGIGHKVDAVFMKDGFFYFFHGTRQYKFDPKTKRILTLQKANSWFNCRKN

SEQ ID NO: 880 - protein, 450 aa, Artificial Sequence
  MMP-1 variant G86N
FPATLETQEQDVDLVQKYLEKYYNLKNDGRQVEKRRNSGPVVEKLKQMQEFFGLKVTGKPDAETLKVMKQPRCGVPDVAQFVLTENNPRWEQTHLTYRIENYTPDLPRADVDHAIEKAFQLWSNVTPLTFTKVSEGQADIMISFVRGDHRDNSPFDGPGGNLAHAFQPGPGIGGDAHFDEDERWTNNFREYNLHRVAAHELGHSLGLSHSTDIGALMYPSYTFSGDVQLAQDDIDGIQAIYGRSQNPVQPIGPQTPKACDSKLTFDAITTIRGEVMFFKDRFYMRTNPFYPEVELNFISVFWPQLPNGLEAAYEFADRDEVRFFKGNKYWAVQGQNVLHGYPKDIYSSFGFPRTVKHIDAALSEENTGKTYFFVANKYWRYDEYKRSMDPGYPKMIAHDFPGIGHKVDAVFMKDGFFYFFHGTRQYKFDPKTKRILTLQKANSWFNCRKN

SEQ ID NO: 881 - protein, 450 aa, Artificial Sequence
  MMP-1 variant G86Q
FPATLETQEQDVDLVQKYLEKYYNLKNDGRQVEKRRNSGPVVEKLKQMQEFFGLKVTGKPDAETLKVMKQPRCGVPDVAQFVLTEQNPRWEQTHLTYRIENYTPDLPRADVDHAIEKAFQLWSNVTPLTFTKVSEGQADIMISFVRGDHRDNSPFDGPGGNLAHAFQPGPGIGGDAHFDEDERWTNNFREYNLHRVAAHELGHSLGLSHSTDIGALMYPSYTFSGDVQLAQDDIDGIQAIYGRSQNPVQPIGPQTPKACDSKLTFDAITTIRGEVMFFKDRFYMRTNPFYPEVELNFISVFWPQLPNGLEAAYEFADRDEVRFFKGNKYWAVQGQNVLHGYPKDIYSSFGFPRTVKHIDAALSEENTGKTYFFVANKYWRYDEYKRSMDPGYPKMIAHDFPGIGHKVDAVFMKDGFFYFFHGTRQYKFDPKTKRILTLQKANSWFNCRKN

SEQ ID NO: 882 - protein, 450 aa, Artificial Sequence
  MMP-1 variant G86T
FPATLETQEQDVDLVQKYLEKYYNLKNDGRQVEKRRNSGPVVEKLKQMQEFFGLKVTGKPDAETLKVMKQPRCGVPDVAQFVLTETNPRWEQTHLTYRIENYTPDLPRADVDHAIEKAFQLWSNVTPLTFTKVSEGQADIMISFVRGDHRDNSPFDGPGGNLAHAFQPGPGIGGDAHFDEDERWTNNFREYNLHRVAAHELGHSLGLSHSTDIGALMYPSYTFSGDVQLAQDDIDGIQAIYGRSQNPVQPIGPQTPKACDSKLTFDAITTIRGEVMFFKDRFYMRTNPFYPEVELNFISVFWPQLPNGLEAAYEFADRDEVRFFKGNKYWAVQGQNVLHGYPKDIYSSFGFPRTVKHIDAALSEENTGKTYFFVANKYWRYDEYKRSMDPGYPKMIAHDFPGIGHKVDAVFMKDGFFYFFHGTRQYKFDPKTKRILTLQKANSWFNCRKN

SEQ ID NO: 883 - protein, 450 aa, Artificial Sequence
  MMP-1 variant G86Y
FPATLETQEQDVDLVQKYLEKYYNLKNDGRQVEKRRNSGPVVEKLKQMQEFFGLKVTGKPDAETLKVMKQPRCGVPDVAQFVLTEYNPRWEQTHLTYRIENYTPDLPRADVDHAIEKAFQLWSNVTPLTFTKVSEGQADIMISFVRGDHRDNSPFDGPGGNLAHAFQPGPGIGGDAHFDEDERWTNNFREYNLHRVAAHELGHSLGLSHSTDIGALMYPSYTFSGDVQLAQDDIDGIQAIYGRSQNPVQPIGPQTPKACDSKLTFDAITTIRGEVMFFKDRFYMRTNPFYPEVELNFISVFWPQLPNGLEAAYEFADRDEVRFFKGNKYWAVQGQNVLHGYPKDIYSSFGFPRTVKHIDAALSEENTGKTYFFVANKYWRYDEYKRSMDPGYPKMIAHDFPGIGHKVDAVFMKDGFFYFFHGTRQYKFDPKTKRILTLQKANSWFNCRKN

SEQ ID NO: 884 - protein, 450 aa, Artificial Sequence
  MMP-1 variant G86S
FPATLETQEQDVDLVQKYLEKYYNLKNDGRQVEKRRNSGPVVEKLKQMQEFFGLKVTGKPDAETLKVMKQPRCGVPDVAQFVLTESNPRWEQTHLTYRIENYTPDLPRADVDHAIEKAFQLWSNVTPLTFTKVSEGQADIMISFVRGDHRDNSPFDGPGGNLAHAFQPGPGIGGDAHFDEDERWTNNFREYNLHRVAAHELGHSLGLSHSTDIGALMYPSYTFSGDVQLAQDDIDGIQAIYGRSQNPVQPIGPQTPKACDSKLTFDAITTIRGEVMFFKDRFYMRTNPFYPEVELNFISVFWPQLPNGLEAAYEFADRDEVRFFKGNKYWAVQGQNVLHGYPKDIYSSFGFPRTVKHIDAALSEENTGKTYFFVANKYWRYDEYKRSMDPGYPKMIAHDFPGIGHKVDAVFMKDGFFYFFHGTRQYKFDPKTKRILTLQKANSWFNCRKN

SEQ ID NO: 885 - protein, 450 aa, Artificial Sequence
  MMP-1 variant G86F
FPATLETQEQDVDLVQKYLEKYYNLKNDGRQVEKRRNSGPVVEKLKQMQEFFGLKVTGKPDAETLKVMKQPRCGVPDVAQFVLTEFNPRWEQTHLTYRIENYTPDLPRADVDHAIEKAFQLWSNVTPLTFTKVSEGQADIMISFVRGDHRDNSPFDGPGGNLAHAFQPGPGIGGDAHFDEDERWTNNFREYNLHRVAAHELGHSLGLSHSTDIGALMYPSYTFSGDVQLAQDDIDGIQAIYGRSQNPVQPIGPQTPKACDSKLTFDAITTIRGEVMFFKDRFYMRTNPFYPEVELNFISVFWPQLPNGLEAAYEFADRDEVRFFKGNKYWAVQGQNVLHGYPKDIYSSFGFPRTVKHIDAALSEENTGKTYFFVANKYWRYDEYKRSMDPGYPKMIAHDFPGIGHKVDAVFMKDGFFYFFHGTRQYKFDPKTKRILTLQKANSWFNCRKN

SEQ ID NO: 886 - protein, 450 aa, Artificial Sequence
  MMP-1 variant G86M
FPATLETQEQDVDLVQKYLEKYYNLKNDGRQVEKRRNSGPVVEKLKQMQEFFGLKVTGKPDAETLKVMKQPRCGVPDVAQFVLTEMNPRWEQTHLTYRIENYTPDLPRADVDHAIEKAFQLWSNVTPLTFTKVSEGQADIMISFVRGDHRDNSPFDGPGGNLAHAFQPGPGIGGDAHFDEDERWTNNFREYNLHRVAAHELGHSLGLSHSTDIGALMYPSYTFSGDVQLAQDDIDGIQAIYGRSQNPVQPIGPQTPKACDSKLTFDAITTIRGEVMFFKDRFYMRTNPFYPEVELNFISVFWPQLPNGLEAAYEFADRDEVRFFKGNKYWAVQGQNVLHGYPKDIYSSFGFPRTVKHIDAALSEENTGKTYFFVANKYWRYDEYKRSMDPGYPKMIAHDFPGIGHKVDAVFMKDGFFYFFHGTRQYKFDPKTKRILTLQKANSWFNCRKN

SEQ ID NO: 887 - protein, 450 aa, Artificial Sequence
  MMP-1 variant G86W
FPATLETQEQDVDLVQKYLEKYYNLKNDGRQVEKRRNSGPVVEKLKQMQEFFGLKVTGKPDAETLKVMKQPRCGVPDVAQFVLTEWNPRWEQTHLTYRIENYTPDLPRADVDHAIEKAFQLWSNVTPLTFTKVSEGQADIMISFVRGDHRDNSPFDGPGGNLAHAFQPGPGIGGDAHFDEDERWTNNFREYNLHRVAAHELGHSLGLSHSTDIGALMYPSYTFSGDVQLAQDDIDGIQAIYGRSQNPVQPIGPQTPKACDSKLTFDAITTIRGEVMFFKDRFYMRTNPFYPEVELNFISVFWPQLPNGLEAAYEFADRDEVRFFKGNKYWAVQGQNVLHGYPKDIYSSFGFPRTVKHIDAALSEENTGKTYFFVANKYWRYDEYKRSMDPGYPKMIAHDFPGIGHKVDAVFMKDGFFYFFHGTRQYKFDPKTKRILTLQKANSWFNCRKN

SEQ ID NO: 888 - protein, 450 aa, Artificial Sequence
  MMP-1 variant G86I
FPATLETQEQDVDLVQKYLEKYYNLKNDGRQVEKRRNSGPVVEKLKQMQEFFGLKVTGKPDAETLKVMKQPRCGVPDVAQFVLTEINPRWEQTHLTYRIENYTPDLPRADVDHAIEKAFQLWSNVTPLTFTKVSEGQADIMISFVRGDHRDNSPFDGPGGNLAHAFQPGPGIGGDAHFDEDERWTNNFREYNLHRVAAHELGHSLGLSHSTDIGALMYPSYTFSGDVQLAQDDIDGIQAIYGRSQNPVQPIGPQTPKACDSKLTFDAITTIRGEVMFFKDRFYMRTNPFYPEVELNFISVFWPQLPNGLEAAYEFADRDEVRFFKGNKYWAVQGQNVLHGYPKDIYSSFGFPRTVKHIDAALSEENTGKTYFFVANKYWRYDEYKRSMDPGYPKMIAHDFPGIGHKVDAVFMKDGFFYFFHGTRQYKFDPKTKRILTLQKANSWFNCRKN

SEQ ID NO: 889 - protein, 450 aa, Artificial Sequence
  MMP-1 variant G86V
FPATLETQEQDVDLVQKYLEKYYNLKNDGRQVEKRRNSGPVVEKLKQMQEFFGLKVTGKPDAETLKVMKQPRCGVPDVAQFVLTEVNPRWEQTHLTYRIENYTPDLPRADVDHAIEKAFQLWSNVTPLTFTKVSEGQADIMISFVRGDHRDNSPFDGPGGNLAHAFQPGPGIGGDAHFDEDERWTNNFREYNLHRVAAHELGHSLGLSHSTDIGALMYPSYTFSGDVQLAQDDIDGIQAIYGRSQNPVQPIGPQTPKACDSKLTFDAITTIRGEVMFFKDRFYMRTNPFYPEVELNFISVFWPQLPNGLEAAYEFADRDEVRFFKGNKYWAVQGQNVLHGYPKDIYSSFGFPRTVKHIDAALSEENTGKTYFFVANKYWRYDEYKRSMDPGYPKMIAHDFPGIGHKVDAVFMKDGFFYFFHGTRQYKFDPKTKRILTLQKANSWFNCRKN

SEQ ID NO: 890 - protein, 450 aa, Artificial Sequence
  MMP-1 variant G86L
FPATLETQEQDVDLVQKYLEKYYNLKNDGRQVEKRRNSGPVVEKLKQMQEFFGLKVTGKPDAETLKVMKQPRCGVPDVAQFVLTELNPRWEQTHLTYRIENYTPDLPRADVDHAIEKAFQLWSNVTPLTFTKVSEGQADIMISFVRGDHRDNSPFDGPGGNLAHAFQPGPGIGGDAHFDEDERWTNNFREYNLHRVAAHELGHSLGLSHSTDIGALMYPSYTFSGDVQLAQDDIDGIQAIYGRSQNPVQPIGPQTPKACDSKLTFDAITTIRGEVMFFKDRFYMRTNPFYPEVELNFISVFWPQLPNGLEAAYEFADRDEVRFFKGNKYWAVQGQNVLHGYPKDIYSSFGFPRTVKHIDAALSEENTGKTYFFVANKYWRYDEYKRSMDPGYPKMIAHDFPGIGHKVDAVFMKDGFFYFFHGTRQYKFDPKTKRILTLQKANSWFNCRKN

SEQ ID NO: 891 - protein, 450 aa, Artificial Sequence
  MMP-1 variant G86A
FPATLETQEQDVDLVQKYLEKYYNLKNDGRQVEKRRNSGPVVEKLKQMQEFFGLKVTGKPDAETLKVMKQPRCGVPDVAQFVLTEANPRWEQTHLTYRIENYTPDLPRADVDHAIEKAFQLWSNVTPLTFTKVSEGQADIMISFVRGDHRDNSPFDGPGGNLAHAFQPGPGIGGDAHFDEDERWTNNFREYNLHRVAAHELGHSLGLSHSTDIGALMYPSYTFSGDVQLAQDDIDGIQAIYGRSQNPVQPIGPQTPKACDSKLTFDAITTIRGEVMFFKDRFYMRTNPFYPEVELNFISVFWPQLPNGLEAAYEFADRDEVRFFKGNKYWAVQGQNVLHGYPKDIYSSFGFPRTVKHIDAALSEENTGKTYFFVANKYWRYDEYKRSMDPGYPKMIAHDFPGIGHKVDAVFMKDGFFYFFHGTRQYKFDPKTKRILTLQKANSWFNCRKN

SEQ ID NO: 892 - protein, 450 aa, Artificial Sequence
  MMP-1 variant G86P
FPATLETQEQDVDLVQKYLEKYYNLKNDGRQVEKRRNSGPVVEKLKQMQEFFGLKVTGKPDAETLKVMKQPRCGVPDVAQFVLTEPNPRWEQTHLTYRIENYTPDLPRADVDHAIEKAFQLWSNVTPLTFTKVSEGQADIMISFVRGDHRDNSPFDGPGGNLAHAFQPGPGIGGDAHFDEDERWTNNFREYNLHRVAAHELGHSLGLSHSTDIGALMYPSYTFSGDVQLAQDDIDGIQAIYGRSQNPVQPIGPQTPKACDSKLTFDAITTIRGEVMFFKDRFYMRTNPFYPEVELNFISVFWPQLPNGLEAAYEFADRDEVRFFKGNKYWAVQGQNVLHGYPKDIYSSFGFPRTVKHIDAALSEENTGKTYFFVANKYWRYDEYKRSMDPGYPKMIAHDFPGIGHKVDAVFMKDGFFYFFHGTRQYKFDPKTKRILTLQKANSWFNCRKN

SEQ ID NO: 893 - protein, 450 aa, Artificial Sequence
  MMP-1 variant N87D
FPATLETQEQDVDLVQKYLEKYYNLKNDGRQVEKRRNSGPVVEKLKQMQEFFGLKVTGKPDAETLKVMKQPRCGVPDVAQFVLTEGDPRWEQTHLTYRIENYTPDLPRADVDHAIEKAFQLWSNVTPLTFTKVSEGQADIMISFVRGDHRDNSPFDGPGGNLAHAFQPGPGIGGDAHFDEDERWTNNFREYNLHRVAAHELGHSLGLSHSTDIGALMYPSYTFSGDVQLAQDDIDGIQAIYGRSQNPVQPIGPQTPKACDSKLTFDAITTIRGEVMFFKDRFYMRTNPFYPEVELNFISVFWPQLPNGLEAAYEFADRDEVRFFKGNKYWAVQGQNVLHGYPKDIYSSFGFPRTVKHIDAALSEENTGKTYFFVANKYWRYDEYKRSMDPGYPKMIAHDFPGIGHKVDAVFMKDGFFYFFHGTRQYKFDPKTKRILTLQKANSWFNCRKN

SEQ ID NO: 894 - protein, 450 aa, Artificial Sequence
  MMP-1 variant N87E
FPATLETQEQDVDLVQKYLEKYYNLKNDGRQVEKRRNSGPVVEKLKQMQEFFGLKVTGKPDAETLKVMKQPRCGVPDVAQFVLTEGEPRWEQTHLTYRIENYTPDLPRADVDHAIEKAFQLWSNVTPLTFTKVSEGQADIMISFVRGDHRDNSPFDGPGGNLAHAFQPGPGIGGDAHFDEDERWTNNFREYNLHRVAAHELGHSLGLSHSTDIGALMYPSYTFSGDVQLAQDDIDGIQAIYGRSQNPVQPIGPQTPKACDSKLTFDAITTIRGEVMFFKDRFYMRTNPFYPEVELNFISVFWPQLPNGLEAAYEFADRDEVRFFKGNKYWAVQGQNVLHGYPKDIYSSFGFPRTVKHIDAALSEENTGKTYFFVANKYWRYDEYKRSMDPGYPKMIAHDFPGIGHKVDAVFMKDGFFYFFHGTRQYKFDPKTKRILTLQKANSWFNCRKN

SEQ ID NO: 895 - protein, 450 aa, Artificial Sequence
  MMP-1 variant N87H
FPATLETQEQDVDLVQKYLEKYYNLKNDGRQVEKRRNSGPVVEKLKQMQEFFGLKVTGKPDAETLKVMKQPRCGVPDVAQFVLTEGHPRWEQTHLTYRIENYTPDLPRADVDHAIEKAFQLWSNVTPLTFTKVSEGQADIMISFVRGDHRDNSPFDGPGGNLAHAFQPGPGIGGDAHFDEDERWTNNFREYNLHRVAAHELGHSLGLSHSTDIGALMYPSYTFSGDVQLAQDDIDGIQAIYGRSQNPVQPIGPQTPKACDSKLTFDAITTIRGEVMFFKDRFYMRTNPFYPEVELNFISVFWPQLPNGLEAAYEFADRDEVRFFKGNKYWAVQGQNVLHGYPKDIYSSFGFPRTVKHIDAALSEENTGKTYFFVANKYWRYDEYKRSMDPGYPKMIAHDFPGIGHKVDAVFMKDGFFYFFHGTRQYKFDPKTKRILTLQKANSWFNCRKN

SEQ ID NO: 896 - protein, 450 aa, Artificial Sequence
  MMP-1 variant N87K
FPATLETQEQDVDLVQKYLEKYYNLKNDGRQVEKRRNSGPVVEKLKQMQEFFGLKVTGKPDAETLKVMKQPRCGVPDVAQFVLTEGKPRWEQTHLTYRIENYTPDLPRADVDHAIEKAFQLWSNVTPLTFTKVSEGQADIMISFVRGDHRDNSPFDGPGGNLAHAFQPGPGIGGDAHFDEDERWTNNFREYNLHRVAAHELGHSLGLSHSTDIGALMYPSYTFSGDVQLAQDDIDGIQAIYGRSQNPVQPIGPQTPKACDSKLTFDAITTIRGEVMFFKDRFYMRTNPFYPEVELNFISVFWPQLPNGLEAAYEFADRDEVRFFKGNKYWAVQGQNVLHGYPKDIYSSFGFPRTVKHIDAALSEENTGKTYFFVANKYWRYDEYKRSMDPGYPKMIAHDFPGIGHKVDAVFMKDGFFYFFHGTRQYKFDPKTKRILTLQKANSWFNCRKN

SEQ ID NO: 897 - protein, 450 aa, Artificial Sequence
  MMP-1 variant N87R
FPATLETQEQDVDLVQKYLEKYYNLKNDGRQVEKRRNSGPVVEKLKQMQEFFGLKVTGKPDAETLKVMKQPRCGVPDVAQFVLTEGRPRWEQTHLTYRIENYTPDLPRADVDHAIEKAFQLWSNVTPLTFTKVSEGQADIMISFVRGDHRDNSPFDGPGGNLAHAFQPGPGIGGDAHFDEDERWTNNFREYNLHRVAAHELGHSLGLSHSTDIGALMYPSYTFSGDVQLAQDDIDGIQAIYGRSQNPVQPIGPQTPKACDSKLTFDAITTIRGEVMFFKDRFYMRTNPFYPEVELNFISVFWPQLPNGLEAAYEFADRDEVRFFKGNKYWAVQGQNVLHGYPKDIYSSFGFPRTVKHIDAALSEENTGKTYFFVANKYWRYDEYKRSMDPGYPKMIAHDFPGIGHKVDAVFMKDGFFYFFHGTRQYKFDPKTKRILTLQKANSWFNCRKN

SEQ ID NO: 898 - protein, 450 aa, Artificial Sequence
  MMP-1 variant N87C
FPATLETQEQDVDLVQKYLEKYYNLKNDGRQVEKRRNSGPVVEKLKQMQEFFGLKVTGKPDAETLKVMKQPRCGVPDVAQFVLTEGCPRWEQTHLTYRIENYTPDLPRADVDHAIEKAFQLWSNVTPLTFTKVSEGQADIMISFVRGDHRDNSPFDGPGGNLAHAFQPGPGIGGDAHFDEDERWTNNFREYNLHRVAAHELGHSLGLSHSTDIGALMYPSYTFSGDVQLAQDDIDGIQAIYGRSQNPVQPIGPQTPKACDSKLTFDAITTIRGEVMFFKDRFYMRTNPFYPEVELNFISVFWPQLPNGLEAAYEFADRDEVRFFKGNKYWAVQGQNVLHGYPKDIYSSFGFPRTVKHIDAALSEENTGKTYFFVANKYWRYDEYKRSMDPGYPKMIAHDFPGIGHKVDAVFMKDGFFYFFHGTRQYKFDPKTKRILTLQKANSWFNCRKN

SEQ ID NO: 899 - protein, 450 aa, Artificial Sequence
  MMP-1 variant N87Q
FPATLETQEQDVDLVQKYLEKYYNLKNDGRQVEKRRNSGPVVEKLKQMQEFFGLKVTGKPDAETLKVMKQPRCGVPDVAQFVLTEGQPRWEQTHLTYRIENYTPDLPRADVDHAIEKAFQLWSNVTPLTFTKVSEGQADIMISFVRGDHRDNSPFDGPGGNLAHAFQPGPGIGGDAHFDEDERWTNNFREYNLHRVAAHELGHSLGLSHSTDIGALMYPSYTFSGDVQLAQDDIDGIQAIYGRSQNPVQPIGPQTPKACDSKLTFDAITTIRGEVMFFKDRFYMRTNPFYPEVELNFISVFWPQLPNGLEAAYEFADRDEVRFFKGNKYWAVQGQNVLHGYPKDIYSSFGFPRTVKHIDAALSEENTGKTYFFVANKYWRYDEYKRSMDPGYPKMIAHDFPGIGHKVDAVFMKDGFFYFFHGTRQYKFDPKTKRILTLQKANSWFNCRKN

SEQ ID NO: 900 - protein, 450 aa, Artificial Sequence
  MMP-1 variant N87T
FPATLETQEQDVDLVQKYLEKYYNLKNDGRQVEKRRNSGPVVEKLKQMQEFFGLKVTGKPDAETLKVMKQPRCGVPDVAQFVLTEGTPRWEQTHLTYRIENYTPDLPRADVDHAIEKAFQLWSNVTPLTFTKVSEGQADIMISFVRGDHRDNSPFDGPGGNLAHAFQPGPGIGGDAHFDEDERWTNNFREYNLHRVAAHELGHSLGLSHSTDIGALMYPSYTFSGDVQLAQDDIDGIQAIYGRSQNPVQPIGPQTPKACDSKLTFDAITTIRGEVMFFKDRFYMRTNPFYPEVELNFISVFWPQLPNGLEAAYEFADRDEVRFFKGNKYWAVQGQNVLHGYPKDIYSSFGFPRTVKHIDAALSEENTGKTYFFVANKYWRYDEYKRSMDPGYPKMIAHDFPGIGHKVDAVFMKDGFFYFFHGTRQYKFDPKTKRILTLQKANSWFNCRKN

SEQ ID NO: 901 - protein, 450 aa, Artificial Sequence
  MMP-1 variant N87Y
FPATLETQEQDVDLVQKYLEKYYNLKNDGRQVEKRRNSGPVVEKLKQMQEFFGLKVTGKPDAETLKVMKQPRCGVPDVAQFVLTEGYPRWEQTHLTYRIENYTPDLPRADVDHAIEKAFQLWSNVTPLTFTKVSEGQADIMISFVRGDHRDNSPFDGPGGNLAHAFQPGPGIGGDAHFDEDERWTNNFREYNLHRVAAHELGHSLGLSHSTDIGALMYPSYTFSGDVQLAQDDIDGIQAIYGRSQNPVQPIGPQTPKACDSKLTFDAITTIRGEVMFFKDRFYMRTNPFYPEVELNFISVFWPQLPNGLEAAYEFADRDEVRFFKGNKYWAVQGQNVLHGYPKDIYSSFGFPRTVKHIDAALSEENTGKTYFFVANKYWRYDEYKRSMDPGYPKMIAHDFPGIGHKVDAVFMKDGFFYFFHGTRQYKFDPKTKRILTLQKANSWFNCRKN

SEQ ID NO: 902 - protein, 450 aa, Artificial Sequence
  MMP-1 variant N87S
FPATLETQEQDVDLVQKYLEKYYNLKNDGRQVEKRRNSGPVVEKLKQMQEFFGLKVTGKPDAETLKVMKQPRCGVPDVAQFVLTEGSPRWEQTHLTYRIENYTPDLPRADVDHAIEKAFQLWSNVTPLTFTKVSEGQADIMISFVRGDHRDNSPFDGPGGNLAHAFQPGPGIGGDAHFDEDERWTNNFREYNLHRVAAHELGHSLGLSHSTDIGALMYPSYTFSGDVQLAQDDIDGIQAIYGRSQNPVQPIGPQTPKACDSKLTFDAITTIRGEVMFFKDRFYMRTNPFYPEVELNFISVFWPQLPNGLEAAYEFADRDEVRFFKGNKYWAVQGQNVLHGYPKDIYSSFGFPRTVKHIDAALSEENTGKTYFFVANKYWRYDEYKRSMDPGYPKMIAHDFPGIGHKVDAVFMKDGFFYFFHGTRQYKFDPKTKRILTLQKANSWFNCRKN

SEQ ID NO: 903 - protein, 450 aa, Artificial Sequence
  MMP-1 variant N87G
FPATLETQEQDVDLVQKYLEKYYNLKNDGRQVEKRRNSGPVVEKLKQMQEFFGLKVTGKPDAETLKVMKQPRCGVPDVAQFVLTEGGPRWEQTHLTYRIENYTPDLPRADVDHAIEKAFQLWSNVTPLTFTKVSEGQADIMISFVRGDHRDNSPFDGPGGNLAHAFQPGPGIGGDAHFDEDERWTNNFREYNLHRVAAHELGHSLGLSHSTDIGALMYPSYTFSGDVQLAQDDIDGIQAIYGRSQNPVQPIGPQTPKACDSKLTFDAITTIRGEVMFFKDRFYMRTNPFYPEVELNFISVFWPQLPNGLEAAYEFADRDEVRFFKGNKYWAVQGQNVLHGYPKDIYSSFGFPRTVKHIDAALSEENTGKTYFFVANKYWRYDEYKRSMDPGYPKMIAHDFPGIGHKVDAVFMKDGFFYFFHGTRQYKFDPKTKRILTLQKANSWFNCRKN

SEQ ID NO: 904 - protein, 450 aa, Artificial Sequence
  MMP-1 variant N87F
FPATLETQEQDVDLVQKYLEKYYNLKNDGRQVEKRRNSGPVVEKLKQMQEFFGLKVTGKPDAETLKVMKQPRCGVPDVAQFVLTEGFPRWEQTHLTYRIENYTPDLPRADVDHAIEKAFQLWSNVTPLTFTKVSEGQADIMISFVRGDHRDNSPFDGPGGNLAHAFQPGPGIGGDAHFDEDERWTNNFREYNLHRVAAHELGHSLGLSHSTDIGALMYPSYTFSGDVQLAQDDIDGIQAIYGRSQNPVQPIGPQTPKACDSKLTFDAITTIRGEVMFFKDRFYMRTNPFYPEVELNFISVFWPQLPNGLEAAYEFADRDEVRFFKGNKYWAVQGQNVLHGYPKDIYSSFGFPRTVKHIDAALSEENTGKTYFFVANKYWRYDEYKRSMDPGYPKMIAHDFPGIGHKVDAVFMKDGFFYFFHGTRQYKFDPKTKRILTLQKANSWFNCRKN

SEQ ID NO: 905 - protein, 450 aa, Artificial Sequence
  MMP-1 variant N87M
FPATLETQEQDVDLVQKYLEKYYNLKNDGRQVEKRRNSGPVVEKLKQMQEFFGLKVTGKPDAETLKVMKQPRCGVPDVAQFVLTEGMPRWEQTHLTYRIENYTPDLPRADVDHAIEKAFQLWSNVTPLTFTKVSEGQADIMISFVRGDHRDNSPFDGPGGNLAHAFQPGPGIGGDAHFDEDERWTNNFREYNLHRVAAHELGHSLGLSHSTDIGALMYPSYTFSGDVQLAQDDIDGIQAIYGRSQNPVQPIGPQTPKACDSKLTFDAITTIRGEVMFFKDRFYMRTNPFYPEVELNFISVFWPQLPNGLEAAYEFADRDEVRFFKGNKYWAVQGQNVLHGYPKDIYSSFGFPRTVKHIDAALSEENTGKTYFFVANKYWRYDEYKRSMDPGYPKMIAHDFPGIGHKVDAVFMKDGFFYFFHGTRQYKFDPKTKRILTLQKANSWFNCRKN

SEQ ID NO: 906 - protein, 450 aa, Artificial Sequence
  MMP-1 variant N87W
FPATLETQEQDVDLVQKYLEKYYNLKNDGRQVEKRRNSGPVVEKLKQMQEFFGLKVTGKPDAETLKVMKQPRCGVPDVAQFVLTEGWPRWEQTHLTYRIENYTPDLPRADVDHAIEKAFQLWSNVTPLTFTKVSEGQADIMISFVRGDHRDNSPFDGPGGNLAHAFQPGPGIGGDAHFDEDERWTNNFREYNLHRVAAHELGHSLGLSHSTDIGALMYPSYTFSGDVQLAQDDIDGIQAIYGRSQNPVQPIGPQTPKACDSKLTFDAITTIRGEVMFFKDRFYMRTNPFYPEVELNFISVFWPQLPNGLEAAYEFADRDEVRFFKGNKYWAVQGQNVLHGYPKDIYSSFGFPRTVKHIDAALSEENTGKTYFFVANKYWRYDEYKRSMDPGYPKMIAHDFPGIGHKVDAVFMKDGFFYFFHGTRQYKFDPKTKRILTLQKANSWFNCRKN

SEQ ID NO: 907 - protein, 450 aa, Artificial Sequence
  MMP-1 variant N87I
FPATLETQEQDVDLVQKYLEKYYNLKNDGRQVEKRRNSGPVVEKLKQMQEFFGLKVTGKPDAETLKVMKQPRCGVPDVAQFVLTEGIPRWEQTHLTYRIENYTPDLPRADVDHAIEKAFQLWSNVTPLTFTKVSEGQADIMISFVRGDHRDNSPFDGPGGNLAHAFQPGPGIGGDAHFDEDERWTNNFREYNLHRVAAHELGHSLGLSHSTDIGALMYPSYTFSGDVQLAQDDIDGIQAIYGRSQNPVQPIGPQTPKACDSKLTFDAITTIRGEVMFFKDRFYMRTNPFYPEVELNFISVFWPQLPNGLEAAYEFADRDEVRFFKGNKYWAVQGQNVLHGYPKDIYSSFGFPRTVKHIDAALSEENTGKTYFFVANKYWRYDEYKRSMDPGYPKMIAHDFPGIGHKVDAVFMKDGFFYFFHGTRQYKFDPKTKRILTLQKANSWFNCRKN

SEQ ID NO: 908 - protein, 450 aa, Artificial Sequence
  MMP-1 variant N87V
FPATLETQEQDVDLVQKYLEKYYNLKNDGRQVEKRRNSGPVVEKLKQMQEFFGLKVTGKPDAETLKVMKQPRCGVPDVAQFVLTEGVPRWEQTHLTYRIENYTPDLPRADVDHAIEKAFQLWSNVTPLTFTKVSEGQADIMISFVRGDHRDNSPFDGPGGNLAHAFQPGPGIGGDAHFDEDERWTNNFREYNLHRVAAHELGHSLGLSHSTDIGALMYPSYTFSGDVQLAQDDIDGIQAIYGRSQNPVQPIGPQTPKACDSKLTFDAITTIRGEVMFFKDRFYMRTNPFYPEVELNFISVFWPQLPNGLEAAYEFADRDEVRFFKGNKYWAVQGQNVLHGYPKDIYSSFGFPRTVKHIDAALSEENTGKTYFFVANKYWRYDEYKRSMDPGYPKMIAHDFPGIGHKVDAVFMKDGFFYFFHGTRQYKFDPKTKRILTLQKANSWFNCRKN

SEQ ID NO: 909 - protein, 450 aa, Artificial Sequence
  MMP-1 variant N87L
FPATLETQEQDVDLVQKYLEKYYNLKNDGRQVEKRRNSGPVVEKLKQMQEFFGLKVTGKPDAETLKVMKQPRCGVPDVAQFVLTEGLPRWEQTHLTYRIENYTPDLPRADVDHAIEKAFQLWSNVTPLTFTKVSEGQADIMISFVRGDHRDNSPFDGPGGNLAHAFQPGPGIGGDAHFDEDERWTNNFREYNLHRVAAHELGHSLGLSHSTDIGALMYPSYTFSGDVQLAQDDIDGIQAIYGRSQNPVQPIGPQTPKACDSKLTFDAITTIRGEVMFFKDRFYMRTNPFYPEVELNFISVFWPQLPNGLEAAYEFADRDEVRFFKGNKYWAVQGQNVLHGYPKDIYSSFGFPRTVKHIDAALSEENTGKTYFFVANKYWRYDEYKRSMDPGYPKMIAHDFPGIGHKVDAVFMKDGFFYFFHGTRQYKFDPKTKRILTLQKANSWFNCRKN

SEQ ID NO: 910 - protein, 450 aa, Artificial Sequence
  MMP-1 variant N87A
FPATLETQEQDVDLVQKYLEKYYNLKNDGRQVEKRRNSGPVVEKLKQMQEFFGLKVTGKPDAETLKVMKQPRCGVPDVAQFVLTEGAPRWEQTHLTYRIENYTPDLPRADVDHAIEKAFQLWSNVTPLTFTKVSEGQADIMISFVRGDHRDNSPFDGPGGNLAHAFQPGPGIGGDAHFDEDERWTNNFREYNLHRVAAHELGHSLGLSHSTDIGALMYPSYTFSGDVQLAQDDIDGIQAIYGRSQNPVQPIGPQTPKACDSKLTFDAITTIRGEVMFFKDRFYMRTNPFYPEVELNFISVFWPQLPNGLEAAYEFADRDEVRFFKGNKYWAVQGQNVLHGYPKDIYSSFGFPRTVKHIDAALSEENTGKTYFFVANKYWRYDEYKRSMDPGYPKMIAHDFPGIGHKVDAVFMKDGFFYFFHGTRQYKFDPKTKRILTLQKANSWFNCRKN

SEQ ID NO: 911 - protein, 450 aa, Artificial Sequence
  MMP-1 variant N87P
FPATLETQEQDVDLVQKYLEKYYNLKNDGRQVEKRRNSGPVVEKLKQMQEFFGLKVTGKPDAETLKVMKQPRCGVPDVAQFVLTEGPPRWEQTHLTYRIENYTPDLPRADVDHAIEKAFQLWSNVTPLTFTKVSEGQADIMISFVRGDHRDNSPFDGPGGNLAHAFQPGPGIGGDAHFDEDERWTNNFREYNLHRVAAHELGHSLGLSHSTDIGALMYPSYTFSGDVQLAQDDIDGIQAIYGRSQNPVQPIGPQTPKACDSKLTFDAITTIRGEVMFFKDRFYMRTNPFYPEVELNFISVFWPQLPNGLEAAYEFADRDEVRFFKGNKYWAVQGQNVLHGYPKDIYSSFGFPRTVKHIDAALSEENTGKTYFFVANKYWRYDEYKRSMDPGYPKMIAHDFPGIGHKVDAVFMKDGFFYFFHGTRQYKFDPKTKRILTLQKANSWFNCRKN

SEQ ID NO: 912 - protein, 450 aa, Artificial Sequence
  MMP-1 variant P88D
FPATLETQEQDVDLVQKYLEKYYNLKNDGRQVEKRRNSGPVVEKLKQMQEFFGLKVTGKPDAETLKVMKQPRCGVPDVAQFVLTEGNDRWEQTHLTYRIENYTPDLPRADVDHAIEKAFQLWSNVTPLTFTKVSEGQADIMISFVRGDHRDNSPFDGPGGNLAHAFQPGPGIGGDAHFDEDERWTNNFREYNLHRVAAHELGHSLGLSHSTDIGALMYPSYTFSGDVQLAQDDIDGIQAIYGRSQNPVQPIGPQTPKACDSKLTFDAITTIRGEVMFFKDRFYMRTNPFYPEVELNFISVFWPQLPNGLEAAYEFADRDEVRFFKGNKYWAVQGQNVLHGYPKDIYSSFGFPRTVKHIDAALSEENTGKTYFFVANKYWRYDEYKRSMDPGYPKMIAHDFPGIGHKVDAVFMKDGFFYFFHGTRQYKFDPKTKRILTLQKANSWFNCRKN

SEQ ID NO: 913 - protein, 450 aa, Artificial Sequence
  MMP-1 variant P88E
FPATLETQEQDVDLVQKYLEKYYNLKNDGRQVEKRRNSGPVVEKLKQMQEFFGLKVTGKPDAETLKVMKQPRCGVPDVAQFVLTEGNERWEQTHLTYRIENYTPDLPRADVDHAIEKAFQLWSNVTPLTFTKVSEGQADIMISFVRGDHRDNSPFDGPGGNLAHAFQPGPGIGGDAHFDEDERWTNNFREYNLHRVAAHELGHSLGLSHSTDIGALMYPSYTFSGDVQLAQDDIDGIQAIYGRSQNPVQPIGPQTPKACDSKLTFDAITTIRGEVMFFKDRFYMRTNPFYPEVELNFISVFWPQLPNGLEAAYEFADRDEVRFFKGNKYWAVQGQNVLHGYPKDIYSSFGFPRTVKHIDAALSEENTGKTYFFVANKYWRYDEYKRSMDPGYPKMIAHDFPGIGHKVDAVFMKDGFFYFFHGTRQYKFDPKTKRILTLQKANSWFNCRKN

SEQ ID NO: 914 - protein, 450 aa, Artificial Sequence
  MMP-1 variant P88H
FPATLETQEQDVDLVQKYLEKYYNLKNDGRQVEKRRNSGPVVEKLKQMQEFFGLKVTGKPDAETLKVMKQPRCGVPDVAQFVLTEGNHRWEQTHLTYRIENYTPDLPRADVDHAIEKAFQLWSNVTPLTFTKVSEGQADIMISFVRGDHRDNSPFDGPGGNLAHAFQPGPGIGGDAHFDEDERWTNNFREYNLHRVAAHELGHSLGLSHSTDIGALMYPSYTFSGDVQLAQDDIDGIQAIYGRSQNPVQPIGPQTPKACDSKLTFDAITTIRGEVMFFKDRFYMRTNPFYPEVELNFISVFWPQLPNGLEAAYEFADRDEVRFFKGNKYWAVQGQNVLHGYPKDIYSSFGFPRTVKHIDAALSEENTGKTYFFVANKYWRYDEYKRSMDPGYPKMIAHDFPGIGHKVDAVFMKDGFFYFFHGTRQYKFDPKTKRILTLQKANSWFNCRKN

SEQ ID NO: 915 - protein, 450 aa, Artificial Sequence
  MMP-1 variant P88K
FPATLETQEQDVDLVQKYLEKYYNLKNDGRQVEKRRNSGPVVEKLKQMQEFFGLKVTGKPDAETLKVMKQPRCGVPDVAQFVLTEGNKRWEQTHLTYRIENYTPDLPRADVDHAIEKAFQLWSNVTPLTFTKVSEGQADIMISFVRGDHRDNSPFDGPGGNLAHAFQPGPGIGGDAHFDEDERWTNNFREYNLHRVAAHELGHSLGLSHSTDIGALMYPSYTFSGDVQLAQDDIDGIQAIYGRSQNPVQPIGPQTPKACDSKLTFDAITTIRGEVMFFKDRFYMRTNPFYPEVELNFISVFWPQLPNGLEAAYEFADRDEVRFFKGNKYWAVQGQNVLHGYPKDIYSSFGFPRTVKHIDAALSEENTGKTYFFVANKYWRYDEYKRSMDPGYPKMIAHDFPGIGHKVDAVFMKDGFFYFFHGTRQYKFDPKTKRILTLQKANSWFNCRKN

SEQ ID NO: 916 - protein, 450 aa, Artificial Sequence
  MMP-1 variant P88R
FPATLETQEQDVDLVQKYLEKYYNLKNDGRQVEKRRNSGPVVEKLKQMQEFFGLKVTGKPDAETLKVMKQPRCGVPDVAQFVLTEGNRRWEQTHLTYRIENYTPDLPRADVDHAIEKAFQLWSNVTPLTFTKVSEGQADIMISFVRGDHRDNSPFDGPGGNLAHAFQPGPGIGGDAHFDEDERWTNNFREYNLHRVAAHELGHSLGLSHSTDIGALMYPSYTFSGDVQLAQDDIDGIQAIYGRSQNPVQPIGPQTPKACDSKLTFDAITTIRGEVMFFKDRFYMRTNPFYPEVELNFISVFWPQLPNGLEAAYEFADRDEVRFFKGNKYWAVQGQNVLHGYPKDIYSSFGFPRTVKHIDAALSEENTGKTYFFVANKYWRYDEYKRSMDPGYPKMIAHDFPGIGHKVDAVFMKDGFFYFFHGTRQYKFDPKTKRILTLQKANSWFNCRKN

SEQ ID NO: 917 - protein, 450 aa, Artificial Sequence
  MMP-1 variant P88C
FPATLETQEQDVDLVQKYLEKYYNLKNDGRQVEKRRNSGPVVEKLKQMQEFFGLKVTGKPDAETLKVMKQPRCGVPDVAQFVLTEGNCRWEQTHLTYRIENYTPDLPRADVDHAIEKAFQLWSNVTPLTFTKVSEGQADIMISFVRGDHRDNSPFDGPGGNLAHAFQPGPGIGGDAHFDEDERWTNNFREYNLHRVAAHELGHSLGLSHSTDIGALMYPSYTFSGDVQLAQDDIDGIQAIYGRSQNPVQPIGPQTPKACDSKLTFDAITTIRGEVMFFKDRFYMRTNPFYPEVELNFISVFWPQLPNGLEAAYEFADRDEVRFFKGNKYWAVQGQNVLHGYPKDIYSSFGFPRTVKHIDAALSEENTGKTYFFVANKYWRYDEYKRSMDPGYPKMIAHDFPGIGHKVDAVFMKDGFFYFFHGTRQYKFDPKTKRILTLQKANSWFNCRKN

SEQ ID NO: 918 - protein, 450 aa, Artificial Sequence
  MMP-1 variant P88N
FPATLETQEQDVDLVQKYLEKYYNLKNDGRQVEKRRNSGPVVEKLKQMQEFFGLKVTGKPDAETLKVMKQPRCGVPDVAQFVLTEGNNRWEQTHLTYRIENYTPDLPRADVDHAIEKAFQLWSNVTPLTFTKVSEGQADIMISFVRGDHRDNSPFDGPGGNLAHAFQPGPGIGGDAHFDEDERWTNNFREYNLHRVAAHELGHSLGLSHSTDIGALMYPSYTFSGDVQLAQDDIDGIQAIYGRSQNPVQPIGPQTPKACDSKLTFDAITTIRGEVMFFKDRFYMRTNPFYPEVELNFISVFWPQLPNGLEAAYEFADRDEVRFFKGNKYWAVQGQNVLHGYPKDIYSSFGFPRTVKHIDAALSEENTGKTYFFVANKYWRYDEYKRSMDPGYPKMIAHDFPGIGHKVDAVFMKDGFFYFFHGTRQYKFDPKTKRILTLQKANSWFNCRKN

SEQ ID NO: 919 - protein, 450 aa, Artificial Sequence
  MMP-1 variant P88Q
FPATLETQEQDVDLVQKYLEKYYNLKNDGRQVEKRRNSGPVVEKLKQMQEFFGLKVTGKPDAETLKVMKQPRCGVPDVAQFVLTEGNQRWEQTHLTYRIENYTPDLPRADVDHAIEKAFQLWSNVTPLTFTKVSEGQADIMISFVRGDHRDNSPFDGPGGNLAHAFQPGPGIGGDAHFDEDERWTNNFREYNLHRVAAHELGHSLGLSHSTDIGALMYPSYTFSGDVQLAQDDIDGIQAIYGRSQNPVQPIGPQTPKACDSKLTFDAITTIRGEVMFFKDRFYMRTNPFYPEVELNFISVFWPQLPNGLEAAYEFADRDEVRFFKGNKYWAVQGQNVLHGYPKDIYSSFGFPRTVKHIDAALSEENTGKTYFFVANKYWRYDEYKRSMDPGYPKMIAHDFPGIGHKVDAVFMKDGFFYFFHGTRQYKFDPKTKRILTLQKANSWFNCRKN

SEQ ID NO: 920 - protein, 450 aa, Artificial Sequence
  MMP-1 variant P88T
FPATLETQEQDVDLVQKYLEKYYNLKNDGRQVEKRRNSGPVVEKLKQMQEFFGLKVTGKPDAETLKVMKQPRCGVPDVAQFVLTEGNTRWEQTHLTYRIENYTPDLPRADVDHAIEKAFQLWSNVTPLTFTKVSEGQADIMISFVRGDHRDNSPFDGPGGNLAHAFQPGPGIGGDAHFDEDERWTNNFREYNLHRVAAHELGHSLGLSHSTDIGALMYPSYTFSGDVQLAQDDIDGIQAIYGRSQNPVQPIGPQTPKACDSKLTFDAITTIRGEVMFFKDRFYMRTNPFYPEVELNFISVFWPQLPNGLEAAYEFADRDEVRFFKGNKYWAVQGQNVLHGYPKDIYSSFGFPRTVKHIDAALSEENTGKTYFFVANKYWRYDEYKRSMDPGYPKMIAHDFPGIGHKVDAVFMKDGFFYFFHGTRQYKFDPKTKRILTLQKANSWFNCRKN

SEQ ID NO: 921 - protein, 450 aa, Artificial Sequence
  MMP-1 variant P88Y
FPATLETQEQDVDLVQKYLEKYYNLKNDGRQVEKRRNSGPVVEKLKQMQEFFGLKVTGKPDAETLKVMKQPRCGVPDVAQFVLTEGNYRWEQTHLTYRIENYTPDLPRADVDHAIEKAFQLWSNVTPLTFTKVSEGQADIMISFVRGDHRDNSPFDGPGGNLAHAFQPGPGIGGDAHFDEDERWTNNFREYNLHRVAAHELGHSLGLSHSTDIGALMYPSYTFSGDVQLAQDDIDGIQAIYGRSQNPVQPIGPQTPKACDSKLTFDAITTIRGEVMFFKDRFYMRTNPFYPEVELNFISVFWPQLPNGLEAAYEFADRDEVRFFKGNKYWAVQGQNVLHGYPKDIYSSFGFPRTVKHIDAALSEENTGKTYFFVANKYWRYDEYKRSMDPGYPKMIAHDFPGIGHKVDAVFMKDGFFYFFHGTRQYKFDPKTKRILTLQKANSWFNCRKN

SEQ ID NO: 922 - protein, 450 aa, Artificial Sequence
  MMP-1 variant P88S
FPATLETQEQDVDLVQKYLEKYYNLKNDGRQVEKRRNSGPVVEKLKQMQEFFGLKVTGKPDAETLKVMKQPRCGVPDVAQFVLTEGNSRWEQTHLTYRIENYTPDLPRADVDHAIEKAFQLWSNVTPLTFTKVSEGQADIMISFVRGDHRDNSPFDGPGGNLAHAFQPGPGIGGDAHFDEDERWTNNFREYNLHRVAAHELGHSLGLSHSTDIGALMYPSYTFSGDVQLAQDDIDGIQAIYGRSQNPVQPIGPQTPKACDSKLTFDAITTIRGEVMFFKDRFYMRTNPFYPEVELNFISVFWPQLPNGLEAAYEFADRDEVRFFKGNKYWAVQGQNVLHGYPKDIYSSFGFPRTVKHIDAALSEENTGKTYFFVANKYWRYDEYKRSMDPGYPKMIAHDFPGIGHKVDAVFMKDGFFYFFHGTRQYKFDPKTKRILTLQKANSWFNCRKN

SEQ ID NO: 923 - protein, 450 aa, Artificial Sequence
  MMP-1 variant P88G
FPATLETQEQDVDLVQKYLEKYYNLKNDGRQVEKRRNSGPVVEKLKQMQEFFGLKVTGKPDAETLKVMKQPRCGVPDVAQFVLTEGNGRWEQTHLTYRIENYTPDLPRADVDHAIEKAFQLWSNVTPLTFTKVSEGQADIMISFVRGDHRDNSPFDGPGGNLAHAFQPGPGIGGDAHFDEDERWTNNFREYNLHRVAAHELGHSLGLSHSTDIGALMYPSYTFSGDVQLAQDDIDGIQAIYGRSQNPVQPIGPQTPKACDSKLTFDAITTIRGEVMFFKDRFYMRTNPFYPEVELNFISVFWPQLPNGLEAAYEFADRDEVRFFKGNKYWAVQGQNVLHGYPKDIYSSFGFPRTVKHIDAALSEENTGKTYFFVANKYWRYDEYKRSMDPGYPKMIAHDFPGIGHKVDAVFMKDGFFYFFHGTRQYKFDPKTKRILTLQKANSWFNCRKN

SEQ ID NO: 924 - protein, 450 aa, Artificial Sequence
  MMP-1 variant P88F
FPATLETQEQDVDLVQKYLEKYYNLKNDGRQVEKRRNSGPVVEKLKQMQEFFGLKVTGKPDAETLKVMKQPRCGVPDVAQFVLTEGNFRWEQTHLTYRIENYTPDLPRADVDHAIEKAFQLWSNVTPLTFTKVSEGQADIMISFVRGDHRDNSPFDGPGGNLAHAFQPGPGIGGDAHFDEDERWTNNFREYNLHRVAAHELGHSLGLSHSTDIGALMYPSYTFSGDVQLAQDDIDGIQAIYGRSQNPVQPIGPQTPKACDSKLTFDAITTIRGEVMFFKDRFYMRTNPFYPEVELNFISVFWPQLPNGLEAAYEFADRDEVRFFKGNKYWAVQGQNVLHGYPKDIYSSFGFPRTVKHIDAALSEENTGKTYFFVANKYWRYDEYKRSMDPGYPKMIAHDFPGIGHKVDAVFMKDGFFYFFHGTRQYKFDPKTKRILTLQKANSWFNCRKN

SEQ ID NO: 925 - protein, 450 aa, Artificial Sequence
  MMP-1 variant P88M
FPATLETQEQDVDLVQKYLEKYYNLKNDGRQVEKRRNSGPVVEKLKQMQEFFGLKVTGKPDAETLKVMKQPRCGVPDVAQFVLTEGNMRWEQTHLTYRIENYTPDLPRADVDHAIEKAFQLWSNVTPLTFTKVSEGQADIMISFVRGDHRDNSPFDGPGGNLAHAFQPGPGIGGDAHFDEDERWTNNFREYNLHRVAAHELGHSLGLSHSTDIGALMYPSYTFSGDVQLAQDDIDGIQAIYGRSQNPVQPIGPQTPKACDSKLTFDAITTIRGEVMFFKDRFYMRTNPFYPEVELNFISVFWPQLPNGLEAAYEFADRDEVRFFKGNKYWAVQGQNVLHGYPKDIYSSFGFPRTVKHIDAALSEENTGKTYFFVANKYWRYDEYKRSMDPGYPKMIAHDFPGIGHKVDAVFMKDGFFYFFHGTRQYKFDPKTKRILTLQKANSWFNCRKN

SEQ ID NO: 926 - protein, 450 aa, Artificial Sequence
  MMP-1 variant P88W
FPATLETQEQDVDLVQKYLEKYYNLKNDGRQVEKRRNSGPVVEKLKQMQEFFGLKVTGKPDAETLKVMKQPRCGVPDVAQFVLTEGNWRWEQTHLTYRIENYTPDLPRADVDHAIEKAFQLWSNVTPLTFTKVSEGQADIMISFVRGDHRDNSPFDGPGGNLAHAFQPGPGIGGDAHFDEDERWTNNFREYNLHRVAAHELGHSLGLSHSTDIGALMYPSYTFSGDVQLAQDDIDGIQAIYGRSQNPVQPIGPQTPKACDSKLTFDAITTIRGEVMFFKDRFYMRTNPFYPEVELNFISVFWPQLPNGLEAAYEFADRDEVRFFKGNKYWAVQGQNVLHGYPKDIYSSFGFPRTVKHIDAALSEENTGKTYFFVANKYWRYDEYKRSMDPGYPKMIAHDFPGIGHKVDAVFMKDGFFYFFHGTRQYKFDPKTKRILTLQKANSWFNCRKN

SEQ ID NO: 927 - protein, 450 aa, Artificial Sequence
  MMP-1 variant P88I
FPATLETQEQDVDLVQKYLEKYYNLKNDGRQVEKRRNSGPVVEKLKQMQEFFGLKVTGKPDAETLKVMKQPRCGVPDVAQFVLTEGNIRWEQTHLTYRIENYTPDLPRADVDHAIEKAFQLWSNVTPLTFTKVSEGQADIMISFVRGDHRDNSPFDGPGGNLAHAFQPGPGIGGDAHFDEDERWTNNFREYNLHRVAAHELGHSLGLSHSTDIGALMYPSYTFSGDVQLAQDDIDGIQAIYGRSQNPVQPIGPQTPKACDSKLTFDAITTIRGEVMFFKDRFYMRTNPFYPEVELNFISVFWPQLPNGLEAAYEFADRDEVRFFKGNKYWAVQGQNVLHGYPKDIYSSFGFPRTVKHIDAALSEENTGKTYFFVANKYWRYDEYKRSMDPGYPKMIAHDFPGIGHKVDAVFMKDGFFYFFHGTRQYKFDPKTKRILTLQKANSWFNCRKN

SEQ ID NO: 928 - protein, 450 aa, Artificial Sequence
  MMP-1 variant P88V
FPATLETQEQDVDLVQKYLEKYYNLKNDGRQVEKRRNSGPVVEKLKQMQEFFGLKVTGKPDAETLKVMKQPRCGVPDVAQFVLTEGNVRWEQTHLTYRIENYTPDLPRADVDHAIEKAFQLWSNVTPLTFTKVSEGQADIMISFVRGDHRDNSPFDGPGGNLAHAFQPGPGIGGDAHFDEDERWTNNFREYNLHRVAAHELGHSLGLSHSTDIGALMYPSYTFSGDVQLAQDDIDGIQAIYGRSQNPVQPIGPQTPKACDSKLTFDAITTIRGEVMFFKDRFYMRTNPFYPEVELNFISVFWPQLPNGLEAAYEFADRDEVRFFKGNKYWAVQGQNVLHGYPKDIYSSFGFPRTVKHIDAALSEENTGKTYFFVANKYWRYDEYKRSMDPGYPKMIAHDFPGIGHKVDAVFMKDGFFYFFHGTRQYKFDPKTKRILTLQKANSWFNCRKN

SEQ ID NO: 929 - protein, 450 aa, Artificial Sequence
  MMP-1 variant P88L
FPATLETQEQDVDLVQKYLEKYYNLKNDGRQVEKRRNSGPVVEKLKQMQEFFGLKVTGKPDAETLKVMKQPRCGVPDVAQFVLTEGNLRWEQTHLTYRIENYTPDLPRADVDHAIEKAFQLWSNVTPLTFTKVSEGQADIMISFVRGDHRDNSPFDGPGGNLAHAFQPGPGIGGDAHFDEDERWTNNFREYNLHRVAAHELGHSLGLSHSTDIGALMYPSYTFSGDVQLAQDDIDGIQAIYGRSQNPVQPIGPQTPKACDSKLTFDAITTIRGEVMFFKDRFYMRTNPFYPEVELNFISVFWPQLPNGLEAAYEFADRDEVRFFKGNKYWAVQGQNVLHGYPKDIYSSFGFPRTVKHIDAALSEENTGKTYFFVANKYWRYDEYKRSMDPGYPKMIAHDFPGIGHKVDAVFMKDGFFYFFHGTRQYKFDPKTKRILTLQKANSWFNCRKN

SEQ ID NO: 930 - protein, 450 aa, Artificial Sequence
  MMP-1 variant P88A
FPATLETQEQDVDLVQKYLEKYYNLKNDGRQVEKRRNSGPVVEKLKQMQEFFGLKVTGKPDAETLKVMKQPRCGVPDVAQFVLTEGNARWEQTHLTYRIENYTPDLPRADVDHAIEKAFQLWSNVTPLTFTKVSEGQADIMISFVRGDHRDNSPFDGPGGNLAHAFQPGPGIGGDAHFDEDERWTNNFREYNLHRVAAHELGHSLGLSHSTDIGALMYPSYTFSGDVQLAQDDIDGIQAIYGRSQNPVQPIGPQTPKACDSKLTFDAITTIRGEVMFFKDRFYMRTNPFYPEVELNFISVFWPQLPNGLEAAYEFADRDEVRFFKGNKYWAVQGQNVLHGYPKDIYSSFGFPRTVKHIDAALSEENTGKTYFFVANKYWRYDEYKRSMDPGYPKMIAHDFPGIGHKVDAVFMKDGFFYFFHGTRQYKFDPKTKRILTLQKANSWFNCRKN

SEQ ID NO: 931 - protein, 450 aa, Artificial Sequence
  MMP-1 variant R89D
FPATLETQEQDVDLVQKYLEKYYNLKNDGRQVEKRRNSGPVVEKLKQMQEFFGLKVTGKPDAETLKVMKQPRCGVPDVAQFVLTEGNPDWEQTHLTYRIENYTPDLPRADVDHAIEKAFQLWSNVTPLTFTKVSEGQADIMISFVRGDHRDNSPFDGPGGNLAHAFQPGPGIGGDAHFDEDERWTNNFREYNLHRVAAHELGHSLGLSHSTDIGALMYPSYTFSGDVQLAQDDIDGIQAIYGRSQNPVQPIGPQTPKACDSKLTFDAITTIRGEVMFFKDRFYMRTNPFYPEVELNFISVFWPQLPNGLEAAYEFADRDEVRFFKGNKYWAVQGQNVLHGYPKDIYSSFGFPRTVKHIDAALSEENTGKTYFFVANKYWRYDEYKRSMDPGYPKMIAHDFPGIGHKVDAVFMKDGFFYFFHGTRQYKFDPKTKRILTLQKANSWFNCRKN

SEQ ID NO: 932 - protein, 450 aa, Artificial Sequence
  MMP-1 variant R89E
FPATLETQEQDVDLVQKYLEKYYNLKNDGRQVEKRRNSGPVVEKLKQMQEFFGLKVTGKPDAETLKVMKQPRCGVPDVAQFVLTEGNPEWEQTHLTYRIENYTPDLPRADVDHAIEKAFQLWSNVTPLTFTKVSEGQADIMISFVRGDHRDNSPFDGPGGNLAHAFQPGPGIGGDAHFDEDERWTNNFREYNLHRVAAHELGHSLGLSHSTDIGALMYPSYTFSGDVQLAQDDIDGIQAIYGRSQNPVQPIGPQTPKACDSKLTFDAITTIRGEVMFFKDRFYMRTNPFYPEVELNFISVFWPQLPNGLEAAYEFADRDEVRFFKGNKYWAVQGQNVLHGYPKDIYSSFGFPRTVKHIDAALSEENTGKTYFFVANKYWRYDEYKRSMDPGYPKMIAHDFPGIGHKVDAVFMKDGFFYFFHGTRQYKFDPKTKRILTLQKANSWFNCRKN

SEQ ID NO: 933 - protein, 450 aa, Artificial Sequence
  MMP-1 variant R89H
FPATLETQEQDVDLVQKYLEKYYNLKNDGRQVEKRRNSGPVVEKLKQMQEFFGLKVTGKPDAETLKVMKQPRCGVPDVAQFVLTEGNPHWEQTHLTYRIENYTPDLPRADVDHAIEKAFQLWSNVTPLTFTKVSEGQADIMISFVRGDHRDNSPFDGPGGNLAHAFQPGPGIGGDAHFDEDERWTNNFREYNLHRVAAHELGHSLGLSHSTDIGALMYPSYTFSGDVQLAQDDIDGIQAIYGRSQNPVQPIGPQTPKACDSKLTFDAITTIRGEVMFFKDRFYMRTNPFYPEVELNFISVFWPQLPNGLEAAYEFADRDEVRFFKGNKYWAVQGQNVLHGYPKDIYSSFGFPRTVKHIDAALSEENTGKTYFFVANKYWRYDEYKRSMDPGYPKMIAHDFPGIGHKVDAVFMKDGFFYFFHGTRQYKFDPKTKRILTLQKANSWFNCRKN

SEQ ID NO: 934 - protein, 499 aa, Artificial Sequence
  MMP-1 variant R89K
FPATLETQEQDVDLVQKYLEKYYNLKNDGRQVEKRRNSGPVVEKLKQMQEFFGLKVTGKPDAETLKVMKQPRCGVPDVAQFVLTEGNPKWEQTHLTYRIENYTPDLPRADVDHAIEKAFQLWSNVTPLTFTKVSEGQADIMISFVRGDHRDNSPFDGPGGNLAHAFQPGPGIGGDAHFDEDERWTNNFREYNLHRVAAHELGHSLGLSHSTDIGALMYPSYTFSGDVQLAQDDIDGIQAIYGRSQNPVQPIGPQTPKACDSKLTFDAITTIRGEVMFFKDRFYMRTNPFYPEVELNFISVFWPQLPNGLEAAYEFADRDEVRFFKGNKYWAVQGQNVLHGYPKDIYSSFGFPRTVKHIDAALSEENTGKTYFFVANKYWRYDEYKRSMDPGYPKMIAHDFPGIGHKVDAVFMKDGFFYFFHGTRQYKFDPKTKRILTLQKANSWFNCRKNGIGHKVDAVFMKDGFFYFFHGTRQYKFDPKTKRILTLQKANSWFNCRKN

SEQ ID NO: 935 - protein, 450 aa, Artificial Sequence
  MMP-1 variant R89C
FPATLETQEQDVDLVQKYLEKYYNLKNDGRQVEKRRNSGPVVEKLKQMQEFFGLKVTGKPDAETLKVMKQPRCGVPDVAQFVLTEGNPCWEQTHLTYRIENYTPDLPRADVDHAIEKAFQLWSNVTPLTFTKVSEGQADIMISFVRGDHRDNSPFDGPGGNLAHAFQPGPGIGGDAHFDEDERWTNNFREYNLHRVAAHELGHSLGLSHSTDIGALMYPSYTFSGDVQLAQDDIDGIQAIYGRSQNPVQPIGPQTPKACDSKLTFDAITTIRGEVMFFKDRFYMRTNPFYPEVELNFISVFWPQLPNGLEAAYEFADRDEVRFFKGNKYWAVQGQNVLHGYPKDIYSSFGFPRTVKHIDAALSEENTGKTYFFVANKYWRYDEYKRSMDPGYPKMIAHDFPGIGHKVDAVFMKDGFFYFFHGTRQYKFDPKTKRILTLQKANSWFNCRKN

SEQ ID NO: 936 - protein, 450 aa, Artificial Sequence
  MMP-1 variant R89N
FPATLETQEQDVDLVQKYLEKYYNLKNDGRQVEKRRNSGPVVEKLKQMQEFFGLKVTGKPDAETLKVMKQPRCGVPDVAQFVLTEGNPNWEQTHLTYRIENYTPDLPRADVDHAIEKAFQLWSNVTPLTFTKVSEGQADIMISFVRGDHRDNSPFDGPGGNLAHAFQPGPGIGGDAHFDEDERWTNNFREYNLHRVAAHELGHSLGLSHSTDIGALMYPSYTFSGDVQLAQDDIDGIQAIYGRSQNPVQPIGPQTPKACDSKLTFDAITTIRGEVMFFKDRFYMRTNPFYPEVELNFISVFWPQLPNGLEAAYEFADRDEVRFFKGNKYWAVQGQNVLHGYPKDIYSSFGFPRTVKHIDAALSEENTGKTYFFVANKYWRYDEYKRSMDPGYPKMIAHDFPGIGHKVDAVFMKDGFFYFFHGTRQYKFDPKTKRILTLQKANSWFNCRKN

SEQ ID NO: 937 - protein, 450 aa, Artificial Sequence
  MMP-1 variant R89Q
FPATLETQEQDVDLVQKYLEKYYNLKNDGRQVEKRRNSGPVVEKLKQMQEFFGLKVTGKPDAETLKVMKQPRCGVPDVAQFVLTEGNPQWEQTHLTYRIENYTPDLPRADVDHAIEKAFQLWSNVTPLTFTKVSEGQADIMISFVRGDHRDNSPFDGPGGNLAHAFQPGPGIGGDAHFDEDERWTNNFREYNLHRVAAHELGHSLGLSHSTDIGALMYPSYTFSGDVQLAQDDIDGIQAIYGRSQNPVQPIGPQTPKACDSKLTFDAITTIRGEVMFFKDRFYMRTNPFYPEVELNFISVFWPQLPNGLEAAYEFADRDEVRFFKGNKYWAVQGQNVLHGYPKDIYSSFGFPRTVKHIDAALSEENTGKTYFFVANKYWRYDEYKRSMDPGYPKMIAHDFPGIGHKVDAVFMKDGFFYFFHGTRQYKFDPKTKRILTLQKANSWFNCRKN

SEQ ID NO: 938 - protein, 450 aa, Artificial Sequence
  MMP-1 variant R89T
FPATLETQEQDVDLVQKYLEKYYNLKNDGRQVEKRRNSGPVVEKLKQMQEFFGLKVTGKPDAETLKVMKQPRCGVPDVAQFVLTEGNPTWEQTHLTYRIENYTPDLPRADVDHAIEKAFQLWSNVTPLTFTKVSEGQADIMISFVRGDHRDNSPFDGPGGNLAHAFQPGPGIGGDAHFDEDERWTNNFREYNLHRVAAHELGHSLGLSHSTDIGALMYPSYTFSGDVQLAQDDIDGIQAIYGRSQNPVQPIGPQTPKACDSKLTFDAITTIRGEVMFFKDRFYMRTNPFYPEVELNFISVFWPQLPNGLEAAYEFADRDEVRFFKGNKYWAVQGQNVLHGYPKDIYSSFGFPRTVKHIDAALSEENTGKTYFFVANKYWRYDEYKRSMDPGYPKMIAHDFPGIGHKVDAVFMKDGFFYFFHGTRQYKFDPKTKRILTLQKANSWFNCRKN

SEQ ID NO: 939 - protein, 450 aa, Artificial Sequence
  MMP-1 variant R89Y
FPATLETQEQDVDLVQKYLEKYYNLKNDGRQVEKRRNSGPVVEKLKQMQEFFGLKVTGKPDAETLKVMKQPRCGVPDVAQFVLTEGNPYWEQTHLTYRIENYTPDLPRADVDHAIEKAFQLWSNVTPLTFTKVSEGQADIMISFVRGDHRDNSPFDGPGGNLAHAFQPGPGIGGDAHFDEDERWTNNFREYNLHRVAAHELGHSLGLSHSTDIGALMYPSYTFSGDVQLAQDDIDGIQAIYGRSQNPVQPIGPQTPKACDSKLTFDAITTIRGEVMFFKDRFYMRTNPFYPEVELNFISVFWPQLPNGLEAAYEFADRDEVRFFKGNKYWAVQGQNVLHGYPKDIYSSFGFPRTVKHIDAALSEENTGKTYFFVANKYWRYDEYKRSMDPGYPKMIAHDFPGIGHKVDAVFMKDGFFYFFHGTRQYKFDPKTKRILTLQKANSWFNCRKN

SEQ ID NO: 940 - protein, 450 aa, Artificial Sequence
  MMP-1 variant R89S
FPATLETQEQDVDLVQKYLEKYYNLKNDGRQVEKRRNSGPVVEKLKQMQEFFGLKVTGKPDAETLKVMKQPRCGVPDVAQFVLTEGNPSWEQTHLTYRIENYTPDLPRADVDHAIEKAFQLWSNVTPLTFTKVSEGQADIMISFVRGDHRDNSPFDGPGGNLAHAFQPGPGIGGDAHFDEDERWTNNFREYNLHRVAAHELGHSLGLSHSTDIGALMYPSYTFSGDVQLAQDDIDGIQAIYGRSQNPVQPIGPQTPKACDSKLTFDAITTIRGEVMFFKDRFYMRTNPFYPEVELNFISVFWPQLPNGLEAAYEFADRDEVRFFKGNKYWAVQGQNVLHGYPKDIYSSFGFPRTVKHIDAALSEENTGKTYFFVANKYWRYDEYKRSMDPGYPKMIAHDFPGIGHKVDAVFMKDGFFYFFHGTRQYKFDPKTKRILTLQKANSWFNCRKN

SEQ ID NO: 941 - protein, 450 aa, Artificial Sequence
  MMP-1 variant R89G
FPATLETQEQDVDLVQKYLEKYYNLKNDGRQVEKRRNSGPVVEKLKQMQEFFGLKVTGKPDAETLKVMKQPRCGVPDVAQFVLTEGNPGWEQTHLTYRIENYTPDLPRADVDHAIEKAFQLWSNVTPLTFTKVSEGQADIMISFVRGDHRDNSPFDGPGGNLAHAFQPGPGIGGDAHFDEDERWTNNFREYNLHRVAAHELGHSLGLSHSTDIGALMYPSYTFSGDVQLAQDDIDGIQAIYGRSQNPVQPIGPQTPKACDSKLTFDAITTIRGEVMFFKDRFYMRTNPFYPEVELNFISVFWPQLPNGLEAAYEFADRDEVRFFKGNKYWAVQGQNVLHGYPKDIYSSFGFPRTVKHIDAALSEENTGKTYFFVANKYWRYDEYKRSMDPGYPKMIAHDFPGIGHKVDAVFMKDGFFYFFHGTRQYKFDPKTKRILTLQKANSWFNCRKN

SEQ ID NO: 942 - protein, 450 aa, Artificial Sequence
  MMP-1 variant R89F
FPATLETQEQDVDLVQKYLEKYYNLKNDGRQVEKRRNSGPVVEKLKQMQEFFGLKVTGKPDAETLKVMKQPRCGVPDVAQFVLTEGNPFWEQTHLTYRIENYTPDLPRADVDHAIEKAFQLWSNVTPLTFTKVSEGQADIMISFVRGDHRDNSPFDGPGGNLAHAFQPGPGIGGDAHFDEDERWTNNFREYNLHRVAAHELGHSLGLSHSTDIGALMYPSYTFSGDVQLAQDDIDGIQAIYGRSQNPVQPIGPQTPKACDSKLTFDAITTIRGEVMFFKDRFYMRTNPFYPEVELNFISVFWPQLPNGLEAAYEFADRDEVRFFKGNKYWAVQGQNVLHGYPKDIYSSFGFPRTVKHIDAALSEENTGKTYFFVANKYWRYDEYKRSMDPGYPKMIAHDFPGIGHKVDAVFMKDGFFYFFHGTRQYKFDPKTKRILTLQKANSWFNCRKN

SEQ ID NO: 943 - protein, 450 aa, Artificial Sequence
  MMP-1 variant R89M
FPATLETQEQDVDLVQKYLEKYYNLKNDGRQVEKRRNSGPVVEKLKQMQEFFGLKVTGKPDAETLKVMKQPRCGVPDVAQFVLTEGNPMWEQTHLTYRIENYTPDLPRADVDHAIEKAFQLWSNVTPLTFTKVSEGQADIMISFVRGDHRDNSPFDGPGGNLAHAFQPGPGIGGDAHFDEDERWTNNFREYNLHRVAAHELGHSLGLSHSTDIGALMYPSYTFSGDVQLAQDDIDGIQAIYGRSQNPVQPIGPQTPKACDSKLTFDAITTIRGEVMFFKDRFYMRTNPFYPEVELNFISVFWPQLPNGLEAAYEFADRDEVRFFKGNKYWAVQGQNVLHGYPKDIYSSFGFPRTVKHIDAALSEENTGKTYFFVANKYWRYDEYKRSMDPGYPKMIAHDFPGIGHKVDAVFMKDGFFYFFHGTRQYKFDPKTKRILTLQKANSWFNCRKN

SEQ ID NO: 944 - protein, 450 aa, Artificial Sequence
  MMP-1 variant R89W
FPATLETQEQDVDLVQKYLEKYYNLKNDGRQVEKRRNSGPVVEKLKQMQEFFGLKVTGKPDAETLKVMKQPRCGVPDVAQFVLTEGNPWWEQTHLTYRIENYTPDLPRADVDHAIEKAFQLWSNVTPLTFTKVSEGQADIMISFVRGDHRDNSPFDGPGGNLAHAFQPGPGIGGDAHFDEDERWTNNFREYNLHRVAAHELGHSLGLSHSTDIGALMYPSYTFSGDVQLAQDDIDGIQAIYGRSQNPVQPIGPQTPKACDSKLTFDAITTIRGEVMFFKDRFYMRTNPFYPEVELNFISVFWPQLPNGLEAAYEFADRDEVRFFKGNKYWAVQGQNVLHGYPKDIYSSFGFPRTVKHIDAALSEENTGKTYFFVANKYWRYDEYKRSMDPGYPKMIAHDFPGIGHKVDAVFMKDGFFYFFHGTRQYKFDPKTKRILTLQKANSWFNCRKN

SEQ ID NO: 945 - protein, 450 aa, Artificial Sequence
  MMP-1 variant R89I
FPATLETQEQDVDLVQKYLEKYYNLKNDGRQVEKRRNSGPVVEKLKQMQEFFGLKVTGKPDAETLKVMKQPRCGVPDVAQFVLTEGNPIWEQTHLTYRIENYTPDLPRADVDHAIEKAFQLWSNVTPLTFTKVSEGQADIMISFVRGDHRDNSPFDGPGGNLAHAFQPGPGIGGDAHFDEDERWTNNFREYNLHRVAAHELGHSLGLSHSTDIGALMYPSYTFSGDVQLAQDDIDGIQAIYGRSQNPVQPIGPQTPKACDSKLTFDAITTIRGEVMFFKDRFYMRTNPFYPEVELNFISVFWPQLPNGLEAAYEFADRDEVRFFKGNKYWAVQGQNVLHGYPKDIYSSFGFPRTVKHIDAALSEENTGKTYFFVANKYWRYDEYKRSMDPGYPKMIAHDFPGIGHKVDAVFMKDGFFYFFHGTRQYKFDPKTKRILTLQKANSWFNCRKN

SEQ ID NO: 946 - protein, 450 aa, Artificial Sequence
  MMP-1 variant R89V
FPATLETQEQDVDLVQKYLEKYYNLKNDGRQVEKRRNSGPVVEKLKQMQEFFGLKVTGKPDAETLKVMKQPRCGVPDVAQFVLTEGNPVWEQTHLTYRIENYTPDLPRADVDHAIEKAFQLWSNVTPLTFTKVSEGQADIMISFVRGDHRDNSPFDGPGGNLAHAFQPGPGIGGDAHFDEDERWTNNFREYNLHRVAAHELGHSLGLSHSTDIGALMYPSYTFSGDVQLAQDDIDGIQAIYGRSQNPVQPIGPQTPKACDSKLTFDAITTIRGEVMFFKDRFYMRTNPFYPEVELNFISVFWPQLPNGLEAAYEFADRDEVRFFKGNKYWAVQGQNVLHGYPKDIYSSFGFPRTVKHIDAALSEENTGKTYFFVANKYWRYDEYKRSMDPGYPKMIAHDFPGIGHKVDAVFMKDGFFYFFHGTRQYKFDPKTKRILTLQKANSWFNCRKN

SEQ ID NO: 947 - protein, 450 aa, Artificial Sequence
  MMP-1 variant R89L
FPATLETQEQDVDLVQKYLEKYYNLKNDGRQVEKRRNSGPVVEKLKQMQEFFGLKVTGKPDAETLKVMKQPRCGVPDVAQFVLTEGNPLWEQTHLTYRIENYTPDLPRADVDHAIEKAFQLWSNVTPLTFTKVSEGQADIMISFVRGDHRDNSPFDGPGGNLAHAFQPGPGIGGDAHFDEDERWTNNFREYNLHRVAAHELGHSLGLSHSTDIGALMYPSYTFSGDVQLAQDDIDGIQAIYGRSQNPVQPIGPQTPKACDSKLTFDAITTIRGEVMFFKDRFYMRTNPFYPEVELNFISVFWPQLPNGLEAAYEFADRDEVRFFKGNKYWAVQGQNVLHGYPKDIYSSFGFPRTVKHIDAALSEENTGKTYFFVANKYWRYDEYKRSMDPGYPKMIAHDFPGIGHKVDAVFMKDGFFYFFHGTRQYKFDPKTKRILTLQKANSWFNCRKN

SEQ ID NO: 948 - protein, 450 aa, Artificial Sequence
  MMP-1 variant R89A
FPATLETQEQDVDLVQKYLEKYYNLKNDGRQVEKRRNSGPVVEKLKQMQEFFGLKVTGKPDAETLKVMKQPRCGVPDVAQFVLTEGNPAWEQTHLTYRIENYTPDLPRADVDHAIEKAFQLWSNVTPLTFTKVSEGQADIMISFVRGDHRDNSPFDGPGGNLAHAFQPGPGIGGDAHFDEDERWTNNFREYNLHRVAAHELGHSLGLSHSTDIGALMYPSYTFSGDVQLAQDDIDGIQAIYGRSQNPVQPIGPQTPKACDSKLTFDAITTIRGEVMFFKDRFYMRTNPFYPEVELNFISVFWPQLPNGLEAAYEFADRDEVRFFKGNKYWAVQGQNVLHGYPKDIYSSFGFPRTVKHIDAALSEENTGKTYFFVANKYWRYDEYKRSMDPGYPKMIAHDFPGIGHKVDAVFMKDGFFYFFHGTRQYKFDPKTKRILTLQKANSWFNCRKN

SEQ ID NO: 949 - protein, 450 aa, Artificial Sequence
  MMP-1 variant R89P
FPATLETQEQDVDLVQKYLEKYYNLKNDGRQVEKRRNSGPVVEKLKQMQEFFGLKVTGKPDAETLKVMKQPRCGVPDVAQFVLTEGNPPWEQTHLTYRIENYTPDLPRADVDHAIEKAFQLWSNVTPLTFTKVSEGQADIMISFVRGDHRDNSPFDGPGGNLAHAFQPGPGIGGDAHFDEDERWTNNFREYNLHRVAAHELGHSLGLSHSTDIGALMYPSYTFSGDVQLAQDDIDGIQAIYGRSQNPVQPIGPQTPKACDSKLTFDAITTIRGEVMFFKDRFYMRTNPFYPEVELNFISVFWPQLPNGLEAAYEFADRDEVRFFKGNKYWAVQGQNVLHGYPKDIYSSFGFPRTVKHIDAALSEENTGKTYFFVANKYWRYDEYKRSMDPGYPKMIAHDFPGIGHKVDAVFMKDGFFYFFHGTRQYKFDPKTKRILTLQKANSWFNCRKN

SEQ ID NO: 950 - protein, 450 aa, Artificial Sequence
  MMP-1 variant W90D
FPATLETQEQDVDLVQKYLEKYYNLKNDGRQVEKRRNSGPVVEKLKQMQEFFGLKVTGKPDAETLKVMKQPRCGVPDVAQFVLTEGNPRDEQTHLTYRIENYTPDLPRADVDHAIEKAFQLWSNVTPLTFTKVSEGQADIMISFVRGDHRDNSPFDGPGGNLAHAFQPGPGIGGDAHFDEDERWTNNFREYNLHRVAAHELGHSLGLSHSTDIGALMYPSYTFSGDVQLAQDDIDGIQAIYGRSQNPVQPIGPQTPKACDSKLTFDAITTIRGEVMFFKDRFYMRTNPFYPEVELNFISVFWPQLPNGLEAAYEFADRDEVRFFKGNKYWAVQGQNVLHGYPKDIYSSFGFPRTVKHIDAALSEENTGKTYFFVANKYWRYDEYKRSMDPGYPKMIAHDFPGIGHKVDAVFMKDGFFYFFHGTRQYKFDPKTKRILTLQKANSWFNCRKN

SEQ ID NO: 951 - protein, 450 aa, Artificial Sequence
  MMP-1 variant W90E
FPATLETQEQDVDLVQKYLEKYYNLKNDGRQVEKRRNSGPVVEKLKQMQEFFGLKVTGKPDAETLKVMKQPRCGVPDVAQFVLTEGNPREEQTHLTYRIENYTPDLPRADVDHAIEKAFQLWSNVTPLTFTKVSEGQADIMISFVRGDHRDNSPFDGPGGNLAHAFQPGPGIGGDAHFDEDERWTNNFREYNLHRVAAHELGHSLGLSHSTDIGALMYPSYTFSGDVQLAQDDIDGIQAIYGRSQNPVQPIGPQTPKACDSKLTFDAITTIRGEVMFFKDRFYMRTNPFYPEVELNFISVFWPQLPNGLEAAYEFADRDEVRFFKGNKYWAVQGQNVLHGYPKDIYSSFGFPRTVKHIDAALSEENTGKTYFFVANKYWRYDEYKRSMDPGYPKMIAHDFPGIGHKVDAVFMKDGFFYFFHGTRQYKFDPKTKRILTLQKANSWFNCRKN

SEQ ID NO: 952 - protein, 450 aa, Artificial Sequence
  MMP-1 variant W90H
FPATLETQEQDVDLVQKYLEKYYNLKNDGRQVEKRRNSGPVVEKLKQMQEFFGLKVTGKPDAETLKVMKQPRCGVPDVAQFVLTEGNPRHEQTHLTYRIENYTPDLPRADVDHAIEKAFQLWSNVTPLTFTKVSEGQADIMISFVRGDHRDNSPFDGPGGNLAHAFQPGPGIGGDAHFDEDERWTNNFREYNLHRVAAHELGHSLGLSHSTDIGALMYPSYTFSGDVQLAQDDIDGIQAIYGRSQNPVQPIGPQTPKACDSKLTFDAITTIRGEVMFFKDRFYMRTNPFYPEVELNFISVFWPQLPNGLEAAYEFADRDEVRFFKGNKYWAVQGQNVLHGYPKDIYSSFGFPRTVKHIDAALSEENTGKTYFFVANKYWRYDEYKRSMDPGYPKMIAHDFPGIGHKVDAVFMKDGFFYFFHGTRQYKFDPKTKRILTLQKANSWFNCRKN

SEQ ID NO: 953 - protein, 450 aa, Artificial Sequence
  MMP-1 variant W90K
FPATLETQEQDVDLVQKYLEKYYNLKNDGRQVEKRRNSGPVVEKLKQMQEFFGLKVTGKPDAETLKVMKQPRCGVPDVAQFVLTEGNPRKEQTHLTYRIENYTPDLPRADVDHAIEKAFQLWSNVTPLTFTKVSEGQADIMISFVRGDHRDNSPFDGPGGNLAHAFQPGPGIGGDAHFDEDERWTNNFREYNLHRVAAHELGHSLGLSHSTDIGALMYPSYTFSGDVQLAQDDIDGIQAIYGRSQNPVQPIGPQTPKACDSKLTFDAITTIRGEVMFFKDRFYMRTNPFYPEVELNFISVFWPQLPNGLEAAYEFADRDEVRFFKGNKYWAVQGQNVLHGYPKDIYSSFGFPRTVKHIDAALSEENTGKTYFFVANKYWRYDEYKRSMDPGYPKMIAHDFPGIGHKVDAVFMKDGFFYFFHGTRQYKFDPKTKRILTLQKANSWFNCRKN

SEQ ID NO: 954 - protein, 450 aa, Artificial Sequence
  MMP-1 variant W90R
FPATLETQEQDVDLVQKYLEKYYNLKNDGRQVEKRRNSGPVVEKLKQMQEFFGLKVTGKPDAETLKVMKQPRCGVPDVAQFVLTEGNPRREQTHLTYRIENYTPDLPRADVDHAIEKAFQLWSNVTPLTFTKVSEGQADIMISFVRGDHRDNSPFDGPGGNLAHAFQPGPGIGGDAHFDEDERWTNNFREYNLHRVAAHELGHSLGLSHSTDIGALMYPSYTFSGDVQLAQDDIDGIQAIYGRSQNPVQPIGPQTPKACDSKLTFDAITTIRGEVMFFKDRFYMRTNPFYPEVELNFISVFWPQLPNGLEAAYEFADRDEVRFFKGNKYWAVQGQNVLHGYPKDIYSSFGFPRTVKHIDAALSEENTGKTYFFVANKYWRYDEYKRSMDPGYPKMIAHDFPGIGHKVDAVFMKDGFFYFFHGTRQYKFDPKTKRILTLQKANSWFNCRKN

SEQ ID NO: 955 - protein, 450 aa, Artificial Sequence
  MMP-1 variant W90C
FPATLETQEQDVDLVQKYLEKYYNLKNDGRQVEKRRNSGPVVEKLKQMQEFFGLKVTGKPDAETLKVMKQPRCGVPDVAQFVLTEGNPRCEQTHLTYRIENYTPDLPRADVDHAIEKAFQLWSNVTPLTFTKVSEGQADIMISFVRGDHRDNSPFDGPGGNLAHAFQPGPGIGGDAHFDEDERWTNNFREYNLHRVAAHELGHSLGLSHSTDIGALMYPSYTFSGDVQLAQDDIDGIQAIYGRSQNPVQPIGPQTPKACDSKLTFDAITTIRGEVMFFKDRFYMRTNPFYPEVELNFISVFWPQLPNGLEAAYEFADRDEVRFFKGNKYWAVQGQNVLHGYPKDIYSSFGFPRTVKHIDAALSEENTGKTYFFVANKYWRYDEYKRSMDPGYPKMIAHDFPGIGHKVDAVFMKDGFFYFFHGTRQYKFDPKTKRILTLQKANSWFNCRKN

SEQ ID NO: 956 - protein, 450 aa, Artificial Sequence
  MMP-1 variant W90N
FPATLETQEQDVDLVQKYLEKYYNLKNDGRQVEKRRNSGPVVEKLKQMQEFFGLKVTGKPDAETLKVMKQPRCGVPDVAQFVLTEGNPRNEQTHLTYRIENYTPDLPRADVDHAIEKAFQLWSNVTPLTFTKVSEGQADIMISFVRGDHRDNSPFDGPGGNLAHAFQPGPGIGGDAHFDEDERWTNNFREYNLHRVAAHELGHSLGLSHSTDIGALMYPSYTFSGDVQLAQDDIDGIQAIYGRSQNPVQPIGPQTPKACDSKLTFDAITTIRGEVMFFKDRFYMRTNPFYPEVELNFISVFWPQLPNGLEAAYEFADRDEVRFFKGNKYWAVQGQNVLHGYPKDIYSSFGFPRTVKHIDAALSEENTGKTYFFVANKYWRYDEYKRSMDPGYPKMIAHDFPGIGHKVDAVFMKDGFFYFFHGTRQYKFDPKTKRILTLQKANSWFNCRKN

SEQ ID NO: 957 - protein, 450 aa, Artificial Sequence
  MMP-1 variant W90Q
FPATLETQEQDVDLVQKYLEKYYNLKNDGRQVEKRRNSGPVVEKLKQMQEFFGLKVTGKPDAETLKVMKQPRCGVPDVAQFVLTEGNPRQEQTHLTYRIENYTPDLPRADVDHAIEKAFQLWSNVTPLTFTKVSEGQADIMISFVRGDHRDNSPFDGPGGNLAHAFQPGPGIGGDAHFDEDERWTNNFREYNLHRVAAHELGHSLGLSHSTDIGALMYPSYTFSGDVQLAQDDIDGIQAIYGRSQNPVQPIGPQTPKACDSKLTFDAITTIRGEVMFFKDRFYMRTNPFYPEVELNFISVFWPQLPNGLEAAYEFADRDEVRFFKGNKYWAVQGQNVLHGYPKDIYSSFGFPRTVKHIDAALSEENTGKTYFFVANKYWRYDEYKRSMDPGYPKMIAHDFPGIGHKVDAVFMKDGFFYFFHGTRQYKFDPKTKRILTLQKANSWFNCRKN

SEQ ID NO: 958 - protein, 450 aa, Artificial Sequence
  MMP-1 variant W90T
FPATLETQEQDVDLVQKYLEKYYNLKNDGRQVEKRRNSGPVVEKLKQMQEFFGLKVTGKPDAETLKVMKQPRCGVPDVAQFVLTEGNPRTEQTHLTYRIENYTPDLPRADVDHAIEKAFQLWSNVTPLTFTKVSEGQADIMISFVRGDHRDNSPFDGPGGNLAHAFQPGPGIGGDAHFDEDERWTNNFREYNLHRVAAHELGHSLGLSHSTDIGALMYPSYTFSGDVQLAQDDIDGIQAIYGRSQNPVQPIGPQTPKACDSKLTFDAITTIRGEVMFFKDRFYMRTNPFYPEVELNFISVFWPQLPNGLEAAYEFADRDEVRFFKGNKYWAVQGQNVLHGYPKDIYSSFGFPRTVKHIDAALSEENTGKTYFFVANKYWRYDEYKRSMDPGYPKMIAHDFPGIGHKVDAVFMKDGFFYFFHGTRQYKFDPKTKRILTLQKANSWFNCRKN

SEQ ID NO: 959 - protein, 450 aa, Artificial Sequence
  MMP-1 variant W90Y
FPATLETQEQDVDLVQKYLEKYYNLKNDGRQVEKRRNSGPVVEKLKQMQEFFGLKVTGKPDAETLKVMKQPRCGVPDVAQFVLTEGNPRYEQTHLTYRIENYTPDLPRADVDHAIEKAFQLWSNVTPLTFTKVSEGQADIMISFVRGDHRDNSPFDGPGGNLAHAFQPGPGIGGDAHFDEDERWTNNFREYNLHRVAAHELGHSLGLSHSTDIGALMYPSYTFSGDVQLAQDDIDGIQAIYGRSQNPVQPIGPQTPKACDSKLTFDAITTIRGEVMFFKDRFYMRTNPFYPEVELNFISVFWPQLPNGLEAAYEFADRDEVRFFKGNKYWAVQGQNVLHGYPKDIYSSFGFPRTVKHIDAALSEENTGKTYFFVANKYWRYDEYKRSMDPGYPKMIAHDFPGIGHKVDAVFMKDGFFYFFHGTRQYKFDPKTKRILTLQKANSWFNCRKN

SEQ ID NO: 960 - protein, 450 aa, Artificial Sequence
  MMP-1 variant W90S
FPATLETQEQDVDLVQKYLEKYYNLKNDGRQVEKRRNSGPVVEKLKQMQEFFGLKVTGKPDAETLKVMKQPRCGVPDVAQFVLTEGNPRSEQTHLTYRIENYTPDLPRADVDHAIEKAFQLWSNVTPLTFTKVSEGQADIMISFVRGDHRDNSPFDGPGGNLAHAFQPGPGIGGDAHFDEDERWTNNFREYNLHRVAAHELGHSLGLSHSTDIGALMYPSYTFSGDVQLAQDDIDGIQAIYGRSQNPVQPIGPQTPKACDSKLTFDAITTIRGEVMFFKDRFYMRTNPFYPEVELNFISVFWPQLPNGLEAAYEFADRDEVRFFKGNKYWAVQGQNVLHGYPKDIYSSFGFPRTVKHIDAALSEENTGKTYFFVANKYWRYDEYKRSMDPGYPKMIAHDFPGIGHKVDAVFMKDGFFYFFHGTRQYKFDPKTKRILTLQKANSWFNCRKN

SEQ ID NO: 961 - protein, 450 aa, Artificial Sequence
  MMP-1 variant W90G
FPATLETQEQDVDLVQKYLEKYYNLKNDGRQVEKRRNSGPVVEKLKQMQEFFGLKVTGKPDAETLKVMKQPRCGVPDVAQFVLTEGNPRGEQTHLTYRIENYTPDLPRADVDHAIEKAFQLWSNVTPLTFTKVSEGQADIMISFVRGDHRDNSPFDGPGGNLAHAFQPGPGIGGDAHFDEDERWTNNFREYNLHRVAAHELGHSLGLSHSTDIGALMYPSYTFSGDVQLAQDDIDGIQAIYGRSQNPVQPIGPQTPKACDSKLTFDAITTIRGEVMFFKDRFYMRTNPFYPEVELNFISVFWPQLPNGLEAAYEFADRDEVRFFKGNKYWAVQGQNVLHGYPKDIYSSFGFPRTVKHIDAALSEENTGKTYFFVANKYWRYDEYKRSMDPGYPKMIAHDFPGIGHKVDAVFMKDGFFYFFHGTRQYKFDPKTKRILTLQKANSWFNCRKN

SEQ ID NO: 962 - protein, 450 aa, Artificial Sequence
  MMP-1 variant W90F
FPATLETQEQDVDLVQKYLEKYYNLKNDGRQVEKRRNSGPVVEKLKQMQEFFGLKVTGKPDAETLKVMKQPRCGVPDVAQFVLTEGNPRFEQTHLTYRIENYTPDLPRADVDHAIEKAFQLWSNVTPLTFTKVSEGQADIMISFVRGDHRDNSPFDGPGGNLAHAFQPGPGIGGDAHFDEDERWTNNFREYNLHRVAAHELGHSLGLSHSTDIGALMYPSYTFSGDVQLAQDDIDGIQAIYGRSQNPVQPIGPQTPKACDSKLTFDAITTIRGEVMFFKDRFYMRTNPFYPEVELNFISVFWPQLPNGLEAAYEFADRDEVRFFKGNKYWAVQGQNVLHGYPKDIYSSFGFPRTVKHIDAALSEENTGKTYFFVANKYWRYDEYKRSMDPGYPKMIAHDFPGIGHKVDAVFMKDGFFYFFHGTRQYKFDPKTKRILTLQKANSWFNCRKN

SEQ ID NO: 963 - protein, 450 aa, Artificial Sequence
  MMP-1 variant W90M
FPATLETQEQDVDLVQKYLEKYYNLKNDGRQVEKRRNSGPVVEKLKQMQEFFGLKVTGKPDAETLKVMKQPRCGVPDVAQFVLTEGNPRMEQTHLTYRIENYTPDLPRADVDHAIEKAFQLWSNVTPLTFTKVSEGQADIMISFVRGDHRDNSPFDGPGGNLAHAFQPGPGIGGDAHFDEDERWTNNFREYNLHRVAAHELGHSLGLSHSTDIGALMYPSYTFSGDVQLAQDDIDGIQAIYGRSQNPVQPIGPQTPKACDSKLTFDAITTIRGEVMFFKDRFYMRTNPFYPEVELNFISVFWPQLPNGLEAAYEFADRDEVRFFKGNKYWAVQGQNVLHGYPKDIYSSFGFPRTVKHIDAALSEENTGKTYFFVANKYWRYDEYKRSMDPGYPKMIAHDFPGIGHKVDAVFMKDGFFYFFHGTRQYKFDPKTKRILTLQKANSWFNCRKN

SEQ ID NO: 964 - protein, 450 aa, Artificial Sequence
  MMP-1 variant W90I
FPATLETQEQDVDLVQKYLEKYYNLKNDGRQVEKRRNSGPVVEKLKQMQEFFGLKVTGKPDAETLKVMKQPRCGVPDVAQFVLTEGNPRIEQTHLTYRIENYTPDLPRADVDHAIEKAFQLWSNVTPLTFTKVSEGQADIMISFVRGDHRDNSPFDGPGGNLAHAFQPGPGIGGDAHFDEDERWTNNFREYNLHRVAAHELGHSLGLSHSTDIGALMYPSYTFSGDVQLAQDDIDGIQAIYGRSQNPVQPIGPQTPKACDSKLTFDAITTIRGEVMFFKDRFYMRTNPFYPEVELNFISVFWPQLPNGLEAAYEFADRDEVRFFKGNKYWAVQGQNVLHGYPKDIYSSFGFPRTVKHIDAALSEENTGKTYFFVANKYWRYDEYKRSMDPGYPKMIAHDFPGIGHKVDAVFMKDGFFYFFHGTRQYKFDPKTKRILTLQKANSWFNCRKN

SEQ ID NO: 965 - protein, 450 aa, Artificial Sequence
  MMP-1 variant W90V
FPATLETQEQDVDLVQKYLEKYYNLKNDGRQVEKRRNSGPVVEKLKQMQEFFGLKVTGKPDAETLKVMKQPRCGVPDVAQFVLTEGNPRVEQTHLTYRIENYTPDLPRADVDHAIEKAFQLWSNVTPLTFTKVSEGQADIMISFVRGDHRDNSPFDGPGGNLAHAFQPGPGIGGDAHFDEDERWTNNFREYNLHRVAAHELGHSLGLSHSTDIGALMYPSYTFSGDVQLAQDDIDGIQAIYGRSQNPVQPIGPQTPKACDSKLTFDAITTIRGEVMFFKDRFYMRTNPFYPEVELNFISVFWPQLPNGLEAAYEFADRDEVRFFKGNKYWAVQGQNVLHGYPKDIYSSFGFPRTVKHIDAALSEENTGKTYFFVANKYWRYDEYKRSMDPGYPKMIAHDFPGIGHKVDAVFMKDGFFYFFHGTRQYKFDPKTKRILTLQKANSWFNCRKN

SEQ ID NO: 966 - protein, 450 aa, Artificial Sequence
  MMP-1 variant W90L
FPATLETQEQDVDLVQKYLEKYYNLKNDGRQVEKRRNSGPVVEKLKQMQEFFGLKVTGKPDAETLKVMKQPRCGVPDVAQFVLTEGNPRLEQTHLTYRIENYTPDLPRADVDHAIEKAFQLWSNVTPLTFTKVSEGQADIMISFVRGDHRDNSPFDGPGGNLAHAFQPGPGIGGDAHFDEDERWTNNFREYNLHRVAAHELGHSLGLSHSTDIGALMYPSYTFSGDVQLAQDDIDGIQAIYGRSQNPVQPIGPQTPKACDSKLTFDAITTIRGEVMFFKDRFYMRTNPFYPEVELNFISVFWPQLPNGLEAAYEFADRDEVRFFKGNKYWAVQGQNVLHGYPKDIYSSFGFPRTVKHIDAALSEENTGKTYFFVANKYWRYDEYKRSMDPGYPKMIAHDFPGIGHKVDAVFMKDGFFYFFHGTRQYKFDPKTKRILTLQKANSWFNCRKN

SEQ ID NO: 967 - protein, 450 aa, Artificial Sequence
  MMP-1 variant W90A
FPATLETQEQDVDLVQKYLEKYYNLKNDGRQVEKRRNSGPVVEKLKQMQEFFGLKVTGKPDAETLKVMKQPRCGVPDVAQFVLTEGNPRAEQTHLTYRIENYTPDLPRADVDHAIEKAFQLWSNVTPLTFTKVSEGQADIMISFVRGDHRDNSPFDGPGGNLAHAFQPGPGIGGDAHFDEDERWTNNFREYNLHRVAAHELGHSLGLSHSTDIGALMYPSYTFSGDVQLAQDDIDGIQAIYGRSQNPVQPIGPQTPKACDSKLTFDAITTIRGEVMFFKDRFYMRTNPFYPEVELNFISVFWPQLPNGLEAAYEFADRDEVRFFKGNKYWAVQGQNVLHGYPKDIYSSFGFPRTVKHIDAALSEENTGKTYFFVANKYWRYDEYKRSMDPGYPKMIAHDFPGIGHKVDAVFMKDGFFYFFHGTRQYKFDPKTKRILTLQKANSWFNCRKN

SEQ ID NO: 968 - protein, 450 aa, Artificial Sequence
  MMP-1 variant W90P
FPATLETQEQDVDLVQKYLEKYYNLKNDGRQVEKRRNSGPVVEKLKQMQEFFGLKVTGKPDAETLKVMKQPRCGVPDVAQFVLTEGNPRPEQTHLTYRIENYTPDLPRADVDHAIEKAFQLWSNVTPLTFTKVSEGQADIMISFVRGDHRDNSPFDGPGGNLAHAFQPGPGIGGDAHFDEDERWTNNFREYNLHRVAAHELGHSLGLSHSTDIGALMYPSYTFSGDVQLAQDDIDGIQAIYGRSQNPVQPIGPQTPKACDSKLTFDAITTIRGEVMFFKDRFYMRTNPFYPEVELNFISVFWPQLPNGLEAAYEFADRDEVRFFKGNKYWAVQGQNVLHGYPKDIYSSFGFPRTVKHIDAALSEENTGKTYFFVANKYWRYDEYKRSMDPGYPKMIAHDFPGIGHKVDAVFMKDGFFYFFHGTRQYKFDPKTKRILTLQKANSWFNCRKN

SEQ ID NO: 969 - protein, 450 aa, Artificial Sequence
  MMP-1 variant E91D
FPATLETQEQDVDLVQKYLEKYYNLKNDGRQVEKRRNSGPVVEKLKQMQEFFGLKVTGKPDAETLKVMKQPRCGVPDVAQFVLTEGNPRWDQTHLTYRIENYTPDLPRADVDHAIEKAFQLWSNVTPLTFTKVSEGQADIMISFVRGDHRDNSPFDGPGGNLAHAFQPGPGIGGDAHFDEDERWTNNFREYNLHRVAAHELGHSLGLSHSTDIGALMYPSYTFSGDVQLAQDDIDGIQAIYGRSQNPVQPIGPQTPKACDSKLTFDAITTIRGEVMFFKDRFYMRTNPFYPEVELNFISVFWPQLPNGLEAAYEFADRDEVRFFKGNKYWAVQGQNVLHGYPKDIYSSFGFPRTVKHIDAALSEENTGKTYFFVANKYWRYDEYKRSMDPGYPKMIAHDFPGIGHKVDAVFMKDGFFYFFHGTRQYKFDPKTKRILTLQKANSWFNCRKN

SEQ ID NO: 970 - protein, 450 aa, Artificial Sequence
  MMP-1 variant E91H
FPATLETQEQDVDLVQKYLEKYYNLKNDGRQVEKRRNSGPVVEKLKQMQEFFGLKVTGKPDAETLKVMKQPRCGVPDVAQFVLTEGNPRWHQTHLTYRIENYTPDLPRADVDHAIEKAFQLWSNVTPLTFTKVSEGQADIMISFVRGDHRDNSPFDGPGGNLAHAFQPGPGIGGDAHFDEDERWTNNFREYNLHRVAAHELGHSLGLSHSTDIGALMYPSYTFSGDVQLAQDDIDGIQAIYGRSQNPVQPIGPQTPKACDSKLTFDAITTIRGEVMFFKDRFYMRTNPFYPEVELNFISVFWPQLPNGLEAAYEFADRDEVRFFKGNKYWAVQGQNVLHGYPKDIYSSFGFPRTVKHIDAALSEENTGKTYFFVANKYWRYDEYKRSMDPGYPKMIAHDFPGIGHKVDAVFMKDGFFYFFHGTRQYKFDPKTKRILTLQKANSWFNCRKN

SEQ ID NO: 971 - protein, 450 aa, Artificial Sequence
  MMP-1 variant E91K
FPATLETQEQDVDLVQKYLEKYYNLKNDGRQVEKRRNSGPVVEKLKQMQEFFGLKVTGKPDAETLKVMKQPRCGVPDVAQFVLTEGNPRWKQTHLTYRIENYTPDLPRADVDHAIEKAFQLWSNVTPLTFTKVSEGQADIMISFVRGDHRDNSPFDGPGGNLAHAFQPGPGIGGDAHFDEDERWTNNFREYNLHRVAAHELGHSLGLSHSTDIGALMYPSYTFSGDVQLAQDDIDGIQAIYGRSQNPVQPIGPQTPKACDSKLTFDAITTIRGEVMFFKDRFYMRTNPFYPEVELNFISVFWPQLPNGLEAAYEFADRDEVRFFKGNKYWAVQGQNVLHGYPKDIYSSFGFPRTVKHIDAALSEENTGKTYFFVANKYWRYDEYKRSMDPGYPKMIAHDFPGIGHKVDAVFMKDGFFYFFHGTRQYKFDPKTKRILTLQKANSWFNCRKN

SEQ ID NO: 972 - protein, 450 aa, Artificial Sequence
  MMP-1 variant E91R
FPATLETQEQDVDLVQKYLEKYYNLKNDGRQVEKRRNSGPVVEKLKQMQEFFGLKVTGKPDAETLKVMKQPRCGVPDVAQFVLTEGNPRWRQTHLTYRIENYTPDLPRADVDHAIEKAFQLWSNVTPLTFTKVSEGQADIMISFVRGDHRDNSPFDGPGGNLAHAFQPGPGIGGDAHFDEDERWTNNFREYNLHRVAAHELGHSLGLSHSTDIGALMYPSYTFSGDVQLAQDDIDGIQAIYGRSQNPVQPIGPQTPKACDSKLTFDAITTIRGEVMFFKDRFYMRTNPFYPEVELNFISVFWPQLPNGLEAAYEFADRDEVRFFKGNKYWAVQGQNVLHGYPKDIYSSFGFPRTVKHIDAALSEENTGKTYFFVANKYWRYDEYKRSMDPGYPKMIAHDFPGIGHKVDAVFMKDGFFYFFHGTRQYKFDPKTKRILTLQKANSWFNCRKN

SEQ ID NO: 973 - protein, 450 aa, Artificial Sequence
  MMP-1 variant E91C
FPATLETQEQDVDLVQKYLEKYYNLKNDGRQVEKRRNSGPVVEKLKQMQEFFGLKVTGKPDAETLKVMKQPRCGVPDVAQFVLTEGNPRWCQTHLTYRIENYTPDLPRADVDHAIEKAFQLWSNVTPLTFTKVSEGQADIMISFVRGDHRDNSPFDGPGGNLAHAFQPGPGIGGDAHFDEDERWTNNFREYNLHRVAAHELGHSLGLSHSTDIGALMYPSYTFSGDVQLAQDDIDGIQAIYGRSQNPVQPIGPQTPKACDSKLTFDAITTIRGEVMFFKDRFYMRTNPFYPEVELNFISVFWPQLPNGLEAAYEFADRDEVRFFKGNKYWAVQGQNVLHGYPKDIYSSFGFPRTVKHIDAALSEENTGKTYFFVANKYWRYDEYKRSMDPGYPKMIAHDFPGIGHKVDAVFMKDGFFYFFHGTRQYKFDPKTKRILTLQKANSWFNCRKN

SEQ ID NO: 974 - protein, 450 aa, Artificial Sequence
  MMP-1 variant E91N
FPATLETQEQDVDLVQKYLEKYYNLKNDGRQVEKRRNSGPVVEKLKQMQEFFGLKVTGKPDAETLKVMKQPRCGVPDVAQFVLTEGNPRWNQTHLTYRIENYTPDLPRADVDHAIEKAFQLWSNVTPLTFTKVSEGQADIMISFVRGDHRDNSPFDGPGGNLAHAFQPGPGIGGDAHFDEDERWTNNFREYNLHRVAAHELGHSLGLSHSTDIGALMYPSYTFSGDVQLAQDDIDGIQAIYGRSQNPVQPIGPQTPKACDSKLTFDAITTIRGEVMFFKDRFYMRTNPFYPEVELNFISVFWPQLPNGLEAAYEFADRDEVRFFKGNKYWAVQGQNVLHGYPKDIYSSFGFPRTVKHIDAALSEENTGKTYFFVANKYWRYDEYKRSMDPGYPKMIAHDFPGIGHKVDAVFMKDGFFYFFHGTRQYKFDPKTKRILTLQKANSWFNCRKN

SEQ ID NO: 975 - protein, 450 aa, Artificial Sequence
  MMP-1 variant E91Q
FPATLETQEQDVDLVQKYLEKYYNLKNDGRQVEKRRNSGPVVEKLKQMQEFFGLKVTGKPDAETLKVMKQPRCGVPDVAQFVLTEGNPRWQQTHLTYRIENYTPDLPRADVDHAIEKAFQLWSNVTPLTFTKVSEGQADIMISFVRGDHRDNSPFDGPGGNLAHAFQPGPGIGGDAHFDEDERWTNNFREYNLHRVAAHELGHSLGLSHSTDIGALMYPSYTFSGDVQLAQDDIDGIQAIYGRSQNPVQPIGPQTPKACDSKLTFDAITTIRGEVMFFKDRFYMRTNPFYPEVELNFISVFWPQLPNGLEAAYEFADRDEVRFFKGNKYWAVQGQNVLHGYPKDIYSSFGFPRTVKHIDAALSEENTGKTYFFVANKYWRYDEYKRSMDPGYPKMIAHDFPGIGHKVDAVFMKDGFFYFFHGTRQYKFDPKTKRILTLQKANSWFNCRKN

SEQ ID NO: 976 - protein, 450 aa, Artificial Sequence
  MMP-1 variant E91T
FPATLETQEQDVDLVQKYLEKYYNLKNDGRQVEKRRNSGPVVEKLKQMQEFFGLKVTGKPDAETLKVMKQPRCGVPDVAQFVLTEGNPRWTQTHLTYRIENYTPDLPRADVDHAIEKAFQLWSNVTPLTFTKVSEGQADIMISFVRGDHRDNSPFDGPGGNLAHAFQPGPGIGGDAHFDEDERWTNNFREYNLHRVAAHELGHSLGLSHSTDIGALMYPSYTFSGDVQLAQDDIDGIQAIYGRSQNPVQPIGPQTPKACDSKLTFDAITTIRGEVMFFKDRFYMRTNPFYPEVELNFISVFWPQLPNGLEAAYEFADRDEVRFFKGNKYWAVQGQNVLHGYPKDIYSSFGFPRTVKHIDAALSEENTGKTYFFVANKYWRYDEYKRSMDPGYPKMIAHDFPGIGHKVDAVFMKDGFFYFFHGTRQYKFDPKTKRILTLQKANSWFNCRKN

SEQ ID NO: 977 - protein, 450 aa, Artificial Sequence
  MMP-1 variant E91Y
FPATLETQEQDVDLVQKYLEKYYNLKNDGRQVEKRRNSGPVVEKLKQMQEFFGLKVTGKPDAETLKVMKQPRCGVPDVAQFVLTEGNPRWYQTHLTYRIENYTPDLPRADVDHAIEKAFQLWSNVTPLTFTKVSEGQADIMISFVRGDHRDNSPFDGPGGNLAHAFQPGPGIGGDAHFDEDERWTNNFREYNLHRVAAHELGHSLGLSHSTDIGALMYPSYTFSGDVQLAQDDIDGIQAIYGRSQNPVQPIGPQTPKACDSKLTFDAITTIRGEVMFFKDRFYMRTNPFYPEVELNFISVFWPQLPNGLEAAYEFADRDEVRFFKGNKYWAVQGQNVLHGYPKDIYSSFGFPRTVKHIDAALSEENTGKTYFFVANKYWRYDEYKRSMDPGYPKMIAHDFPGIGHKVDAVFMKDGFFYFFHGTRQYKFDPKTKRILTLQKANSWFNCRKN

SEQ ID NO: 978 - protein, 450 aa, Artificial Sequence
  MMP-1 variant E91S
FPATLETQEQDVDLVQKYLEKYYNLKNDGRQVEKRRNSGPVVEKLKQMQEFFGLKVTGKPDAETLKVMKQPRCGVPDVAQFVLTEGNPRWSQTHLTYRIENYTPDLPRADVDHAIEKAFQLWSNVTPLTFTKVSEGQADIMISFVRGDHRDNSPFDGPGGNLAHAFQPGPGIGGDAHFDEDERWTNNFREYNLHRVAAHELGHSLGLSHSTDIGALMYPSYTFSGDVQLAQDDIDGIQAIYGRSQNPVQPIGPQTPKACDSKLTFDAITTIRGEVMFFKDRFYMRTNPFYPEVELNFISVFWPQLPNGLEAAYEFADRDEVRFFKGNKYWAVQGQNVLHGYPKDIYSSFGFPRTVKHIDAALSEENTGKTYFFVANKYWRYDEYKRSMDPGYPKMIAHDFPGIGHKVDAVFMKDGFFYFFHGTRQYKFDPKTKRILTLQKANSWFNCRKN

SEQ ID NO: 979 - protein, 450 aa, Artificial Sequence
  MMP-1 variant E91G
FPATLETQEQDVDLVQKYLEKYYNLKNDGRQVEKRRNSGPVVEKLKQMQEFFGLKVTGKPDAETLKVMKQPRCGVPDVAQFVLTEGNPRWGQTHLTYRIENYTPDLPRADVDHAIEKAFQLWSNVTPLTFTKVSEGQADIMISFVRGDHRDNSPFDGPGGNLAHAFQPGPGIGGDAHFDEDERWTNNFREYNLHRVAAHELGHSLGLSHSTDIGALMYPSYTFSGDVQLAQDDIDGIQAIYGRSQNPVQPIGPQTPKACDSKLTFDAITTIRGEVMFFKDRFYMRTNPFYPEVELNFISVFWPQLPNGLEAAYEFADRDEVRFFKGNKYWAVQGQNVLHGYPKDIYSSFGFPRTVKHIDAALSEENTGKTYFFVANKYWRYDEYKRSMDPGYPKMIAHDFPGIGHKVDAVFMKDGFFYFFHGTRQYKFDPKTKRILTLQKANSWFNCRKN

SEQ ID NO: 980 - protein, 450 aa, Artificial Sequence
  MMP-1 variant E91F
FPATLETQEQDVDLVQKYLEKYYNLKNDGRQVEKRRNSGPVVEKLKQMQEFFGLKVTGKPDAETLKVMKQPRCGVPDVAQFVLTEGNPRWFQTHLTYRIENYTPDLPRADVDHAIEKAFQLWSNVTPLTFTKVSEGQADIMISFVRGDHRDNSPFDGPGGNLAHAFQPGPGIGGDAHFDEDERWTNNFREYNLHRVAAHELGHSLGLSHSTDIGALMYPSYTFSGDVQLAQDDIDGIQAIYGRSQNPVQPIGPQTPKACDSKLTFDAITTIRGEVMFFKDRFYMRTNPFYPEVELNFISVFWPQLPNGLEAAYEFADRDEVRFFKGNKYWAVQGQNVLHGYPKDIYSSFGFPRTVKHIDAALSEENTGKTYFFVANKYWRYDEYKRSMDPGYPKMIAHDFPGIGHKVDAVFMKDGFFYFFHGTRQYKFDPKTKRILTLQKANSWFNCRKN

SEQ ID NO: 981 - protein, 450 aa, Artificial Sequence
  MMP-1 variant E91M
FPATLETQEQDVDLVQKYLEKYYNLKNDGRQVEKRRNSGPVVEKLKQMQEFFGLKVTGKPDAETLKVMKQPRCGVPDVAQFVLTEGNPRWMQTHLTYRIENYTPDLPRADVDHAIEKAFQLWSNVTPLTFTKVSEGQADIMISFVRGDHRDNSPFDGPGGNLAHAFQPGPGIGGDAHFDEDERWTNNFREYNLHRVAAHELGHSLGLSHSTDIGALMYPSYTFSGDVQLAQDDIDGIQAIYGRSQNPVQPIGPQTPKACDSKLTFDAITTIRGEVMFFKDRFYMRTNPFYPEVELNFISVFWPQLPNGLEAAYEFADRDEVRFFKGNKYWAVQGQNVLHGYPKDIYSSFGFPRTVKHIDAALSEENTGKTYFFVANKYWRYDEYKRSMDPGYPKMIAHDFPGIGHKVDAVFMKDGFFYFFHGTRQYKFDPKTKRILTLQKANSWFNCRKN

SEQ ID NO: 982 - protein, 450 aa, Artificial Sequence
  MMP-1 variant E91W
FPATLETQEQDVDLVQKYLEKYYNLKNDGRQVEKRRNSGPVVEKLKQMQEFFGLKVTGKPDAETLKVMKQPRCGVPDVAQFVLTEGNPRWWQTHLTYRIENYTPDLPRADVDHAIEKAFQLWSNVTPLTFTKVSEGQADIMISFVRGDHRDNSPFDGPGGNLAHAFQPGPGIGGDAHFDEDERWTNNFREYNLHRVAAHELGHSLGLSHSTDIGALMYPSYTFSGDVQLAQDDIDGIQAIYGRSQNPVQPIGPQTPKACDSKLTFDAITTIRGEVMFFKDRFYMRTNPFYPEVELNFISVFWPQLPNGLEAAYEFADRDEVRFFKGNKYWAVQGQNVLHGYPKDIYSSFGFPRTVKHIDAALSEENTGKTYFFVANKYWRYDEYKRSMDPGYPKMIAHDFPGIGHKVDAVFMKDGFFYFFHGTRQYKFDPKTKRILTLQKANSWFNCRKN

SEQ ID NO: 983 - protein, 450 aa, Artificial Sequence
  MMP-1 variant E91I
FPATLETQEQDVDLVQKYLEKYYNLKNDGRQVEKRRNSGPVVEKLKQMQEFFGLKVTGKPDAETLKVMKQPRCGVPDVAQFVLTEGNPRWIQTHLTYRIENYTPDLPRADVDHAIEKAFQLWSNVTPLTFTKVSEGQADIMISFVRGDHRDNSPFDGPGGNLAHAFQPGPGIGGDAHFDEDERWTNNFREYNLHRVAAHELGHSLGLSHSTDIGALMYPSYTFSGDVQLAQDDIDGIQAIYGRSQNPVQPIGPQTPKACDSKLTFDAITTIRGEVMFFKDRFYMRTNPFYPEVELNFISVFWPQLPNGLEAAYEFADRDEVRFFKGNKYWAVQGQNVLHGYPKDIYSSFGFPRTVKHIDAALSEENTGKTYFFVANKYWRYDEYKRSMDPGYPKMIAHDFPGIGHKVDAVFMKDGFFYFFHGTRQYKFDPKTKRILTLQKANSWFNCRKN

SEQ ID NO: 984 - protein, 450 aa, Artificial Sequence
  MMP-1 variant E91V
FPATLETQEQDVDLVQKYLEKYYNLKNDGRQVEKRRNSGPVVEKLKQMQEFFGLKVTGKPDAETLKVMKQPRCGVPDVAQFVLTEGNPRWVQTHLTYRIENYTPDLPRADVDHAIEKAFQLWSNVTPLTFTKVSEGQADIMISFVRGDHRDNSPFDGPGGNLAHAFQPGPGIGGDAHFDEDERWTNNFREYNLHRVAAHELGHSLGLSHSTDIGALMYPSYTFSGDVQLAQDDIDGIQAIYGRSQNPVQPIGPQTPKACDSKLTFDAITTIRGEVMFFKDRFYMRTNPFYPEVELNFISVFWPQLPNGLEAAYEFADRDEVRFFKGNKYWAVQGQNVLHGYPKDIYSSFGFPRTVKHIDAALSEENTGKTYFFVANKYWRYDEYKRSMDPGYPKMIAHDFPGIGHKVDAVFMKDGFFYFFHGTRQYKFDPKTKRILTLQKANSWFNCRKN

SEQ ID NO: 985 - protein, 450 aa, Artificial Sequence
  MMP-1 variant E91L
FPATLETQEQDVDLVQKYLEKYYNLKNDGRQVEKRRNSGPVVEKLKQMQEFFGLKVTGKPDAETLKVMKQPRCGVPDVAQFVLTEGNPRWLQTHLTYRIENYTPDLPRADVDHAIEKAFQLWSNVTPLTFTKVSEGQADIMISFVRGDHRDNSPFDGPGGNLAHAFQPGPGIGGDAHFDEDERWTNNFREYNLHRVAAHELGHSLGLSHSTDIGALMYPSYTFSGDVQLAQDDIDGIQAIYGRSQNPVQPIGPQTPKACDSKLTFDAITTIRGEVMFFKDRFYMRTNPFYPEVELNFISVFWPQLPNGLEAAYEFADRDEVRFFKGNKYWAVQGQNVLHGYPKDIYSSFGFPRTVKHIDAALSEENTGKTYFFVANKYWRYDEYKRSMDPGYPKMIAHDFPGIGHKVDAVFMKDGFFYFFHGTRQYKFDPKTKRILTLQKANSWFNCRKN

SEQ ID NO: 986 - protein, 450 aa, Artificial Sequence
  MMP-1 variant E91A
FPATLETQEQDVDLVQKYLEKYYNLKNDGRQVEKRRNSGPVVEKLKQMQEFFGLKVTGKPDAETLKVMKQPRCGVPDVAQFVLTEGNPRWAQTHLTYRIENYTPDLPRADVDHAIEKAFQLWSNVTPLTFTKVSEGQADIMISFVRGDHRDNSPFDGPGGNLAHAFQPGPGIGGDAHFDEDERWTNNFREYNLHRVAAHELGHSLGLSHSTDIGALMYPSYTFSGDVQLAQDDIDGIQAIYGRSQNPVQPIGPQTPKACDSKLTFDAITTIRGEVMFFKDRFYMRTNPFYPEVELNFISVFWPQLPNGLEAAYEFADRDEVRFFKGNKYWAVQGQNVLHGYPKDIYSSFGFPRTVKHIDAALSEENTGKTYFFVANKYWRYDEYKRSMDPGYPKMIAHDFPGIGHKVDAVFMKDGFFYFFHGTRQYKFDPKTKRILTLQKANSWFNCRKN

SEQ ID NO: 987 - protein, 450 aa, Artificial Sequence
  MMP-1 variant E91P
FPATLETQEQDVDLVQKYLEKYYNLKNDGRQVEKRRNSGPVVEKLKQMQEFFGLKVTGKPDAETLKVMKQPRCGVPDVAQFVLTEGNPRWPQTHLTYRIENYTPDLPRADVDHAIEKAFQLWSNVTPLTFTKVSEGQADIMISFVRGDHRDNSPFDGPGGNLAHAFQPGPGIGGDAHFDEDERWTNNFREYNLHRVAAHELGHSLGLSHSTDIGALMYPSYTFSGDVQLAQDDIDGIQAIYGRSQNPVQPIGPQTPKACDSKLTFDAITTIRGEVMFFKDRFYMRTNPFYPEVELNFISVFWPQLPNGLEAAYEFADRDEVRFFKGNKYWAVQGQNVLHGYPKDIYSSFGFPRTVKHIDAALSEENTGKTYFFVANKYWRYDEYKRSMDPGYPKMIAHDFPGIGHKVDAVFMKDGFFYFFHGTRQYKFDPKTKRILTLQKANSWFNCRKN

SEQ ID NO: 988 - protein, 450 aa, Artificial Sequence
  MMP-1 variant Q92D
FPATLETQEQDVDLVQKYLEKYYNLKNDGRQVEKRRNSGPVVEKLKQMQEFFGLKVTGKPDAETLKVMKQPRCGVPDVAQFVLTEGNPRWEDTHLTYRIENYTPDLPRADVDHAIEKAFQLWSNVTPLTFTKVSEGQADIMISFVRGDHRDNSPFDGPGGNLAHAFQPGPGIGGDAHFDEDERWTNNFREYNLHRVAAHELGHSLGLSHSTDIGALMYPSYTFSGDVQLAQDDIDGIQAIYGRSQNPVQPIGPQTPKACDSKLTFDAITTIRGEVMFFKDRFYMRTNPFYPEVELNFISVFWPQLPNGLEAAYEFADRDEVRFFKGNKYWAVQGQNVLHGYPKDIYSSFGFPRTVKHIDAALSEENTGKTYFFVANKYWRYDEYKRSMDPGYPKMIAHDFPGIGHKVDAVFMKDGFFYFFHGTRQYKFDPKTKRILTLQKANSWFNCRKN

SEQ ID NO: 989 - protein, 450 aa, Artificial Sequence
  MMP-1 variant Q92E
FPATLETQEQDVDLVQKYLEKYYNLKNDGRQVEKRRNSGPVVEKLKQMQEFFGLKVTGKPDAETLKVMKQPRCGVPDVAQFVLTEGNPRWEETHLTYRIENYTPDLPRADVDHAIEKAFQLWSNVTPLTFTKVSEGQADIMISFVRGDHRDNSPFDGPGGNLAHAFQPGPGIGGDAHFDEDERWTNNFREYNLHRVAAHELGHSLGLSHSTDIGALMYPSYTFSGDVQLAQDDIDGIQAIYGRSQNPVQPIGPQTPKACDSKLTFDAITTIRGEVMFFKDRFYMRTNPFYPEVELNFISVFWPQLPNGLEAAYEFADRDEVRFFKGNKYWAVQGQNVLHGYPKDIYSSFGFPRTVKHIDAALSEENTGKTYFFVANKYWRYDEYKRSMDPGYPKMIAHDFPGIGHKVDAVFMKDGFFYFFHGTRQYKFDPKTKRILTLQKANSWFNCRKN

SEQ ID NO: 990 - protein, 450 aa, Artificial Sequence
  MMP-1 variant Q92H
FPATLETQEQDVDLVQKYLEKYYNLKNDGRQVEKRRNSGPVVEKLKQMQEFFGLKVTGKPDAETLKVMKQPRCGVPDVAQFVLTEGNPRWEHTHLTYRIENYTPDLPRADVDHAIEKAFQLWSNVTPLTFTKVSEGQADIMISFVRGDHRDNSPFDGPGGNLAHAFQPGPGIGGDAHFDEDERWTNNFREYNLHRVAAHELGHSLGLSHSTDIGALMYPSYTFSGDVQLAQDDIDGIQAIYGRSQNPVQPIGPQTPKACDSKLTFDAITTIRGEVMFFKDRFYMRTNPFYPEVELNFISVFWPQLPNGLEAAYEFADRDEVRFFKGNKYWAVQGQNVLHGYPKDIYSSFGFPRTVKHIDAALSEENTGKTYFFVANKYWRYDEYKRSMDPGYPKMIAHDFPGIGHKVDAVFMKDGFFYFFHGTRQYKFDPKTKRILTLQKANSWFNCRKN

SEQ ID NO: 991 - protein, 450 aa, Artificial Sequence
  MMP-1 variant Q92K
FPATLETQEQDVDLVQKYLEKYYNLKNDGRQVEKRRNSGPVVEKLKQMQEFFGLKVTGKPDAETLKVMKQPRCGVPDVAQFVLTEGNPRWEKTHLTYRIENYTPDLPRADVDHAIEKAFQLWSNVTPLTFTKVSEGQADIMISFVRGDHRDNSPFDGPGGNLAHAFQPGPGIGGDAHFDEDERWTNNFREYNLHRVAAHELGHSLGLSHSTDIGALMYPSYTFSGDVQLAQDDIDGIQAIYGRSQNPVQPIGPQTPKACDSKLTFDAITTIRGEVMFFKDRFYMRTNPFYPEVELNFISVFWPQLPNGLEAAYEFADRDEVRFFKGNKYWAVQGQNVLHGYPKDIYSSFGFPRTVKHIDAALSEENTGKTYFFVANKYWRYDEYKRSMDPGYPKMIAHDFPGIGHKVDAVFMKDGFFYFFHGTRQYKFDPKTKRILTLQKANSWFNCRKN

SEQ ID NO: 992 - protein, 450 aa, Artificial Sequence
  MMP-1 variant Q92R
FPATLETQEQDVDLVQKYLEKYYNLKNDGRQVEKRRNSGPVVEKLKQMQEFFGLKVTGKPDAETLKVMKQPRCGVPDVAQFVLTEGNPRWERTHLTYRIENYTPDLPRADVDHAIEKAFQLWSNVTPLTFTKVSEGQADIMISFVRGDHRDNSPFDGPGGNLAHAFQPGPGIGGDAHFDEDERWTNNFREYNLHRVAAHELGHSLGLSHSTDIGALMYPSYTFSGDVQLAQDDIDGIQAIYGRSQNPVQPIGPQTPKACDSKLTFDAITTIRGEVMFFKDRFYMRTNPFYPEVELNFISVFWPQLPNGLEAAYEFADRDEVRFFKGNKYWAVQGQNVLHGYPKDIYSSFGFPRTVKHIDAALSEENTGKTYFFVANKYWRYDEYKRSMDPGYPKMIAHDFPGIGHKVDAVFMKDGFFYFFHGTRQYKFDPKTKRILTLQKANSWFNCRKN

SEQ ID NO: 993 - protein, 450 aa, Artificial Sequence
  MMP-1 variant Q92C
FPATLETQEQDVDLVQKYLEKYYNLKNDGRQVEKRRNSGPVVEKLKQMQEFFGLKVTGKPDAETLKVMKQPRCGVPDVAQFVLTEGNPRWECTHLTYRIENYTPDLPRADVDHAIEKAFQLWSNVTPLTFTKVSEGQADIMISFVRGDHRDNSPFDGPGGNLAHAFQPGPGIGGDAHFDEDERWTNNFREYNLHRVAAHELGHSLGLSHSTDIGALMYPSYTFSGDVQLAQDDIDGIQAIYGRSQNPVQPIGPQTPKACDSKLTFDAITTIRGEVMFFKDRFYMRTNPFYPEVELNFISVFWPQLPNGLEAAYEFADRDEVRFFKGNKYWAVQGQNVLHGYPKDIYSSFGFPRTVKHIDAALSEENTGKTYFFVANKYWRYDEYKRSMDPGYPKMIAHDFPGIGHKVDAVFMKDGFFYFFHGTRQYKFDPKTKRILTLQKANSWFNCRKN

SEQ ID NO: 994 - protein, 450 aa, Artificial Sequence
  MMP-1 variant Q92N
FPATLETQEQDVDLVQKYLEKYYNLKNDGRQVEKRRNSGPVVEKLKQMQEFFGLKVTGKPDAETLKVMKQPRCGVPDVAQFVLTEGNPRWENTHLTYRIENYTPDLPRADVDHAIEKAFQLWSNVTPLTFTKVSEGQADIMISFVRGDHRDNSPFDGPGGNLAHAFQPGPGIGGDAHFDEDERWTNNFREYNLHRVAAHELGHSLGLSHSTDIGALMYPSYTFSGDVQLAQDDIDGIQAIYGRSQNPVQPIGPQTPKACDSKLTFDAITTIRGEVMFFKDRFYMRTNPFYPEVELNFISVFWPQLPNGLEAAYEFADRDEVRFFKGNKYWAVQGQNVLHGYPKDIYSSFGFPRTVKHIDAALSEENTGKTYFFVANKYWRYDEYKRSMDPGYPKMIAHDFPGIGHKVDAVFMKDGFFYFFHGTRQYKFDPKTKRILTLQKANSWFNCRKN

SEQ ID NO: 995 - protein, 450 aa, Artificial Sequence
  MMP-1 variant Q92T
FPATLETQEQDVDLVQKYLEKYYNLKNDGRQVEKRRNSGPVVEKLKQMQEFFGLKVTGKPDAETLKVMKQPRCGVPDVAQFVLTEGNPRWETTHLTYRIENYTPDLPRADVDHAIEKAFQLWSNVTPLTFTKVSEGQADIMISFVRGDHRDNSPFDGPGGNLAHAFQPGPGIGGDAHFDEDERWTNNFREYNLHRVAAHELGHSLGLSHSTDIGALMYPSYTFSGDVQLAQDDIDGIQAIYGRSQNPVQPIGPQTPKACDSKLTFDAITTIRGEVMFFKDRFYMRTNPFYPEVELNFISVFWPQLPNGLEAAYEFADRDEVRFFKGNKYWAVQGQNVLHGYPKDIYSSFGFPRTVKHIDAALSEENTGKTYFFVANKYWRYDEYKRSMDPGYPKMIAHDFPGIGHKVDAVFMKDGFFYFFHGTRQYKFDPKTKRILTLQKANSWFNCRKN

SEQ ID NO: 996 - protein, 450 aa, Artificial Sequence
  MMP-1 variant Q92Y
FPATLETQEQDVDLVQKYLEKYYNLKNDGRQVEKRRNSGPVVEKLKQMQEFFGLKVTGKPDAETLKVMKQPRCGVPDVAQFVLTEGNPRWEYTHLTYRIENYTPDLPRADVDHAIEKAFQLWSNVTPLTFTKVSEGQADIMISFVRGDHRDNSPFDGPGGNLAHAFQPGPGIGGDAHFDEDERWTNNFREYNLHRVAAHELGHSLGLSHSTDIGALMYPSYTFSGDVQLAQDDIDGIQAIYGRSQNPVQPIGPQTPKACDSKLTFDAITTIRGEVMFFKDRFYMRTNPFYPEVELNFISVFWPQLPNGLEAAYEFADRDEVRFFKGNKYWAVQGQNVLHGYPKDIYSSFGFPRTVKHIDAALSEENTGKTYFFVANKYWRYDEYKRSMDPGYPKMIAHDFPGIGHKVDAVFMKDGFFYFFHGTRQYKFDPKTKRILTLQKANSWFNCRKN

SEQ ID NO: 997 - protein, 450 aa, Artificial Sequence
  MMP-1 variant Q92S
FPATLETQEQDVDLVQKYLEKYYNLKNDGRQVEKRRNSGPVVEKLKQMQEFFGLKVTGKPDAETLKVMKQPRCGVPDVAQFVLTEGNPRWESTHLTYRIENYTPDLPRADVDHAIEKAFQLWSNVTPLTFTKVSEGQADIMISFVRGDHRDNSPFDGPGGNLAHAFQPGPGIGGDAHFDEDERWTNNFREYNLHRVAAHELGHSLGLSHSTDIGALMYPSYTFSGDVQLAQDDIDGIQAIYGRSQNPVQPIGPQTPKACDSKLTFDAITTIRGEVMFFKDRFYMRTNPFYPEVELNFISVFWPQLPNGLEAAYEFADRDEVRFFKGNKYWAVQGQNVLHGYPKDIYSSFGFPRTVKHIDAALSEENTGKTYFFVANKYWRYDEYKRSMDPGYPKMIAHDFPGIGHKVDAVFMKDGFFYFFHGTRQYKFDPKTKRILTLQKANSWFNCRKN

SEQ ID NO: 998 - protein, 450 aa, Artificial Sequence
  MMP-1 variant Q92G
FPATLETQEQDVDLVQKYLEKYYNLKNDGRQVEKRRNSGPVVEKLKQMQEFFGLKVTGKPDAETLKVMKQPRCGVPDVAQFVLTEGNPRWEGTHLTYRIENYTPDLPRADVDHAIEKAFQLWSNVTPLTFTKVSEGQADIMISFVRGDHRDNSPFDGPGGNLAHAFQPGPGIGGDAHFDEDERWTNNFREYNLHRVAAHELGHSLGLSHSTDIGALMYPSYTFSGDVQLAQDDIDGIQAIYGRSQNPVQPIGPQTPKACDSKLTFDAITTIRGEVMFFKDRFYMRTNPFYPEVELNFISVFWPQLPNGLEAAYEFADRDEVRFFKGNKYWAVQGQNVLHGYPKDIYSSFGFPRTVKHIDAALSEENTGKTYFFVANKYWRYDEYKRSMDPGYPKMIAHDFPGIGHKVDAVFMKDGFFYFFHGTRQYKFDPKTKRILTLQKANSWFNCRKN

SEQ ID NO: 999 - protein, 450 aa, Artificial Sequence
  MMP-1 variant Q92F
FPATLETQEQDVDLVQKYLEKYYNLKNDGRQVEKRRNSGPVVEKLKQMQEFFGLKVTGKPDAETLKVMKQPRCGVPDVAQFVLTEGNPRWEFTHLTYRIENYTPDLPRADVDHAIEKAFQLWSNVTPLTFTKVSEGQADIMISFVRGDHRDNSPFDGPGGNLAHAFQPGPGIGGDAHFDEDERWTNNFREYNLHRVAAHELGHSLGLSHSTDIGALMYPSYTFSGDVQLAQDDIDGIQAIYGRSQNPVQPIGPQTPKACDSKLTFDAITTIRGEVMFFKDRFYMRTNPFYPEVELNFISVFWPQLPNGLEAAYEFADRDEVRFFKGNKYWAVQGQNVLHGYPKDIYSSFGFPRTVKHIDAALSEENTGKTYFFVANKYWRYDEYKRSMDPGYPKMIAHDFPGIGHKVDAVFMKDGFFYFFHGTRQYKFDPKTKRILTLQKANSWFNCRKN

SEQ ID NO: 1000 - protein, 450 aa, Artificial Sequence
  MMP-1 variant Q92M
FPATLETQEQDVDLVQKYLEKYYNLKNDGRQVEKRRNSGPVVEKLKQMQEFFGLKVTGKPDAETLKVMKQPRCGVPDVAQFVLTEGNPRWEMTHLTYRIENYTPDLPRADVDHAIEKAFQLWSNVTPLTFTKVSEGQADIMISFVRGDHRDNSPFDGPGGNLAHAFQPGPGIGGDAHFDEDERWTNNFREYNLHRVAAHELGHSLGLSHSTDIGALMYPSYTFSGDVQLAQDDIDGIQAIYGRSQNPVQPIGPQTPKACDSKLTFDAITTIRGEVMFFKDRFYMRTNPFYPEVELNFISVFWPQLPNGLEAAYEFADRDEVRFFKGNKYWAVQGQNVLHGYPKDIYSSFGFPRTVKHIDAALSEENTGKTYFFVANKYWRYDEYKRSMDPGYPKMIAHDFPGIGHKVDAVFMKDGFFYFFHGTRQYKFDPKTKRILTLQKANSWFNCRKN

SEQ ID NO: 1001 - protein, 450 aa, Artificial Sequence
  MMP-1 variant Q92W
FPATLETQEQDVDLVQKYLEKYYNLKNDGRQVEKRRNSGPVVEKLKQMQEFFGLKVTGKPDAETLKVMKQPRCGVPDVAQFVLTEGNPRWEWTHLTYRIENYTPDLPRADVDHAIEKAFQLWSNVTPLTFTKVSEGQADIMISFVRGDHRDNSPFDGPGGNLAHAFQPGPGIGGDAHFDEDERWTNNFREYNLHRVAAHELGHSLGLSHSTDIGALMYPSYTFSGDVQLAQDDIDGIQAIYGRSQNPVQPIGPQTPKACDSKLTFDAITTIRGEVMFFKDRFYMRTNPFYPEVELNFISVFWPQLPNGLEAAYEFADRDEVRFFKGNKYWAVQGQNVLHGYPKDIYSSFGFPRTVKHIDAALSEENTGKTYFFVANKYWRYDEYKRSMDPGYPKMIAHDFPGIGHKVDAVFMKDGFFYFFHGTRQYKFDPKTKRILTLQKANSWFNCRKN

SEQ ID NO: 1002 - protein, 450 aa, Artificial Sequence
  MMP-1 variant Q92I
FPATLETQEQDVDLVQKYLEKYYNLKNDGRQVEKRRNSGPVVEKLKQMQEFFGLKVTGKPDAETLKVMKQPRCGVPDVAQFVLTEGNPRWEITHLTYRIENYTPDLPRADVDHAIEKAFQLWSNVTPLTFTKVSEGQADIMISFVRGDHRDNSPFDGPGGNLAHAFQPGPGIGGDAHFDEDERWTNNFREYNLHRVAAHELGHSLGLSHSTDIGALMYPSYTFSGDVQLAQDDIDGIQAIYGRSQNPVQPIGPQTPKACDSKLTFDAITTIRGEVMFFKDRFYMRTNPFYPEVELNFISVFWPQLPNGLEAAYEFADRDEVRFFKGNKYWAVQGQNVLHGYPKDIYSSFGFPRTVKHIDAALSEENTGKTYFFVANKYWRYDEYKRSMDPGYPKMIAHDFPGIGHKVDAVFMKDGFFYFFHGTRQYKFDPKTKRILTLQKANSWFNCRKN

SEQ ID NO: 1003 - protein, 450 aa, Artificial Sequence
  MMP-1 variant Q92V
FPATLETQEQDVDLVQKYLEKYYNLKNDGRQVEKRRNSGPVVEKLKQMQEFFGLKVTGKPDAETLKVMKQPRCGVPDVAQFVLTEGNPRWEVTHLTYRIENYTPDLPRADVDHAIEKAFQLWSNVTPLTFTKVSEGQADIMISFVRGDHRDNSPFDGPGGNLAHAFQPGPGIGGDAHFDEDERWTNNFREYNLHRVAAHELGHSLGLSHSTDIGALMYPSYTFSGDVQLAQDDIDGIQAIYGRSQNPVQPIGPQTPKACDSKLTFDAITTIRGEVMFFKDRFYMRTNPFYPEVELNFISVFWPQLPNGLEAAYEFADRDEVRFFKGNKYWAVQGQNVLHGYPKDIYSSFGFPRTVKHIDAALSEENTGKTYFFVANKYWRYDEYKRSMDPGYPKMIAHDFPGIGHKVDAVFMKDGFFYFFHGTRQYKFDPKTKRILTLQKANSWFNCRKN

SEQ ID NO: 1004 - protein, 450 aa, Artificial Sequence
  MMP-1 variant Q92L
FPATLETQEQDVDLVQKYLEKYYNLKNDGRQVEKRRNSGPVVEKLKQMQEFFGLKVTGKPDAETLKVMKQPRCGVPDVAQFVLTEGNPRWELTHLTYRIENYTPDLPRADVDHAIEKAFQLWSNVTPLTFTKVSEGQADIMISFVRGDHRDNSPFDGPGGNLAHAFQPGPGIGGDAHFDEDERWTNNFREYNLHRVAAHELGHSLGLSHSTDIGALMYPSYTFSGDVQLAQDDIDGIQAIYGRSQNPVQPIGPQTPKACDSKLTFDAITTIRGEVMFFKDRFYMRTNPFYPEVELNFISVFWPQLPNGLEAAYEFADRDEVRFFKGNKYWAVQGQNVLHGYPKDIYSSFGFPRTVKHIDAALSEENTGKTYFFVANKYWRYDEYKRSMDPGYPKMIAHDFPGIGHKVDAVFMKDGFFYFFHGTRQYKFDPKTKRILTLQKANSWFNCRKN

SEQ ID NO: 1005 - protein, 450 aa, Artificial Sequence
  MMP-1 variant Q92A
FPATLETQEQDVDLVQKYLEKYYNLKNDGRQVEKRRNSGPVVEKLKQMQEFFGLKVTGKPDAETLKVMKQPRCGVPDVAQFVLTEGNPRWEATHLTYRIENYTPDLPRADVDHAIEKAFQLWSNVTPLTFTKVSEGQADIMISFVRGDHRDNSPFDGPGGNLAHAFQPGPGIGGDAHFDEDERWTNNFREYNLHRVAAHELGHSLGLSHSTDIGALMYPSYTFSGDVQLAQDDIDGIQAIYGRSQNPVQPIGPQTPKACDSKLTFDAITTIRGEVMFFKDRFYMRTNPFYPEVELNFISVFWPQLPNGLEAAYEFADRDEVRFFKGNKYWAVQGQNVLHGYPKDIYSSFGFPRTVKHIDAALSEENTGKTYFFVANKYWRYDEYKRSMDPGYPKMIAHDFPGIGHKVDAVFMKDGFFYFFHGTRQYKFDPKTKRILTLQKANSWFNCRKN

SEQ ID NO: 1006 - protein, 450 aa, Artificial Sequence
  MMP-1 variant Q92P
FPATLETQEQDVDLVQKYLEKYYNLKNDGRQVEKRRNSGPVVEKLKQMQEFFGLKVTGKPDAETLKVMKQPRCGVPDVAQFVLTEGNPRWEPTHLTYRIENYTPDLPRADVDHAIEKAFQLWSNVTPLTFTKVSEGQADIMISFVRGDHRDNSPFDGPGGNLAHAFQPGPGIGGDAHFDEDERWTNNFREYNLHRVAAHELGHSLGLSHSTDIGALMYPSYTFSGDVQLAQDDIDGIQAIYGRSQNPVQPIGPQTPKACDSKLTFDAITTIRGEVMFFKDRFYMRTNPFYPEVELNFISVFWPQLPNGLEAAYEFADRDEVRFFKGNKYWAVQGQNVLHGYPKDIYSSFGFPRTVKHIDAALSEENTGKTYFFVANKYWRYDEYKRSMDPGYPKMIAHDFPGIGHKVDAVFMKDGFFYFFHGTRQYKFDPKTKRILTLQKANSWFNCRKN

SEQ ID NO: 1007 - protein, 450 aa, Artificial Sequence
  MMP-1 variant T93D
FPATLETQEQDVDLVQKYLEKYYNLKNDGRQVEKRRNSGPVVEKLKQMQEFFGLKVTGKPDAETLKVMKQPRCGVPDVAQFVLTEGNPRWEQDHLTYRIENYTPDLPRADVDHAIEKAFQLWSNVTPLTFTKVSEGQADIMISFVRGDHRDNSPFDGPGGNLAHAFQPGPGIGGDAHFDEDERWTNNFREYNLHRVAAHELGHSLGLSHSTDIGALMYPSYTFSGDVQLAQDDIDGIQAIYGRSQNPVQPIGPQTPKACDSKLTFDAITTIRGEVMFFKDRFYMRTNPFYPEVELNFISVFWPQLPNGLEAAYEFADRDEVRFFKGNKYWAVQGQNVLHGYPKDIYSSFGFPRTVKHIDAALSEENTGKTYFFVANKYWRYDEYKRSMDPGYPKMIAHDFPGIGHKVDAVFMKDGFFYFFHGTRQYKFDPKTKRILTLQKANSWFNCRKN

SEQ ID NO: 1008 - protein, 450 aa, Artificial Sequence
  MMP-1 variant T93E
FPATLETQEQDVDLVQKYLEKYYNLKNDGRQVEKRRNSGPVVEKLKQMQEFFGLKVTGKPDAETLKVMKQPRCGVPDVAQFVLTEGNPRWEQEHLTYRIENYTPDLPRADVDHAIEKAFQLWSNVTPLTFTKVSEGQADIMISFVRGDHRDNSPFDGPGGNLAHAFQPGPGIGGDAHFDEDERWTNNFREYNLHRVAAHELGHSLGLSHSTDIGALMYPSYTFSGDVQLAQDDIDGIQAIYGRSQNPVQPIGPQTPKACDSKLTFDAITTIRGEVMFFKDRFYMRTNPFYPEVELNFISVFWPQLPNGLEAAYEFADRDEVRFFKGNKYWAVQGQNVLHGYPKDIYSSFGFPRTVKHIDAALSEENTGKTYFFVANKYWRYDEYKRSMDPGYPKMIAHDFPGIGHKVDAVFMKDGFFYFFHGTRQYKFDPKTKRILTLQKANSWFNCRKN

SEQ ID NO: 1009 - protein, 450 aa, Artificial Sequence
  MMP-1 variant T93H
FPATLETQEQDVDLVQKYLEKYYNLKNDGRQVEKRRNSGPVVEKLKQMQEFFGLKVTGKPDAETLKVMKQPRCGVPDVAQFVLTEGNPRWEQHHLTYRIENYTPDLPRADVDHAIEKAFQLWSNVTPLTFTKVSEGQADIMISFVRGDHRDNSPFDGPGGNLAHAFQPGPGIGGDAHFDEDERWTNNFREYNLHRVAAHELGHSLGLSHSTDIGALMYPSYTFSGDVQLAQDDIDGIQAIYGRSQNPVQPIGPQTPKACDSKLTFDAITTIRGEVMFFKDRFYMRTNPFYPEVELNFISVFWPQLPNGLEAAYEFADRDEVRFFKGNKYWAVQGQNVLHGYPKDIYSSFGFPRTVKHIDAALSEENTGKTYFFVANKYWRYDEYKRSMDPGYPKMIAHDFPGIGHKVDAVFMKDGFFYFFHGTRQYKFDPKTKRILTLQKANSWFNCRKN

SEQ ID NO: 1010 - protein, 450 aa, Artificial Sequence
  MMP-1 variant T93K
FPATLETQEQDVDLVQKYLEKYYNLKNDGRQVEKRRNSGPVVEKLKQMQEFFGLKVTGKPDAETLKVMKQPRCGVPDVAQFVLTEGNPRWEQKHLTYRIENYTPDLPRADVDHAIEKAFQLWSNVTPLTFTKVSEGQADIMISFVRGDHRDNSPFDGPGGNLAHAFQPGPGIGGDAHFDEDERWTNNFREYNLHRVAAHELGHSLGLSHSTDIGALMYPSYTFSGDVQLAQDDIDGIQAIYGRSQNPVQPIGPQTPKACDSKLTFDAITTIRGEVMFFKDRFYMRTNPFYPEVELNFISVFWPQLPNGLEAAYEFADRDEVRFFKGNKYWAVQGQNVLHGYPKDIYSSFGFPRTVKHIDAALSEENTGKTYFFVANKYWRYDEYKRSMDPGYPKMIAHDFPGIGHKVDAVFMKDGFFYFFHGTRQYKFDPKTKRILTLQKANSWFNCRKN

SEQ ID NO: 1011 - protein, 450 aa, Artificial Sequence
  MMP-1 variant T93R
FPATLETQEQDVDLVQKYLEKYYNLKNDGRQVEKRRNSGPVVEKLKQMQEFFGLKVTGKPDAETLKVMKQPRCGVPDVAQFVLTEGNPRWEQRHLTYRIENYTPDLPRADVDHAIEKAFQLWSNVTPLTFTKVSEGQADIMISFVRGDHRDNSPFDGPGGNLAHAFQPGPGIGGDAHFDEDERWTNNFREYNLHRVAAHELGHSLGLSHSTDIGALMYPSYTFSGDVQLAQDDIDGIQAIYGRSQNPVQPIGPQTPKACDSKLTFDAITTIRGEVMFFKDRFYMRTNPFYPEVELNFISVFWPQLPNGLEAAYEFADRDEVRFFKGNKYWAVQGQNVLHGYPKDIYSSFGFPRTVKHIDAALSEENTGKTYFFVANKYWRYDEYKRSMDPGYPKMIAHDFPGIGHKVDAVFMKDGFFYFFHGTRQYKFDPKTKRILTLQKANSWFNCRKN

SEQ ID NO: 1012 - protein, 450 aa, Artificial Sequence
  MMP-1 variant T93C
FPATLETQEQDVDLVQKYLEKYYNLKNDGRQVEKRRNSGPVVEKLKQMQEFFGLKVTGKPDAETLKVMKQPRCGVPDVAQFVLTEGNPRWEQCHLTYRIENYTPDLPRADVDHAIEKAFQLWSNVTPLTFTKVSEGQADIMISFVRGDHRDNSPFDGPGGNLAHAFQPGPGIGGDAHFDEDERWTNNFREYNLHRVAAHELGHSLGLSHSTDIGALMYPSYTFSGDVQLAQDDIDGIQAIYGRSQNPVQPIGPQTPKACDSKLTFDAITTIRGEVMFFKDRFYMRTNPFYPEVELNFISVFWPQLPNGLEAAYEFADRDEVRFFKGNKYWAVQGQNVLHGYPKDIYSSFGFPRTVKHIDAALSEENTGKTYFFVANKYWRYDEYKRSMDPGYPKMIAHDFPGIGHKVDAVFMKDGFFYFFHGTRQYKFDPKTKRILTLQKANSWFNCRKN

SEQ ID NO: 1013 - protein, 450 aa, Artificial Sequence
  MMP-1 variant T93N
FPATLETQEQDVDLVQKYLEKYYNLKNDGRQVEKRRNSGPVVEKLKQMQEFFGLKVTGKPDAETLKVMKQPRCGVPDVAQFVLTEGNPRWEQNHLTYRIENYTPDLPRADVDHAIEKAFQLWSNVTPLTFTKVSEGQADIMISFVRGDHRDNSPFDGPGGNLAHAFQPGPGIGGDAHFDEDERWTNNFREYNLHRVAAHELGHSLGLSHSTDIGALMYPSYTFSGDVQLAQDDIDGIQAIYGRSQNPVQPIGPQTPKACDSKLTFDAITTIRGEVMFFKDRFYMRTNPFYPEVELNFISVFWPQLPNGLEAAYEFADRDEVRFFKGNKYWAVQGQNVLHGYPKDIYSSFGFPRTVKHIDAALSEENTGKTYFFVANKYWRYDEYKRSMDPGYPKMIAHDFPGIGHKVDAVFMKDGFFYFFHGTRQYKFDPKTKRILTLQKANSWFNCRKN

SEQ ID NO: 1014 - protein, 450 aa, Artificial Sequence
  MMP-1 variant T93Q
FPATLETQEQDVDLVQKYLEKYYNLKNDGRQVEKRRNSGPVVEKLKQMQEFFGLKVTGKPDAETLKVMKQPRCGVPDVAQFVLTEGNPRWEQQHLTYRIENYTPDLPRADVDHAIEKAFQLWSNVTPLTFTKVSEGQADIMISFVRGDHRDNSPFDGPGGNLAHAFQPGPGIGGDAHFDEDERWTNNFREYNLHRVAAHELGHSLGLSHSTDIGALMYPSYTFSGDVQLAQDDIDGIQAIYGRSQNPVQPIGPQTPKACDSKLTFDAITTIRGEVMFFKDRFYMRTNPFYPEVELNFISVFWPQLPNGLEAAYEFADRDEVRFFKGNKYWAVQGQNVLHGYPKDIYSSFGFPRTVKHIDAALSEENTGKTYFFVANKYWRYDEYKRSMDPGYPKMIAHDFPGIGHKVDAVFMKDGFFYFFHGTRQYKFDPKTKRILTLQKANSWFNCRKN

SEQ ID NO: 1015 - protein, 450 aa, Artificial Sequence
  MMP-1 variant T93Y
FPATLETQEQDVDLVQKYLEKYYNLKNDGRQVEKRRNSGPVVEKLKQMQEFFGLKVTGKPDAETLKVMKQPRCGVPDVAQFVLTEGNPRWEQYHLTYRIENYTPDLPRADVDHAIEKAFQLWSNVTPLTFTKVSEGQADIMISFVRGDHRDNSPFDGPGGNLAHAFQPGPGIGGDAHFDEDERWTNNFREYNLHRVAAHELGHSLGLSHSTDIGALMYPSYTFSGDVQLAQDDIDGIQAIYGRSQNPVQPIGPQTPKACDSKLTFDAITTIRGEVMFFKDRFYMRTNPFYPEVELNFISVFWPQLPNGLEAAYEFADRDEVRFFKGNKYWAVQGQNVLHGYPKDIYSSFGFPRTVKHIDAALSEENTGKTYFFVANKYWRYDEYKRSMDPGYPKMIAHDFPGIGHKVDAVFMKDGFFYFFHGTRQYKFDPKTKRILTLQKANSWFNCRKN

SEQ ID NO: 1016 - protein, 450 aa, Artificial Sequence
  MMP-1 variant T93S
FPATLETQEQDVDLVQKYLEKYYNLKNDGRQVEKRRNSGPVVEKLKQMQEFFGLKVTGKPDAETLKVMKQPRCGVPDVAQFVLTEGNPRWEQSHLTYRIENYTPDLPRADVDHAIEKAFQLWSNVTPLTFTKVSEGQADIMISFVRGDHRDNSPFDGPGGNLAHAFQPGPGIGGDAHFDEDERWTNNFREYNLHRVAAHELGHSLGLSHSTDIGALMYPSYTFSGDVQLAQDDIDGIQAIYGRSQNPVQPIGPQTPKACDSKLTFDAITTIRGEVMFFKDRFYMRTNPFYPEVELNFISVFWPQLPNGLEAAYEFADRDEVRFFKGNKYWAVQGQNVLHGYPKDIYSSFGFPRTVKHIDAALSEENTGKTYFFVANKYWRYDEYKRSMDPGYPKMIAHDFPGIGHKVDAVFMKDGFFYFFHGTRQYKFDPKTKRILTLQKANSWFNCRKN

SEQ ID NO: 1017 - protein, 450 aa, Artificial Sequence
  MMP-1 variant T93G
FPATLETQEQDVDLVQKYLEKYYNLKNDGRQVEKRRNSGPVVEKLKQMQEFFGLKVTGKPDAETLKVMKQPRCGVPDVAQFVLTEGNPRWEQGHLTYRIENYTPDLPRADVDHAIEKAFQLWSNVTPLTFTKVSEGQADIMISFVRGDHRDNSPFDGPGGNLAHAFQPGPGIGGDAHFDEDERWTNNFREYNLHRVAAHELGHSLGLSHSTDIGALMYPSYTFSGDVQLAQDDIDGIQAIYGRSQNPVQPIGPQTPKACDSKLTFDAITTIRGEVMFFKDRFYMRTNPFYPEVELNFISVFWPQLPNGLEAAYEFADRDEVRFFKGNKYWAVQGQNVLHGYPKDIYSSFGFPRTVKHIDAALSEENTGKTYFFVANKYWRYDEYKRSMDPGYPKMIAHDFPGIGHKVDAVFMKDGFFYFFHGTRQYKFDPKTKRILTLQKANSWFNCRKN

SEQ ID NO: 1018 - protein, 450 aa, Artificial Sequence
  MMP-1 variant T93F
FPATLETQEQDVDLVQKYLEKYYNLKNDGRQVEKRRNSGPVVEKLKQMQEFFGLKVTGKPDAETLKVMKQPRCGVPDVAQFVLTEGNPRWEQFHLTYRIENYTPDLPRADVDHAIEKAFQLWSNVTPLTFTKVSEGQADIMISFVRGDHRDNSPFDGPGGNLAHAFQPGPGIGGDAHFDEDERWTNNFREYNLHRVAAHELGHSLGLSHSTDIGALMYPSYTFSGDVQLAQDDIDGIQAIYGRSQNPVQPIGPQTPKACDSKLTFDAITTIRGEVMFFKDRFYMRTNPFYPEVELNFISVFWPQLPNGLEAAYEFADRDEVRFFKGNKYWAVQGQNVLHGYPKDIYSSFGFPRTVKHIDAALSEENTGKTYFFVANKYWRYDEYKRSMDPGYPKMIAHDFPGIGHKVDAVFMKDGFFYFFHGTRQYKFDPKTKRILTLQKANSWFNCRKN

SEQ ID NO: 1019 - protein, 450 aa, Artificial Sequence
  MMP-1 variant T93M
FPATLETQEQDVDLVQKYLEKYYNLKNDGRQVEKRRNSGPVVEKLKQMQEFFGLKVTGKPDAETLKVMKQPRCGVPDVAQFVLTEGNPRWEQMHLTYRIENYTPDLPRADVDHAIEKAFQLWSNVTPLTFTKVSEGQADIMISFVRGDHRDNSPFDGPGGNLAHAFQPGPGIGGDAHFDEDERWTNNFREYNLHRVAAHELGHSLGLSHSTDIGALMYPSYTFSGDVQLAQDDIDGIQAIYGRSQNPVQPIGPQTPKACDSKLTFDAITTIRGEVMFFKDRFYMRTNPFYPEVELNFISVFWPQLPNGLEAAYEFADRDEVRFFKGNKYWAVQGQNVLHGYPKDIYSSFGFPRTVKHIDAALSEENTGKTYFFVANKYWRYDEYKRSMDPGYPKMIAHDFPGIGHKVDAVFMKDGFFYFFHGTRQYKFDPKTKRILTLQKANSWFNCRKN

SEQ ID NO: 1020 - protein, 450 aa, Artificial Sequence
  MMP-1 variant T93W
FPATLETQEQDVDLVQKYLEKYYNLKNDGRQVEKRRNSGPVVEKLKQMQEFFGLKVTGKPDAETLKVMKQPRCGVPDVAQFVLTEGNPRWEQWHLTYRIENYTPDLPRADVDHAIEKAFQLWSNVTPLTFTKVSEGQADIMISFVRGDHRDNSPFDGPGGNLAHAFQPGPGIGGDAHFDEDERWTNNFREYNLHRVAAHELGHSLGLSHSTDIGALMYPSYTFSGDVQLAQDDIDGIQAIYGRSQNPVQPIGPQTPKACDSKLTFDAITTIRGEVMFFKDRFYMRTNPFYPEVELNFISVFWPQLPNGLEAAYEFADRDEVRFFKGNKYWAVQGQNVLHGYPKDIYSSFGFPRTVKHIDAALSEENTGKTYFFVANKYWRYDEYKRSMDPGYPKMIAHDFPGIGHKVDAVFMKDGFFYFFHGTRQYKFDPKTKRILTLQKANSWFNCRKN

SEQ ID NO: 1021 - protein, 450 aa, Artificial Sequence
  MMP-1 variant T93I
FPATLETQEQDVDLVQKYLEKYYNLKNDGRQVEKRRNSGPVVEKLKQMQEFFGLKVTGKPDAETLKVMKQPRCGVPDVAQFVLTEGNPRWEQIHLTYRIENYTPDLPRADVDHAIEKAFQLWSNVTPLTFTKVSEGQADIMISFVRGDHRDNSPFDGPGGNLAHAFQPGPGIGGDAHFDEDERWTNNFREYNLHRVAAHELGHSLGLSHSTDIGALMYPSYTFSGDVQLAQDDIDGIQAIYGRSQNPVQPIGPQTPKACDSKLTFDAITTIRGEVMFFKDRFYMRTNPFYPEVELNFISVFWPQLPNGLEAAYEFADRDEVRFFKGNKYWAVQGQNVLHGYPKDIYSSFGFPRTVKHIDAALSEENTGKTYFFVANKYWRYDEYKRSMDPGYPKMIAHDFPGIGHKVDAVFMKDGFFYFFHGTRQYKFDPKTKRILTLQKANSWFNCRKN

SEQ ID NO: 1022 - protein, 450 aa, Artificial Sequence
  MMP-1 variant T93V
FPATLETQEQDVDLVQKYLEKYYNLKNDGRQVEKRRNSGPVVEKLKQMQEFFGLKVTGKPDAETLKVMKQPRCGVPDVAQFVLTEGNPRWEQVHLTYRIENYTPDLPRADVDHAIEKAFQLWSNVTPLTFTKVSEGQADIMISFVRGDHRDNSPFDGPGGNLAHAFQPGPGIGGDAHFDEDERWTNNFREYNLHRVAAHELGHSLGLSHSTDIGALMYPSYTFSGDVQLAQDDIDGIQAIYGRSQNPVQPIGPQTPKACDSKLTFDAITTIRGEVMFFKDRFYMRTNPFYPEVELNFISVFWPQLPNGLEAAYEFADRDEVRFFKGNKYWAVQGQNVLHGYPKDIYSSFGFPRTVKHIDAALSEENTGKTYFFVANKYWRYDEYKRSMDPGYPKMIAHDFPGIGHKVDAVFMKDGFFYFFHGTRQYKFDPKTKRILTLQKANSWFNCRKN

SEQ ID NO: 1023 - protein, 450 aa, Artificial Sequence
  MMP-1 variant T93L
FPATLETQEQDVDLVQKYLEKYYNLKNDGRQVEKRRNSGPVVEKLKQMQEFFGLKVTGKPDAETLKVMKQPRCGVPDVAQFVLTEGNPRWEQLHLTYRIENYTPDLPRADVDHAIEKAFQLWSNVTPLTFTKVSEGQADIMISFVRGDHRDNSPFDGPGGNLAHAFQPGPGIGGDAHFDEDERWTNNFREYNLHRVAAHELGHSLGLSHSTDIGALMYPSYTFSGDVQLAQDDIDGIQAIYGRSQNPVQPIGPQTPKACDSKLTFDAITTIRGEVMFFKDRFYMRTNPFYPEVELNFISVFWPQLPNGLEAAYEFADRDEVRFFKGNKYWAVQGQNVLHGYPKDIYSSFGFPRTVKHIDAALSEENTGKTYFFVANKYWRYDEYKRSMDPGYPKMIAHDFPGIGHKVDAVFMKDGFFYFFHGTRQYKFDPKTKRILTLQKANSWFNCRKN

SEQ ID NO: 1024 - protein, 450 aa, Artificial Sequence
  MMP-1 variant T93A
FPATLETQEQDVDLVQKYLEKYYNLKNDGRQVEKRRNSGPVVEKLKQMQEFFGLKVTGKPDAETLKVMKQPRCGVPDVAQFVLTEGNPRWEQAHLTYRIENYTPDLPRADVDHAIEKAFQLWSNVTPLTFTKVSEGQADIMISFVRGDHRDNSPFDGPGGNLAHAFQPGPGIGGDAHFDEDERWTNNFREYNLHRVAAHELGHSLGLSHSTDIGALMYPSYTFSGDVQLAQDDIDGIQAIYGRSQNPVQPIGPQTPKACDSKLTFDAITTIRGEVMFFKDRFYMRTNPFYPEVELNFISVFWPQLPNGLEAAYEFADRDEVRFFKGNKYWAVQGQNVLHGYPKDIYSSFGFPRTVKHIDAALSEENTGKTYFFVANKYWRYDEYKRSMDPGYPKMIAHDFPGIGHKVDAVFMKDGFFYFFHGTRQYKFDPKTKRILTLQKANSWFNCRKN

SEQ ID NO: 1025 - protein, 450 aa, Artificial Sequence
  MMP-1 variant T93P
FPATLETQEQDVDLVQKYLEKYYNLKNDGRQVEKRRNSGPVVEKLKQMQEFFGLKVTGKPDAETLKVMKQPRCGVPDVAQFVLTEGNPRWEQPHLTYRIENYTPDLPRADVDHAIEKAFQLWSNVTPLTFTKVSEGQADIMISFVRGDHRDNSPFDGPGGNLAHAFQPGPGIGGDAHFDEDERWTNNFREYNLHRVAAHELGHSLGLSHSTDIGALMYPSYTFSGDVQLAQDDIDGIQAIYGRSQNPVQPIGPQTPKACDSKLTFDAITTIRGEVMFFKDRFYMRTNPFYPEVELNFISVFWPQLPNGLEAAYEFADRDEVRFFKGNKYWAVQGQNVLHGYPKDIYSSFGFPRTVKHIDAALSEENTGKTYFFVANKYWRYDEYKRSMDPGYPKMIAHDFPGIGHKVDAVFMKDGFFYFFHGTRQYKFDPKTKRILTLQKANSWFNCRKN

SEQ ID NO: 1026 - protein, 450 aa, Artificial Sequence
  MMP-1 variant H94D
FPATLETQEQDVDLVQKYLEKYYNLKNDGRQVEKRRNSGPVVEKLKQMQEFFGLKVTGKPDAETLKVMKQPRCGVPDVAQFVLTEGNPRWEQTDLTYRIENYTPDLPRADVDHAIEKAFQLWSNVTPLTFTKVSEGQADIMISFVRGDHRDNSPFDGPGGNLAHAFQPGPGIGGDAHFDEDERWTNNFREYNLHRVAAHELGHSLGLSHSTDIGALMYPSYTFSGDVQLAQDDIDGIQAIYGRSQNPVQPIGPQTPKACDSKLTFDAITTIRGEVMFFKDRFYMRTNPFYPEVELNFISVFWPQLPNGLEAAYEFADRDEVRFFKGNKYWAVQGQNVLHGYPKDIYSSFGFPRTVKHIDAALSEENTGKTYFFVANKYWRYDEYKRSMDPGYPKMIAHDFPGIGHKVDAVFMKDGFFYFFHGTRQYKFDPKTKRILTLQKANSWFNCRKN

SEQ ID NO: 1027 - protein, 450 aa, Artificial Sequence
  MMP-1 variant H94E
FPATLETQEQDVDLVQKYLEKYYNLKNDGRQVEKRRNSGPVVEKLKQMQEFFGLKVTGKPDAETLKVMKQPRCGVPDVAQFVLTEGNPRWEQTELTYRIENYTPDLPRADVDHAIEKAFQLWSNVTPLTFTKVSEGQADIMISFVRGDHRDNSPFDGPGGNLAHAFQPGPGIGGDAHFDEDERWTNNFREYNLHRVAAHELGHSLGLSHSTDIGALMYPSYTFSGDVQLAQDDIDGIQAIYGRSQNPVQPIGPQTPKACDSKLTFDAITTIRGEVMFFKDRFYMRTNPFYPEVELNFISVFWPQLPNGLEAAYEFADRDEVRFFKGNKYWAVQGQNVLHGYPKDIYSSFGFPRTVKHIDAALSEENTGKTYFFVANKYWRYDEYKRSMDPGYPKMIAHDFPGIGHKVDAVFMKDGFFYFFHGTRQYKFDPKTKRILTLQKANSWFNCRKN

SEQ ID NO: 1028 - protein, 450 aa, Artificial Sequence
  MMP-1 variant H94K
FPATLETQEQDVDLVQKYLEKYYNLKNDGRQVEKRRNSGPVVEKLKQMQEFFGLKVTGKPDAETLKVMKQPRCGVPDVAQFVLTEGNPRWEQTKLTYRIENYTPDLPRADVDHAIEKAFQLWSNVTPLTFTKVSEGQADIMISFVRGDHRDNSPFDGPGGNLAHAFQPGPGIGGDAHFDEDERWTNNFREYNLHRVAAHELGHSLGLSHSTDIGALMYPSYTFSGDVQLAQDDIDGIQAIYGRSQNPVQPIGPQTPKACDSKLTFDAITTIRGEVMFFKDRFYMRTNPFYPEVELNFISVFWPQLPNGLEAAYEFADRDEVRFFKGNKYWAVQGQNVLHGYPKDIYSSFGFPRTVKHIDAALSEENTGKTYFFVANKYWRYDEYKRSMDPGYPKMIAHDFPGIGHKVDAVFMKDGFFYFFHGTRQYKFDPKTKRILTLQKANSWFNCRKN

SEQ ID NO: 1029 - protein, 450 aa, Artificial Sequence
  MMP-1 variant H94R
FPATLETQEQDVDLVQKYLEKYYNLKNDGRQVEKRRNSGPVVEKLKQMQEFFGLKVTGKPDAETLKVMKQPRCGVPDVAQFVLTEGNPRWEQTRLTYRIENYTPDLPRADVDHAIEKAFQLWSNVTPLTFTKVSEGQADIMISFVRGDHRDNSPFDGPGGNLAHAFQPGPGIGGDAHFDEDERWTNNFREYNLHRVAAHELGHSLGLSHSTDIGALMYPSYTFSGDVQLAQDDIDGIQAIYGRSQNPVQPIGPQTPKACDSKLTFDAITTIRGEVMFFKDRFYMRTNPFYPEVELNFISVFWPQLPNGLEAAYEFADRDEVRFFKGNKYWAVQGQNVLHGYPKDIYSSFGFPRTVKHIDAALSEENTGKTYFFVANKYWRYDEYKRSMDPGYPKMIAHDFPGIGHKVDAVFMKDGFFYFFHGTRQYKFDPKTKRILTLQKANSWFNCRKN

SEQ ID NO: 1030 - protein, 450 aa, Artificial Sequence
  MMP-1 variant H94C
FPATLETQEQDVDLVQKYLEKYYNLKNDGRQVEKRRNSGPVVEKLKQMQEFFGLKVTGKPDAETLKVMKQPRCGVPDVAQFVLTEGNPRWEQTCLTYRIENYTPDLPRADVDHAIEKAFQLWSNVTPLTFTKVSEGQADIMISFVRGDHRDNSPFDGPGGNLAHAFQPGPGIGGDAHFDEDERWTNNFREYNLHRVAAHELGHSLGLSHSTDIGALMYPSYTFSGDVQLAQDDIDGIQAIYGRSQNPVQPIGPQTPKACDSKLTFDAITTIRGEVMFFKDRFYMRTNPFYPEVELNFISVFWPQLPNGLEAAYEFADRDEVRFFKGNKYWAVQGQNVLHGYPKDIYSSFGFPRTVKHIDAALSEENTGKTYFFVANKYWRYDEYKRSMDPGYPKMIAHDFPGIGHKVDAVFMKDGFFYFFHGTRQYKFDPKTKRILTLQKANSWFNCRKN

SEQ ID NO: 1031 - protein, 499 aa, Artificial Sequence
  MMP-1 variant H94N
FPATLETQEQDVDLVQKYLEKYYNLKNDGRQVEKRRNSGPVVEKLKQMQEFFGLKVTGKPDAETLKVMKQPRCGVPDVAQFVLTEGNPRWEQTNLTYRIENYTPDLPRADVDHAIEKAFQLWSNVTPLTFTKVSEGQADIMISFVRGDHRDNSPFDGPGGNLAHAFQPGPGIGGDAHFDEDERWTNNFREYNLHRVAAHELGHSLGLSHSTDIGALMYPSYTFSGDVQLAQDDIDGIQAIYGRSQNPVQPIGPQTPKACDSKLTFDAITTIRGEVMFFKDRFYMRTNPFYPEVELNFISVFWPQLPNGLEAAYEFADRDEVRFFKGNKYWAVQGQNVLHGYPKDIYSSFGFPRTVKHIDAALSEENTGKTYFFVANKYWRYDEYKRSMDPGYPKMIAHDFPGIGHKVDAVFMKDGFFYFFHGTRQYKFDPKTKRILTLQKANSWFNCRKNGIGHKVDAVFMKDGFFYFFHGTRQYKFDPKTKRILTLQKANSWFNCRKN

SEQ ID NO: 1032 - protein, 450 aa, Artificial Sequence
  MMP-1 variant H94Q
FPATLETQEQDVDLVQKYLEKYYNLKNDGRQVEKRRNSGPVVEKLKQMQEFFGLKVTGKPDAETLKVMKQPRCGVPDVAQFVLTEGNPRWEQTQLTYRIENYTPDLPRADVDHAIEKAFQLWSNVTPLTFTKVSEGQADIMISFVRGDHRDNSPFDGPGGNLAHAFQPGPGIGGDAHFDEDERWTNNFREYNLHRVAAHELGHSLGLSHSTDIGALMYPSYTFSGDVQLAQDDIDGIQAIYGRSQNPVQPIGPQTPKACDSKLTFDAITTIRGEVMFFKDRFYMRTNPFYPEVELNFISVFWPQLPNGLEAAYEFADRDEVRFFKGNKYWAVQGQNVLHGYPKDIYSSFGFPRTVKHIDAALSEENTGKTYFFVANKYWRYDEYKRSMDPGYPKMIAHDFPGIGHKVDAVFMKDGFFYFFHGTRQYKFDPKTKRILTLQKANSWFNCRKN

SEQ ID NO: 1033 - protein, 450 aa, Artificial Sequence
  MMP-1 variant H94T
FPATLETQEQDVDLVQKYLEKYYNLKNDGRQVEKRRNSGPVVEKLKQMQEFFGLKVTGKPDAETLKVMKQPRCGVPDVAQFVLTEGNPRWEQTTLTYRIENYTPDLPRADVDHAIEKAFQLWSNVTPLTFTKVSEGQADIMISFVRGDHRDNSPFDGPGGNLAHAFQPGPGIGGDAHFDEDERWTNNFREYNLHRVAAHELGHSLGLSHSTDIGALMYPSYTFSGDVQLAQDDIDGIQAIYGRSQNPVQPIGPQTPKACDSKLTFDAITTIRGEVMFFKDRFYMRTNPFYPEVELNFISVFWPQLPNGLEAAYEFADRDEVRFFKGNKYWAVQGQNVLHGYPKDIYSSFGFPRTVKHIDAALSEENTGKTYFFVANKYWRYDEYKRSMDPGYPKMIAHDFPGIGHKVDAVFMKDGFFYFFHGTRQYKFDPKTKRILTLQKANSWFNCRKN

SEQ ID NO: 1034 - protein, 450 aa, Artificial Sequence
  MMP-1 variant H94Y
FPATLETQEQDVDLVQKYLEKYYNLKNDGRQVEKRRNSGPVVEKLKQMQEFFGLKVTGKPDAETLKVMKQPRCGVPDVAQFVLTEGNPRWEQTYLTYRIENYTPDLPRADVDHAIEKAFQLWSNVTPLTFTKVSEGQADIMISFVRGDHRDNSPFDGPGGNLAHAFQPGPGIGGDAHFDEDERWTNNFREYNLHRVAAHELGHSLGLSHSTDIGALMYPSYTFSGDVQLAQDDIDGIQAIYGRSQNPVQPIGPQTPKACDSKLTFDAITTIRGEVMFFKDRFYMRTNPFYPEVELNFISVFWPQLPNGLEAAYEFADRDEVRFFKGNKYWAVQGQNVLHGYPKDIYSSFGFPRTVKHIDAALSEENTGKTYFFVANKYWRYDEYKRSMDPGYPKMIAHDFPGIGHKVDAVFMKDGFFYFFHGTRQYKFDPKTKRILTLQKANSWFNCRKN

SEQ ID NO: 1035 - protein, 450 aa, Artificial Sequence
  MMP-1 variant H94S
FPATLETQEQDVDLVQKYLEKYYNLKNDGRQVEKRRNSGPVVEKLKQMQEFFGLKVTGKPDAETLKVMKQPRCGVPDVAQFVLTEGNPRWEQTSLTYRIENYTPDLPRADVDHAIEKAFQLWSNVTPLTFTKVSEGQADIMISFVRGDHRDNSPFDGPGGNLAHAFQPGPGIGGDAHFDEDERWTNNFREYNLHRVAAHELGHSLGLSHSTDIGALMYPSYTFSGDVQLAQDDIDGIQAIYGRSQNPVQPIGPQTPKACDSKLTFDAITTIRGEVMFFKDRFYMRTNPFYPEVELNFISVFWPQLPNGLEAAYEFADRDEVRFFKGNKYWAVQGQNVLHGYPKDIYSSFGFPRTVKHIDAALSEENTGKTYFFVANKYWRYDEYKRSMDPGYPKMIAHDFPGIGHKVDAVFMKDGFFYFFHGTRQYKFDPKTKRILTLQKANSWFNCRKN

SEQ ID NO: 1036 - protein, 450 aa, Artificial Sequence
  MMP-1 variant H94G
FPATLETQEQDVDLVQKYLEKYYNLKNDGRQVEKRRNSGPVVEKLKQMQEFFGLKVTGKPDAETLKVMKQPRCGVPDVAQFVLTEGNPRWEQTGLTYRIENYTPDLPRADVDHAIEKAFQLWSNVTPLTFTKVSEGQADIMISFVRGDHRDNSPFDGPGGNLAHAFQPGPGIGGDAHFDEDERWTNNFREYNLHRVAAHELGHSLGLSHSTDIGALMYPSYTFSGDVQLAQDDIDGIQAIYGRSQNPVQPIGPQTPKACDSKLTFDAITTIRGEVMFFKDRFYMRTNPFYPEVELNFISVFWPQLPNGLEAAYEFADRDEVRFFKGNKYWAVQGQNVLHGYPKDIYSSFGFPRTVKHIDAALSEENTGKTYFFVANKYWRYDEYKRSMDPGYPKMIAHDFPGIGHKVDAVFMKDGFFYFFHGTRQYKFDPKTKRILTLQKANSWFNCRKN

SEQ ID NO: 1037 - protein, 450 aa, Artificial Sequence
  MMP-1 variant H94F
FPATLETQEQDVDLVQKYLEKYYNLKNDGRQVEKRRNSGPVVEKLKQMQEFFGLKVTGKPDAETLKVMKQPRCGVPDVAQFVLTEGNPRWEQTFLTYRIENYTPDLPRADVDHAIEKAFQLWSNVTPLTFTKVSEGQADIMISFVRGDHRDNSPFDGPGGNLAHAFQPGPGIGGDAHFDEDERWTNNFREYNLHRVAAHELGHSLGLSHSTDIGALMYPSYTFSGDVQLAQDDIDGIQAIYGRSQNPVQPIGPQTPKACDSKLTFDAITTIRGEVMFFKDRFYMRTNPFYPEVELNFISVFWPQLPNGLEAAYEFADRDEVRFFKGNKYWAVQGQNVLHGYPKDIYSSFGFPRTVKHIDAALSEENTGKTYFFVANKYWRYDEYKRSMDPGYPKMIAHDFPGIGHKVDAVFMKDGFFYFFHGTRQYKFDPKTKRILTLQKANSWFNCRKN

SEQ ID NO: 1038 - protein, 450 aa, Artificial Sequence
  MMP-1 variant H94M
FPATLETQEQDVDLVQKYLEKYYNLKNDGRQVEKRRNSGPVVEKLKQMQEFFGLKVTGKPDAETLKVMKQPRCGVPDVAQFVLTEGNPRWEQTMLTYRIENYTPDLPRADVDHAIEKAFQLWSNVTPLTFTKVSEGQADIMISFVRGDHRDNSPFDGPGGNLAHAFQPGPGIGGDAHFDEDERWTNNFREYNLHRVAAHELGHSLGLSHSTDIGALMYPSYTFSGDVQLAQDDIDGIQAIYGRSQNPVQPIGPQTPKACDSKLTFDAITTIRGEVMFFKDRFYMRTNPFYPEVELNFISVFWPQLPNGLEAAYEFADRDEVRFFKGNKYWAVQGQNVLHGYPKDIYSSFGFPRTVKHIDAALSEENTGKTYFFVANKYWRYDEYKRSMDPGYPKMIAHDFPGIGHKVDAVFMKDGFFYFFHGTRQYKFDPKTKRILTLQKANSWFNCRKN

SEQ ID NO: 1039 - protein, 450 aa, Artificial Sequence
  MMP-1 variant H94W
FPATLETQEQDVDLVQKYLEKYYNLKNDGRQVEKRRNSGPVVEKLKQMQEFFGLKVTGKPDAETLKVMKQPRCGVPDVAQFVLTEGNPRWEQTWLTYRIENYTPDLPRADVDHAIEKAFQLWSNVTPLTFTKVSEGQADIMISFVRGDHRDNSPFDGPGGNLAHAFQPGPGIGGDAHFDEDERWTNNFREYNLHRVAAHELGHSLGLSHSTDIGALMYPSYTFSGDVQLAQDDIDGIQAIYGRSQNPVQPIGPQTPKACDSKLTFDAITTIRGEVMFFKDRFYMRTNPFYPEVELNFISVFWPQLPNGLEAAYEFADRDEVRFFKGNKYWAVQGQNVLHGYPKDIYSSFGFPRTVKHIDAALSEENTGKTYFFVANKYWRYDEYKRSMDPGYPKMIAHDFPGIGHKVDAVFMKDGFFYFFHGTRQYKFDPKTKRILTLQKANSWFNCRKN

SEQ ID NO: 1040 - protein, 450 aa, Artificial Sequence
  MMP-1 variant H94I
FPATLETQEQDVDLVQKYLEKYYNLKNDGRQVEKRRNSGPVVEKLKQMQEFFGLKVTGKPDAETLKVMKQPRCGVPDVAQFVLTEGNPRWEQTILTYRIENYTPDLPRADVDHAIEKAFQLWSNVTPLTFTKVSEGQADIMISFVRGDHRDNSPFDGPGGNLAHAFQPGPGIGGDAHFDEDERWTNNFREYNLHRVAAHELGHSLGLSHSTDIGALMYPSYTFSGDVQLAQDDIDGIQAIYGRSQNPVQPIGPQTPKACDSKLTFDAITTIRGEVMFFKDRFYMRTNPFYPEVELNFISVFWPQLPNGLEAAYEFADRDEVRFFKGNKYWAVQGQNVLHGYPKDIYSSFGFPRTVKHIDAALSEENTGKTYFFVANKYWRYDEYKRSMDPGYPKMIAHDFPGIGHKVDAVFMKDGFFYFFHGTRQYKFDPKTKRILTLQKANSWFNCRKN

SEQ ID NO: 1041 - protein, 450 aa, Artificial Sequence
  MMP-1 variant H94V
FPATLETQEQDVDLVQKYLEKYYNLKNDGRQVEKRRNSGPVVEKLKQMQEFFGLKVTGKPDAETLKVMKQPRCGVPDVAQFVLTEGNPRWEQTVLTYRIENYTPDLPRADVDHAIEKAFQLWSNVTPLTFTKVSEGQADIMISFVRGDHRDNSPFDGPGGNLAHAFQPGPGIGGDAHFDEDERWTNNFREYNLHRVAAHELGHSLGLSHSTDIGALMYPSYTFSGDVQLAQDDIDGIQAIYGRSQNPVQPIGPQTPKACDSKLTFDAITTIRGEVMFFKDRFYMRTNPFYPEVELNFISVFWPQLPNGLEAAYEFADRDEVRFFKGNKYWAVQGQNVLHGYPKDIYSSFGFPRTVKHIDAALSEENTGKTYFFVANKYWRYDEYKRSMDPGYPKMIAHDFPGIGHKVDAVFMKDGFFYFFHGTRQYKFDPKTKRILTLQKANSWFNCRKN

SEQ ID NO: 1042 - protein, 450 aa, Artificial Sequence
  MMP-1 variant H94L
FPATLETQEQDVDLVQKYLEKYYNLKNDGRQVEKRRNSGPVVEKLKQMQEFFGLKVTGKPDAETLKVMKQPRCGVPDVAQFVLTEGNPRWEQTLLTYRIENYTPDLPRADVDHAIEKAFQLWSNVTPLTFTKVSEGQADIMISFVRGDHRDNSPFDGPGGNLAHAFQPGPGIGGDAHFDEDERWTNNFREYNLHRVAAHELGHSLGLSHSTDIGALMYPSYTFSGDVQLAQDDIDGIQAIYGRSQNPVQPIGPQTPKACDSKLTFDAITTIRGEVMFFKDRFYMRTNPFYPEVELNFISVFWPQLPNGLEAAYEFADRDEVRFFKGNKYWAVQGQNVLHGYPKDIYSSFGFPRTVKHIDAALSEENTGKTYFFVANKYWRYDEYKRSMDPGYPKMIAHDFPGIGHKVDAVFMKDGFFYFFHGTRQYKFDPKTKRILTLQKANSWFNCRKN

SEQ ID NO: 1043 - protein, 450 aa, Artificial Sequence
  MMP-1 variant H94A
FPATLETQEQDVDLVQKYLEKYYNLKNDGRQVEKRRNSGPVVEKLKQMQEFFGLKVTGKPDAETLKVMKQPRCGVPDVAQFVLTEGNPRWEQTALTYRIENYTPDLPRADVDHAIEKAFQLWSNVTPLTFTKVSEGQADIMISFVRGDHRDNSPFDGPGGNLAHAFQPGPGIGGDAHFDEDERWTNNFREYNLHRVAAHELGHSLGLSHSTDIGALMYPSYTFSGDVQLAQDDIDGIQAIYGRSQNPVQPIGPQTPKACDSKLTFDAITTIRGEVMFFKDRFYMRTNPFYPEVELNFISVFWPQLPNGLEAAYEFADRDEVRFFKGNKYWAVQGQNVLHGYPKDIYSSFGFPRTVKHIDAALSEENTGKTYFFVANKYWRYDEYKRSMDPGYPKMIAHDFPGIGHKVDAVFMKDGFFYFFHGTRQYKFDPKTKRILTLQKANSWFNCRKN

SEQ ID NO: 1044 - protein, 450 aa, Artificial Sequence
  MMP-1 variant H94P
FPATLETQEQDVDLVQKYLEKYYNLKNDGRQVEKRRNSGPVVEKLKQMQEFFGLKVTGKPDAETLKVMKQPRCGVPDVAQFVLTEGNPRWEQTPLTYRIENYTPDLPRADVDHAIEKAFQLWSNVTPLTFTKVSEGQADIMISFVRGDHRDNSPFDGPGGNLAHAFQPGPGIGGDAHFDEDERWTNNFREYNLHRVAAHELGHSLGLSHSTDIGALMYPSYTFSGDVQLAQDDIDGIQAIYGRSQNPVQPIGPQTPKACDSKLTFDAITTIRGEVMFFKDRFYMRTNPFYPEVELNFISVFWPQLPNGLEAAYEFADRDEVRFFKGNKYWAVQGQNVLHGYPKDIYSSFGFPRTVKHIDAALSEENTGKTYFFVANKYWRYDEYKRSMDPGYPKMIAHDFPGIGHKVDAVFMKDGFFYFFHGTRQYKFDPKTKRILTLQKANSWFNCRKN

SEQ ID NO: 1045 - protein, 450 aa, Artificial Sequence
  MMP-1 variant T96D
FPATLETQEQDVDLVQKYLEKYYNLKNDGRQVEKRRNSGPVVEKLKQMQEFFGLKVTGKPDAETLKVMKQPRCGVPDVAQFVLTEGNPRWEQTHLDYRIENYTPDLPRADVDHAIEKAFQLWSNVTPLTFTKVSEGQADIMISFVRGDHRDNSPFDGPGGNLAHAFQPGPGIGGDAHFDEDERWTNNFREYNLHRVAAHELGHSLGLSHSTDIGALMYPSYTFSGDVQLAQDDIDGIQAIYGRSQNPVQPIGPQTPKACDSKLTFDAITTIRGEVMFFKDRFYMRTNPFYPEVELNFISVFWPQLPNGLEAAYEFADRDEVRFFKGNKYWAVQGQNVLHGYPKDIYSSFGFPRTVKHIDAALSEENTGKTYFFVANKYWRYDEYKRSMDPGYPKMIAHDFPGIGHKVDAVFMKDGFFYFFHGTRQYKFDPKTKRILTLQKANSWFNCRKN

SEQ ID NO: 1046 - protein, 450 aa, Artificial Sequence
  MMP-1 variant T96E
FPATLETQEQDVDLVQKYLEKYYNLKNDGRQVEKRRNSGPVVEKLKQMQEFFGLKVTGKPDAETLKVMKQPRCGVPDVAQFVLTEGNPRWEQTHLEYRIENYTPDLPRADVDHAIEKAFQLWSNVTPLTFTKVSEGQADIMISFVRGDHRDNSPFDGPGGNLAHAFQPGPGIGGDAHFDEDERWTNNFREYNLHRVAAHELGHSLGLSHSTDIGALMYPSYTFSGDVQLAQDDIDGIQAIYGRSQNPVQPIGPQTPKACDSKLTFDAITTIRGEVMFFKDRFYMRTNPFYPEVELNFISVFWPQLPNGLEAAYEFADRDEVRFFKGNKYWAVQGQNVLHGYPKDIYSSFGFPRTVKHIDAALSEENTGKTYFFVANKYWRYDEYKRSMDPGYPKMIAHDFPGIGHKVDAVFMKDGFFYFFHGTRQYKFDPKTKRILTLQKANSWFNCRKN

SEQ ID NO: 1047 - protein, 450 aa, Artificial Sequence
  MMP-1 variant T96H
FPATLETQEQDVDLVQKYLEKYYNLKNDGRQVEKRRNSGPVVEKLKQMQEFFGLKVTGKPDAETLKVMKQPRCGVPDVAQFVLTEGNPRWEQTHLHYRIENYTPDLPRADVDHAIEKAFQLWSNVTPLTFTKVSEGQADIMISFVRGDHRDNSPFDGPGGNLAHAFQPGPGIGGDAHFDEDERWTNNFREYNLHRVAAHELGHSLGLSHSTDIGALMYPSYTFSGDVQLAQDDIDGIQAIYGRSQNPVQPIGPQTPKACDSKLTFDAITTIRGEVMFFKDRFYMRTNPFYPEVELNFISVFWPQLPNGLEAAYEFADRDEVRFFKGNKYWAVQGQNVLHGYPKDIYSSFGFPRTVKHIDAALSEENTGKTYFFVANKYWRYDEYKRSMDPGYPKMIAHDFPGIGHKVDAVFMKDGFFYFFHGTRQYKFDPKTKRILTLQKANSWFNCRKN

SEQ ID NO: 1048 - protein, 450 aa, Artificial Sequence
  MMP-1 variant T96K
FPATLETQEQDVDLVQKYLEKYYNLKNDGRQVEKRRNSGPVVEKLKQMQEFFGLKVTGKPDAETLKVMKQPRCGVPDVAQFVLTEGNPRWEQTHLKYRIENYTPDLPRADVDHAIEKAFQLWSNVTPLTFTKVSEGQADIMISFVRGDHRDNSPFDGPGGNLAHAFQPGPGIGGDAHFDEDERWTNNFREYNLHRVAAHELGHSLGLSHSTDIGALMYPSYTFSGDVQLAQDDIDGIQAIYGRSQNPVQPIGPQTPKACDSKLTFDAITTIRGEVMFFKDRFYMRTNPFYPEVELNFISVFWPQLPNGLEAAYEFADRDEVRFFKGNKYWAVQGQNVLHGYPKDIYSSFGFPRTVKHIDAALSEENTGKTYFFVANKYWRYDEYKRSMDPGYPKMIAHDFPGIGHKVDAVFMKDGFFYFFHGTRQYKFDPKTKRILTLQKANSWFNCRKN

SEQ ID NO: 1049 - protein, 450 aa, Artificial Sequence
  MMP-1 variant T96R
FPATLETQEQDVDLVQKYLEKYYNLKNDGRQVEKRRNSGPVVEKLKQMQEFFGLKVTGKPDAETLKVMKQPRCGVPDVAQFVLTEGNPRWEQTHLRYRIENYTPDLPRADVDHAIEKAFQLWSNVTPLTFTKVSEGQADIMISFVRGDHRDNSPFDGPGGNLAHAFQPGPGIGGDAHFDEDERWTNNFREYNLHRVAAHELGHSLGLSHSTDIGALMYPSYTFSGDVQLAQDDIDGIQAIYGRSQNPVQPIGPQTPKACDSKLTFDAITTIRGEVMFFKDRFYMRTNPFYPEVELNFISVFWPQLPNGLEAAYEFADRDEVRFFKGNKYWAVQGQNVLHGYPKDIYSSFGFPRTVKHIDAALSEENTGKTYFFVANKYWRYDEYKRSMDPGYPKMIAHDFPGIGHKVDAVFMKDGFFYFFHGTRQYKFDPKTKRILTLQKANSWFNCRKN

SEQ ID NO: 1050 - protein, 450 aa, Artificial Sequence
  MMP-1 variant T96C
FPATLETQEQDVDLVQKYLEKYYNLKNDGRQVEKRRNSGPVVEKLKQMQEFFGLKVTGKPDAETLKVMKQPRCGVPDVAQFVLTEGNPRWEQTHLCYRIENYTPDLPRADVDHAIEKAFQLWSNVTPLTFTKVSEGQADIMISFVRGDHRDNSPFDGPGGNLAHAFQPGPGIGGDAHFDEDERWTNNFREYNLHRVAAHELGHSLGLSHSTDIGALMYPSYTFSGDVQLAQDDIDGIQAIYGRSQNPVQPIGPQTPKACDSKLTFDAITTIRGEVMFFKDRFYMRTNPFYPEVELNFISVFWPQLPNGLEAAYEFADRDEVRFFKGNKYWAVQGQNVLHGYPKDIYSSFGFPRTVKHIDAALSEENTGKTYFFVANKYWRYDEYKRSMDPGYPKMIAHDFPGIGHKVDAVFMKDGFFYFFHGTRQYKFDPKTKRILTLQKANSWFNCRKN

SEQ ID NO: 1051 - protein, 450 aa, Artificial Sequence
  MMP-1 variant T96N
FPATLETQEQDVDLVQKYLEKYYNLKNDGRQVEKRRNSGPVVEKLKQMQEFFGLKVTGKPDAETLKVMKQPRCGVPDVAQFVLTEGNPRWEQTHLNYRIENYTPDLPRADVDHAIEKAFQLWSNVTPLTFTKVSEGQADIMISFVRGDHRDNSPFDGPGGNLAHAFQPGPGIGGDAHFDEDERWTNNFREYNLHRVAAHELGHSLGLSHSTDIGALMYPSYTFSGDVQLAQDDIDGIQAIYGRSQNPVQPIGPQTPKACDSKLTFDAITTIRGEVMFFKDRFYMRTNPFYPEVELNFISVFWPQLPNGLEAAYEFADRDEVRFFKGNKYWAVQGQNVLHGYPKDIYSSFGFPRTVKHIDAALSEENTGKTYFFVANKYWRYDEYKRSMDPGYPKMIAHDFPGIGHKVDAVFMKDGFFYFFHGTRQYKFDPKTKRILTLQKANSWFNCRKN

SEQ ID NO: 1052 - protein, 450 aa, Artificial Sequence
  MMP-1 variant T96Q
FPATLETQEQDVDLVQKYLEKYYNLKNDGRQVEKRRNSGPVVEKLKQMQEFFGLKVTGKPDAETLKVMKQPRCGVPDVAQFVLTEGNPRWEQTHLQYRIENYTPDLPRADVDHAIEKAFQLWSNVTPLTFTKVSEGQADIMISFVRGDHRDNSPFDGPGGNLAHAFQPGPGIGGDAHFDEDERWTNNFREYNLHRVAAHELGHSLGLSHSTDIGALMYPSYTFSGDVQLAQDDIDGIQAIYGRSQNPVQPIGPQTPKACDSKLTFDAITTIRGEVMFFKDRFYMRTNPFYPEVELNFISVFWPQLPNGLEAAYEFADRDEVRFFKGNKYWAVQGQNVLHGYPKDIYSSFGFPRTVKHIDAALSEENTGKTYFFVANKYWRYDEYKRSMDPGYPKMIAHDFPGIGHKVDAVFMKDGFFYFFHGTRQYKFDPKTKRILTLQKANSWFNCRKN

SEQ ID NO: 1053 - protein, 450 aa, Artificial Sequence
  MMP-1 variant T96Y
FPATLETQEQDVDLVQKYLEKYYNLKNDGRQVEKRRNSGPVVEKLKQMQEFFGLKVTGKPDAETLKVMKQPRCGVPDVAQFVLTEGNPRWEQTHLYYRIENYTPDLPRADVDHAIEKAFQLWSNVTPLTFTKVSEGQADIMISFVRGDHRDNSPFDGPGGNLAHAFQPGPGIGGDAHFDEDERWTNNFREYNLHRVAAHELGHSLGLSHSTDIGALMYPSYTFSGDVQLAQDDIDGIQAIYGRSQNPVQPIGPQTPKACDSKLTFDAITTIRGEVMFFKDRFYMRTNPFYPEVELNFISVFWPQLPNGLEAAYEFADRDEVRFFKGNKYWAVQGQNVLHGYPKDIYSSFGFPRTVKHIDAALSEENTGKTYFFVANKYWRYDEYKRSMDPGYPKMIAHDFPGIGHKVDAVFMKDGFFYFFHGTRQYKFDPKTKRILTLQKANSWFNCRKN

SEQ ID NO: 1054 - protein, 450 aa, Artificial Sequence
  MMP-1 variant T96S
FPATLETQEQDVDLVQKYLEKYYNLKNDGRQVEKRRNSGPVVEKLKQMQEFFGLKVTGKPDAETLKVMKQPRCGVPDVAQFVLTEGNPRWEQTHLSYRIENYTPDLPRADVDHAIEKAFQLWSNVTPLTFTKVSEGQADIMISFVRGDHRDNSPFDGPGGNLAHAFQPGPGIGGDAHFDEDERWTNNFREYNLHRVAAHELGHSLGLSHSTDIGALMYPSYTFSGDVQLAQDDIDGIQAIYGRSQNPVQPIGPQTPKACDSKLTFDAITTIRGEVMFFKDRFYMRTNPFYPEVELNFISVFWPQLPNGLEAAYEFADRDEVRFFKGNKYWAVQGQNVLHGYPKDIYSSFGFPRTVKHIDAALSEENTGKTYFFVANKYWRYDEYKRSMDPGYPKMIAHDFPGIGHKVDAVFMKDGFFYFFHGTRQYKFDPKTKRILTLQKANSWFNCRKN

SEQ ID NO: 1055 - protein, 450 aa, Artificial Sequence
  MMP-1 variant T96G
FPATLETQEQDVDLVQKYLEKYYNLKNDGRQVEKRRNSGPVVEKLKQMQEFFGLKVTGKPDAETLKVMKQPRCGVPDVAQFVLTEGNPRWEQTHLGYRIENYTPDLPRADVDHAIEKAFQLWSNVTPLTFTKVSEGQADIMISFVRGDHRDNSPFDGPGGNLAHAFQPGPGIGGDAHFDEDERWTNNFREYNLHRVAAHELGHSLGLSHSTDIGALMYPSYTFSGDVQLAQDDIDGIQAIYGRSQNPVQPIGPQTPKACDSKLTFDAITTIRGEVMFFKDRFYMRTNPFYPEVELNFISVFWPQLPNGLEAAYEFADRDEVRFFKGNKYWAVQGQNVLHGYPKDIYSSFGFPRTVKHIDAALSEENTGKTYFFVANKYWRYDEYKRSMDPGYPKMIAHDFPGIGHKVDAVFMKDGFFYFFHGTRQYKFDPKTKRILTLQKANSWFNCRKN

SEQ ID NO: 1056 - protein, 450 aa, Artificial Sequence
  MMP-1 variant T96F
FPATLETQEQDVDLVQKYLEKYYNLKNDGRQVEKRRNSGPVVEKLKQMQEFFGLKVTGKPDAETLKVMKQPRCGVPDVAQFVLTEGNPRWEQTHLFYRIENYTPDLPRADVDHAIEKAFQLWSNVTPLTFTKVSEGQADIMISFVRGDHRDNSPFDGPGGNLAHAFQPGPGIGGDAHFDEDERWTNNFREYNLHRVAAHELGHSLGLSHSTDIGALMYPSYTFSGDVQLAQDDIDGIQAIYGRSQNPVQPIGPQTPKACDSKLTFDAITTIRGEVMFFKDRFYMRTNPFYPEVELNFISVFWPQLPNGLEAAYEFADRDEVRFFKGNKYWAVQGQNVLHGYPKDIYSSFGFPRTVKHIDAALSEENTGKTYFFVANKYWRYDEYKRSMDPGYPKMIAHDFPGIGHKVDAVFMKDGFFYFFHGTRQYKFDPKTKRILTLQKANSWFNCRKN

SEQ ID NO: 1057 - protein, 450 aa, Artificial Sequence
  MMP-1 variant T96M
FPATLETQEQDVDLVQKYLEKYYNLKNDGRQVEKRRNSGPVVEKLKQMQEFFGLKVTGKPDAETLKVMKQPRCGVPDVAQFVLTEGNPRWEQTHLMYRIENYTPDLPRADVDHAIEKAFQLWSNVTPLTFTKVSEGQADIMISFVRGDHRDNSPFDGPGGNLAHAFQPGPGIGGDAHFDEDERWTNNFREYNLHRVAAHELGHSLGLSHSTDIGALMYPSYTFSGDVQLAQDDIDGIQAIYGRSQNPVQPIGPQTPKACDSKLTFDAITTIRGEVMFFKDRFYMRTNPFYPEVELNFISVFWPQLPNGLEAAYEFADRDEVRFFKGNKYWAVQGQNVLHGYPKDIYSSFGFPRTVKHIDAALSEENTGKTYFFVANKYWRYDEYKRSMDPGYPKMIAHDFPGIGHKVDAVFMKDGFFYFFHGTRQYKFDPKTKRILTLQKANSWFNCRKN

SEQ ID NO: 1058 - protein, 450 aa, Artificial Sequence
  MMP-1 variant T96W
FPATLETQEQDVDLVQKYLEKYYNLKNDGRQVEKRRNSGPVVEKLKQMQEFFGLKVTGKPDAETLKVMKQPRCGVPDVAQFVLTEGNPRWEQTHLWYRIENYTPDLPRADVDHAIEKAFQLWSNVTPLTFTKVSEGQADIMISFVRGDHRDNSPFDGPGGNLAHAFQPGPGIGGDAHFDEDERWTNNFREYNLHRVAAHELGHSLGLSHSTDIGALMYPSYTFSGDVQLAQDDIDGIQAIYGRSQNPVQPIGPQTPKACDSKLTFDAITTIRGEVMFFKDRFYMRTNPFYPEVELNFISVFWPQLPNGLEAAYEFADRDEVRFFKGNKYWAVQGQNVLHGYPKDIYSSFGFPRTVKHIDAALSEENTGKTYFFVANKYWRYDEYKRSMDPGYPKMIAHDFPGIGHKVDAVFMKDGFFYFFHGTRQYKFDPKTKRILTLQKANSWFNCRKN

SEQ ID NO: 1059 - protein, 450 aa, Artificial Sequence
  MMP-1 variant T96I
FPATLETQEQDVDLVQKYLEKYYNLKNDGRQVEKRRNSGPVVEKLKQMQEFFGLKVTGKPDAETLKVMKQPRCGVPDVAQFVLTEGNPRWEQTHLIYRIENYTPDLPRADVDHAIEKAFQLWSNVTPLTFTKVSEGQADIMISFVRGDHRDNSPFDGPGGNLAHAFQPGPGIGGDAHFDEDERWTNNFREYNLHRVAAHELGHSLGLSHSTDIGALMYPSYTFSGDVQLAQDDIDGIQAIYGRSQNPVQPIGPQTPKACDSKLTFDAITTIRGEVMFFKDRFYMRTNPFYPEVELNFISVFWPQLPNGLEAAYEFADRDEVRFFKGNKYWAVQGQNVLHGYPKDIYSSFGFPRTVKHIDAALSEENTGKTYFFVANKYWRYDEYKRSMDPGYPKMIAHDFPGIGHKVDAVFMKDGFFYFFHGTRQYKFDPKTKRILTLQKANSWFNCRKN

SEQ ID NO: 1060 - protein, 450 aa, Artificial Sequence
  MMP-1 variant T96V
FPATLETQEQDVDLVQKYLEKYYNLKNDGRQVEKRRNSGPVVEKLKQMQEFFGLKVTGKPDAETLKVMKQPRCGVPDVAQFVLTEGNPRWEQTHLVYRIENYTPDLPRADVDHAIEKAFQLWSNVTPLTFTKVSEGQADIMISFVRGDHRDNSPFDGPGGNLAHAFQPGPGIGGDAHFDEDERWTNNFREYNLHRVAAHELGHSLGLSHSTDIGALMYPSYTFSGDVQLAQDDIDGIQAIYGRSQNPVQPIGPQTPKACDSKLTFDAITTIRGEVMFFKDRFYMRTNPFYPEVELNFISVFWPQLPNGLEAAYEFADRDEVRFFKGNKYWAVQGQNVLHGYPKDIYSSFGFPRTVKHIDAALSEENTGKTYFFVANKYWRYDEYKRSMDPGYPKMIAHDFPGIGHKVDAVFMKDGFFYFFHGTRQYKFDPKTKRILTLQKANSWFNCRKN

SEQ ID NO: 1061 - protein, 450 aa, Artificial Sequence
  MMP-1 variant T96L
FPATLETQEQDVDLVQKYLEKYYNLKNDGRQVEKRRNSGPVVEKLKQMQEFFGLKVTGKPDAETLKVMKQPRCGVPDVAQFVLTEGNPRWEQTHLLYRIENYTPDLPRADVDHAIEKAFQLWSNVTPLTFTKVSEGQADIMISFVRGDHRDNSPFDGPGGNLAHAFQPGPGIGGDAHFDEDERWTNNFREYNLHRVAAHELGHSLGLSHSTDIGALMYPSYTFSGDVQLAQDDIDGIQAIYGRSQNPVQPIGPQTPKACDSKLTFDAITTIRGEVMFFKDRFYMRTNPFYPEVELNFISVFWPQLPNGLEAAYEFADRDEVRFFKGNKYWAVQGQNVLHGYPKDIYSSFGFPRTVKHIDAALSEENTGKTYFFVANKYWRYDEYKRSMDPGYPKMIAHDFPGIGHKVDAVFMKDGFFYFFHGTRQYKFDPKTKRILTLQKANSWFNCRKN

SEQ ID NO: 1062 - protein, 450 aa, Artificial Sequence
  MMP-1 variant T96A
FPATLETQEQDVDLVQKYLEKYYNLKNDGRQVEKRRNSGPVVEKLKQMQEFFGLKVTGKPDAETLKVMKQPRCGVPDVAQFVLTEGNPRWEQTHLAYRIENYTPDLPRADVDHAIEKAFQLWSNVTPLTFTKVSEGQADIMISFVRGDHRDNSPFDGPGGNLAHAFQPGPGIGGDAHFDEDERWTNNFREYNLHRVAAHELGHSLGLSHSTDIGALMYPSYTFSGDVQLAQDDIDGIQAIYGRSQNPVQPIGPQTPKACDSKLTFDAITTIRGEVMFFKDRFYMRTNPFYPEVELNFISVFWPQLPNGLEAAYEFADRDEVRFFKGNKYWAVQGQNVLHGYPKDIYSSFGFPRTVKHIDAALSEENTGKTYFFVANKYWRYDEYKRSMDPGYPKMIAHDFPGIGHKVDAVFMKDGFFYFFHGTRQYKFDPKTKRILTLQKANSWFNCRKN

SEQ ID NO: 1063 - protein, 450 aa, Artificial Sequence
  MMP-1 variant T96P
FPATLETQEQDVDLVQKYLEKYYNLKNDGRQVEKRRNSGPVVEKLKQMQEFFGLKVTGKPDAETLKVMKQPRCGVPDVAQFVLTEGNPRWEQTHLPYRIENYTPDLPRADVDHAIEKAFQLWSNVTPLTFTKVSEGQADIMISFVRGDHRDNSPFDGPGGNLAHAFQPGPGIGGDAHFDEDERWTNNFREYNLHRVAAHELGHSLGLSHSTDIGALMYPSYTFSGDVQLAQDDIDGIQAIYGRSQNPVQPIGPQTPKACDSKLTFDAITTIRGEVMFFKDRFYMRTNPFYPEVELNFISVFWPQLPNGLEAAYEFADRDEVRFFKGNKYWAVQGQNVLHGYPKDIYSSFGFPRTVKHIDAALSEENTGKTYFFVANKYWRYDEYKRSMDPGYPKMIAHDFPGIGHKVDAVFMKDGFFYFFHGTRQYKFDPKTKRILTLQKANSWFNCRKN

SEQ ID NO: 1064 - protein, 450 aa, Artificial Sequence
  MMP-1 variant Y97D
FPATLETQEQDVDLVQKYLEKYYNLKNDGRQVEKRRNSGPVVEKLKQMQEFFGLKVTGKPDAETLKVMKQPRCGVPDVAQFVLTEGNPRWEQTHLTDRIENYTPDLPRADVDHAIEKAFQLWSNVTPLTFTKVSEGQADIMISFVRGDHRDNSPFDGPGGNLAHAFQPGPGIGGDAHFDEDERWTNNFREYNLHRVAAHELGHSLGLSHSTDIGALMYPSYTFSGDVQLAQDDIDGIQAIYGRSQNPVQPIGPQTPKACDSKLTFDAITTIRGEVMFFKDRFYMRTNPFYPEVELNFISVFWPQLPNGLEAAYEFADRDEVRFFKGNKYWAVQGQNVLHGYPKDIYSSFGFPRTVKHIDAALSEENTGKTYFFVANKYWRYDEYKRSMDPGYPKMIAHDFPGIGHKVDAVFMKDGFFYFFHGTRQYKFDPKTKRILTLQKANSWFNCRKN

SEQ ID NO: 1065 - protein, 450 aa, Artificial Sequence
  MMP-1 variant Y97E
FPATLETQEQDVDLVQKYLEKYYNLKNDGRQVEKRRNSGPVVEKLKQMQEFFGLKVTGKPDAETLKVMKQPRCGVPDVAQFVLTEGNPRWEQTHLTERIENYTPDLPRADVDHAIEKAFQLWSNVTPLTFTKVSEGQADIMISFVRGDHRDNSPFDGPGGNLAHAFQPGPGIGGDAHFDEDERWTNNFREYNLHRVAAHELGHSLGLSHSTDIGALMYPSYTFSGDVQLAQDDIDGIQAIYGRSQNPVQPIGPQTPKACDSKLTFDAITTIRGEVMFFKDRFYMRTNPFYPEVELNFISVFWPQLPNGLEAAYEFADRDEVRFFKGNKYWAVQGQNVLHGYPKDIYSSFGFPRTVKHIDAALSEENTGKTYFFVANKYWRYDEYKRSMDPGYPKMIAHDFPGIGHKVDAVFMKDGFFYFFHGTRQYKFDPKTKRILTLQKANSWFNCRKN

SEQ ID NO: 1066 - protein, 450 aa, Artificial Sequence
  MMP-1 variant Y97H
FPATLETQEQDVDLVQKYLEKYYNLKNDGRQVEKRRNSGPVVEKLKQMQEFFGLKVTGKPDAETLKVMKQPRCGVPDVAQFVLTEGNPRWEQTHLTHRIENYTPDLPRADVDHAIEKAFQLWSNVTPLTFTKVSEGQADIMISFVRGDHRDNSPFDGPGGNLAHAFQPGPGIGGDAHFDEDERWTNNFREYNLHRVAAHELGHSLGLSHSTDIGALMYPSYTFSGDVQLAQDDIDGIQAIYGRSQNPVQPIGPQTPKACDSKLTFDAITTIRGEVMFFKDRFYMRTNPFYPEVELNFISVFWPQLPNGLEAAYEFADRDEVRFFKGNKYWAVQGQNVLHGYPKDIYSSFGFPRTVKHIDAALSEENTGKTYFFVANKYWRYDEYKRSMDPGYPKMIAHDFPGIGHKVDAVFMKDGFFYFFHGTRQYKFDPKTKRILTLQKANSWFNCRKN

SEQ ID NO: 1067 - protein, 450 aa, Artificial Sequence
  MMP-1 variant Y97K
FPATLETQEQDVDLVQKYLEKYYNLKNDGRQVEKRRNSGPVVEKLKQMQEFFGLKVTGKPDAETLKVMKQPRCGVPDVAQFVLTEGNPRWEQTHLTKRIENYTPDLPRADVDHAIEKAFQLWSNVTPLTFTKVSEGQADIMISFVRGDHRDNSPFDGPGGNLAHAFQPGPGIGGDAHFDEDERWTNNFREYNLHRVAAHELGHSLGLSHSTDIGALMYPSYTFSGDVQLAQDDIDGIQAIYGRSQNPVQPIGPQTPKACDSKLTFDAITTIRGEVMFFKDRFYMRTNPFYPEVELNFISVFWPQLPNGLEAAYEFADRDEVRFFKGNKYWAVQGQNVLHGYPKDIYSSFGFPRTVKHIDAALSEENTGKTYFFVANKYWRYDEYKRSMDPGYPKMIAHDFPGIGHKVDAVFMKDGFFYFFHGTRQYKFDPKTKRILTLQKANSWFNCRKN

SEQ ID NO: 1068 - protein, 450 aa, Artificial Sequence
  MMP-1 variant Y97R
FPATLETQEQDVDLVQKYLEKYYNLKNDGRQVEKRRNSGPVVEKLKQMQEFFGLKVTGKPDAETLKVMKQPRCGVPDVAQFVLTEGNPRWEQTHLTRRIENYTPDLPRADVDHAIEKAFQLWSNVTPLTFTKVSEGQADIMISFVRGDHRDNSPFDGPGGNLAHAFQPGPGIGGDAHFDEDERWTNNFREYNLHRVAAHELGHSLGLSHSTDIGALMYPSYTFSGDVQLAQDDIDGIQAIYGRSQNPVQPIGPQTPKACDSKLTFDAITTIRGEVMFFKDRFYMRTNPFYPEVELNFISVFWPQLPNGLEAAYEFADRDEVRFFKGNKYWAVQGQNVLHGYPKDIYSSFGFPRTVKHIDAALSEENTGKTYFFVANKYWRYDEYKRSMDPGYPKMIAHDFPGIGHKVDAVFMKDGFFYFFHGTRQYKFDPKTKRILTLQKANSWFNCRKN

SEQ ID NO: 1069 - protein, 450 aa, Artificial Sequence
  MMP-1 variant Y97C
FPATLETQEQDVDLVQKYLEKYYNLKNDGRQVEKRRNSGPVVEKLKQMQEFFGLKVTGKPDAETLKVMKQPRCGVPDVAQFVLTEGNPRWEQTHLTCRIENYTPDLPRADVDHAIEKAFQLWSNVTPLTFTKVSEGQADIMISFVRGDHRDNSPFDGPGGNLAHAFQPGPGIGGDAHFDEDERWTNNFREYNLHRVAAHELGHSLGLSHSTDIGALMYPSYTFSGDVQLAQDDIDGIQAIYGRSQNPVQPIGPQTPKACDSKLTFDAITTIRGEVMFFKDRFYMRTNPFYPEVELNFISVFWPQLPNGLEAAYEFADRDEVRFFKGNKYWAVQGQNVLHGYPKDIYSSFGFPRTVKHIDAALSEENTGKTYFFVANKYWRYDEYKRSMDPGYPKMIAHDFPGIGHKVDAVFMKDGFFYFFHGTRQYKFDPKTKRILTLQKANSWFNCRKN

SEQ ID NO: 1070 - protein, 450 aa, Artificial Sequence
  MMP-1 variant Y97N
FPATLETQEQDVDLVQKYLEKYYNLKNDGRQVEKRRNSGPVVEKLKQMQEFFGLKVTGKPDAETLKVMKQPRCGVPDVAQFVLTEGNPRWEQTHLTNRIENYTPDLPRADVDHAIEKAFQLWSNVTPLTFTKVSEGQADIMISFVRGDHRDNSPFDGPGGNLAHAFQPGPGIGGDAHFDEDERWTNNFREYNLHRVAAHELGHSLGLSHSTDIGALMYPSYTFSGDVQLAQDDIDGIQAIYGRSQNPVQPIGPQTPKACDSKLTFDAITTIRGEVMFFKDRFYMRTNPFYPEVELNFISVFWPQLPNGLEAAYEFADRDEVRFFKGNKYWAVQGQNVLHGYPKDIYSSFGFPRTVKHIDAALSEENTGKTYFFVANKYWRYDEYKRSMDPGYPKMIAHDFPGIGHKVDAVFMKDGFFYFFHGTRQYKFDPKTKRILTLQKANSWFNCRKN

SEQ ID NO: 1071 - protein, 450 aa, Artificial Sequence
  MMP-1 variant Y97Q
FPATLETQEQDVDLVQKYLEKYYNLKNDGRQVEKRRNSGPVVEKLKQMQEFFGLKVTGKPDAETLKVMKQPRCGVPDVAQFVLTEGNPRWEQTHLTQRIENYTPDLPRADVDHAIEKAFQLWSNVTPLTFTKVSEGQADIMISFVRGDHRDNSPFDGPGGNLAHAFQPGPGIGGDAHFDEDERWTNNFREYNLHRVAAHELGHSLGLSHSTDIGALMYPSYTFSGDVQLAQDDIDGIQAIYGRSQNPVQPIGPQTPKACDSKLTFDAITTIRGEVMFFKDRFYMRTNPFYPEVELNFISVFWPQLPNGLEAAYEFADRDEVRFFKGNKYWAVQGQNVLHGYPKDIYSSFGFPRTVKHIDAALSEENTGKTYFFVANKYWRYDEYKRSMDPGYPKMIAHDFPGIGHKVDAVFMKDGFFYFFHGTRQYKFDPKTKRILTLQKANSWFNCRKN

SEQ ID NO: 1072 - protein, 450 aa, Artificial Sequence
  MMP-1 variant Y97T
FPATLETQEQDVDLVQKYLEKYYNLKNDGRQVEKRRNSGPVVEKLKQMQEFFGLKVTGKPDAETLKVMKQPRCGVPDVAQFVLTEGNPRWEQTHLTTRIENYTPDLPRADVDHAIEKAFQLWSNVTPLTFTKVSEGQADIMISFVRGDHRDNSPFDGPGGNLAHAFQPGPGIGGDAHFDEDERWTNNFREYNLHRVAAHELGHSLGLSHSTDIGALMYPSYTFSGDVQLAQDDIDGIQAIYGRSQNPVQPIGPQTPKACDSKLTFDAITTIRGEVMFFKDRFYMRTNPFYPEVELNFISVFWPQLPNGLEAAYEFADRDEVRFFKGNKYWAVQGQNVLHGYPKDIYSSFGFPRTVKHIDAALSEENTGKTYFFVANKYWRYDEYKRSMDPGYPKMIAHDFPGIGHKVDAVFMKDGFFYFFHGTRQYKFDPKTKRILTLQKANSWFNCRKN

SEQ ID NO: 1073 - protein, 450 aa, Artificial Sequence
  MMP-1 variant Y97S
FPATLETQEQDVDLVQKYLEKYYNLKNDGRQVEKRRNSGPVVEKLKQMQEFFGLKVTGKPDAETLKVMKQPRCGVPDVAQFVLTEGNPRWEQTHLTSRIENYTPDLPRADVDHAIEKAFQLWSNVTPLTFTKVSEGQADIMISFVRGDHRDNSPFDGPGGNLAHAFQPGPGIGGDAHFDEDERWTNNFREYNLHRVAAHELGHSLGLSHSTDIGALMYPSYTFSGDVQLAQDDIDGIQAIYGRSQNPVQPIGPQTPKACDSKLTFDAITTIRGEVMFFKDRFYMRTNPFYPEVELNFISVFWPQLPNGLEAAYEFADRDEVRFFKGNKYWAVQGQNVLHGYPKDIYSSFGFPRTVKHIDAALSEENTGKTYFFVANKYWRYDEYKRSMDPGYPKMIAHDFPGIGHKVDAVFMKDGFFYFFHGTRQYKFDPKTKRILTLQKANSWFNCRKN

SEQ ID NO: 1074 - protein, 450 aa, Artificial Sequence
  MMP-1 variant Y97G
FPATLETQEQDVDLVQKYLEKYYNLKNDGRQVEKRRNSGPVVEKLKQMQEFFGLKVTGKPDAETLKVMKQPRCGVPDVAQFVLTEGNPRWEQTHLTGRIENYTPDLPRADVDHAIEKAFQLWSNVTPLTFTKVSEGQADIMISFVRGDHRDNSPFDGPGGNLAHAFQPGPGIGGDAHFDEDERWTNNFREYNLHRVAAHELGHSLGLSHSTDIGALMYPSYTFSGDVQLAQDDIDGIQAIYGRSQNPVQPIGPQTPKACDSKLTFDAITTIRGEVMFFKDRFYMRTNPFYPEVELNFISVFWPQLPNGLEAAYEFADRDEVRFFKGNKYWAVQGQNVLHGYPKDIYSSFGFPRTVKHIDAALSEENTGKTYFFVANKYWRYDEYKRSMDPGYPKMIAHDFPGIGHKVDAVFMKDGFFYFFHGTRQYKFDPKTKRILTLQKANSWFNCRKN

SEQ ID NO: 1075 - protein, 450 aa, Artificial Sequence
  MMP-1 variant Y97F
FPATLETQEQDVDLVQKYLEKYYNLKNDGRQVEKRRNSGPVVEKLKQMQEFFGLKVTGKPDAETLKVMKQPRCGVPDVAQFVLTEGNPRWEQTHLTFRIENYTPDLPRADVDHAIEKAFQLWSNVTPLTFTKVSEGQADIMISFVRGDHRDNSPFDGPGGNLAHAFQPGPGIGGDAHFDEDERWTNNFREYNLHRVAAHELGHSLGLSHSTDIGALMYPSYTFSGDVQLAQDDIDGIQAIYGRSQNPVQPIGPQTPKACDSKLTFDAITTIRGEVMFFKDRFYMRTNPFYPEVELNFISVFWPQLPNGLEAAYEFADRDEVRFFKGNKYWAVQGQNVLHGYPKDIYSSFGFPRTVKHIDAALSEENTGKTYFFVANKYWRYDEYKRSMDPGYPKMIAHDFPGIGHKVDAVFMKDGFFYFFHGTRQYKFDPKTKRILTLQKANSWFNCRKN

SEQ ID NO: 1076 - protein, 450 aa, Artificial Sequence
  MMP-1 variant Y97M
FPATLETQEQDVDLVQKYLEKYYNLKNDGRQVEKRRNSGPVVEKLKQMQEFFGLKVTGKPDAETLKVMKQPRCGVPDVAQFVLTEGNPRWEQTHLTMRIENYTPDLPRADVDHAIEKAFQLWSNVTPLTFTKVSEGQADIMISFVRGDHRDNSPFDGPGGNLAHAFQPGPGIGGDAHFDEDERWTNNFREYNLHRVAAHELGHSLGLSHSTDIGALMYPSYTFSGDVQLAQDDIDGIQAIYGRSQNPVQPIGPQTPKACDSKLTFDAITTIRGEVMFFKDRFYMRTNPFYPEVELNFISVFWPQLPNGLEAAYEFADRDEVRFFKGNKYWAVQGQNVLHGYPKDIYSSFGFPRTVKHIDAALSEENTGKTYFFVANKYWRYDEYKRSMDPGYPKMIAHDFPGIGHKVDAVFMKDGFFYFFHGTRQYKFDPKTKRILTLQKANSWFNCRKN

SEQ ID NO: 1077 - protein, 450 aa, Artificial Sequence
  MMP-1 variant Y97W
FPATLETQEQDVDLVQKYLEKYYNLKNDGRQVEKRRNSGPVVEKLKQMQEFFGLKVTGKPDAETLKVMKQPRCGVPDVAQFVLTEGNPRWEQTHLTWRIENYTPDLPRADVDHAIEKAFQLWSNVTPLTFTKVSEGQADIMISFVRGDHRDNSPFDGPGGNLAHAFQPGPGIGGDAHFDEDERWTNNFREYNLHRVAAHELGHSLGLSHSTDIGALMYPSYTFSGDVQLAQDDIDGIQAIYGRSQNPVQPIGPQTPKACDSKLTFDAITTIRGEVMFFKDRFYMRTNPFYPEVELNFISVFWPQLPNGLEAAYEFADRDEVRFFKGNKYWAVQGQNVLHGYPKDIYSSFGFPRTVKHIDAALSEENTGKTYFFVANKYWRYDEYKRSMDPGYPKMIAHDFPGIGHKVDAVFMKDGFFYFFHGTRQYKFDPKTKRILTLQKANSWFNCRKN

SEQ ID NO: 1078 - protein, 450 aa, Artificial Sequence
  MMP-1 variant Y97I
FPATLETQEQDVDLVQKYLEKYYNLKNDGRQVEKRRNSGPVVEKLKQMQEFFGLKVTGKPDAETLKVMKQPRCGVPDVAQFVLTEGNPRWEQTHLTIRIENYTPDLPRADVDHAIEKAFQLWSNVTPLTFTKVSEGQADIMISFVRGDHRDNSPFDGPGGNLAHAFQPGPGIGGDAHFDEDERWTNNFREYNLHRVAAHELGHSLGLSHSTDIGALMYPSYTFSGDVQLAQDDIDGIQAIYGRSQNPVQPIGPQTPKACDSKLTFDAITTIRGEVMFFKDRFYMRTNPFYPEVELNFISVFWPQLPNGLEAAYEFADRDEVRFFKGNKYWAVQGQNVLHGYPKDIYSSFGFPRTVKHIDAALSEENTGKTYFFVANKYWRYDEYKRSMDPGYPKMIAHDFPGIGHKVDAVFMKDGFFYFFHGTRQYKFDPKTKRILTLQKANSWFNCRKN

SEQ ID NO: 1079 - protein, 450 aa, Artificial Sequence
  MMP-1 variant Y97V
FPATLETQEQDVDLVQKYLEKYYNLKNDGRQVEKRRNSGPVVEKLKQMQEFFGLKVTGKPDAETLKVMKQPRCGVPDVAQFVLTEGNPRWEQTHLTVRIENYTPDLPRADVDHAIEKAFQLWSNVTPLTFTKVSEGQADIMISFVRGDHRDNSPFDGPGGNLAHAFQPGPGIGGDAHFDEDERWTNNFREYNLHRVAAHELGHSLGLSHSTDIGALMYPSYTFSGDVQLAQDDIDGIQAIYGRSQNPVQPIGPQTPKACDSKLTFDAITTIRGEVMFFKDRFYMRTNPFYPEVELNFISVFWPQLPNGLEAAYEFADRDEVRFFKGNKYWAVQGQNVLHGYPKDIYSSFGFPRTVKHIDAALSEENTGKTYFFVANKYWRYDEYKRSMDPGYPKMIAHDFPGIGHKVDAVFMKDGFFYFFHGTRQYKFDPKTKRILTLQKANSWFNCRKN

SEQ ID NO: 1080 - protein, 450 aa, Artificial Sequence
  MMP-1 variant Y97L
FPATLETQEQDVDLVQKYLEKYYNLKNDGRQVEKRRNSGPVVEKLKQMQEFFGLKVTGKPDAETLKVMKQPRCGVPDVAQFVLTEGNPRWEQTHLTLRIENYTPDLPRADVDHAIEKAFQLWSNVTPLTFTKVSEGQADIMISFVRGDHRDNSPFDGPGGNLAHAFQPGPGIGGDAHFDEDERWTNNFREYNLHRVAAHELGHSLGLSHSTDIGALMYPSYTFSGDVQLAQDDIDGIQAIYGRSQNPVQPIGPQTPKACDSKLTFDAITTIRGEVMFFKDRFYMRTNPFYPEVELNFISVFWPQLPNGLEAAYEFADRDEVRFFKGNKYWAVQGQNVLHGYPKDIYSSFGFPRTVKHIDAALSEENTGKTYFFVANKYWRYDEYKRSMDPGYPKMIAHDFPGIGHKVDAVFMKDGFFYFFHGTRQYKFDPKTKRILTLQKANSWFNCRKN

SEQ ID NO: 1081 - protein, 450 aa, Artificial Sequence
  MMP-1 variant Y97A
FPATLETQEQDVDLVQKYLEKYYNLKNDGRQVEKRRNSGPVVEKLKQMQEFFGLKVTGKPDAETLKVMKQPRCGVPDVAQFVLTEGNPRWEQTHLTARIENYTPDLPRADVDHAIEKAFQLWSNVTPLTFTKVSEGQADIMISFVRGDHRDNSPFDGPGGNLAHAFQPGPGIGGDAHFDEDERWTNNFREYNLHRVAAHELGHSLGLSHSTDIGALMYPSYTFSGDVQLAQDDIDGIQAIYGRSQNPVQPIGPQTPKACDSKLTFDAITTIRGEVMFFKDRFYMRTNPFYPEVELNFISVFWPQLPNGLEAAYEFADRDEVRFFKGNKYWAVQGQNVLHGYPKDIYSSFGFPRTVKHIDAALSEENTGKTYFFVANKYWRYDEYKRSMDPGYPKMIAHDFPGIGHKVDAVFMKDGFFYFFHGTRQYKFDPKTKRILTLQKANSWFNCRKN

SEQ ID NO: 1082 - protein, 450 aa, Artificial Sequence
  MMP-1 variant Y97P
FPATLETQEQDVDLVQKYLEKYYNLKNDGRQVEKRRNSGPVVEKLKQMQEFFGLKVTGKPDAETLKVMKQPRCGVPDVAQFVLTEGNPRWEQTHLTPRIENYTPDLPRADVDHAIEKAFQLWSNVTPLTFTKVSEGQADIMISFVRGDHRDNSPFDGPGGNLAHAFQPGPGIGGDAHFDEDERWTNNFREYNLHRVAAHELGHSLGLSHSTDIGALMYPSYTFSGDVQLAQDDIDGIQAIYGRSQNPVQPIGPQTPKACDSKLTFDAITTIRGEVMFFKDRFYMRTNPFYPEVELNFISVFWPQLPNGLEAAYEFADRDEVRFFKGNKYWAVQGQNVLHGYPKDIYSSFGFPRTVKHIDAALSEENTGKTYFFVANKYWRYDEYKRSMDPGYPKMIAHDFPGIGHKVDAVFMKDGFFYFFHGTRQYKFDPKTKRILTLQKANSWFNCRKN

SEQ ID NO: 1083 - protein, 450 aa, Artificial Sequence
  MMP-1 variant R98D
FPATLETQEQDVDLVQKYLEKYYNLKNDGRQVEKRRNSGPVVEKLKQMQEFFGLKVTGKPDAETLKVMKQPRCGVPDVAQFVLTEGNPRWEQTHLTYDIENYTPDLPRADVDHAIEKAFQLWSNVTPLTFTKVSEGQADIMISFVRGDHRDNSPFDGPGGNLAHAFQPGPGIGGDAHFDEDERWTNNFREYNLHRVAAHELGHSLGLSHSTDIGALMYPSYTFSGDVQLAQDDIDGIQAIYGRSQNPVQPIGPQTPKACDSKLTFDAITTIRGEVMFFKDRFYMRTNPFYPEVELNFISVFWPQLPNGLEAAYEFADRDEVRFFKGNKYWAVQGQNVLHGYPKDIYSSFGFPRTVKHIDAALSEENTGKTYFFVANKYWRYDEYKRSMDPGYPKMIAHDFPGIGHKVDAVFMKDGFFYFFHGTRQYKFDPKTKRILTLQKANSWFNCRKN

SEQ ID NO: 1084 - protein, 450 aa, Artificial Sequence
  MMP-1 variant R98E
FPATLETQEQDVDLVQKYLEKYYNLKNDGRQVEKRRNSGPVVEKLKQMQEFFGLKVTGKPDAETLKVMKQPRCGVPDVAQFVLTEGNPRWEQTHLTYEIENYTPDLPRADVDHAIEKAFQLWSNVTPLTFTKVSEGQADIMISFVRGDHRDNSPFDGPGGNLAHAFQPGPGIGGDAHFDEDERWTNNFREYNLHRVAAHELGHSLGLSHSTDIGALMYPSYTFSGDVQLAQDDIDGIQAIYGRSQNPVQPIGPQTPKACDSKLTFDAITTIRGEVMFFKDRFYMRTNPFYPEVELNFISVFWPQLPNGLEAAYEFADRDEVRFFKGNKYWAVQGQNVLHGYPKDIYSSFGFPRTVKHIDAALSEENTGKTYFFVANKYWRYDEYKRSMDPGYPKMIAHDFPGIGHKVDAVFMKDGFFYFFHGTRQYKFDPKTKRILTLQKANSWFNCRKN

SEQ ID NO: 1085 - protein, 450 aa, Artificial Sequence
  MMP-1 variant R98H
FPATLETQEQDVDLVQKYLEKYYNLKNDGRQVEKRRNSGPVVEKLKQMQEFFGLKVTGKPDAETLKVMKQPRCGVPDVAQFVLTEGNPRWEQTHLTYHIENYTPDLPRADVDHAIEKAFQLWSNVTPLTFTKVSEGQADIMISFVRGDHRDNSPFDGPGGNLAHAFQPGPGIGGDAHFDEDERWTNNFREYNLHRVAAHELGHSLGLSHSTDIGALMYPSYTFSGDVQLAQDDIDGIQAIYGRSQNPVQPIGPQTPKACDSKLTFDAITTIRGEVMFFKDRFYMRTNPFYPEVELNFISVFWPQLPNGLEAAYEFADRDEVRFFKGNKYWAVQGQNVLHGYPKDIYSSFGFPRTVKHIDAALSEENTGKTYFFVANKYWRYDEYKRSMDPGYPKMIAHDFPGIGHKVDAVFMKDGFFYFFHGTRQYKFDPKTKRILTLQKANSWFNCRKN

SEQ ID NO: 1086 - protein, 450 aa, Artificial Sequence
  MMP-1 variant R98K
FPATLETQEQDVDLVQKYLEKYYNLKNDGRQVEKRRNSGPVVEKLKQMQEFFGLKVTGKPDAETLKVMKQPRCGVPDVAQFVLTEGNPRWEQTHLTYKIENYTPDLPRADVDHAIEKAFQLWSNVTPLTFTKVSEGQADIMISFVRGDHRDNSPFDGPGGNLAHAFQPGPGIGGDAHFDEDERWTNNFREYNLHRVAAHELGHSLGLSHSTDIGALMYPSYTFSGDVQLAQDDIDGIQAIYGRSQNPVQPIGPQTPKACDSKLTFDAITTIRGEVMFFKDRFYMRTNPFYPEVELNFISVFWPQLPNGLEAAYEFADRDEVRFFKGNKYWAVQGQNVLHGYPKDIYSSFGFPRTVKHIDAALSEENTGKTYFFVANKYWRYDEYKRSMDPGYPKMIAHDFPGIGHKVDAVFMKDGFFYFFHGTRQYKFDPKTKRILTLQKANSWFNCRKN

SEQ ID NO: 1087 - protein, 450 aa, Artificial Sequence
  MMP-1 variant R98C
FPATLETQEQDVDLVQKYLEKYYNLKNDGRQVEKRRNSGPVVEKLKQMQEFFGLKVTGKPDAETLKVMKQPRCGVPDVAQFVLTEGNPRWEQTHLTYCIENYTPDLPRADVDHAIEKAFQLWSNVTPLTFTKVSEGQADIMISFVRGDHRDNSPFDGPGGNLAHAFQPGPGIGGDAHFDEDERWTNNFREYNLHRVAAHELGHSLGLSHSTDIGALMYPSYTFSGDVQLAQDDIDGIQAIYGRSQNPVQPIGPQTPKACDSKLTFDAITTIRGEVMFFKDRFYMRTNPFYPEVELNFISVFWPQLPNGLEAAYEFADRDEVRFFKGNKYWAVQGQNVLHGYPKDIYSSFGFPRTVKHIDAALSEENTGKTYFFVANKYWRYDEYKRSMDPGYPKMIAHDFPGIGHKVDAVFMKDGFFYFFHGTRQYKFDPKTKRILTLQKANSWFNCRKN

SEQ ID NO: 1088 - protein, 450 aa, Artificial Sequence
  MMP-1 variant R98N
FPATLETQEQDVDLVQKYLEKYYNLKNDGRQVEKRRNSGPVVEKLKQMQEFFGLKVTGKPDAETLKVMKQPRCGVPDVAQFVLTEGNPRWEQTHLTYNIENYTPDLPRADVDHAIEKAFQLWSNVTPLTFTKVSEGQADIMISFVRGDHRDNSPFDGPGGNLAHAFQPGPGIGGDAHFDEDERWTNNFREYNLHRVAAHELGHSLGLSHSTDIGALMYPSYTFSGDVQLAQDDIDGIQAIYGRSQNPVQPIGPQTPKACDSKLTFDAITTIRGEVMFFKDRFYMRTNPFYPEVELNFISVFWPQLPNGLEAAYEFADRDEVRFFKGNKYWAVQGQNVLHGYPKDIYSSFGFPRTVKHIDAALSEENTGKTYFFVANKYWRYDEYKRSMDPGYPKMIAHDFPGIGHKVDAVFMKDGFFYFFHGTRQYKFDPKTKRILTLQKANSWFNCRKN

SEQ ID NO: 1089 - protein, 450 aa, Artificial Sequence
  MMP-1 variant R98Q
FPATLETQEQDVDLVQKYLEKYYNLKNDGRQVEKRRNSGPVVEKLKQMQEFFGLKVTGKPDAETLKVMKQPRCGVPDVAQFVLTEGNPRWEQTHLTYQIENYTPDLPRADVDHAIEKAFQLWSNVTPLTFTKVSEGQADIMISFVRGDHRDNSPFDGPGGNLAHAFQPGPGIGGDAHFDEDERWTNNFREYNLHRVAAHELGHSLGLSHSTDIGALMYPSYTFSGDVQLAQDDIDGIQAIYGRSQNPVQPIGPQTPKACDSKLTFDAITTIRGEVMFFKDRFYMRTNPFYPEVELNFISVFWPQLPNGLEAAYEFADRDEVRFFKGNKYWAVQGQNVLHGYPKDIYSSFGFPRTVKHIDAALSEENTGKTYFFVANKYWRYDEYKRSMDPGYPKMIAHDFPGIGHKVDAVFMKDGFFYFFHGTRQYKFDPKTKRILTLQKANSWFNCRKN

SEQ ID NO: 1090 - protein, 450 aa, Artificial Sequence
  MMP-1 variant R98T
FPATLETQEQDVDLVQKYLEKYYNLKNDGRQVEKRRNSGPVVEKLKQMQEFFGLKVTGKPDAETLKVMKQPRCGVPDVAQFVLTEGNPRWEQTHLTYTIENYTPDLPRADVDHAIEKAFQLWSNVTPLTFTKVSEGQADIMISFVRGDHRDNSPFDGPGGNLAHAFQPGPGIGGDAHFDEDERWTNNFREYNLHRVAAHELGHSLGLSHSTDIGALMYPSYTFSGDVQLAQDDIDGIQAIYGRSQNPVQPIGPQTPKACDSKLTFDAITTIRGEVMFFKDRFYMRTNPFYPEVELNFISVFWPQLPNGLEAAYEFADRDEVRFFKGNKYWAVQGQNVLHGYPKDIYSSFGFPRTVKHIDAALSEENTGKTYFFVANKYWRYDEYKRSMDPGYPKMIAHDFPGIGHKVDAVFMKDGFFYFFHGTRQYKFDPKTKRILTLQKANSWFNCRKN

SEQ ID NO: 1091 - protein, 450 aa, Artificial Sequence
  MMP-1 variant R98Y
FPATLETQEQDVDLVQKYLEKYYNLKNDGRQVEKRRNSGPVVEKLKQMQEFFGLKVTGKPDAETLKVMKQPRCGVPDVAQFVLTEGNPRWEQTHLTYYIENYTPDLPRADVDHAIEKAFQLWSNVTPLTFTKVSEGQADIMISFVRGDHRDNSPFDGPGGNLAHAFQPGPGIGGDAHFDEDERWTNNFREYNLHRVAAHELGHSLGLSHSTDIGALMYPSYTFSGDVQLAQDDIDGIQAIYGRSQNPVQPIGPQTPKACDSKLTFDAITTIRGEVMFFKDRFYMRTNPFYPEVELNFISVFWPQLPNGLEAAYEFADRDEVRFFKGNKYWAVQGQNVLHGYPKDIYSSFGFPRTVKHIDAALSEENTGKTYFFVANKYWRYDEYKRSMDPGYPKMIAHDFPGIGHKVDAVFMKDGFFYFFHGTRQYKFDPKTKRILTLQKANSWFNCRKN

SEQ ID NO: 1092 - protein, 450 aa, Artificial Sequence
  MMP-1 variant R98S
FPATLETQEQDVDLVQKYLEKYYNLKNDGRQVEKRRNSGPVVEKLKQMQEFFGLKVTGKPDAETLKVMKQPRCGVPDVAQFVLTEGNPRWEQTHLTYSIENYTPDLPRADVDHAIEKAFQLWSNVTPLTFTKVSEGQADIMISFVRGDHRDNSPFDGPGGNLAHAFQPGPGIGGDAHFDEDERWTNNFREYNLHRVAAHELGHSLGLSHSTDIGALMYPSYTFSGDVQLAQDDIDGIQAIYGRSQNPVQPIGPQTPKACDSKLTFDAITTIRGEVMFFKDRFYMRTNPFYPEVELNFISVFWPQLPNGLEAAYEFADRDEVRFFKGNKYWAVQGQNVLHGYPKDIYSSFGFPRTVKHIDAALSEENTGKTYFFVANKYWRYDEYKRSMDPGYPKMIAHDFPGIGHKVDAVFMKDGFFYFFHGTRQYKFDPKTKRILTLQKANSWFNCRKN

SEQ ID NO: 1093 - protein, 450 aa, Artificial Sequence
  MMP-1 variant R98G
FPATLETQEQDVDLVQKYLEKYYNLKNDGRQVEKRRNSGPVVEKLKQMQEFFGLKVTGKPDAETLKVMKQPRCGVPDVAQFVLTEGNPRWEQTHLTYGIENYTPDLPRADVDHAIEKAFQLWSNVTPLTFTKVSEGQADIMISFVRGDHRDNSPFDGPGGNLAHAFQPGPGIGGDAHFDEDERWTNNFREYNLHRVAAHELGHSLGLSHSTDIGALMYPSYTFSGDVQLAQDDIDGIQAIYGRSQNPVQPIGPQTPKACDSKLTFDAITTIRGEVMFFKDRFYMRTNPFYPEVELNFISVFWPQLPNGLEAAYEFADRDEVRFFKGNKYWAVQGQNVLHGYPKDIYSSFGFPRTVKHIDAALSEENTGKTYFFVANKYWRYDEYKRSMDPGYPKMIAHDFPGIGHKVDAVFMKDGFFYFFHGTRQYKFDPKTKRILTLQKANSWFNCRKN

SEQ ID NO: 1094 - protein, 450 aa, Artificial Sequence
  MMP-1 variant R98F
FPATLETQEQDVDLVQKYLEKYYNLKNDGRQVEKRRNSGPVVEKLKQMQEFFGLKVTGKPDAETLKVMKQPRCGVPDVAQFVLTEGNPRWEQTHLTYFIENYTPDLPRADVDHAIEKAFQLWSNVTPLTFTKVSEGQADIMISFVRGDHRDNSPFDGPGGNLAHAFQPGPGIGGDAHFDEDERWTNNFREYNLHRVAAHELGHSLGLSHSTDIGALMYPSYTFSGDVQLAQDDIDGIQAIYGRSQNPVQPIGPQTPKACDSKLTFDAITTIRGEVMFFKDRFYMRTNPFYPEVELNFISVFWPQLPNGLEAAYEFADRDEVRFFKGNKYWAVQGQNVLHGYPKDIYSSFGFPRTVKHIDAALSEENTGKTYFFVANKYWRYDEYKRSMDPGYPKMIAHDFPGIGHKVDAVFMKDGFFYFFHGTRQYKFDPKTKRILTLQKANSWFNCRKN

SEQ ID NO: 1095 - protein, 450 aa, Artificial Sequence
  MMP-1 variant R98M
FPATLETQEQDVDLVQKYLEKYYNLKNDGRQVEKRRNSGPVVEKLKQMQEFFGLKVTGKPDAETLKVMKQPRCGVPDVAQFVLTEGNPRWEQTHLTYMIENYTPDLPRADVDHAIEKAFQLWSNVTPLTFTKVSEGQADIMISFVRGDHRDNSPFDGPGGNLAHAFQPGPGIGGDAHFDEDERWTNNFREYNLHRVAAHELGHSLGLSHSTDIGALMYPSYTFSGDVQLAQDDIDGIQAIYGRSQNPVQPIGPQTPKACDSKLTFDAITTIRGEVMFFKDRFYMRTNPFYPEVELNFISVFWPQLPNGLEAAYEFADRDEVRFFKGNKYWAVQGQNVLHGYPKDIYSSFGFPRTVKHIDAALSEENTGKTYFFVANKYWRYDEYKRSMDPGYPKMIAHDFPGIGHKVDAVFMKDGFFYFFHGTRQYKFDPKTKRILTLQKANSWFNCRKN

SEQ ID NO: 1096 - protein, 450 aa, Artificial Sequence
  MMP-1 variant R98W
FPATLETQEQDVDLVQKYLEKYYNLKNDGRQVEKRRNSGPVVEKLKQMQEFFGLKVTGKPDAETLKVMKQPRCGVPDVAQFVLTEGNPRWEQTHLTYWIENYTPDLPRADVDHAIEKAFQLWSNVTPLTFTKVSEGQADIMISFVRGDHRDNSPFDGPGGNLAHAFQPGPGIGGDAHFDEDERWTNNFREYNLHRVAAHELGHSLGLSHSTDIGALMYPSYTFSGDVQLAQDDIDGIQAIYGRSQNPVQPIGPQTPKACDSKLTFDAITTIRGEVMFFKDRFYMRTNPFYPEVELNFISVFWPQLPNGLEAAYEFADRDEVRFFKGNKYWAVQGQNVLHGYPKDIYSSFGFPRTVKHIDAALSEENTGKTYFFVANKYWRYDEYKRSMDPGYPKMIAHDFPGIGHKVDAVFMKDGFFYFFHGTRQYKFDPKTKRILTLQKANSWFNCRKN

SEQ ID NO: 1097 - protein, 450 aa, Artificial Sequence
  MMP-1 variant R98I
FPATLETQEQDVDLVQKYLEKYYNLKNDGRQVEKRRNSGPVVEKLKQMQEFFGLKVTGKPDAETLKVMKQPRCGVPDVAQFVLTEGNPRWEQTHLTYIIENYTPDLPRADVDHAIEKAFQLWSNVTPLTFTKVSEGQADIMISFVRGDHRDNSPFDGPGGNLAHAFQPGPGIGGDAHFDEDERWTNNFREYNLHRVAAHELGHSLGLSHSTDIGALMYPSYTFSGDVQLAQDDIDGIQAIYGRSQNPVQPIGPQTPKACDSKLTFDAITTIRGEVMFFKDRFYMRTNPFYPEVELNFISVFWPQLPNGLEAAYEFADRDEVRFFKGNKYWAVQGQNVLHGYPKDIYSSFGFPRTVKHIDAALSEENTGKTYFFVANKYWRYDEYKRSMDPGYPKMIAHDFPGIGHKVDAVFMKDGFFYFFHGTRQYKFDPKTKRILTLQKANSWFNCRKN

SEQ ID NO: 1098 - protein, 450 aa, Artificial Sequence
  MMP-1 variant R98V
FPATLETQEQDVDLVQKYLEKYYNLKNDGRQVEKRRNSGPVVEKLKQMQEFFGLKVTGKPDAETLKVMKQPRCGVPDVAQFVLTEGNPRWEQTHLTYVIENYTPDLPRADVDHAIEKAFQLWSNVTPLTFTKVSEGQADIMISFVRGDHRDNSPFDGPGGNLAHAFQPGPGIGGDAHFDEDERWTNNFREYNLHRVAAHELGHSLGLSHSTDIGALMYPSYTFSGDVQLAQDDIDGIQAIYGRSQNPVQPIGPQTPKACDSKLTFDAITTIRGEVMFFKDRFYMRTNPFYPEVELNFISVFWPQLPNGLEAAYEFADRDEVRFFKGNKYWAVQGQNVLHGYPKDIYSSFGFPRTVKHIDAALSEENTGKTYFFVANKYWRYDEYKRSMDPGYPKMIAHDFPGIGHKVDAVFMKDGFFYFFHGTRQYKFDPKTKRILTLQKANSWFNCRKN

SEQ ID NO: 1099 - protein, 450 aa, Artificial Sequence
  MMP-1 variant R98L
FPATLETQEQDVDLVQKYLEKYYNLKNDGRQVEKRRNSGPVVEKLKQMQEFFGLKVTGKPDAETLKVMKQPRCGVPDVAQFVLTEGNPRWEQTHLTYLIENYTPDLPRADVDHAIEKAFQLWSNVTPLTFTKVSEGQADIMISFVRGDHRDNSPFDGPGGNLAHAFQPGPGIGGDAHFDEDERWTNNFREYNLHRVAAHELGHSLGLSHSTDIGALMYPSYTFSGDVQLAQDDIDGIQAIYGRSQNPVQPIGPQTPKACDSKLTFDAITTIRGEVMFFKDRFYMRTNPFYPEVELNFISVFWPQLPNGLEAAYEFADRDEVRFFKGNKYWAVQGQNVLHGYPKDIYSSFGFPRTVKHIDAALSEENTGKTYFFVANKYWRYDEYKRSMDPGYPKMIAHDFPGIGHKVDAVFMKDGFFYFFHGTRQYKFDPKTKRILTLQKANSWFNCRKN

SEQ ID NO: 1100 - protein, 450 aa, Artificial Sequence
  MMP-1 variant R98A
FPATLETQEQDVDLVQKYLEKYYNLKNDGRQVEKRRNSGPVVEKLKQMQEFFGLKVTGKPDAETLKVMKQPRCGVPDVAQFVLTEGNPRWEQTHLTYAIENYTPDLPRADVDHAIEKAFQLWSNVTPLTFTKVSEGQADIMISFVRGDHRDNSPFDGPGGNLAHAFQPGPGIGGDAHFDEDERWTNNFREYNLHRVAAHELGHSLGLSHSTDIGALMYPSYTFSGDVQLAQDDIDGIQAIYGRSQNPVQPIGPQTPKACDSKLTFDAITTIRGEVMFFKDRFYMRTNPFYPEVELNFISVFWPQLPNGLEAAYEFADRDEVRFFKGNKYWAVQGQNVLHGYPKDIYSSFGFPRTVKHIDAALSEENTGKTYFFVANKYWRYDEYKRSMDPGYPKMIAHDFPGIGHKVDAVFMKDGFFYFFHGTRQYKFDPKTKRILTLQKANSWFNCRKN

SEQ ID NO: 1101 - protein, 450 aa, Artificial Sequence
  MMP-1 variant R98P
FPATLETQEQDVDLVQKYLEKYYNLKNDGRQVEKRRNSGPVVEKLKQMQEFFGLKVTGKPDAETLKVMKQPRCGVPDVAQFVLTEGNPRWEQTHLTYPIENYTPDLPRADVDHAIEKAFQLWSNVTPLTFTKVSEGQADIMISFVRGDHRDNSPFDGPGGNLAHAFQPGPGIGGDAHFDEDERWTNNFREYNLHRVAAHELGHSLGLSHSTDIGALMYPSYTFSGDVQLAQDDIDGIQAIYGRSQNPVQPIGPQTPKACDSKLTFDAITTIRGEVMFFKDRFYMRTNPFYPEVELNFISVFWPQLPNGLEAAYEFADRDEVRFFKGNKYWAVQGQNVLHGYPKDIYSSFGFPRTVKHIDAALSEENTGKTYFFVANKYWRYDEYKRSMDPGYPKMIAHDFPGIGHKVDAVFMKDGFFYFFHGTRQYKFDPKTKRILTLQKANSWFNCRKN

SEQ ID NO: 1102 - protein, 450 aa, Artificial Sequence
  MMP-1 variant I99D
FPATLETQEQDVDLVQKYLEKYYNLKNDGRQVEKRRNSGPVVEKLKQMQEFFGLKVTGKPDAETLKVMKQPRCGVPDVAQFVLTEGNPRWEQTHLTYRDENYTPDLPRADVDHAIEKAFQLWSNVTPLTFTKVSEGQADIMISFVRGDHRDNSPFDGPGGNLAHAFQPGPGIGGDAHFDEDERWTNNFREYNLHRVAAHELGHSLGLSHSTDIGALMYPSYTFSGDVQLAQDDIDGIQAIYGRSQNPVQPIGPQTPKACDSKLTFDAITTIRGEVMFFKDRFYMRTNPFYPEVELNFISVFWPQLPNGLEAAYEFADRDEVRFFKGNKYWAVQGQNVLHGYPKDIYSSFGFPRTVKHIDAALSEENTGKTYFFVANKYWRYDEYKRSMDPGYPKMIAHDFPGIGHKVDAVFMKDGFFYFFHGTRQYKFDPKTKRILTLQKANSWFNCRKN

SEQ ID NO: 1103 - protein, 450 aa, Artificial Sequence
  MMP-1 variant I99E
FPATLETQEQDVDLVQKYLEKYYNLKNDGRQVEKRRNSGPVVEKLKQMQEFFGLKVTGKPDAETLKVMKQPRCGVPDVAQFVLTEGNPRWEQTHLTYREENYTPDLPRADVDHAIEKAFQLWSNVTPLTFTKVSEGQADIMISFVRGDHRDNSPFDGPGGNLAHAFQPGPGIGGDAHFDEDERWTNNFREYNLHRVAAHELGHSLGLSHSTDIGALMYPSYTFSGDVQLAQDDIDGIQAIYGRSQNPVQPIGPQTPKACDSKLTFDAITTIRGEVMFFKDRFYMRTNPFYPEVELNFISVFWPQLPNGLEAAYEFADRDEVRFFKGNKYWAVQGQNVLHGYPKDIYSSFGFPRTVKHIDAALSEENTGKTYFFVANKYWRYDEYKRSMDPGYPKMIAHDFPGIGHKVDAVFMKDGFFYFFHGTRQYKFDPKTKRILTLQKANSWFNCRKN

SEQ ID NO: 1104 - protein, 450 aa, Artificial Sequence
  MMP-1 variant I99H
FPATLETQEQDVDLVQKYLEKYYNLKNDGRQVEKRRNSGPVVEKLKQMQEFFGLKVTGKPDAETLKVMKQPRCGVPDVAQFVLTEGNPRWEQTHLTYRHENYTPDLPRADVDHAIEKAFQLWSNVTPLTFTKVSEGQADIMISFVRGDHRDNSPFDGPGGNLAHAFQPGPGIGGDAHFDEDERWTNNFREYNLHRVAAHELGHSLGLSHSTDIGALMYPSYTFSGDVQLAQDDIDGIQAIYGRSQNPVQPIGPQTPKACDSKLTFDAITTIRGEVMFFKDRFYMRTNPFYPEVELNFISVFWPQLPNGLEAAYEFADRDEVRFFKGNKYWAVQGQNVLHGYPKDIYSSFGFPRTVKHIDAALSEENTGKTYFFVANKYWRYDEYKRSMDPGYPKMIAHDFPGIGHKVDAVFMKDGFFYFFHGTRQYKFDPKTKRILTLQKANSWFNCRKN

SEQ ID NO: 1105 - protein, 450 aa, Artificial Sequence
  MMP-1 variant I99K
FPATLETQEQDVDLVQKYLEKYYNLKNDGRQVEKRRNSGPVVEKLKQMQEFFGLKVTGKPDAETLKVMKQPRCGVPDVAQFVLTEGNPRWEQTHLTYRKENYTPDLPRADVDHAIEKAFQLWSNVTPLTFTKVSEGQADIMISFVRGDHRDNSPFDGPGGNLAHAFQPGPGIGGDAHFDEDERWTNNFREYNLHRVAAHELGHSLGLSHSTDIGALMYPSYTFSGDVQLAQDDIDGIQAIYGRSQNPVQPIGPQTPKACDSKLTFDAITTIRGEVMFFKDRFYMRTNPFYPEVELNFISVFWPQLPNGLEAAYEFADRDEVRFFKGNKYWAVQGQNVLHGYPKDIYSSFGFPRTVKHIDAALSEENTGKTYFFVANKYWRYDEYKRSMDPGYPKMIAHDFPGIGHKVDAVFMKDGFFYFFHGTRQYKFDPKTKRILTLQKANSWFNCRKN

SEQ ID NO: 1106 - protein, 450 aa, Artificial Sequence
  MMP-1 variant I99R
FPATLETQEQDVDLVQKYLEKYYNLKNDGRQVEKRRNSGPVVEKLKQMQEFFGLKVTGKPDAETLKVMKQPRCGVPDVAQFVLTEGNPRWEQTHLTYRRENYTPDLPRADVDHAIEKAFQLWSNVTPLTFTKVSEGQADIMISFVRGDHRDNSPFDGPGGNLAHAFQPGPGIGGDAHFDEDERWTNNFREYNLHRVAAHELGHSLGLSHSTDIGALMYPSYTFSGDVQLAQDDIDGIQAIYGRSQNPVQPIGPQTPKACDSKLTFDAITTIRGEVMFFKDRFYMRTNPFYPEVELNFISVFWPQLPNGLEAAYEFADRDEVRFFKGNKYWAVQGQNVLHGYPKDIYSSFGFPRTVKHIDAALSEENTGKTYFFVANKYWRYDEYKRSMDPGYPKMIAHDFPGIGHKVDAVFMKDGFFYFFHGTRQYKFDPKTKRILTLQKANSWFNCRKN

SEQ ID NO: 1107 - protein, 450 aa, Artificial Sequence
  MMP-1 variant I99C
FPATLETQEQDVDLVQKYLEKYYNLKNDGRQVEKRRNSGPVVEKLKQMQEFFGLKVTGKPDAETLKVMKQPRCGVPDVAQFVLTEGNPRWEQTHLTYRCENYTPDLPRADVDHAIEKAFQLWSNVTPLTFTKVSEGQADIMISFVRGDHRDNSPFDGPGGNLAHAFQPGPGIGGDAHFDEDERWTNNFREYNLHRVAAHELGHSLGLSHSTDIGALMYPSYTFSGDVQLAQDDIDGIQAIYGRSQNPVQPIGPQTPKACDSKLTFDAITTIRGEVMFFKDRFYMRTNPFYPEVELNFISVFWPQLPNGLEAAYEFADRDEVRFFKGNKYWAVQGQNVLHGYPKDIYSSFGFPRTVKHIDAALSEENTGKTYFFVANKYWRYDEYKRSMDPGYPKMIAHDFPGIGHKVDAVFMKDGFFYFFHGTRQYKFDPKTKRILTLQKANSWFNCRKN

SEQ ID NO: 1108 - protein, 450 aa, Artificial Sequence
  MMP-1 variant I99N
FPATLETQEQDVDLVQKYLEKYYNLKNDGRQVEKRRNSGPVVEKLKQMQEFFGLKVTGKPDAETLKVMKQPRCGVPDVAQFVLTEGNPRWEQTHLTYRNENYTPDLPRADVDHAIEKAFQLWSNVTPLTFTKVSEGQADIMISFVRGDHRDNSPFDGPGGNLAHAFQPGPGIGGDAHFDEDERWTNNFREYNLHRVAAHELGHSLGLSHSTDIGALMYPSYTFSGDVQLAQDDIDGIQAIYGRSQNPVQPIGPQTPKACDSKLTFDAITTIRGEVMFFKDRFYMRTNPFYPEVELNFISVFWPQLPNGLEAAYEFADRDEVRFFKGNKYWAVQGQNVLHGYPKDIYSSFGFPRTVKHIDAALSEENTGKTYFFVANKYWRYDEYKRSMDPGYPKMIAHDFPGIGHKVDAVFMKDGFFYFFHGTRQYKFDPKTKRILTLQKANSWFNCRKN

SEQ ID NO: 1109 - protein, 450 aa, Artificial Sequence
  MMP-1 variant I99Q
FPATLETQEQDVDLVQKYLEKYYNLKNDGRQVEKRRNSGPVVEKLKQMQEFFGLKVTGKPDAETLKVMKQPRCGVPDVAQFVLTEGNPRWEQTHLTYRQENYTPDLPRADVDHAIEKAFQLWSNVTPLTFTKVSEGQADIMISFVRGDHRDNSPFDGPGGNLAHAFQPGPGIGGDAHFDEDERWTNNFREYNLHRVAAHELGHSLGLSHSTDIGALMYPSYTFSGDVQLAQDDIDGIQAIYGRSQNPVQPIGPQTPKACDSKLTFDAITTIRGEVMFFKDRFYMRTNPFYPEVELNFISVFWPQLPNGLEAAYEFADRDEVRFFKGNKYWAVQGQNVLHGYPKDIYSSFGFPRTVKHIDAALSEENTGKTYFFVANKYWRYDEYKRSMDPGYPKMIAHDFPGIGHKVDAVFMKDGFFYFFHGTRQYKFDPKTKRILTLQKANSWFNCRKN

SEQ ID NO: 1110 - protein, 450 aa, Artificial Sequence
  MMP-1 variant I99T
FPATLETQEQDVDLVQKYLEKYYNLKNDGRQVEKRRNSGPVVEKLKQMQEFFGLKVTGKPDAETLKVMKQPRCGVPDVAQFVLTEGNPRWEQTHLTYRTENYTPDLPRADVDHAIEKAFQLWSNVTPLTFTKVSEGQADIMISFVRGDHRDNSPFDGPGGNLAHAFQPGPGIGGDAHFDEDERWTNNFREYNLHRVAAHELGHSLGLSHSTDIGALMYPSYTFSGDVQLAQDDIDGIQAIYGRSQNPVQPIGPQTPKACDSKLTFDAITTIRGEVMFFKDRFYMRTNPFYPEVELNFISVFWPQLPNGLEAAYEFADRDEVRFFKGNKYWAVQGQNVLHGYPKDIYSSFGFPRTVKHIDAALSEENTGKTYFFVANKYWRYDEYKRSMDPGYPKMIAHDFPGIGHKVDAVFMKDGFFYFFHGTRQYKFDPKTKRILTLQKANSWFNCRKN

SEQ ID NO: 1111 - protein, 450 aa, Artificial Sequence
  MMP-1 variant I99Y
FPATLETQEQDVDLVQKYLEKYYNLKNDGRQVEKRRNSGPVVEKLKQMQEFFGLKVTGKPDAETLKVMKQPRCGVPDVAQFVLTEGNPRWEQTHLTYRYENYTPDLPRADVDHAIEKAFQLWSNVTPLTFTKVSEGQADIMISFVRGDHRDNSPFDGPGGNLAHAFQPGPGIGGDAHFDEDERWTNNFREYNLHRVAAHELGHSLGLSHSTDIGALMYPSYTFSGDVQLAQDDIDGIQAIYGRSQNPVQPIGPQTPKACDSKLTFDAITTIRGEVMFFKDRFYMRTNPFYPEVELNFISVFWPQLPNGLEAAYEFADRDEVRFFKGNKYWAVQGQNVLHGYPKDIYSSFGFPRTVKHIDAALSEENTGKTYFFVANKYWRYDEYKRSMDPGYPKMIAHDFPGIGHKVDAVFMKDGFFYFFHGTRQYKFDPKTKRILTLQKANSWFNCRKN

SEQ ID NO: 1112 - protein, 450 aa, Artificial Sequence
  MMP-1 variant I99S
FPATLETQEQDVDLVQKYLEKYYNLKNDGRQVEKRRNSGPVVEKLKQMQEFFGLKVTGKPDAETLKVMKQPRCGVPDVAQFVLTEGNPRWEQTHLTYRSENYTPDLPRADVDHAIEKAFQLWSNVTPLTFTKVSEGQADIMISFVRGDHRDNSPFDGPGGNLAHAFQPGPGIGGDAHFDEDERWTNNFREYNLHRVAAHELGHSLGLSHSTDIGALMYPSYTFSGDVQLAQDDIDGIQAIYGRSQNPVQPIGPQTPKACDSKLTFDAITTIRGEVMFFKDRFYMRTNPFYPEVELNFISVFWPQLPNGLEAAYEFADRDEVRFFKGNKYWAVQGQNVLHGYPKDIYSSFGFPRTVKHIDAALSEENTGKTYFFVANKYWRYDEYKRSMDPGYPKMIAHDFPGIGHKVDAVFMKDGFFYFFHGTRQYKFDPKTKRILTLQKANSWFNCRKN

SEQ ID NO: 1113 - protein, 450 aa, Artificial Sequence
  MMP-1 variant I99G
FPATLETQEQDVDLVQKYLEKYYNLKNDGRQVEKRRNSGPVVEKLKQMQEFFGLKVTGKPDAETLKVMKQPRCGVPDVAQFVLTEGNPRWEQTHLTYRGENYTPDLPRADVDHAIEKAFQLWSNVTPLTFTKVSEGQADIMISFVRGDHRDNSPFDGPGGNLAHAFQPGPGIGGDAHFDEDERWTNNFREYNLHRVAAHELGHSLGLSHSTDIGALMYPSYTFSGDVQLAQDDIDGIQAIYGRSQNPVQPIGPQTPKACDSKLTFDAITTIRGEVMFFKDRFYMRTNPFYPEVELNFISVFWPQLPNGLEAAYEFADRDEVRFFKGNKYWAVQGQNVLHGYPKDIYSSFGFPRTVKHIDAALSEENTGKTYFFVANKYWRYDEYKRSMDPGYPKMIAHDFPGIGHKVDAVFMKDGFFYFFHGTRQYKFDPKTKRILTLQKANSWFNCRKN

SEQ ID NO: 1114 - protein, 450 aa, Artificial Sequence
  MMP-1 variant I99F
FPATLETQEQDVDLVQKYLEKYYNLKNDGRQVEKRRNSGPVVEKLKQMQEFFGLKVTGKPDAETLKVMKQPRCGVPDVAQFVLTEGNPRWEQTHLTYRFENYTPDLPRADVDHAIEKAFQLWSNVTPLTFTKVSEGQADIMISFVRGDHRDNSPFDGPGGNLAHAFQPGPGIGGDAHFDEDERWTNNFREYNLHRVAAHELGHSLGLSHSTDIGALMYPSYTFSGDVQLAQDDIDGIQAIYGRSQNPVQPIGPQTPKACDSKLTFDAITTIRGEVMFFKDRFYMRTNPFYPEVELNFISVFWPQLPNGLEAAYEFADRDEVRFFKGNKYWAVQGQNVLHGYPKDIYSSFGFPRTVKHIDAALSEENTGKTYFFVANKYWRYDEYKRSMDPGYPKMIAHDFPGIGHKVDAVFMKDGFFYFFHGTRQYKFDPKTKRILTLQKANSWFNCRKN

SEQ ID NO: 1115 - protein, 450 aa, Artificial Sequence
  MMP-1 variant I99M
FPATLETQEQDVDLVQKYLEKYYNLKNDGRQVEKRRNSGPVVEKLKQMQEFFGLKVTGKPDAETLKVMKQPRCGVPDVAQFVLTEGNPRWEQTHLTYRMENYTPDLPRADVDHAIEKAFQLWSNVTPLTFTKVSEGQADIMISFVRGDHRDNSPFDGPGGNLAHAFQPGPGIGGDAHFDEDERWTNNFREYNLHRVAAHELGHSLGLSHSTDIGALMYPSYTFSGDVQLAQDDIDGIQAIYGRSQNPVQPIGPQTPKACDSKLTFDAITTIRGEVMFFKDRFYMRTNPFYPEVELNFISVFWPQLPNGLEAAYEFADRDEVRFFKGNKYWAVQGQNVLHGYPKDIYSSFGFPRTVKHIDAALSEENTGKTYFFVANKYWRYDEYKRSMDPGYPKMIAHDFPGIGHKVDAVFMKDGFFYFFHGTRQYKFDPKTKRILTLQKANSWFNCRKN

SEQ ID NO: 1116 - protein, 450 aa, Artificial Sequence
  MMP-1 variant I99W
FPATLETQEQDVDLVQKYLEKYYNLKNDGRQVEKRRNSGPVVEKLKQMQEFFGLKVTGKPDAETLKVMKQPRCGVPDVAQFVLTEGNPRWEQTHLTYRWENYTPDLPRADVDHAIEKAFQLWSNVTPLTFTKVSEGQADIMISFVRGDHRDNSPFDGPGGNLAHAFQPGPGIGGDAHFDEDERWTNNFREYNLHRVAAHELGHSLGLSHSTDIGALMYPSYTFSGDVQLAQDDIDGIQAIYGRSQNPVQPIGPQTPKACDSKLTFDAITTIRGEVMFFKDRFYMRTNPFYPEVELNFISVFWPQLPNGLEAAYEFADRDEVRFFKGNKYWAVQGQNVLHGYPKDIYSSFGFPRTVKHIDAALSEENTGKTYFFVANKYWRYDEYKRSMDPGYPKMIAHDFPGIGHKVDAVFMKDGFFYFFHGTRQYKFDPKTKRILTLQKANSWFNCRKN

SEQ ID NO: 1117 - protein, 450 aa, Artificial Sequence
  MMP-1 variant I99V
FPATLETQEQDVDLVQKYLEKYYNLKNDGRQVEKRRNSGPVVEKLKQMQEFFGLKVTGKPDAETLKVMKQPRCGVPDVAQFVLTEGNPRWEQTHLTYRVENYTPDLPRADVDHAIEKAFQLWSNVTPLTFTKVSEGQADIMISFVRGDHRDNSPFDGPGGNLAHAFQPGPGIGGDAHFDEDERWTNNFREYNLHRVAAHELGHSLGLSHSTDIGALMYPSYTFSGDVQLAQDDIDGIQAIYGRSQNPVQPIGPQTPKACDSKLTFDAITTIRGEVMFFKDRFYMRTNPFYPEVELNFISVFWPQLPNGLEAAYEFADRDEVRFFKGNKYWAVQGQNVLHGYPKDIYSSFGFPRTVKHIDAALSEENTGKTYFFVANKYWRYDEYKRSMDPGYPKMIAHDFPGIGHKVDAVFMKDGFFYFFHGTRQYKFDPKTKRILTLQKANSWFNCRKN

SEQ ID NO: 1118 - protein, 450 aa, Artificial Sequence
  MMP-1 variant I99L
FPATLETQEQDVDLVQKYLEKYYNLKNDGRQVEKRRNSGPVVEKLKQMQEFFGLKVTGKPDAETLKVMKQPRCGVPDVAQFVLTEGNPRWEQTHLTYRLENYTPDLPRADVDHAIEKAFQLWSNVTPLTFTKVSEGQADIMISFVRGDHRDNSPFDGPGGNLAHAFQPGPGIGGDAHFDEDERWTNNFREYNLHRVAAHELGHSLGLSHSTDIGALMYPSYTFSGDVQLAQDDIDGIQAIYGRSQNPVQPIGPQTPKACDSKLTFDAITTIRGEVMFFKDRFYMRTNPFYPEVELNFISVFWPQLPNGLEAAYEFADRDEVRFFKGNKYWAVQGQNVLHGYPKDIYSSFGFPRTVKHIDAALSEENTGKTYFFVANKYWRYDEYKRSMDPGYPKMIAHDFPGIGHKVDAVFMKDGFFYFFHGTRQYKFDPKTKRILTLQKANSWFNCRKN

SEQ ID NO: 1119 - protein, 450 aa, Artificial Sequence
  MMP-1 variant I99A
FPATLETQEQDVDLVQKYLEKYYNLKNDGRQVEKRRNSGPVVEKLKQMQEFFGLKVTGKPDAETLKVMKQPRCGVPDVAQFVLTEGNPRWEQTHLTYRAENYTPDLPRADVDHAIEKAFQLWSNVTPLTFTKVSEGQADIMISFVRGDHRDNSPFDGPGGNLAHAFQPGPGIGGDAHFDEDERWTNNFREYNLHRVAAHELGHSLGLSHSTDIGALMYPSYTFSGDVQLAQDDIDGIQAIYGRSQNPVQPIGPQTPKACDSKLTFDAITTIRGEVMFFKDRFYMRTNPFYPEVELNFISVFWPQLPNGLEAAYEFADRDEVRFFKGNKYWAVQGQNVLHGYPKDIYSSFGFPRTVKHIDAALSEENTGKTYFFVANKYWRYDEYKRSMDPGYPKMIAHDFPGIGHKVDAVFMKDGFFYFFHGTRQYKFDPKTKRILTLQKANSWFNCRKN

SEQ ID NO: 1120 - protein, 450 aa, Artificial Sequence
  MMP-1 variant I99P
FPATLETQEQDVDLVQKYLEKYYNLKNDGRQVEKRRNSGPVVEKLKQMQEFFGLKVTGKPDAETLKVMKQPRCGVPDVAQFVLTEGNPRWEQTHLTYRPENYTPDLPRADVDHAIEKAFQLWSNVTPLTFTKVSEGQADIMISFVRGDHRDNSPFDGPGGNLAHAFQPGPGIGGDAHFDEDERWTNNFREYNLHRVAAHELGHSLGLSHSTDIGALMYPSYTFSGDVQLAQDDIDGIQAIYGRSQNPVQPIGPQTPKACDSKLTFDAITTIRGEVMFFKDRFYMRTNPFYPEVELNFISVFWPQLPNGLEAAYEFADRDEVRFFKGNKYWAVQGQNVLHGYPKDIYSSFGFPRTVKHIDAALSEENTGKTYFFVANKYWRYDEYKRSMDPGYPKMIAHDFPGIGHKVDAVFMKDGFFYFFHGTRQYKFDPKTKRILTLQKANSWFNCRKN

SEQ ID NO: 1121 - protein, 450 aa, Artificial Sequence
  MMP-1 variant N101D
FPATLETQEQDVDLVQKYLEKYYNLKNDGRQVEKRRNSGPVVEKLKQMQEFFGLKVTGKPDAETLKVMKQPRCGVPDVAQFVLTEGNPRWEQTHLTYRIEDYTPDLPRADVDHAIEKAFQLWSNVTPLTFTKVSEGQADIMISFVRGDHRDNSPFDGPGGNLAHAFQPGPGIGGDAHFDEDERWTNNFREYNLHRVAAHELGHSLGLSHSTDIGALMYPSYTFSGDVQLAQDDIDGIQAIYGRSQNPVQPIGPQTPKACDSKLTFDAITTIRGEVMFFKDRFYMRTNPFYPEVELNFISVFWPQLPNGLEAAYEFADRDEVRFFKGNKYWAVQGQNVLHGYPKDIYSSFGFPRTVKHIDAALSEENTGKTYFFVANKYWRYDEYKRSMDPGYPKMIAHDFPGIGHKVDAVFMKDGFFYFFHGTRQYKFDPKTKRILTLQKANSWFNCRKN

SEQ ID NO: 1122 - protein, 450 aa, Artificial Sequence
  MMP-1 variant N101E
FPATLETQEQDVDLVQKYLEKYYNLKNDGRQVEKRRNSGPVVEKLKQMQEFFGLKVTGKPDAETLKVMKQPRCGVPDVAQFVLTEGNPRWEQTHLTYRIEEYTPDLPRADVDHAIEKAFQLWSNVTPLTFTKVSEGQADIMISFVRGDHRDNSPFDGPGGNLAHAFQPGPGIGGDAHFDEDERWTNNFREYNLHRVAAHELGHSLGLSHSTDIGALMYPSYTFSGDVQLAQDDIDGIQAIYGRSQNPVQPIGPQTPKACDSKLTFDAITTIRGEVMFFKDRFYMRTNPFYPEVELNFISVFWPQLPNGLEAAYEFADRDEVRFFKGNKYWAVQGQNVLHGYPKDIYSSFGFPRTVKHIDAALSEENTGKTYFFVANKYWRYDEYKRSMDPGYPKMIAHDFPGIGHKVDAVFMKDGFFYFFHGTRQYKFDPKTKRILTLQKANSWFNCRKN

SEQ ID NO: 1123 - protein, 450 aa, Artificial Sequence
  MMP-1 variant N101H
FPATLETQEQDVDLVQKYLEKYYNLKNDGRQVEKRRNSGPVVEKLKQMQEFFGLKVTGKPDAETLKVMKQPRCGVPDVAQFVLTEGNPRWEQTHLTYRIEHYTPDLPRADVDHAIEKAFQLWSNVTPLTFTKVSEGQADIMISFVRGDHRDNSPFDGPGGNLAHAFQPGPGIGGDAHFDEDERWTNNFREYNLHRVAAHELGHSLGLSHSTDIGALMYPSYTFSGDVQLAQDDIDGIQAIYGRSQNPVQPIGPQTPKACDSKLTFDAITTIRGEVMFFKDRFYMRTNPFYPEVELNFISVFWPQLPNGLEAAYEFADRDEVRFFKGNKYWAVQGQNVLHGYPKDIYSSFGFPRTVKHIDAALSEENTGKTYFFVANKYWRYDEYKRSMDPGYPKMIAHDFPGIGHKVDAVFMKDGFFYFFHGTRQYKFDPKTKRILTLQKANSWFNCRKN

SEQ ID NO: 1124 - protein, 450 aa, Artificial Sequence
  MMP-1 variant N101K
FPATLETQEQDVDLVQKYLEKYYNLKNDGRQVEKRRNSGPVVEKLKQMQEFFGLKVTGKPDAETLKVMKQPRCGVPDVAQFVLTEGNPRWEQTHLTYRIEKYTPDLPRADVDHAIEKAFQLWSNVTPLTFTKVSEGQADIMISFVRGDHRDNSPFDGPGGNLAHAFQPGPGIGGDAHFDEDERWTNNFREYNLHRVAAHELGHSLGLSHSTDIGALMYPSYTFSGDVQLAQDDIDGIQAIYGRSQNPVQPIGPQTPKACDSKLTFDAITTIRGEVMFFKDRFYMRTNPFYPEVELNFISVFWPQLPNGLEAAYEFADRDEVRFFKGNKYWAVQGQNVLHGYPKDIYSSFGFPRTVKHIDAALSEENTGKTYFFVANKYWRYDEYKRSMDPGYPKMIAHDFPGIGHKVDAVFMKDGFFYFFHGTRQYKFDPKTKRILTLQKANSWFNCRKN

SEQ ID NO: 1125 - protein, 450 aa, Artificial Sequence
  MMP-1 variant N101R
FPATLETQEQDVDLVQKYLEKYYNLKNDGRQVEKRRNSGPVVEKLKQMQEFFGLKVTGKPDAETLKVMKQPRCGVPDVAQFVLTEGNPRWEQTHLTYRIERYTPDLPRADVDHAIEKAFQLWSNVTPLTFTKVSEGQADIMISFVRGDHRDNSPFDGPGGNLAHAFQPGPGIGGDAHFDEDERWTNNFREYNLHRVAAHELGHSLGLSHSTDIGALMYPSYTFSGDVQLAQDDIDGIQAIYGRSQNPVQPIGPQTPKACDSKLTFDAITTIRGEVMFFKDRFYMRTNPFYPEVELNFISVFWPQLPNGLEAAYEFADRDEVRFFKGNKYWAVQGQNVLHGYPKDIYSSFGFPRTVKHIDAALSEENTGKTYFFVANKYWRYDEYKRSMDPGYPKMIAHDFPGIGHKVDAVFMKDGFFYFFHGTRQYKFDPKTKRILTLQKANSWFNCRKN

SEQ ID NO: 1126 - protein, 450 aa, Artificial Sequence
  MMP-1 variant N101C
FPATLETQEQDVDLVQKYLEKYYNLKNDGRQVEKRRNSGPVVEKLKQMQEFFGLKVTGKPDAETLKVMKQPRCGVPDVAQFVLTEGNPRWEQTHLTYRIECYTPDLPRADVDHAIEKAFQLWSNVTPLTFTKVSEGQADIMISFVRGDHRDNSPFDGPGGNLAHAFQPGPGIGGDAHFDEDERWTNNFREYNLHRVAAHELGHSLGLSHSTDIGALMYPSYTFSGDVQLAQDDIDGIQAIYGRSQNPVQPIGPQTPKACDSKLTFDAITTIRGEVMFFKDRFYMRTNPFYPEVELNFISVFWPQLPNGLEAAYEFADRDEVRFFKGNKYWAVQGQNVLHGYPKDIYSSFGFPRTVKHIDAALSEENTGKTYFFVANKYWRYDEYKRSMDPGYPKMIAHDFPGIGHKVDAVFMKDGFFYFFHGTRQYKFDPKTKRILTLQKANSWFNCRKN

SEQ ID NO: 1127 - protein, 450 aa, Artificial Sequence
  MMP-1 variant N101Q
FPATLETQEQDVDLVQKYLEKYYNLKNDGRQVEKRRNSGPVVEKLKQMQEFFGLKVTGKPDAETLKVMKQPRCGVPDVAQFVLTEGNPRWEQTHLTYRIEQYTPDLPRADVDHAIEKAFQLWSNVTPLTFTKVSEGQADIMISFVRGDHRDNSPFDGPGGNLAHAFQPGPGIGGDAHFDEDERWTNNFREYNLHRVAAHELGHSLGLSHSTDIGALMYPSYTFSGDVQLAQDDIDGIQAIYGRSQNPVQPIGPQTPKACDSKLTFDAITTIRGEVMFFKDRFYMRTNPFYPEVELNFISVFWPQLPNGLEAAYEFADRDEVRFFKGNKYWAVQGQNVLHGYPKDIYSSFGFPRTVKHIDAALSEENTGKTYFFVANKYWRYDEYKRSMDPGYPKMIAHDFPGIGHKVDAVFMKDGFFYFFHGTRQYKFDPKTKRILTLQKANSWFNCRKN

SEQ ID NO: 1128 - protein, 450 aa, Artificial Sequence
  MMP-1 variant N101T
FPATLETQEQDVDLVQKYLEKYYNLKNDGRQVEKRRNSGPVVEKLKQMQEFFGLKVTGKPDAETLKVMKQPRCGVPDVAQFVLTEGNPRWEQTHLTYRIETYTPDLPRADVDHAIEKAFQLWSNVTPLTFTKVSEGQADIMISFVRGDHRDNSPFDGPGGNLAHAFQPGPGIGGDAHFDEDERWTNNFREYNLHRVAAHELGHSLGLSHSTDIGALMYPSYTFSGDVQLAQDDIDGIQAIYGRSQNPVQPIGPQTPKACDSKLTFDAITTIRGEVMFFKDRFYMRTNPFYPEVELNFISVFWPQLPNGLEAAYEFADRDEVRFFKGNKYWAVQGQNVLHGYPKDIYSSFGFPRTVKHIDAALSEENTGKTYFFVANKYWRYDEYKRSMDPGYPKMIAHDFPGIGHKVDAVFMKDGFFYFFHGTRQYKFDPKTKRILTLQKANSWFNCRKN

SEQ ID NO: 1129 - protein, 450 aa, Artificial Sequence
  MMP-1 variant N101Y
FPATLETQEQDVDLVQKYLEKYYNLKNDGRQVEKRRNSGPVVEKLKQMQEFFGLKVTGKPDAETLKVMKQPRCGVPDVAQFVLTEGNPRWEQTHLTYRIEYYTPDLPRADVDHAIEKAFQLWSNVTPLTFTKVSEGQADIMISFVRGDHRDNSPFDGPGGNLAHAFQPGPGIGGDAHFDEDERWTNNFREYNLHRVAAHELGHSLGLSHSTDIGALMYPSYTFSGDVQLAQDDIDGIQAIYGRSQNPVQPIGPQTPKACDSKLTFDAITTIRGEVMFFKDRFYMRTNPFYPEVELNFISVFWPQLPNGLEAAYEFADRDEVRFFKGNKYWAVQGQNVLHGYPKDIYSSFGFPRTVKHIDAALSEENTGKTYFFVANKYWRYDEYKRSMDPGYPKMIAHDFPGIGHKVDAVFMKDGFFYFFHGTRQYKFDPKTKRILTLQKANSWFNCRKN

SEQ ID NO: 1130 - protein, 450 aa, Artificial Sequence
  MMP-1 variant N101S
FPATLETQEQDVDLVQKYLEKYYNLKNDGRQVEKRRNSGPVVEKLKQMQEFFGLKVTGKPDAETLKVMKQPRCGVPDVAQFVLTEGNPRWEQTHLTYRIESYTPDLPRADVDHAIEKAFQLWSNVTPLTFTKVSEGQADIMISFVRGDHRDNSPFDGPGGNLAHAFQPGPGIGGDAHFDEDERWTNNFREYNLHRVAAHELGHSLGLSHSTDIGALMYPSYTFSGDVQLAQDDIDGIQAIYGRSQNPVQPIGPQTPKACDSKLTFDAITTIRGEVMFFKDRFYMRTNPFYPEVELNFISVFWPQLPNGLEAAYEFADRDEVRFFKGNKYWAVQGQNVLHGYPKDIYSSFGFPRTVKHIDAALSEENTGKTYFFVANKYWRYDEYKRSMDPGYPKMIAHDFPGIGHKVDAVFMKDGFFYFFHGTRQYKFDPKTKRILTLQKANSWFNCRKN

SEQ ID NO: 1131 - protein, 450 aa, Artificial Sequence
  MMP-1 variant N101G
FPATLETQEQDVDLVQKYLEKYYNLKNDGRQVEKRRNSGPVVEKLKQMQEFFGLKVTGKPDAETLKVMKQPRCGVPDVAQFVLTEGNPRWEQTHLTYRIEGYTPDLPRADVDHAIEKAFQLWSNVTPLTFTKVSEGQADIMISFVRGDHRDNSPFDGPGGNLAHAFQPGPGIGGDAHFDEDERWTNNFREYNLHRVAAHELGHSLGLSHSTDIGALMYPSYTFSGDVQLAQDDIDGIQAIYGRSQNPVQPIGPQTPKACDSKLTFDAITTIRGEVMFFKDRFYMRTNPFYPEVELNFISVFWPQLPNGLEAAYEFADRDEVRFFKGNKYWAVQGQNVLHGYPKDIYSSFGFPRTVKHIDAALSEENTGKTYFFVANKYWRYDEYKRSMDPGYPKMIAHDFPGIGHKVDAVFMKDGFFYFFHGTRQYKFDPKTKRILTLQKANSWFNCRKN

SEQ ID NO: 1132 - protein, 450 aa, Artificial Sequence
  MMP-1 variant N101F
FPATLETQEQDVDLVQKYLEKYYNLKNDGRQVEKRRNSGPVVEKLKQMQEFFGLKVTGKPDAETLKVMKQPRCGVPDVAQFVLTEGNPRWEQTHLTYRIEFYTPDLPRADVDHAIEKAFQLWSNVTPLTFTKVSEGQADIMISFVRGDHRDNSPFDGPGGNLAHAFQPGPGIGGDAHFDEDERWTNNFREYNLHRVAAHELGHSLGLSHSTDIGALMYPSYTFSGDVQLAQDDIDGIQAIYGRSQNPVQPIGPQTPKACDSKLTFDAITTIRGEVMFFKDRFYMRTNPFYPEVELNFISVFWPQLPNGLEAAYEFADRDEVRFFKGNKYWAVQGQNVLHGYPKDIYSSFGFPRTVKHIDAALSEENTGKTYFFVANKYWRYDEYKRSMDPGYPKMIAHDFPGIGHKVDAVFMKDGFFYFFHGTRQYKFDPKTKRILTLQKANSWFNCRKN

SEQ ID NO: 1133 - protein, 450 aa, Artificial Sequence
  MMP-1 variant N101M
FPATLETQEQDVDLVQKYLEKYYNLKNDGRQVEKRRNSGPVVEKLKQMQEFFGLKVTGKPDAETLKVMKQPRCGVPDVAQFVLTEGNPRWEQTHLTYRIEMYTPDLPRADVDHAIEKAFQLWSNVTPLTFTKVSEGQADIMISFVRGDHRDNSPFDGPGGNLAHAFQPGPGIGGDAHFDEDERWTNNFREYNLHRVAAHELGHSLGLSHSTDIGALMYPSYTFSGDVQLAQDDIDGIQAIYGRSQNPVQPIGPQTPKACDSKLTFDAITTIRGEVMFFKDRFYMRTNPFYPEVELNFISVFWPQLPNGLEAAYEFADRDEVRFFKGNKYWAVQGQNVLHGYPKDIYSSFGFPRTVKHIDAALSEENTGKTYFFVANKYWRYDEYKRSMDPGYPKMIAHDFPGIGHKVDAVFMKDGFFYFFHGTRQYKFDPKTKRILTLQKANSWFNCRKN

SEQ ID NO: 1134 - protein, 450 aa, Artificial Sequence
  MMP-1 variant N101W
FPATLETQEQDVDLVQKYLEKYYNLKNDGRQVEKRRNSGPVVEKLKQMQEFFGLKVTGKPDAETLKVMKQPRCGVPDVAQFVLTEGNPRWEQTHLTYRIEWYTPDLPRADVDHAIEKAFQLWSNVTPLTFTKVSEGQADIMISFVRGDHRDNSPFDGPGGNLAHAFQPGPGIGGDAHFDEDERWTNNFREYNLHRVAAHELGHSLGLSHSTDIGALMYPSYTFSGDVQLAQDDIDGIQAIYGRSQNPVQPIGPQTPKACDSKLTFDAITTIRGEVMFFKDRFYMRTNPFYPEVELNFISVFWPQLPNGLEAAYEFADRDEVRFFKGNKYWAVQGQNVLHGYPKDIYSSFGFPRTVKHIDAALSEENTGKTYFFVANKYWRYDEYKRSMDPGYPKMIAHDFPGIGHKVDAVFMKDGFFYFFHGTRQYKFDPKTKRILTLQKANSWFNCRKN

SEQ ID NO: 1135 - protein, 450 aa, Artificial Sequence
  MMP-1 variant N101I
FPATLETQEQDVDLVQKYLEKYYNLKNDGRQVEKRRNSGPVVEKLKQMQEFFGLKVTGKPDAETLKVMKQPRCGVPDVAQFVLTEGNPRWEQTHLTYRIEIYTPDLPRADVDHAIEKAFQLWSNVTPLTFTKVSEGQADIMISFVRGDHRDNSPFDGPGGNLAHAFQPGPGIGGDAHFDEDERWTNNFREYNLHRVAAHELGHSLGLSHSTDIGALMYPSYTFSGDVQLAQDDIDGIQAIYGRSQNPVQPIGPQTPKACDSKLTFDAITTIRGEVMFFKDRFYMRTNPFYPEVELNFISVFWPQLPNGLEAAYEFADRDEVRFFKGNKYWAVQGQNVLHGYPKDIYSSFGFPRTVKHIDAALSEENTGKTYFFVANKYWRYDEYKRSMDPGYPKMIAHDFPGIGHKVDAVFMKDGFFYFFHGTRQYKFDPKTKRILTLQKANSWFNCRKN

SEQ ID NO: 1136 - protein, 450 aa, Artificial Sequence
  MMP-1 variant N101V
FPATLETQEQDVDLVQKYLEKYYNLKNDGRQVEKRRNSGPVVEKLKQMQEFFGLKVTGKPDAETLKVMKQPRCGVPDVAQFVLTEGNPRWEQTHLTYRIEVYTPDLPRADVDHAIEKAFQLWSNVTPLTFTKVSEGQADIMISFVRGDHRDNSPFDGPGGNLAHAFQPGPGIGGDAHFDEDERWTNNFREYNLHRVAAHELGHSLGLSHSTDIGALMYPSYTFSGDVQLAQDDIDGIQAIYGRSQNPVQPIGPQTPKACDSKLTFDAITTIRGEVMFFKDRFYMRTNPFYPEVELNFISVFWPQLPNGLEAAYEFADRDEVRFFKGNKYWAVQGQNVLHGYPKDIYSSFGFPRTVKHIDAALSEENTGKTYFFVANKYWRYDEYKRSMDPGYPKMIAHDFPGIGHKVDAVFMKDGFFYFFHGTRQYKFDPKTKRILTLQKANSWFNCRKN

SEQ ID NO: 1137 - protein, 450 aa, Artificial Sequence
  MMP-1 variant N101L
FPATLETQEQDVDLVQKYLEKYYNLKNDGRQVEKRRNSGPVVEKLKQMQEFFGLKVTGKPDAETLKVMKQPRCGVPDVAQFVLTEGNPRWEQTHLTYRIELYTPDLPRADVDHAIEKAFQLWSNVTPLTFTKVSEGQADIMISFVRGDHRDNSPFDGPGGNLAHAFQPGPGIGGDAHFDEDERWTNNFREYNLHRVAAHELGHSLGLSHSTDIGALMYPSYTFSGDVQLAQDDIDGIQAIYGRSQNPVQPIGPQTPKACDSKLTFDAITTIRGEVMFFKDRFYMRTNPFYPEVELNFISVFWPQLPNGLEAAYEFADRDEVRFFKGNKYWAVQGQNVLHGYPKDIYSSFGFPRTVKHIDAALSEENTGKTYFFVANKYWRYDEYKRSMDPGYPKMIAHDFPGIGHKVDAVFMKDGFFYFFHGTRQYKFDPKTKRILTLQKANSWFNCRKN

SEQ ID NO: 1138 - protein, 450 aa, Artificial Sequence
  MMP-1 variant N101A
FPATLETQEQDVDLVQKYLEKYYNLKNDGRQVEKRRNSGPVVEKLKQMQEFFGLKVTGKPDAETLKVMKQPRCGVPDVAQFVLTEGNPRWEQTHLTYRIEAYTPDLPRADVDHAIEKAFQLWSNVTPLTFTKVSEGQADIMISFVRGDHRDNSPFDGPGGNLAHAFQPGPGIGGDAHFDEDERWTNNFREYNLHRVAAHELGHSLGLSHSTDIGALMYPSYTFSGDVQLAQDDIDGIQAIYGRSQNPVQPIGPQTPKACDSKLTFDAITTIRGEVMFFKDRFYMRTNPFYPEVELNFISVFWPQLPNGLEAAYEFADRDEVRFFKGNKYWAVQGQNVLHGYPKDIYSSFGFPRTVKHIDAALSEENTGKTYFFVANKYWRYDEYKRSMDPGYPKMIAHDFPGIGHKVDAVFMKDGFFYFFHGTRQYKFDPKTKRILTLQKANSWFNCRKN

SEQ ID NO: 1139 - protein, 450 aa, Artificial Sequence
  MMP-1 variant N101P
FPATLETQEQDVDLVQKYLEKYYNLKNDGRQVEKRRNSGPVVEKLKQMQEFFGLKVTGKPDAETLKVMKQPRCGVPDVAQFVLTEGNPRWEQTHLTYRIEPYTPDLPRADVDHAIEKAFQLWSNVTPLTFTKVSEGQADIMISFVRGDHRDNSPFDGPGGNLAHAFQPGPGIGGDAHFDEDERWTNNFREYNLHRVAAHELGHSLGLSHSTDIGALMYPSYTFSGDVQLAQDDIDGIQAIYGRSQNPVQPIGPQTPKACDSKLTFDAITTIRGEVMFFKDRFYMRTNPFYPEVELNFISVFWPQLPNGLEAAYEFADRDEVRFFKGNKYWAVQGQNVLHGYPKDIYSSFGFPRTVKHIDAALSEENTGKTYFFVANKYWRYDEYKRSMDPGYPKMIAHDFPGIGHKVDAVFMKDGFFYFFHGTRQYKFDPKTKRILTLQKANSWFNCRKN

SEQ ID NO: 1140 - protein, 450 aa, Artificial Sequence
  MMP-1 variant Y102D
FPATLETQEQDVDLVQKYLEKYYNLKNDGRQVEKRRNSGPVVEKLKQMQEFFGLKVTGKPDAETLKVMKQPRCGVPDVAQFVLTEGNPRWEQTHLTYRIENDTPDLPRADVDHAIEKAFQLWSNVTPLTFTKVSEGQADIMISFVRGDHRDNSPFDGPGGNLAHAFQPGPGIGGDAHFDEDERWTNNFREYNLHRVAAHELGHSLGLSHSTDIGALMYPSYTFSGDVQLAQDDIDGIQAIYGRSQNPVQPIGPQTPKACDSKLTFDAITTIRGEVMFFKDRFYMRTNPFYPEVELNFISVFWPQLPNGLEAAYEFADRDEVRFFKGNKYWAVQGQNVLHGYPKDIYSSFGFPRTVKHIDAALSEENTGKTYFFVANKYWRYDEYKRSMDPGYPKMIAHDFPGIGHKVDAVFMKDGFFYFFHGTRQYKFDPKTKRILTLQKANSWFNCRKN

SEQ ID NO: 1141 - protein, 450 aa, Artificial Sequence
  MMP-1 variant Y102E
FPATLETQEQDVDLVQKYLEKYYNLKNDGRQVEKRRNSGPVVEKLKQMQEFFGLKVTGKPDAETLKVMKQPRCGVPDVAQFVLTEGNPRWEQTHLTYRIENETPDLPRADVDHAIEKAFQLWSNVTPLTFTKVSEGQADIMISFVRGDHRDNSPFDGPGGNLAHAFQPGPGIGGDAHFDEDERWTNNFREYNLHRVAAHELGHSLGLSHSTDIGALMYPSYTFSGDVQLAQDDIDGIQAIYGRSQNPVQPIGPQTPKACDSKLTFDAITTIRGEVMFFKDRFYMRTNPFYPEVELNFISVFWPQLPNGLEAAYEFADRDEVRFFKGNKYWAVQGQNVLHGYPKDIYSSFGFPRTVKHIDAALSEENTGKTYFFVANKYWRYDEYKRSMDPGYPKMIAHDFPGIGHKVDAVFMKDGFFYFFHGTRQYKFDPKTKRILTLQKANSWFNCRKN

SEQ ID NO: 1142 - protein, 450 aa, Artificial Sequence
  MMP-1 variant Y102H
FPATLETQEQDVDLVQKYLEKYYNLKNDGRQVEKRRNSGPVVEKLKQMQEFFGLKVTGKPDAETLKVMKQPRCGVPDVAQFVLTEGNPRWEQTHLTYRIENHTPDLPRADVDHAIEKAFQLWSNVTPLTFTKVSEGQADIMISFVRGDHRDNSPFDGPGGNLAHAFQPGPGIGGDAHFDEDERWTNNFREYNLHRVAAHELGHSLGLSHSTDIGALMYPSYTFSGDVQLAQDDIDGIQAIYGRSQNPVQPIGPQTPKACDSKLTFDAITTIRGEVMFFKDRFYMRTNPFYPEVELNFISVFWPQLPNGLEAAYEFADRDEVRFFKGNKYWAVQGQNVLHGYPKDIYSSFGFPRTVKHIDAALSEENTGKTYFFVANKYWRYDEYKRSMDPGYPKMIAHDFPGIGHKVDAVFMKDGFFYFFHGTRQYKFDPKTKRILTLQKANSWFNCRKN

SEQ ID NO: 1143 - protein, 450 aa, Artificial Sequence
  MMP-1 variant Y102K
FPATLETQEQDVDLVQKYLEKYYNLKNDGRQVEKRRNSGPVVEKLKQMQEFFGLKVTGKPDAETLKVMKQPRCGVPDVAQFVLTEGNPRWEQTHLTYRIENKTPDLPRADVDHAIEKAFQLWSNVTPLTFTKVSEGQADIMISFVRGDHRDNSPFDGPGGNLAHAFQPGPGIGGDAHFDEDERWTNNFREYNLHRVAAHELGHSLGLSHSTDIGALMYPSYTFSGDVQLAQDDIDGIQAIYGRSQNPVQPIGPQTPKACDSKLTFDAITTIRGEVMFFKDRFYMRTNPFYPEVELNFISVFWPQLPNGLEAAYEFADRDEVRFFKGNKYWAVQGQNVLHGYPKDIYSSFGFPRTVKHIDAALSEENTGKTYFFVANKYWRYDEYKRSMDPGYPKMIAHDFPGIGHKVDAVFMKDGFFYFFHGTRQYKFDPKTKRILTLQKANSWFNCRKN

SEQ ID NO: 1144 - protein, 450 aa, Artificial Sequence
  MMP-1 variant Y102R
FPATLETQEQDVDLVQKYLEKYYNLKNDGRQVEKRRNSGPVVEKLKQMQEFFGLKVTGKPDAETLKVMKQPRCGVPDVAQFVLTEGNPRWEQTHLTYRIENRTPDLPRADVDHAIEKAFQLWSNVTPLTFTKVSEGQADIMISFVRGDHRDNSPFDGPGGNLAHAFQPGPGIGGDAHFDEDERWTNNFREYNLHRVAAHELGHSLGLSHSTDIGALMYPSYTFSGDVQLAQDDIDGIQAIYGRSQNPVQPIGPQTPKACDSKLTFDAITTIRGEVMFFKDRFYMRTNPFYPEVELNFISVFWPQLPNGLEAAYEFADRDEVRFFKGNKYWAVQGQNVLHGYPKDIYSSFGFPRTVKHIDAALSEENTGKTYFFVANKYWRYDEYKRSMDPGYPKMIAHDFPGIGHKVDAVFMKDGFFYFFHGTRQYKFDPKTKRILTLQKANSWFNCRKN

SEQ ID NO: 1145 - protein, 450 aa, Artificial Sequence
  MMP-1 variant Y102C
FPATLETQEQDVDLVQKYLEKYYNLKNDGRQVEKRRNSGPVVEKLKQMQEFFGLKVTGKPDAETLKVMKQPRCGVPDVAQFVLTEGNPRWEQTHLTYRIENCTPDLPRADVDHAIEKAFQLWSNVTPLTFTKVSEGQADIMISFVRGDHRDNSPFDGPGGNLAHAFQPGPGIGGDAHFDEDERWTNNFREYNLHRVAAHELGHSLGLSHSTDIGALMYPSYTFSGDVQLAQDDIDGIQAIYGRSQNPVQPIGPQTPKACDSKLTFDAITTIRGEVMFFKDRFYMRTNPFYPEVELNFISVFWPQLPNGLEAAYEFADRDEVRFFKGNKYWAVQGQNVLHGYPKDIYSSFGFPRTVKHIDAALSEENTGKTYFFVANKYWRYDEYKRSMDPGYPKMIAHDFPGIGHKVDAVFMKDGFFYFFHGTRQYKFDPKTKRILTLQKANSWFNCRKN

SEQ ID NO: 1146 - protein, 450 aa, Artificial Sequence
  MMP-1 variant Y102N
FPATLETQEQDVDLVQKYLEKYYNLKNDGRQVEKRRNSGPVVEKLKQMQEFFGLKVTGKPDAETLKVMKQPRCGVPDVAQFVLTEGNPRWEQTHLTYRIENNTPDLPRADVDHAIEKAFQLWSNVTPLTFTKVSEGQADIMISFVRGDHRDNSPFDGPGGNLAHAFQPGPGIGGDAHFDEDERWTNNFREYNLHRVAAHELGHSLGLSHSTDIGALMYPSYTFSGDVQLAQDDIDGIQAIYGRSQNPVQPIGPQTPKACDSKLTFDAITTIRGEVMFFKDRFYMRTNPFYPEVELNFISVFWPQLPNGLEAAYEFADRDEVRFFKGNKYWAVQGQNVLHGYPKDIYSSFGFPRTVKHIDAALSEENTGKTYFFVANKYWRYDEYKRSMDPGYPKMIAHDFPGIGHKVDAVFMKDGFFYFFHGTRQYKFDPKTKRILTLQKANSWFNCRKN

SEQ ID NO: 1147 - protein, 450 aa, Artificial Sequence
  MMP-1 variant Y102Q
FPATLETQEQDVDLVQKYLEKYYNLKNDGRQVEKRRNSGPVVEKLKQMQEFFGLKVTGKPDAETLKVMKQPRCGVPDVAQFVLTEGNPRWEQTHLTYRIENQTPDLPRADVDHAIEKAFQLWSNVTPLTFTKVSEGQADIMISFVRGDHRDNSPFDGPGGNLAHAFQPGPGIGGDAHFDEDERWTNNFREYNLHRVAAHELGHSLGLSHSTDIGALMYPSYTFSGDVQLAQDDIDGIQAIYGRSQNPVQPIGPQTPKACDSKLTFDAITTIRGEVMFFKDRFYMRTNPFYPEVELNFISVFWPQLPNGLEAAYEFADRDEVRFFKGNKYWAVQGQNVLHGYPKDIYSSFGFPRTVKHIDAALSEENTGKTYFFVANKYWRYDEYKRSMDPGYPKMIAHDFPGIGHKVDAVFMKDGFFYFFHGTRQYKFDPKTKRILTLQKANSWFNCRKN

SEQ ID NO: 1148 - protein, 450 aa, Artificial Sequence
  MMP-1 variant Y102T
FPATLETQEQDVDLVQKYLEKYYNLKNDGRQVEKRRNSGPVVEKLKQMQEFFGLKVTGKPDAETLKVMKQPRCGVPDVAQFVLTEGNPRWEQTHLTYRIENTTPDLPRADVDHAIEKAFQLWSNVTPLTFTKVSEGQADIMISFVRGDHRDNSPFDGPGGNLAHAFQPGPGIGGDAHFDEDERWTNNFREYNLHRVAAHELGHSLGLSHSTDIGALMYPSYTFSGDVQLAQDDIDGIQAIYGRSQNPVQPIGPQTPKACDSKLTFDAITTIRGEVMFFKDRFYMRTNPFYPEVELNFISVFWPQLPNGLEAAYEFADRDEVRFFKGNKYWAVQGQNVLHGYPKDIYSSFGFPRTVKHIDAALSEENTGKTYFFVANKYWRYDEYKRSMDPGYPKMIAHDFPGIGHKVDAVFMKDGFFYFFHGTRQYKFDPKTKRILTLQKANSWFNCRKN

SEQ ID NO: 1149 - protein, 450 aa, Artificial Sequence
  MMP-1 variant Y102S
FPATLETQEQDVDLVQKYLEKYYNLKNDGRQVEKRRNSGPVVEKLKQMQEFFGLKVTGKPDAETLKVMKQPRCGVPDVAQFVLTEGNPRWEQTHLTYRIENSTPDLPRADVDHAIEKAFQLWSNVTPLTFTKVSEGQADIMISFVRGDHRDNSPFDGPGGNLAHAFQPGPGIGGDAHFDEDERWTNNFREYNLHRVAAHELGHSLGLSHSTDIGALMYPSYTFSGDVQLAQDDIDGIQAIYGRSQNPVQPIGPQTPKACDSKLTFDAITTIRGEVMFFKDRFYMRTNPFYPEVELNFISVFWPQLPNGLEAAYEFADRDEVRFFKGNKYWAVQGQNVLHGYPKDIYSSFGFPRTVKHIDAALSEENTGKTYFFVANKYWRYDEYKRSMDPGYPKMIAHDFPGIGHKVDAVFMKDGFFYFFHGTRQYKFDPKTKRILTLQKANSWFNCRKN

SEQ ID NO: 1150 - protein, 450 aa, Artificial Sequence
  MMP-1 variant Y102G
FPATLETQEQDVDLVQKYLEKYYNLKNDGRQVEKRRNSGPVVEKLKQMQEFFGLKVTGKPDAETLKVMKQPRCGVPDVAQFVLTEGNPRWEQTHLTYRIENGTPDLPRADVDHAIEKAFQLWSNVTPLTFTKVSEGQADIMISFVRGDHRDNSPFDGPGGNLAHAFQPGPGIGGDAHFDEDERWTNNFREYNLHRVAAHELGHSLGLSHSTDIGALMYPSYTFSGDVQLAQDDIDGIQAIYGRSQNPVQPIGPQTPKACDSKLTFDAITTIRGEVMFFKDRFYMRTNPFYPEVELNFISVFWPQLPNGLEAAYEFADRDEVRFFKGNKYWAVQGQNVLHGYPKDIYSSFGFPRTVKHIDAALSEENTGKTYFFVANKYWRYDEYKRSMDPGYPKMIAHDFPGIGHKVDAVFMKDGFFYFFHGTRQYKFDPKTKRILTLQKANSWFNCRKN

SEQ ID NO: 1151 - protein, 450 aa, Artificial Sequence
  MMP-1 variant Y102F
FPATLETQEQDVDLVQKYLEKYYNLKNDGRQVEKRRNSGPVVEKLKQMQEFFGLKVTGKPDAETLKVMKQPRCGVPDVAQFVLTEGNPRWEQTHLTYRIENFTPDLPRADVDHAIEKAFQLWSNVTPLTFTKVSEGQADIMISFVRGDHRDNSPFDGPGGNLAHAFQPGPGIGGDAHFDEDERWTNNFREYNLHRVAAHELGHSLGLSHSTDIGALMYPSYTFSGDVQLAQDDIDGIQAIYGRSQNPVQPIGPQTPKACDSKLTFDAITTIRGEVMFFKDRFYMRTNPFYPEVELNFISVFWPQLPNGLEAAYEFADRDEVRFFKGNKYWAVQGQNVLHGYPKDIYSSFGFPRTVKHIDAALSEENTGKTYFFVANKYWRYDEYKRSMDPGYPKMIAHDFPGIGHKVDAVFMKDGFFYFFHGTRQYKFDPKTKRILTLQKANSWFNCRKN

SEQ ID NO: 1152 - protein, 450 aa, Artificial Sequence
  MMP-1 variant Y102M
FPATLETQEQDVDLVQKYLEKYYNLKNDGRQVEKRRNSGPVVEKLKQMQEFFGLKVTGKPDAETLKVMKQPRCGVPDVAQFVLTEGNPRWEQTHLTYRIENMTPDLPRADVDHAIEKAFQLWSNVTPLTFTKVSEGQADIMISFVRGDHRDNSPFDGPGGNLAHAFQPGPGIGGDAHFDEDERWTNNFREYNLHRVAAHELGHSLGLSHSTDIGALMYPSYTFSGDVQLAQDDIDGIQAIYGRSQNPVQPIGPQTPKACDSKLTFDAITTIRGEVMFFKDRFYMRTNPFYPEVELNFISVFWPQLPNGLEAAYEFADRDEVRFFKGNKYWAVQGQNVLHGYPKDIYSSFGFPRTVKHIDAALSEENTGKTYFFVANKYWRYDEYKRSMDPGYPKMIAHDFPGIGHKVDAVFMKDGFFYFFHGTRQYKFDPKTKRILTLQKANSWFNCRKN

SEQ ID NO: 1153 - protein, 450 aa, Artificial Sequence
  MMP-1 variant Y102W
FPATLETQEQDVDLVQKYLEKYYNLKNDGRQVEKRRNSGPVVEKLKQMQEFFGLKVTGKPDAETLKVMKQPRCGVPDVAQFVLTEGNPRWEQTHLTYRIENWTPDLPRADVDHAIEKAFQLWSNVTPLTFTKVSEGQADIMISFVRGDHRDNSPFDGPGGNLAHAFQPGPGIGGDAHFDEDERWTNNFREYNLHRVAAHELGHSLGLSHSTDIGALMYPSYTFSGDVQLAQDDIDGIQAIYGRSQNPVQPIGPQTPKACDSKLTFDAITTIRGEVMFFKDRFYMRTNPFYPEVELNFISVFWPQLPNGLEAAYEFADRDEVRFFKGNKYWAVQGQNVLHGYPKDIYSSFGFPRTVKHIDAALSEENTGKTYFFVANKYWRYDEYKRSMDPGYPKMIAHDFPGIGHKVDAVFMKDGFFYFFHGTRQYKFDPKTKRILTLQKANSWFNCRKN

SEQ ID NO: 1154 - protein, 450 aa, Artificial Sequence
  MMP-1 variant Y102I
FPATLETQEQDVDLVQKYLEKYYNLKNDGRQVEKRRNSGPVVEKLKQMQEFFGLKVTGKPDAETLKVMKQPRCGVPDVAQFVLTEGNPRWEQTHLTYRIENITPDLPRADVDHAIEKAFQLWSNVTPLTFTKVSEGQADIMISFVRGDHRDNSPFDGPGGNLAHAFQPGPGIGGDAHFDEDERWTNNFREYNLHRVAAHELGHSLGLSHSTDIGALMYPSYTFSGDVQLAQDDIDGIQAIYGRSQNPVQPIGPQTPKACDSKLTFDAITTIRGEVMFFKDRFYMRTNPFYPEVELNFISVFWPQLPNGLEAAYEFADRDEVRFFKGNKYWAVQGQNVLHGYPKDIYSSFGFPRTVKHIDAALSEENTGKTYFFVANKYWRYDEYKRSMDPGYPKMIAHDFPGIGHKVDAVFMKDGFFYFFHGTRQYKFDPKTKRILTLQKANSWFNCRKN

SEQ ID NO: 1155 - protein, 450 aa, Artificial Sequence
  MMP-1 variant Y102V
FPATLETQEQDVDLVQKYLEKYYNLKNDGRQVEKRRNSGPVVEKLKQMQEFFGLKVTGKPDAETLKVMKQPRCGVPDVAQFVLTEGNPRWEQTHLTYRIENVTPDLPRADVDHAIEKAFQLWSNVTPLTFTKVSEGQADIMISFVRGDHRDNSPFDGPGGNLAHAFQPGPGIGGDAHFDEDERWTNNFREYNLHRVAAHELGHSLGLSHSTDIGALMYPSYTFSGDVQLAQDDIDGIQAIYGRSQNPVQPIGPQTPKACDSKLTFDAITTIRGEVMFFKDRFYMRTNPFYPEVELNFISVFWPQLPNGLEAAYEFADRDEVRFFKGNKYWAVQGQNVLHGYPKDIYSSFGFPRTVKHIDAALSEENTGKTYFFVANKYWRYDEYKRSMDPGYPKMIAHDFPGIGHKVDAVFMKDGFFYFFHGTRQYKFDPKTKRILTLQKANSWFNCRKN

SEQ ID NO: 1156 - protein, 450 aa, Artificial Sequence
  MMP-1 variant Y102L
FPATLETQEQDVDLVQKYLEKYYNLKNDGRQVEKRRNSGPVVEKLKQMQEFFGLKVTGKPDAETLKVMKQPRCGVPDVAQFVLTEGNPRWEQTHLTYRIENLTPDLPRADVDHAIEKAFQLWSNVTPLTFTKVSEGQADIMISFVRGDHRDNSPFDGPGGNLAHAFQPGPGIGGDAHFDEDERWTNNFREYNLHRVAAHELGHSLGLSHSTDIGALMYPSYTFSGDVQLAQDDIDGIQAIYGRSQNPVQPIGPQTPKACDSKLTFDAITTIRGEVMFFKDRFYMRTNPFYPEVELNFISVFWPQLPNGLEAAYEFADRDEVRFFKGNKYWAVQGQNVLHGYPKDIYSSFGFPRTVKHIDAALSEENTGKTYFFVANKYWRYDEYKRSMDPGYPKMIAHDFPGIGHKVDAVFMKDGFFYFFHGTRQYKFDPKTKRILTLQKANSWFNCRKN

SEQ ID NO: 1157 - protein, 450 aa, Artificial Sequence
  MMP-1 variant Y102A
FPATLETQEQDVDLVQKYLEKYYNLKNDGRQVEKRRNSGPVVEKLKQMQEFFGLKVTGKPDAETLKVMKQPRCGVPDVAQFVLTEGNPRWEQTHLTYRIENATPDLPRADVDHAIEKAFQLWSNVTPLTFTKVSEGQADIMISFVRGDHRDNSPFDGPGGNLAHAFQPGPGIGGDAHFDEDERWTNNFREYNLHRVAAHELGHSLGLSHSTDIGALMYPSYTFSGDVQLAQDDIDGIQAIYGRSQNPVQPIGPQTPKACDSKLTFDAITTIRGEVMFFKDRFYMRTNPFYPEVELNFISVFWPQLPNGLEAAYEFADRDEVRFFKGNKYWAVQGQNVLHGYPKDIYSSFGFPRTVKHIDAALSEENTGKTYFFVANKYWRYDEYKRSMDPGYPKMIAHDFPGIGHKVDAVFMKDGFFYFFHGTRQYKFDPKTKRILTLQKANSWFNCRKN

SEQ ID NO: 1158 - protein, 450 aa, Artificial Sequence
  MMP-1 variant Y102P
FPATLETQEQDVDLVQKYLEKYYNLKNDGRQVEKRRNSGPVVEKLKQMQEFFGLKVTGKPDAETLKVMKQPRCGVPDVAQFVLTEGNPRWEQTHLTYRIENPTPDLPRADVDHAIEKAFQLWSNVTPLTFTKVSEGQADIMISFVRGDHRDNSPFDGPGGNLAHAFQPGPGIGGDAHFDEDERWTNNFREYNLHRVAAHELGHSLGLSHSTDIGALMYPSYTFSGDVQLAQDDIDGIQAIYGRSQNPVQPIGPQTPKACDSKLTFDAITTIRGEVMFFKDRFYMRTNPFYPEVELNFISVFWPQLPNGLEAAYEFADRDEVRFFKGNKYWAVQGQNVLHGYPKDIYSSFGFPRTVKHIDAALSEENTGKTYFFVANKYWRYDEYKRSMDPGYPKMIAHDFPGIGHKVDAVFMKDGFFYFFHGTRQYKFDPKTKRILTLQKANSWFNCRKN

SEQ ID NO: 1159 - protein, 450 aa, Artificial Sequence
  MMP-1 variant P104D
FPATLETQEQDVDLVQKYLEKYYNLKNDGRQVEKRRNSGPVVEKLKQMQEFFGLKVTGKPDAETLKVMKQPRCGVPDVAQFVLTEGNPRWEQTHLTYRIENYTDDLPRADVDHAIEKAFQLWSNVTPLTFTKVSEGQADIMISFVRGDHRDNSPFDGPGGNLAHAFQPGPGIGGDAHFDEDERWTNNFREYNLHRVAAHELGHSLGLSHSTDIGALMYPSYTFSGDVQLAQDDIDGIQAIYGRSQNPVQPIGPQTPKACDSKLTFDAITTIRGEVMFFKDRFYMRTNPFYPEVELNFISVFWPQLPNGLEAAYEFADRDEVRFFKGNKYWAVQGQNVLHGYPKDIYSSFGFPRTVKHIDAALSEENTGKTYFFVANKYWRYDEYKRSMDPGYPKMIAHDFPGIGHKVDAVFMKDGFFYFFHGTRQYKFDPKTKRILTLQKANSWFNCRKN

SEQ ID NO: 1160 - protein, 450 aa, Artificial Sequence
  MMP-1 variant P104E
FPATLETQEQDVDLVQKYLEKYYNLKNDGRQVEKRRNSGPVVEKLKQMQEFFGLKVTGKPDAETLKVMKQPRCGVPDVAQFVLTEGNPRWEQTHLTYRIENYTEDLPRADVDHAIEKAFQLWSNVTPLTFTKVSEGQADIMISFVRGDHRDNSPFDGPGGNLAHAFQPGPGIGGDAHFDEDERWTNNFREYNLHRVAAHELGHSLGLSHSTDIGALMYPSYTFSGDVQLAQDDIDGIQAIYGRSQNPVQPIGPQTPKACDSKLTFDAITTIRGEVMFFKDRFYMRTNPFYPEVELNFISVFWPQLPNGLEAAYEFADRDEVRFFKGNKYWAVQGQNVLHGYPKDIYSSFGFPRTVKHIDAALSEENTGKTYFFVANKYWRYDEYKRSMDPGYPKMIAHDFPGIGHKVDAVFMKDGFFYFFHGTRQYKFDPKTKRILTLQKANSWFNCRKN

SEQ ID NO: 1161 - protein, 450 aa, Artificial Sequence
  MMP-1 variant P104H
FPATLETQEQDVDLVQKYLEKYYNLKNDGRQVEKRRNSGPVVEKLKQMQEFFGLKVTGKPDAETLKVMKQPRCGVPDVAQFVLTEGNPRWEQTHLTYRIENYTHDLPRADVDHAIEKAFQLWSNVTPLTFTKVSEGQADIMISFVRGDHRDNSPFDGPGGNLAHAFQPGPGIGGDAHFDEDERWTNNFREYNLHRVAAHELGHSLGLSHSTDIGALMYPSYTFSGDVQLAQDDIDGIQAIYGRSQNPVQPIGPQTPKACDSKLTFDAITTIRGEVMFFKDRFYMRTNPFYPEVELNFISVFWPQLPNGLEAAYEFADRDEVRFFKGNKYWAVQGQNVLHGYPKDIYSSFGFPRTVKHIDAALSEENTGKTYFFVANKYWRYDEYKRSMDPGYPKMIAHDFPGIGHKVDAVFMKDGFFYFFHGTRQYKFDPKTKRILTLQKANSWFNCRKN

SEQ ID NO: 1162 - protein, 450 aa, Artificial Sequence
  MMP-1 variant P104K
FPATLETQEQDVDLVQKYLEKYYNLKNDGRQVEKRRNSGPVVEKLKQMQEFFGLKVTGKPDAETLKVMKQPRCGVPDVAQFVLTEGNPRWEQTHLTYRIENYTKDLPRADVDHAIEKAFQLWSNVTPLTFTKVSEGQADIMISFVRGDHRDNSPFDGPGGNLAHAFQPGPGIGGDAHFDEDERWTNNFREYNLHRVAAHELGHSLGLSHSTDIGALMYPSYTFSGDVQLAQDDIDGIQAIYGRSQNPVQPIGPQTPKACDSKLTFDAITTIRGEVMFFKDRFYMRTNPFYPEVELNFISVFWPQLPNGLEAAYEFADRDEVRFFKGNKYWAVQGQNVLHGYPKDIYSSFGFPRTVKHIDAALSEENTGKTYFFVANKYWRYDEYKRSMDPGYPKMIAHDFPGIGHKVDAVFMKDGFFYFFHGTRQYKFDPKTKRILTLQKANSWFNCRKN

SEQ ID NO: 1163 - protein, 450 aa, Artificial Sequence
  MMP-1 variant P104R
FPATLETQEQDVDLVQKYLEKYYNLKNDGRQVEKRRNSGPVVEKLKQMQEFFGLKVTGKPDAETLKVMKQPRCGVPDVAQFVLTEGNPRWEQTHLTYRIENYTRDLPRADVDHAIEKAFQLWSNVTPLTFTKVSEGQADIMISFVRGDHRDNSPFDGPGGNLAHAFQPGPGIGGDAHFDEDERWTNNFREYNLHRVAAHELGHSLGLSHSTDIGALMYPSYTFSGDVQLAQDDIDGIQAIYGRSQNPVQPIGPQTPKACDSKLTFDAITTIRGEVMFFKDRFYMRTNPFYPEVELNFISVFWPQLPNGLEAAYEFADRDEVRFFKGNKYWAVQGQNVLHGYPKDIYSSFGFPRTVKHIDAALSEENTGKTYFFVANKYWRYDEYKRSMDPGYPKMIAHDFPGIGHKVDAVFMKDGFFYFFHGTRQYKFDPKTKRILTLQKANSWFNCRKN

SEQ ID NO: 1164 - protein, 450 aa, Artificial Sequence
  MMP-1 variant P104C
FPATLETQEQDVDLVQKYLEKYYNLKNDGRQVEKRRNSGPVVEKLKQMQEFFGLKVTGKPDAETLKVMKQPRCGVPDVAQFVLTEGNPRWEQTHLTYRIENYTCDLPRADVDHAIEKAFQLWSNVTPLTFTKVSEGQADIMISFVRGDHRDNSPFDGPGGNLAHAFQPGPGIGGDAHFDEDERWTNNFREYNLHRVAAHELGHSLGLSHSTDIGALMYPSYTFSGDVQLAQDDIDGIQAIYGRSQNPVQPIGPQTPKACDSKLTFDAITTIRGEVMFFKDRFYMRTNPFYPEVELNFISVFWPQLPNGLEAAYEFADRDEVRFFKGNKYWAVQGQNVLHGYPKDIYSSFGFPRTVKHIDAALSEENTGKTYFFVANKYWRYDEYKRSMDPGYPKMIAHDFPGIGHKVDAVFMKDGFFYFFHGTRQYKFDPKTKRILTLQKANSWFNCRKN

SEQ ID NO: 1165 - protein, 450 aa, Artificial Sequence
  MMP-1 variant P104N
FPATLETQEQDVDLVQKYLEKYYNLKNDGRQVEKRRNSGPVVEKLKQMQEFFGLKVTGKPDAETLKVMKQPRCGVPDVAQFVLTEGNPRWEQTHLTYRIENYTNDLPRADVDHAIEKAFQLWSNVTPLTFTKVSEGQADIMISFVRGDHRDNSPFDGPGGNLAHAFQPGPGIGGDAHFDEDERWTNNFREYNLHRVAAHELGHSLGLSHSTDIGALMYPSYTFSGDVQLAQDDIDGIQAIYGRSQNPVQPIGPQTPKACDSKLTFDAITTIRGEVMFFKDRFYMRTNPFYPEVELNFISVFWPQLPNGLEAAYEFADRDEVRFFKGNKYWAVQGQNVLHGYPKDIYSSFGFPRTVKHIDAALSEENTGKTYFFVANKYWRYDEYKRSMDPGYPKMIAHDFPGIGHKVDAVFMKDGFFYFFHGTRQYKFDPKTKRILTLQKANSWFNCRKN

SEQ ID NO: 1166 - protein, 450 aa, Artificial Sequence
  MMP-1 variant P104Q
FPATLETQEQDVDLVQKYLEKYYNLKNDGRQVEKRRNSGPVVEKLKQMQEFFGLKVTGKPDAETLKVMKQPRCGVPDVAQFVLTEGNPRWEQTHLTYRIENYTQDLPRADVDHAIEKAFQLWSNVTPLTFTKVSEGQADIMISFVRGDHRDNSPFDGPGGNLAHAFQPGPGIGGDAHFDEDERWTNNFREYNLHRVAAHELGHSLGLSHSTDIGALMYPSYTFSGDVQLAQDDIDGIQAIYGRSQNPVQPIGPQTPKACDSKLTFDAITTIRGEVMFFKDRFYMRTNPFYPEVELNFISVFWPQLPNGLEAAYEFADRDEVRFFKGNKYWAVQGQNVLHGYPKDIYSSFGFPRTVKHIDAALSEENTGKTYFFVANKYWRYDEYKRSMDPGYPKMIAHDFPGIGHKVDAVFMKDGFFYFFHGTRQYKFDPKTKRILTLQKANSWFNCRKN

SEQ ID NO: 1167 - protein, 450 aa, Artificial Sequence
  MMP-1 variant P104T
FPATLETQEQDVDLVQKYLEKYYNLKNDGRQVEKRRNSGPVVEKLKQMQEFFGLKVTGKPDAETLKVMKQPRCGVPDVAQFVLTEGNPRWEQTHLTYRIENYTTDLPRADVDHAIEKAFQLWSNVTPLTFTKVSEGQADIMISFVRGDHRDNSPFDGPGGNLAHAFQPGPGIGGDAHFDEDERWTNNFREYNLHRVAAHELGHSLGLSHSTDIGALMYPSYTFSGDVQLAQDDIDGIQAIYGRSQNPVQPIGPQTPKACDSKLTFDAITTIRGEVMFFKDRFYMRTNPFYPEVELNFISVFWPQLPNGLEAAYEFADRDEVRFFKGNKYWAVQGQNVLHGYPKDIYSSFGFPRTVKHIDAALSEENTGKTYFFVANKYWRYDEYKRSMDPGYPKMIAHDFPGIGHKVDAVFMKDGFFYFFHGTRQYKFDPKTKRILTLQKANSWFNCRKN

SEQ ID NO: 1168 - protein, 450 aa, Artificial Sequence
  MMP-1 variant P104Y
FPATLETQEQDVDLVQKYLEKYYNLKNDGRQVEKRRNSGPVVEKLKQMQEFFGLKVTGKPDAETLKVMKQPRCGVPDVAQFVLTEGNPRWEQTHLTYRIENYTYDLPRADVDHAIEKAFQLWSNVTPLTFTKVSEGQADIMISFVRGDHRDNSPFDGPGGNLAHAFQPGPGIGGDAHFDEDERWTNNFREYNLHRVAAHELGHSLGLSHSTDIGALMYPSYTFSGDVQLAQDDIDGIQAIYGRSQNPVQPIGPQTPKACDSKLTFDAITTIRGEVMFFKDRFYMRTNPFYPEVELNFISVFWPQLPNGLEAAYEFADRDEVRFFKGNKYWAVQGQNVLHGYPKDIYSSFGFPRTVKHIDAALSEENTGKTYFFVANKYWRYDEYKRSMDPGYPKMIAHDFPGIGHKVDAVFMKDGFFYFFHGTRQYKFDPKTKRILTLQKANSWFNCRKN

SEQ ID NO: 1169 - protein, 450 aa, Artificial Sequence
  MMP-1 variant P104S
FPATLETQEQDVDLVQKYLEKYYNLKNDGRQVEKRRNSGPVVEKLKQMQEFFGLKVTGKPDAETLKVMKQPRCGVPDVAQFVLTEGNPRWEQTHLTYRIENYTSDLPRADVDHAIEKAFQLWSNVTPLTFTKVSEGQADIMISFVRGDHRDNSPFDGPGGNLAHAFQPGPGIGGDAHFDEDERWTNNFREYNLHRVAAHELGHSLGLSHSTDIGALMYPSYTFSGDVQLAQDDIDGIQAIYGRSQNPVQPIGPQTPKACDSKLTFDAITTIRGEVMFFKDRFYMRTNPFYPEVELNFISVFWPQLPNGLEAAYEFADRDEVRFFKGNKYWAVQGQNVLHGYPKDIYSSFGFPRTVKHIDAALSEENTGKTYFFVANKYWRYDEYKRSMDPGYPKMIAHDFPGIGHKVDAVFMKDGFFYFFHGTRQYKFDPKTKRILTLQKANSWFNCRKN

SEQ ID NO: 1170 - protein, 450 aa, Artificial Sequence
  MMP-1 variant P104G
FPATLETQEQDVDLVQKYLEKYYNLKNDGRQVEKRRNSGPVVEKLKQMQEFFGLKVTGKPDAETLKVMKQPRCGVPDVAQFVLTEGNPRWEQTHLTYRIENYTGDLPRADVDHAIEKAFQLWSNVTPLTFTKVSEGQADIMISFVRGDHRDNSPFDGPGGNLAHAFQPGPGIGGDAHFDEDERWTNNFREYNLHRVAAHELGHSLGLSHSTDIGALMYPSYTFSGDVQLAQDDIDGIQAIYGRSQNPVQPIGPQTPKACDSKLTFDAITTIRGEVMFFKDRFYMRTNPFYPEVELNFISVFWPQLPNGLEAAYEFADRDEVRFFKGNKYWAVQGQNVLHGYPKDIYSSFGFPRTVKHIDAALSEENTGKTYFFVANKYWRYDEYKRSMDPGYPKMIAHDFPGIGHKVDAVFMKDGFFYFFHGTRQYKFDPKTKRILTLQKANSWFNCRKN

SEQ ID NO: 1171 - protein, 450 aa, Artificial Sequence
  MMP-1 variant P104F
FPATLETQEQDVDLVQKYLEKYYNLKNDGRQVEKRRNSGPVVEKLKQMQEFFGLKVTGKPDAETLKVMKQPRCGVPDVAQFVLTEGNPRWEQTHLTYRIENYTFDLPRADVDHAIEKAFQLWSNVTPLTFTKVSEGQADIMISFVRGDHRDNSPFDGPGGNLAHAFQPGPGIGGDAHFDEDERWTNNFREYNLHRVAAHELGHSLGLSHSTDIGALMYPSYTFSGDVQLAQDDIDGIQAIYGRSQNPVQPIGPQTPKACDSKLTFDAITTIRGEVMFFKDRFYMRTNPFYPEVELNFISVFWPQLPNGLEAAYEFADRDEVRFFKGNKYWAVQGQNVLHGYPKDIYSSFGFPRTVKHIDAALSEENTGKTYFFVANKYWRYDEYKRSMDPGYPKMIAHDFPGIGHKVDAVFMKDGFFYFFHGTRQYKFDPKTKRILTLQKANSWFNCRKN

SEQ ID NO: 1172 - protein, 450 aa, Artificial Sequence
  MMP-1 variant P104M
FPATLETQEQDVDLVQKYLEKYYNLKNDGRQVEKRRNSGPVVEKLKQMQEFFGLKVTGKPDAETLKVMKQPRCGVPDVAQFVLTEGNPRWEQTHLTYRIENYTMDLPRADVDHAIEKAFQLWSNVTPLTFTKVSEGQADIMISFVRGDHRDNSPFDGPGGNLAHAFQPGPGIGGDAHFDEDERWTNNFREYNLHRVAAHELGHSLGLSHSTDIGALMYPSYTFSGDVQLAQDDIDGIQAIYGRSQNPVQPIGPQTPKACDSKLTFDAITTIRGEVMFFKDRFYMRTNPFYPEVELNFISVFWPQLPNGLEAAYEFADRDEVRFFKGNKYWAVQGQNVLHGYPKDIYSSFGFPRTVKHIDAALSEENTGKTYFFVANKYWRYDEYKRSMDPGYPKMIAHDFPGIGHKVDAVFMKDGFFYFFHGTRQYKFDPKTKRILTLQKANSWFNCRKN

SEQ ID NO: 1173 - protein, 450 aa, Artificial Sequence
  MMP-1 variant P104W
FPATLETQEQDVDLVQKYLEKYYNLKNDGRQVEKRRNSGPVVEKLKQMQEFFGLKVTGKPDAETLKVMKQPRCGVPDVAQFVLTEGNPRWEQTHLTYRIENYTWDLPRADVDHAIEKAFQLWSNVTPLTFTKVSEGQADIMISFVRGDHRDNSPFDGPGGNLAHAFQPGPGIGGDAHFDEDERWTNNFREYNLHRVAAHELGHSLGLSHSTDIGALMYPSYTFSGDVQLAQDDIDGIQAIYGRSQNPVQPIGPQTPKACDSKLTFDAITTIRGEVMFFKDRFYMRTNPFYPEVELNFISVFWPQLPNGLEAAYEFADRDEVRFFKGNKYWAVQGQNVLHGYPKDIYSSFGFPRTVKHIDAALSEENTGKTYFFVANKYWRYDEYKRSMDPGYPKMIAHDFPGIGHKVDAVFMKDGFFYFFHGTRQYKFDPKTKRILTLQKANSWFNCRKN

SEQ ID NO: 1174 - protein, 450 aa, Artificial Sequence
  MMP-1 variant P104I
FPATLETQEQDVDLVQKYLEKYYNLKNDGRQVEKRRNSGPVVEKLKQMQEFFGLKVTGKPDAETLKVMKQPRCGVPDVAQFVLTEGNPRWEQTHLTYRIENYTIDLPRADVDHAIEKAFQLWSNVTPLTFTKVSEGQADIMISFVRGDHRDNSPFDGPGGNLAHAFQPGPGIGGDAHFDEDERWTNNFREYNLHRVAAHELGHSLGLSHSTDIGALMYPSYTFSGDVQLAQDDIDGIQAIYGRSQNPVQPIGPQTPKACDSKLTFDAITTIRGEVMFFKDRFYMRTNPFYPEVELNFISVFWPQLPNGLEAAYEFADRDEVRFFKGNKYWAVQGQNVLHGYPKDIYSSFGFPRTVKHIDAALSEENTGKTYFFVANKYWRYDEYKRSMDPGYPKMIAHDFPGIGHKVDAVFMKDGFFYFFHGTRQYKFDPKTKRILTLQKANSWFNCRKN

SEQ ID NO: 1175 - protein, 450 aa, Artificial Sequence
  MMP-1 variant P104V
FPATLETQEQDVDLVQKYLEKYYNLKNDGRQVEKRRNSGPVVEKLKQMQEFFGLKVTGKPDAETLKVMKQPRCGVPDVAQFVLTEGNPRWEQTHLTYRIENYTVDLPRADVDHAIEKAFQLWSNVTPLTFTKVSEGQADIMISFVRGDHRDNSPFDGPGGNLAHAFQPGPGIGGDAHFDEDERWTNNFREYNLHRVAAHELGHSLGLSHSTDIGALMYPSYTFSGDVQLAQDDIDGIQAIYGRSQNPVQPIGPQTPKACDSKLTFDAITTIRGEVMFFKDRFYMRTNPFYPEVELNFISVFWPQLPNGLEAAYEFADRDEVRFFKGNKYWAVQGQNVLHGYPKDIYSSFGFPRTVKHIDAALSEENTGKTYFFVANKYWRYDEYKRSMDPGYPKMIAHDFPGIGHKVDAVFMKDGFFYFFHGTRQYKFDPKTKRILTLQKANSWFNCRKN

SEQ ID NO: 1176 - protein, 450 aa, Artificial Sequence
  MMP-1 variant P104L
FPATLETQEQDVDLVQKYLEKYYNLKNDGRQVEKRRNSGPVVEKLKQMQEFFGLKVTGKPDAETLKVMKQPRCGVPDVAQFVLTEGNPRWEQTHLTYRIENYTLDLPRADVDHAIEKAFQLWSNVTPLTFTKVSEGQADIMISFVRGDHRDNSPFDGPGGNLAHAFQPGPGIGGDAHFDEDERWTNNFREYNLHRVAAHELGHSLGLSHSTDIGALMYPSYTFSGDVQLAQDDIDGIQAIYGRSQNPVQPIGPQTPKACDSKLTFDAITTIRGEVMFFKDRFYMRTNPFYPEVELNFISVFWPQLPNGLEAAYEFADRDEVRFFKGNKYWAVQGQNVLHGYPKDIYSSFGFPRTVKHIDAALSEENTGKTYFFVANKYWRYDEYKRSMDPGYPKMIAHDFPGIGHKVDAVFMKDGFFYFFHGTRQYKFDPKTKRILTLQKANSWFNCRKN

SEQ ID NO: 1177 - protein, 450 aa, Artificial Sequence
  MMP-1 variant P104A
FPATLETQEQDVDLVQKYLEKYYNLKNDGRQVEKRRNSGPVVEKLKQMQEFFGLKVTGKPDAETLKVMKQPRCGVPDVAQFVLTEGNPRWEQTHLTYRIENYTADLPRADVDHAIEKAFQLWSNVTPLTFTKVSEGQADIMISFVRGDHRDNSPFDGPGGNLAHAFQPGPGIGGDAHFDEDERWTNNFREYNLHRVAAHELGHSLGLSHSTDIGALMYPSYTFSGDVQLAQDDIDGIQAIYGRSQNPVQPIGPQTPKACDSKLTFDAITTIRGEVMFFKDRFYMRTNPFYPEVELNFISVFWPQLPNGLEAAYEFADRDEVRFFKGNKYWAVQGQNVLHGYPKDIYSSFGFPRTVKHIDAALSEENTGKTYFFVANKYWRYDEYKRSMDPGYPKMIAHDFPGIGHKVDAVFMKDGFFYFFHGTRQYKFDPKTKRILTLQKANSWFNCRKN

SEQ ID NO: 1178 - protein, 450 aa, Artificial Sequence
  MMP-1 variant L106D
FPATLETQEQDVDLVQKYLEKYYNLKNDGRQVEKRRNSGPVVEKLKQMQEFFGLKVTGKPDAETLKVMKQPRCGVPDVAQFVLTEGNPRWEQTHLTYRIENYTPDDPRADVDHAIEKAFQLWSNVTPLTFTKVSEGQADIMISFVRGDHRDNSPFDGPGGNLAHAFQPGPGIGGDAHFDEDERWTNNFREYNLHRVAAHELGHSLGLSHSTDIGALMYPSYTFSGDVQLAQDDIDGIQAIYGRSQNPVQPIGPQTPKACDSKLTFDAITTIRGEVMFFKDRFYMRTNPFYPEVELNFISVFWPQLPNGLEAAYEFADRDEVRFFKGNKYWAVQGQNVLHGYPKDIYSSFGFPRTVKHIDAALSEENTGKTYFFVANKYWRYDEYKRSMDPGYPKMIAHDFPGIGHKVDAVFMKDGFFYFFHGTRQYKFDPKTKRILTLQKANSWFNCRKN

SEQ ID NO: 1179 - protein, 450 aa, Artificial Sequence
  MMP-1 variant L106E
FPATLETQEQDVDLVQKYLEKYYNLKNDGRQVEKRRNSGPVVEKLKQMQEFFGLKVTGKPDAETLKVMKQPRCGVPDVAQFVLTEGNPRWEQTHLTYRIENYTPDEPRADVDHAIEKAFQLWSNVTPLTFTKVSEGQADIMISFVRGDHRDNSPFDGPGGNLAHAFQPGPGIGGDAHFDEDERWTNNFREYNLHRVAAHELGHSLGLSHSTDIGALMYPSYTFSGDVQLAQDDIDGIQAIYGRSQNPVQPIGPQTPKACDSKLTFDAITTIRGEVMFFKDRFYMRTNPFYPEVELNFISVFWPQLPNGLEAAYEFADRDEVRFFKGNKYWAVQGQNVLHGYPKDIYSSFGFPRTVKHIDAALSEENTGKTYFFVANKYWRYDEYKRSMDPGYPKMIAHDFPGIGHKVDAVFMKDGFFYFFHGTRQYKFDPKTKRILTLQKANSWFNCRKN

SEQ ID NO: 1180 - protein, 450 aa, Artificial Sequence
  MMP-1 variant L106H
FPATLETQEQDVDLVQKYLEKYYNLKNDGRQVEKRRNSGPVVEKLKQMQEFFGLKVTGKPDAETLKVMKQPRCGVPDVAQFVLTEGNPRWEQTHLTYRIENYTPDHPRADVDHAIEKAFQLWSNVTPLTFTKVSEGQADIMISFVRGDHRDNSPFDGPGGNLAHAFQPGPGIGGDAHFDEDERWTNNFREYNLHRVAAHELGHSLGLSHSTDIGALMYPSYTFSGDVQLAQDDIDGIQAIYGRSQNPVQPIGPQTPKACDSKLTFDAITTIRGEVMFFKDRFYMRTNPFYPEVELNFISVFWPQLPNGLEAAYEFADRDEVRFFKGNKYWAVQGQNVLHGYPKDIYSSFGFPRTVKHIDAALSEENTGKTYFFVANKYWRYDEYKRSMDPGYPKMIAHDFPGIGHKVDAVFMKDGFFYFFHGTRQYKFDPKTKRILTLQKANSWFNCRKN

SEQ ID NO: 1181 - protein, 450 aa, Artificial Sequence
  MMP-1 variant L106K
FPATLETQEQDVDLVQKYLEKYYNLKNDGRQVEKRRNSGPVVEKLKQMQEFFGLKVTGKPDAETLKVMKQPRCGVPDVAQFVLTEGNPRWEQTHLTYRIENYTPDKPRADVDHAIEKAFQLWSNVTPLTFTKVSEGQADIMISFVRGDHRDNSPFDGPGGNLAHAFQPGPGIGGDAHFDEDERWTNNFREYNLHRVAAHELGHSLGLSHSTDIGALMYPSYTFSGDVQLAQDDIDGIQAIYGRSQNPVQPIGPQTPKACDSKLTFDAITTIRGEVMFFKDRFYMRTNPFYPEVELNFISVFWPQLPNGLEAAYEFADRDEVRFFKGNKYWAVQGQNVLHGYPKDIYSSFGFPRTVKHIDAALSEENTGKTYFFVANKYWRYDEYKRSMDPGYPKMIAHDFPGIGHKVDAVFMKDGFFYFFHGTRQYKFDPKTKRILTLQKANSWFNCRKN

SEQ ID NO: 1182 - protein, 499 aa, Artificial Sequence
  MMP-1 variant L106R
FPATLETQEQDVDLVQKYLEKYYNLKNDGRQVEKRRNSGPVVEKLKQMQEFFGLKVTGKPDAETLKVMKQPRCGVPDVAQFVLTEGNPRWEQTHLTYRIENYTPDRPRADVDHAIEKAFQLWSNVTPLTFTKVSEGQADIMISFVRGDHRDNSPFDGPGGNLAHAFQPGPGIGGDAHFDEDERWTNNFREYNLHRVAAHELGHSLGLSHSTDIGALMYPSYTFSGDVQLAQDDIDGIQAIYGRSQNPVQPIGPQTPKACDSKLTFDAITTIRGEVMFFKDRFYMRTNPFYPEVELNFISVFWPQLPNGLEAAYEFADRDEVRFFKGNKYWAVQGQNVLHGYPKDIYSSFGFPRTVKHIDAALSEENTGKTYFFVANKYWRYDEYKRSMDPGYPKMIAHDFPGIGHKVDAVFMKDGFFYFFHGTRQYKFDPKTKRILTLQKANSWFNCRKNGIGHKVDAVFMKDGFFYFFHGTRQYKFDPKTKRILTLQKANSWFNCRKN

SEQ ID NO: 1183 - protein, 450 aa, Artificial Sequence
  MMP-1 variant L106C
FPATLETQEQDVDLVQKYLEKYYNLKNDGRQVEKRRNSGPVVEKLKQMQEFFGLKVTGKPDAETLKVMKQPRCGVPDVAQFVLTEGNPRWEQTHLTYRIENYTPDCPRADVDHAIEKAFQLWSNVTPLTFTKVSEGQADIMISFVRGDHRDNSPFDGPGGNLAHAFQPGPGIGGDAHFDEDERWTNNFREYNLHRVAAHELGHSLGLSHSTDIGALMYPSYTFSGDVQLAQDDIDGIQAIYGRSQNPVQPIGPQTPKACDSKLTFDAITTIRGEVMFFKDRFYMRTNPFYPEVELNFISVFWPQLPNGLEAAYEFADRDEVRFFKGNKYWAVQGQNVLHGYPKDIYSSFGFPRTVKHIDAALSEENTGKTYFFVANKYWRYDEYKRSMDPGYPKMIAHDFPGIGHKVDAVFMKDGFFYFFHGTRQYKFDPKTKRILTLQKANSWFNCRKN

SEQ ID NO: 1184 - protein, 450 aa, Artificial Sequence
  MMP-1 variant L106N
FPATLETQEQDVDLVQKYLEKYYNLKNDGRQVEKRRNSGPVVEKLKQMQEFFGLKVTGKPDAETLKVMKQPRCGVPDVAQFVLTEGNPRWEQTHLTYRIENYTPDNPRADVDHAIEKAFQLWSNVTPLTFTKVSEGQADIMISFVRGDHRDNSPFDGPGGNLAHAFQPGPGIGGDAHFDEDERWTNNFREYNLHRVAAHELGHSLGLSHSTDIGALMYPSYTFSGDVQLAQDDIDGIQAIYGRSQNPVQPIGPQTPKACDSKLTFDAITTIRGEVMFFKDRFYMRTNPFYPEVELNFISVFWPQLPNGLEAAYEFADRDEVRFFKGNKYWAVQGQNVLHGYPKDIYSSFGFPRTVKHIDAALSEENTGKTYFFVANKYWRYDEYKRSMDPGYPKMIAHDFPGIGHKVDAVFMKDGFFYFFHGTRQYKFDPKTKRILTLQKANSWFNCRKN

SEQ ID NO: 1185 - protein, 450 aa, Artificial Sequence
  MMP-1 variant L106Q
FPATLETQEQDVDLVQKYLEKYYNLKNDGRQVEKRRNSGPVVEKLKQMQEFFGLKVTGKPDAETLKVMKQPRCGVPDVAQFVLTEGNPRWEQTHLTYRIENYTPDQPRADVDHAIEKAFQLWSNVTPLTFTKVSEGQADIMISFVRGDHRDNSPFDGPGGNLAHAFQPGPGIGGDAHFDEDERWTNNFREYNLHRVAAHELGHSLGLSHSTDIGALMYPSYTFSGDVQLAQDDIDGIQAIYGRSQNPVQPIGPQTPKACDSKLTFDAITTIRGEVMFFKDRFYMRTNPFYPEVELNFISVFWPQLPNGLEAAYEFADRDEVRFFKGNKYWAVQGQNVLHGYPKDIYSSFGFPRTVKHIDAALSEENTGKTYFFVANKYWRYDEYKRSMDPGYPKMIAHDFPGIGHKVDAVFMKDGFFYFFHGTRQYKFDPKTKRILTLQKANSWFNCRKN

SEQ ID NO: 1186 - protein, 450 aa, Artificial Sequence
  MMP-1 variant L106T
FPATLETQEQDVDLVQKYLEKYYNLKNDGRQVEKRRNSGPVVEKLKQMQEFFGLKVTGKPDAETLKVMKQPRCGVPDVAQFVLTEGNPRWEQTHLTYRIENYTPDTPRADVDHAIEKAFQLWSNVTPLTFTKVSEGQADIMISFVRGDHRDNSPFDGPGGNLAHAFQPGPGIGGDAHFDEDERWTNNFREYNLHRVAAHELGHSLGLSHSTDIGALMYPSYTFSGDVQLAQDDIDGIQAIYGRSQNPVQPIGPQTPKACDSKLTFDAITTIRGEVMFFKDRFYMRTNPFYPEVELNFISVFWPQLPNGLEAAYEFADRDEVRFFKGNKYWAVQGQNVLHGYPKDIYSSFGFPRTVKHIDAALSEENTGKTYFFVANKYWRYDEYKRSMDPGYPKMIAHDFPGIGHKVDAVFMKDGFFYFFHGTRQYKFDPKTKRILTLQKANSWFNCRKN

SEQ ID NO: 1187 - protein, 450 aa, Artificial Sequence
  MMP-1 variant L106Y
FPATLETQEQDVDLVQKYLEKYYNLKNDGRQVEKRRNSGPVVEKLKQMQEFFGLKVTGKPDAETLKVMKQPRCGVPDVAQFVLTEGNPRWEQTHLTYRIENYTPDYPRADVDHAIEKAFQLWSNVTPLTFTKVSEGQADIMISFVRGDHRDNSPFDGPGGNLAHAFQPGPGIGGDAHFDEDERWTNNFREYNLHRVAAHELGHSLGLSHSTDIGALMYPSYTFSGDVQLAQDDIDGIQAIYGRSQNPVQPIGPQTPKACDSKLTFDAITTIRGEVMFFKDRFYMRTNPFYPEVELNFISVFWPQLPNGLEAAYEFADRDEVRFFKGNKYWAVQGQNVLHGYPKDIYSSFGFPRTVKHIDAALSEENTGKTYFFVANKYWRYDEYKRSMDPGYPKMIAHDFPGIGHKVDAVFMKDGFFYFFHGTRQYKFDPKTKRILTLQKANSWFNCRKN

SEQ ID NO: 1188 - protein, 450 aa, Artificial Sequence
  MMP-1 variant L106S
FPATLETQEQDVDLVQKYLEKYYNLKNDGRQVEKRRNSGPVVEKLKQMQEFFGLKVTGKPDAETLKVMKQPRCGVPDVAQFVLTEGNPRWEQTHLTYRIENYTPDSPRADVDHAIEKAFQLWSNVTPLTFTKVSEGQADIMISFVRGDHRDNSPFDGPGGNLAHAFQPGPGIGGDAHFDEDERWTNNFREYNLHRVAAHELGHSLGLSHSTDIGALMYPSYTFSGDVQLAQDDIDGIQAIYGRSQNPVQPIGPQTPKACDSKLTFDAITTIRGEVMFFKDRFYMRTNPFYPEVELNFISVFWPQLPNGLEAAYEFADRDEVRFFKGNKYWAVQGQNVLHGYPKDIYSSFGFPRTVKHIDAALSEENTGKTYFFVANKYWRYDEYKRSMDPGYPKMIAHDFPGIGHKVDAVFMKDGFFYFFHGTRQYKFDPKTKRILTLQKANSWFNCRKN

SEQ ID NO: 1189 - protein, 450 aa, Artificial Sequence
  MMP-1 variant L106G
FPATLETQEQDVDLVQKYLEKYYNLKNDGRQVEKRRNSGPVVEKLKQMQEFFGLKVTGKPDAETLKVMKQPRCGVPDVAQFVLTEGNPRWEQTHLTYRIENYTPDGPRADVDHAIEKAFQLWSNVTPLTFTKVSEGQADIMISFVRGDHRDNSPFDGPGGNLAHAFQPGPGIGGDAHFDEDERWTNNFREYNLHRVAAHELGHSLGLSHSTDIGALMYPSYTFSGDVQLAQDDIDGIQAIYGRSQNPVQPIGPQTPKACDSKLTFDAITTIRGEVMFFKDRFYMRTNPFYPEVELNFISVFWPQLPNGLEAAYEFADRDEVRFFKGNKYWAVQGQNVLHGYPKDIYSSFGFPRTVKHIDAALSEENTGKTYFFVANKYWRYDEYKRSMDPGYPKMIAHDFPGIGHKVDAVFMKDGFFYFFHGTRQYKFDPKTKRILTLQKANSWFNCRKN

SEQ ID NO: 1190 - protein, 450 aa, Artificial Sequence
  MMP-1 variant L106F
FPATLETQEQDVDLVQKYLEKYYNLKNDGRQVEKRRNSGPVVEKLKQMQEFFGLKVTGKPDAETLKVMKQPRCGVPDVAQFVLTEGNPRWEQTHLTYRIENYTPDFPRADVDHAIEKAFQLWSNVTPLTFTKVSEGQADIMISFVRGDHRDNSPFDGPGGNLAHAFQPGPGIGGDAHFDEDERWTNNFREYNLHRVAAHELGHSLGLSHSTDIGALMYPSYTFSGDVQLAQDDIDGIQAIYGRSQNPVQPIGPQTPKACDSKLTFDAITTIRGEVMFFKDRFYMRTNPFYPEVELNFISVFWPQLPNGLEAAYEFADRDEVRFFKGNKYWAVQGQNVLHGYPKDIYSSFGFPRTVKHIDAALSEENTGKTYFFVANKYWRYDEYKRSMDPGYPKMIAHDFPGIGHKVDAVFMKDGFFYFFHGTRQYKFDPKTKRILTLQKANSWFNCRKN

SEQ ID NO: 1191 - protein, 450 aa, Artificial Sequence
  MMP-1 variant L106M
FPATLETQEQDVDLVQKYLEKYYNLKNDGRQVEKRRNSGPVVEKLKQMQEFFGLKVTGKPDAETLKVMKQPRCGVPDVAQFVLTEGNPRWEQTHLTYRIENYTPDMPRADVDHAIEKAFQLWSNVTPLTFTKVSEGQADIMISFVRGDHRDNSPFDGPGGNLAHAFQPGPGIGGDAHFDEDERWTNNFREYNLHRVAAHELGHSLGLSHSTDIGALMYPSYTFSGDVQLAQDDIDGIQAIYGRSQNPVQPIGPQTPKACDSKLTFDAITTIRGEVMFFKDRFYMRTNPFYPEVELNFISVFWPQLPNGLEAAYEFADRDEVRFFKGNKYWAVQGQNVLHGYPKDIYSSFGFPRTVKHIDAALSEENTGKTYFFVANKYWRYDEYKRSMDPGYPKMIAHDFPGIGHKVDAVFMKDGFFYFFHGTRQYKFDPKTKRILTLQKANSWFNCRKN

SEQ ID NO: 1192 - protein, 450 aa, Artificial Sequence
  MMP-1 variant L106W
FPATLETQEQDVDLVQKYLEKYYNLKNDGRQVEKRRNSGPVVEKLKQMQEFFGLKVTGKPDAETLKVMKQPRCGVPDVAQFVLTEGNPRWEQTHLTYRIENYTPDWPRADVDHAIEKAFQLWSNVTPLTFTKVSEGQADIMISFVRGDHRDNSPFDGPGGNLAHAFQPGPGIGGDAHFDEDERWTNNFREYNLHRVAAHELGHSLGLSHSTDIGALMYPSYTFSGDVQLAQDDIDGIQAIYGRSQNPVQPIGPQTPKACDSKLTFDAITTIRGEVMFFKDRFYMRTNPFYPEVELNFISVFWPQLPNGLEAAYEFADRDEVRFFKGNKYWAVQGQNVLHGYPKDIYSSFGFPRTVKHIDAALSEENTGKTYFFVANKYWRYDEYKRSMDPGYPKMIAHDFPGIGHKVDAVFMKDGFFYFFHGTRQYKFDPKTKRILTLQKANSWFNCRKN

SEQ ID NO: 1193 - protein, 450 aa, Artificial Sequence
  MMP-1 variant L106I
FPATLETQEQDVDLVQKYLEKYYNLKNDGRQVEKRRNSGPVVEKLKQMQEFFGLKVTGKPDAETLKVMKQPRCGVPDVAQFVLTEGNPRWEQTHLTYRIENYTPDIPRADVDHAIEKAFQLWSNVTPLTFTKVSEGQADIMISFVRGDHRDNSPFDGPGGNLAHAFQPGPGIGGDAHFDEDERWTNNFREYNLHRVAAHELGHSLGLSHSTDIGALMYPSYTFSGDVQLAQDDIDGIQAIYGRSQNPVQPIGPQTPKACDSKLTFDAITTIRGEVMFFKDRFYMRTNPFYPEVELNFISVFWPQLPNGLEAAYEFADRDEVRFFKGNKYWAVQGQNVLHGYPKDIYSSFGFPRTVKHIDAALSEENTGKTYFFVANKYWRYDEYKRSMDPGYPKMIAHDFPGIGHKVDAVFMKDGFFYFFHGTRQYKFDPKTKRILTLQKANSWFNCRKN

SEQ ID NO: 1194 - protein, 450 aa, Artificial Sequence
  MMP-1 variant L106V
FPATLETQEQDVDLVQKYLEKYYNLKNDGRQVEKRRNSGPVVEKLKQMQEFFGLKVTGKPDAETLKVMKQPRCGVPDVAQFVLTEGNPRWEQTHLTYRIENYTPDVPRADVDHAIEKAFQLWSNVTPLTFTKVSEGQADIMISFVRGDHRDNSPFDGPGGNLAHAFQPGPGIGGDAHFDEDERWTNNFREYNLHRVAAHELGHSLGLSHSTDIGALMYPSYTFSGDVQLAQDDIDGIQAIYGRSQNPVQPIGPQTPKACDSKLTFDAITTIRGEVMFFKDRFYMRTNPFYPEVELNFISVFWPQLPNGLEAAYEFADRDEVRFFKGNKYWAVQGQNVLHGYPKDIYSSFGFPRTVKHIDAALSEENTGKTYFFVANKYWRYDEYKRSMDPGYPKMIAHDFPGIGHKVDAVFMKDGFFYFFHGTRQYKFDPKTKRILTLQKANSWFNCRKN

SEQ ID NO: 1195 - protein, 450 aa, Artificial Sequence
  MMP-1 variant L106A
FPATLETQEQDVDLVQKYLEKYYNLKNDGRQVEKRRNSGPVVEKLKQMQEFFGLKVTGKPDAETLKVMKQPRCGVPDVAQFVLTEGNPRWEQTHLTYRIENYTPDAPRADVDHAIEKAFQLWSNVTPLTFTKVSEGQADIMISFVRGDHRDNSPFDGPGGNLAHAFQPGPGIGGDAHFDEDERWTNNFREYNLHRVAAHELGHSLGLSHSTDIGALMYPSYTFSGDVQLAQDDIDGIQAIYGRSQNPVQPIGPQTPKACDSKLTFDAITTIRGEVMFFKDRFYMRTNPFYPEVELNFISVFWPQLPNGLEAAYEFADRDEVRFFKGNKYWAVQGQNVLHGYPKDIYSSFGFPRTVKHIDAALSEENTGKTYFFVANKYWRYDEYKRSMDPGYPKMIAHDFPGIGHKVDAVFMKDGFFYFFHGTRQYKFDPKTKRILTLQKANSWFNCRKN

SEQ ID NO: 1196 - protein, 450 aa, Artificial Sequence
  MMP-1 variant L106P
FPATLETQEQDVDLVQKYLEKYYNLKNDGRQVEKRRNSGPVVEKLKQMQEFFGLKVTGKPDAETLKVMKQPRCGVPDVAQFVLTEGNPRWEQTHLTYRIENYTPDPPRADVDHAIEKAFQLWSNVTPLTFTKVSEGQADIMISFVRGDHRDNSPFDGPGGNLAHAFQPGPGIGGDAHFDEDERWTNNFREYNLHRVAAHELGHSLGLSHSTDIGALMYPSYTFSGDVQLAQDDIDGIQAIYGRSQNPVQPIGPQTPKACDSKLTFDAITTIRGEVMFFKDRFYMRTNPFYPEVELNFISVFWPQLPNGLEAAYEFADRDEVRFFKGNKYWAVQGQNVLHGYPKDIYSSFGFPRTVKHIDAALSEENTGKTYFFVANKYWRYDEYKRSMDPGYPKMIAHDFPGIGHKVDAVFMKDGFFYFFHGTRQYKFDPKTKRILTLQKANSWFNCRKN

SEQ ID NO: 1197 - protein, 450 aa, Artificial Sequence
  MMP-1 variant P107D
FPATLETQEQDVDLVQKYLEKYYNLKNDGRQVEKRRNSGPVVEKLKQMQEFFGLKVTGKPDAETLKVMKQPRCGVPDVAQFVLTEGNPRWEQTHLTYRIENYTPDLDRADVDHAIEKAFQLWSNVTPLTFTKVSEGQADIMISFVRGDHRDNSPFDGPGGNLAHAFQPGPGIGGDAHFDEDERWTNNFREYNLHRVAAHELGHSLGLSHSTDIGALMYPSYTFSGDVQLAQDDIDGIQAIYGRSQNPVQPIGPQTPKACDSKLTFDAITTIRGEVMFFKDRFYMRTNPFYPEVELNFISVFWPQLPNGLEAAYEFADRDEVRFFKGNKYWAVQGQNVLHGYPKDIYSSFGFPRTVKHIDAALSEENTGKTYFFVANKYWRYDEYKRSMDPGYPKMIAHDFPGIGHKVDAVFMKDGFFYFFHGTRQYKFDPKTKRILTLQKANSWFNCRKN

SEQ ID NO: 1198 - protein, 450 aa, Artificial Sequence
  MMP-1 variant P107E
FPATLETQEQDVDLVQKYLEKYYNLKNDGRQVEKRRNSGPVVEKLKQMQEFFGLKVTGKPDAETLKVMKQPRCGVPDVAQFVLTEGNPRWEQTHLTYRIENYTPDLERADVDHAIEKAFQLWSNVTPLTFTKVSEGQADIMISFVRGDHRDNSPFDGPGGNLAHAFQPGPGIGGDAHFDEDERWTNNFREYNLHRVAAHELGHSLGLSHSTDIGALMYPSYTFSGDVQLAQDDIDGIQAIYGRSQNPVQPIGPQTPKACDSKLTFDAITTIRGEVMFFKDRFYMRTNPFYPEVELNFISVFWPQLPNGLEAAYEFADRDEVRFFKGNKYWAVQGQNVLHGYPKDIYSSFGFPRTVKHIDAALSEENTGKTYFFVANKYWRYDEYKRSMDPGYPKMIAHDFPGIGHKVDAVFMKDGFFYFFHGTRQYKFDPKTKRILTLQKANSWFNCRKN

SEQ ID NO: 1199 - protein, 450 aa, Artificial Sequence
  MMP-1 variant P107H
FPATLETQEQDVDLVQKYLEKYYNLKNDGRQVEKRRNSGPVVEKLKQMQEFFGLKVTGKPDAETLKVMKQPRCGVPDVAQFVLTEGNPRWEQTHLTYRIENYTPDLHRADVDHAIEKAFQLWSNVTPLTFTKVSEGQADIMISFVRGDHRDNSPFDGPGGNLAHAFQPGPGIGGDAHFDEDERWTNNFREYNLHRVAAHELGHSLGLSHSTDIGALMYPSYTFSGDVQLAQDDIDGIQAIYGRSQNPVQPIGPQTPKACDSKLTFDAITTIRGEVMFFKDRFYMRTNPFYPEVELNFISVFWPQLPNGLEAAYEFADRDEVRFFKGNKYWAVQGQNVLHGYPKDIYSSFGFPRTVKHIDAALSEENTGKTYFFVANKYWRYDEYKRSMDPGYPKMIAHDFPGIGHKVDAVFMKDGFFYFFHGTRQYKFDPKTKRILTLQKANSWFNCRKN

SEQ ID NO: 1200 - protein, 450 aa, Artificial Sequence
  MMP-1 variant P107K
FPATLETQEQDVDLVQKYLEKYYNLKNDGRQVEKRRNSGPVVEKLKQMQEFFGLKVTGKPDAETLKVMKQPRCGVPDVAQFVLTEGNPRWEQTHLTYRIENYTPDLKRADVDHAIEKAFQLWSNVTPLTFTKVSEGQADIMISFVRGDHRDNSPFDGPGGNLAHAFQPGPGIGGDAHFDEDERWTNNFREYNLHRVAAHELGHSLGLSHSTDIGALMYPSYTFSGDVQLAQDDIDGIQAIYGRSQNPVQPIGPQTPKACDSKLTFDAITTIRGEVMFFKDRFYMRTNPFYPEVELNFISVFWPQLPNGLEAAYEFADRDEVRFFKGNKYWAVQGQNVLHGYPKDIYSSFGFPRTVKHIDAALSEENTGKTYFFVANKYWRYDEYKRSMDPGYPKMIAHDFPGIGHKVDAVFMKDGFFYFFHGTRQYKFDPKTKRILTLQKANSWFNCRKN

SEQ ID NO: 1201 - protein, 450 aa, Artificial Sequence
  MMP-1 variant P107R
FPATLETQEQDVDLVQKYLEKYYNLKNDGRQVEKRRNSGPVVEKLKQMQEFFGLKVTGKPDAETLKVMKQPRCGVPDVAQFVLTEGNPRWEQTHLTYRIENYTPDLRRADVDHAIEKAFQLWSNVTPLTFTKVSEGQADIMISFVRGDHRDNSPFDGPGGNLAHAFQPGPGIGGDAHFDEDERWTNNFREYNLHRVAAHELGHSLGLSHSTDIGALMYPSYTFSGDVQLAQDDIDGIQAIYGRSQNPVQPIGPQTPKACDSKLTFDAITTIRGEVMFFKDRFYMRTNPFYPEVELNFISVFWPQLPNGLEAAYEFADRDEVRFFKGNKYWAVQGQNVLHGYPKDIYSSFGFPRTVKHIDAALSEENTGKTYFFVANKYWRYDEYKRSMDPGYPKMIAHDFPGIGHKVDAVFMKDGFFYFFHGTRQYKFDPKTKRILTLQKANSWFNCRKN

SEQ ID NO: 1202 - protein, 450 aa, Artificial Sequence
  MMP-1 variant P107C
FPATLETQEQDVDLVQKYLEKYYNLKNDGRQVEKRRNSGPVVEKLKQMQEFFGLKVTGKPDAETLKVMKQPRCGVPDVAQFVLTEGNPRWEQTHLTYRIENYTPDLCRADVDHAIEKAFQLWSNVTPLTFTKVSEGQADIMISFVRGDHRDNSPFDGPGGNLAHAFQPGPGIGGDAHFDEDERWTNNFREYNLHRVAAHELGHSLGLSHSTDIGALMYPSYTFSGDVQLAQDDIDGIQAIYGRSQNPVQPIGPQTPKACDSKLTFDAITTIRGEVMFFKDRFYMRTNPFYPEVELNFISVFWPQLPNGLEAAYEFADRDEVRFFKGNKYWAVQGQNVLHGYPKDIYSSFGFPRTVKHIDAALSEENTGKTYFFVANKYWRYDEYKRSMDPGYPKMIAHDFPGIGHKVDAVFMKDGFFYFFHGTRQYKFDPKTKRILTLQKANSWFNCRKN

SEQ ID NO: 1203 - protein, 450 aa, Artificial Sequence
  MMP-1 variant P107N
FPATLETQEQDVDLVQKYLEKYYNLKNDGRQVEKRRNSGPVVEKLKQMQEFFGLKVTGKPDAETLKVMKQPRCGVPDVAQFVLTEGNPRWEQTHLTYRIENYTPDLNRADVDHAIEKAFQLWSNVTPLTFTKVSEGQADIMISFVRGDHRDNSPFDGPGGNLAHAFQPGPGIGGDAHFDEDERWTNNFREYNLHRVAAHELGHSLGLSHSTDIGALMYPSYTFSGDVQLAQDDIDGIQAIYGRSQNPVQPIGPQTPKACDSKLTFDAITTIRGEVMFFKDRFYMRTNPFYPEVELNFISVFWPQLPNGLEAAYEFADRDEVRFFKGNKYWAVQGQNVLHGYPKDIYSSFGFPRTVKHIDAALSEENTGKTYFFVANKYWRYDEYKRSMDPGYPKMIAHDFPGIGHKVDAVFMKDGFFYFFHGTRQYKFDPKTKRILTLQKANSWFNCRKN

SEQ ID NO: 1204 - protein, 450 aa, Artificial Sequence
  MMP-1 variant P107Q
FPATLETQEQDVDLVQKYLEKYYNLKNDGRQVEKRRNSGPVVEKLKQMQEFFGLKVTGKPDAETLKVMKQPRCGVPDVAQFVLTEGNPRWEQTHLTYRIENYTPDLQRADVDHAIEKAFQLWSNVTPLTFTKVSEGQADIMISFVRGDHRDNSPFDGPGGNLAHAFQPGPGIGGDAHFDEDERWTNNFREYNLHRVAAHELGHSLGLSHSTDIGALMYPSYTFSGDVQLAQDDIDGIQAIYGRSQNPVQPIGPQTPKACDSKLTFDAITTIRGEVMFFKDRFYMRTNPFYPEVELNFISVFWPQLPNGLEAAYEFADRDEVRFFKGNKYWAVQGQNVLHGYPKDIYSSFGFPRTVKHIDAALSEENTGKTYFFVANKYWRYDEYKRSMDPGYPKMIAHDFPGIGHKVDAVFMKDGFFYFFHGTRQYKFDPKTKRILTLQKANSWFNCRKN

SEQ ID NO: 1205 - protein, 450 aa, Artificial Sequence
  MMP-1 variant P107T
FPATLETQEQDVDLVQKYLEKYYNLKNDGRQVEKRRNSGPVVEKLKQMQEFFGLKVTGKPDAETLKVMKQPRCGVPDVAQFVLTEGNPRWEQTHLTYRIENYTPDLTRADVDHAIEKAFQLWSNVTPLTFTKVSEGQADIMISFVRGDHRDNSPFDGPGGNLAHAFQPGPGIGGDAHFDEDERWTNNFREYNLHRVAAHELGHSLGLSHSTDIGALMYPSYTFSGDVQLAQDDIDGIQAIYGRSQNPVQPIGPQTPKACDSKLTFDAITTIRGEVMFFKDRFYMRTNPFYPEVELNFISVFWPQLPNGLEAAYEFADRDEVRFFKGNKYWAVQGQNVLHGYPKDIYSSFGFPRTVKHIDAALSEENTGKTYFFVANKYWRYDEYKRSMDPGYPKMIAHDFPGIGHKVDAVFMKDGFFYFFHGTRQYKFDPKTKRILTLQKANSWFNCRKN

SEQ ID NO: 1206 - protein, 450 aa, Artificial Sequence
  MMP-1 variant P107Y
FPATLETQEQDVDLVQKYLEKYYNLKNDGRQVEKRRNSGPVVEKLKQMQEFFGLKVTGKPDAETLKVMKQPRCGVPDVAQFVLTEGNPRWEQTHLTYRIENYTPDLYRADVDHAIEKAFQLWSNVTPLTFTKVSEGQADIMISFVRGDHRDNSPFDGPGGNLAHAFQPGPGIGGDAHFDEDERWTNNFREYNLHRVAAHELGHSLGLSHSTDIGALMYPSYTFSGDVQLAQDDIDGIQAIYGRSQNPVQPIGPQTPKACDSKLTFDAITTIRGEVMFFKDRFYMRTNPFYPEVELNFISVFWPQLPNGLEAAYEFADRDEVRFFKGNKYWAVQGQNVLHGYPKDIYSSFGFPRTVKHIDAALSEENTGKTYFFVANKYWRYDEYKRSMDPGYPKMIAHDFPGIGHKVDAVFMKDGFFYFFHGTRQYKFDPKTKRILTLQKANSWFNCRKN

SEQ ID NO: 1207 - protein, 450 aa, Artificial Sequence
  MMP-1 variant P107S
FPATLETQEQDVDLVQKYLEKYYNLKNDGRQVEKRRNSGPVVEKLKQMQEFFGLKVTGKPDAETLKVMKQPRCGVPDVAQFVLTEGNPRWEQTHLTYRIENYTPDLSRADVDHAIEKAFQLWSNVTPLTFTKVSEGQADIMISFVRGDHRDNSPFDGPGGNLAHAFQPGPGIGGDAHFDEDERWTNNFREYNLHRVAAHELGHSLGLSHSTDIGALMYPSYTFSGDVQLAQDDIDGIQAIYGRSQNPVQPIGPQTPKACDSKLTFDAITTIRGEVMFFKDRFYMRTNPFYPEVELNFISVFWPQLPNGLEAAYEFADRDEVRFFKGNKYWAVQGQNVLHGYPKDIYSSFGFPRTVKHIDAALSEENTGKTYFFVANKYWRYDEYKRSMDPGYPKMIAHDFPGIGHKVDAVFMKDGFFYFFHGTRQYKFDPKTKRILTLQKANSWFNCRKN

SEQ ID NO: 1208 - protein, 450 aa, Artificial Sequence
  MMP-1 variant P107G
FPATLETQEQDVDLVQKYLEKYYNLKNDGRQVEKRRNSGPVVEKLKQMQEFFGLKVTGKPDAETLKVMKQPRCGVPDVAQFVLTEGNPRWEQTHLTYRIENYTPDLGRADVDHAIEKAFQLWSNVTPLTFTKVSEGQADIMISFVRGDHRDNSPFDGPGGNLAHAFQPGPGIGGDAHFDEDERWTNNFREYNLHRVAAHELGHSLGLSHSTDIGALMYPSYTFSGDVQLAQDDIDGIQAIYGRSQNPVQPIGPQTPKACDSKLTFDAITTIRGEVMFFKDRFYMRTNPFYPEVELNFISVFWPQLPNGLEAAYEFADRDEVRFFKGNKYWAVQGQNVLHGYPKDIYSSFGFPRTVKHIDAALSEENTGKTYFFVANKYWRYDEYKRSMDPGYPKMIAHDFPGIGHKVDAVFMKDGFFYFFHGTRQYKFDPKTKRILTLQKANSWFNCRKN

SEQ ID NO: 1209 - protein, 450 aa, Artificial Sequence
  MMP-1 variant P107F
FPATLETQEQDVDLVQKYLEKYYNLKNDGRQVEKRRNSGPVVEKLKQMQEFFGLKVTGKPDAETLKVMKQPRCGVPDVAQFVLTEGNPRWEQTHLTYRIENYTPDLFRADVDHAIEKAFQLWSNVTPLTFTKVSEGQADIMISFVRGDHRDNSPFDGPGGNLAHAFQPGPGIGGDAHFDEDERWTNNFREYNLHRVAAHELGHSLGLSHSTDIGALMYPSYTFSGDVQLAQDDIDGIQAIYGRSQNPVQPIGPQTPKACDSKLTFDAITTIRGEVMFFKDRFYMRTNPFYPEVELNFISVFWPQLPNGLEAAYEFADRDEVRFFKGNKYWAVQGQNVLHGYPKDIYSSFGFPRTVKHIDAALSEENTGKTYFFVANKYWRYDEYKRSMDPGYPKMIAHDFPGIGHKVDAVFMKDGFFYFFHGTRQYKFDPKTKRILTLQKANSWFNCRKN

SEQ ID NO: 1210 - protein, 450 aa, Artificial Sequence
  MMP-1 variant P107M
FPATLETQEQDVDLVQKYLEKYYNLKNDGRQVEKRRNSGPVVEKLKQMQEFFGLKVTGKPDAETLKVMKQPRCGVPDVAQFVLTEGNPRWEQTHLTYRIENYTPDLMRADVDHAIEKAFQLWSNVTPLTFTKVSEGQADIMISFVRGDHRDNSPFDGPGGNLAHAFQPGPGIGGDAHFDEDERWTNNFREYNLHRVAAHELGHSLGLSHSTDIGALMYPSYTFSGDVQLAQDDIDGIQAIYGRSQNPVQPIGPQTPKACDSKLTFDAITTIRGEVMFFKDRFYMRTNPFYPEVELNFISVFWPQLPNGLEAAYEFADRDEVRFFKGNKYWAVQGQNVLHGYPKDIYSSFGFPRTVKHIDAALSEENTGKTYFFVANKYWRYDEYKRSMDPGYPKMIAHDFPGIGHKVDAVFMKDGFFYFFHGTRQYKFDPKTKRILTLQKANSWFNCRKN

SEQ ID NO: 1211 - protein, 450 aa, Artificial Sequence
  MMP-1 variant P107W
FPATLETQEQDVDLVQKYLEKYYNLKNDGRQVEKRRNSGPVVEKLKQMQEFFGLKVTGKPDAETLKVMKQPRCGVPDVAQFVLTEGNPRWEQTHLTYRIENYTPDLWRADVDHAIEKAFQLWSNVTPLTFTKVSEGQADIMISFVRGDHRDNSPFDGPGGNLAHAFQPGPGIGGDAHFDEDERWTNNFREYNLHRVAAHELGHSLGLSHSTDIGALMYPSYTFSGDVQLAQDDIDGIQAIYGRSQNPVQPIGPQTPKACDSKLTFDAITTIRGEVMFFKDRFYMRTNPFYPEVELNFISVFWPQLPNGLEAAYEFADRDEVRFFKGNKYWAVQGQNVLHGYPKDIYSSFGFPRTVKHIDAALSEENTGKTYFFVANKYWRYDEYKRSMDPGYPKMIAHDFPGIGHKVDAVFMKDGFFYFFHGTRQYKFDPKTKRILTLQKANSWFNCRKN

SEQ ID NO: 1212 - protein, 450 aa, Artificial Sequence
  MMP-1 variant P107I
FPATLETQEQDVDLVQKYLEKYYNLKNDGRQVEKRRNSGPVVEKLKQMQEFFGLKVTGKPDAETLKVMKQPRCGVPDVAQFVLTEGNPRWEQTHLTYRIENYTPDLIRADVDHAIEKAFQLWSNVTPLTFTKVSEGQADIMISFVRGDHRDNSPFDGPGGNLAHAFQPGPGIGGDAHFDEDERWTNNFREYNLHRVAAHELGHSLGLSHSTDIGALMYPSYTFSGDVQLAQDDIDGIQAIYGRSQNPVQPIGPQTPKACDSKLTFDAITTIRGEVMFFKDRFYMRTNPFYPEVELNFISVFWPQLPNGLEAAYEFADRDEVRFFKGNKYWAVQGQNVLHGYPKDIYSSFGFPRTVKHIDAALSEENTGKTYFFVANKYWRYDEYKRSMDPGYPKMIAHDFPGIGHKVDAVFMKDGFFYFFHGTRQYKFDPKTKRILTLQKANSWFNCRKN

SEQ ID NO: 1213 - protein, 450 aa, Artificial Sequence
  MMP-1 variant P107V
FPATLETQEQDVDLVQKYLEKYYNLKNDGRQVEKRRNSGPVVEKLKQMQEFFGLKVTGKPDAETLKVMKQPRCGVPDVAQFVLTEGNPRWEQTHLTYRIENYTPDLVRADVDHAIEKAFQLWSNVTPLTFTKVSEGQADIMISFVRGDHRDNSPFDGPGGNLAHAFQPGPGIGGDAHFDEDERWTNNFREYNLHRVAAHELGHSLGLSHSTDIGALMYPSYTFSGDVQLAQDDIDGIQAIYGRSQNPVQPIGPQTPKACDSKLTFDAITTIRGEVMFFKDRFYMRTNPFYPEVELNFISVFWPQLPNGLEAAYEFADRDEVRFFKGNKYWAVQGQNVLHGYPKDIYSSFGFPRTVKHIDAALSEENTGKTYFFVANKYWRYDEYKRSMDPGYPKMIAHDFPGIGHKVDAVFMKDGFFYFFHGTRQYKFDPKTKRILTLQKANSWFNCRKN

SEQ ID NO: 1214 - protein, 450 aa, Artificial Sequence
  MMP-1 variant P107L
FPATLETQEQDVDLVQKYLEKYYNLKNDGRQVEKRRNSGPVVEKLKQMQEFFGLKVTGKPDAETLKVMKQPRCGVPDVAQFVLTEGNPRWEQTHLTYRIENYTPDLLRADVDHAIEKAFQLWSNVTPLTFTKVSEGQADIMISFVRGDHRDNSPFDGPGGNLAHAFQPGPGIGGDAHFDEDERWTNNFREYNLHRVAAHELGHSLGLSHSTDIGALMYPSYTFSGDVQLAQDDIDGIQAIYGRSQNPVQPIGPQTPKACDSKLTFDAITTIRGEVMFFKDRFYMRTNPFYPEVELNFISVFWPQLPNGLEAAYEFADRDEVRFFKGNKYWAVQGQNVLHGYPKDIYSSFGFPRTVKHIDAALSEENTGKTYFFVANKYWRYDEYKRSMDPGYPKMIAHDFPGIGHKVDAVFMKDGFFYFFHGTRQYKFDPKTKRILTLQKANSWFNCRKN

SEQ ID NO: 1215 - protein, 450 aa, Artificial Sequence
  MMP-1 variant P107A
FPATLETQEQDVDLVQKYLEKYYNLKNDGRQVEKRRNSGPVVEKLKQMQEFFGLKVTGKPDAETLKVMKQPRCGVPDVAQFVLTEGNPRWEQTHLTYRIENYTPDLARADVDHAIEKAFQLWSNVTPLTFTKVSEGQADIMISFVRGDHRDNSPFDGPGGNLAHAFQPGPGIGGDAHFDEDERWTNNFREYNLHRVAAHELGHSLGLSHSTDIGALMYPSYTFSGDVQLAQDDIDGIQAIYGRSQNPVQPIGPQTPKACDSKLTFDAITTIRGEVMFFKDRFYMRTNPFYPEVELNFISVFWPQLPNGLEAAYEFADRDEVRFFKGNKYWAVQGQNVLHGYPKDIYSSFGFPRTVKHIDAALSEENTGKTYFFVANKYWRYDEYKRSMDPGYPKMIAHDFPGIGHKVDAVFMKDGFFYFFHGTRQYKFDPKTKRILTLQKANSWFNCRKN

SEQ ID NO: 1216 - protein, 450 aa, Artificial Sequence
  MMP-1 variant R108D
FPATLETQEQDVDLVQKYLEKYYNLKNDGRQVEKRRNSGPVVEKLKQMQEFFGLKVTGKPDAETLKVMKQPRCGVPDVAQFVLTEGNPRWEQTHLTYRIENYTPDLPDADVDHAIEKAFQLWSNVTPLTFTKVSEGQADIMISFVRGDHRDNSPFDGPGGNLAHAFQPGPGIGGDAHFDEDERWTNNFREYNLHRVAAHELGHSLGLSHSTDIGALMYPSYTFSGDVQLAQDDIDGIQAIYGRSQNPVQPIGPQTPKACDSKLTFDAITTIRGEVMFFKDRFYMRTNPFYPEVELNFISVFWPQLPNGLEAAYEFADRDEVRFFKGNKYWAVQGQNVLHGYPKDIYSSFGFPRTVKHIDAALSEENTGKTYFFVANKYWRYDEYKRSMDPGYPKMIAHDFPGIGHKVDAVFMKDGFFYFFHGTRQYKFDPKTKRILTLQKANSWFNCRKN

SEQ ID NO: 1217 - protein, 450 aa, Artificial Sequence
  MMP-1 variant R108E
FPATLETQEQDVDLVQKYLEKYYNLKNDGRQVEKRRNSGPVVEKLKQMQEFFGLKVTGKPDAETLKVMKQPRCGVPDVAQFVLTEGNPRWEQTHLTYRIENYTPDLPEADVDHAIEKAFQLWSNVTPLTFTKVSEGQADIMISFVRGDHRDNSPFDGPGGNLAHAFQPGPGIGGDAHFDEDERWTNNFREYNLHRVAAHELGHSLGLSHSTDIGALMYPSYTFSGDVQLAQDDIDGIQAIYGRSQNPVQPIGPQTPKACDSKLTFDAITTIRGEVMFFKDRFYMRTNPFYPEVELNFISVFWPQLPNGLEAAYEFADRDEVRFFKGNKYWAVQGQNVLHGYPKDIYSSFGFPRTVKHIDAALSEENTGKTYFFVANKYWRYDEYKRSMDPGYPKMIAHDFPGIGHKVDAVFMKDGFFYFFHGTRQYKFDPKTKRILTLQKANSWFNCRKN

SEQ ID NO: 1218 - protein, 450 aa, Artificial Sequence
  MMP-1 variant R108H
FPATLETQEQDVDLVQKYLEKYYNLKNDGRQVEKRRNSGPVVEKLKQMQEFFGLKVTGKPDAETLKVMKQPRCGVPDVAQFVLTEGNPRWEQTHLTYRIENYTPDLPHADVDHAIEKAFQLWSNVTPLTFTKVSEGQADIMISFVRGDHRDNSPFDGPGGNLAHAFQPGPGIGGDAHFDEDERWTNNFREYNLHRVAAHELGHSLGLSHSTDIGALMYPSYTFSGDVQLAQDDIDGIQAIYGRSQNPVQPIGPQTPKACDSKLTFDAITTIRGEVMFFKDRFYMRTNPFYPEVELNFISVFWPQLPNGLEAAYEFADRDEVRFFKGNKYWAVQGQNVLHGYPKDIYSSFGFPRTVKHIDAALSEENTGKTYFFVANKYWRYDEYKRSMDPGYPKMIAHDFPGIGHKVDAVFMKDGFFYFFHGTRQYKFDPKTKRILTLQKANSWFNCRKN

SEQ ID NO: 1219 - protein, 450 aa, Artificial Sequence
  MMP-1 variant R108K
FPATLETQEQDVDLVQKYLEKYYNLKNDGRQVEKRRNSGPVVEKLKQMQEFFGLKVTGKPDAETLKVMKQPRCGVPDVAQFVLTEGNPRWEQTHLTYRIENYTPDLPKADVDHAIEKAFQLWSNVTPLTFTKVSEGQADIMISFVRGDHRDNSPFDGPGGNLAHAFQPGPGIGGDAHFDEDERWTNNFREYNLHRVAAHELGHSLGLSHSTDIGALMYPSYTFSGDVQLAQDDIDGIQAIYGRSQNPVQPIGPQTPKACDSKLTFDAITTIRGEVMFFKDRFYMRTNPFYPEVELNFISVFWPQLPNGLEAAYEFADRDEVRFFKGNKYWAVQGQNVLHGYPKDIYSSFGFPRTVKHIDAALSEENTGKTYFFVANKYWRYDEYKRSMDPGYPKMIAHDFPGIGHKVDAVFMKDGFFYFFHGTRQYKFDPKTKRILTLQKANSWFNCRKN

SEQ ID NO: 1220 - protein, 450 aa, Artificial Sequence
  MMP-1 variant R108C
FPATLETQEQDVDLVQKYLEKYYNLKNDGRQVEKRRNSGPVVEKLKQMQEFFGLKVTGKPDAETLKVMKQPRCGVPDVAQFVLTEGNPRWEQTHLTYRIENYTPDLPCADVDHAIEKAFQLWSNVTPLTFTKVSEGQADIMISFVRGDHRDNSPFDGPGGNLAHAFQPGPGIGGDAHFDEDERWTNNFREYNLHRVAAHELGHSLGLSHSTDIGALMYPSYTFSGDVQLAQDDIDGIQAIYGRSQNPVQPIGPQTPKACDSKLTFDAITTIRGEVMFFKDRFYMRTNPFYPEVELNFISVFWPQLPNGLEAAYEFADRDEVRFFKGNKYWAVQGQNVLHGYPKDIYSSFGFPRTVKHIDAALSEENTGKTYFFVANKYWRYDEYKRSMDPGYPKMIAHDFPGIGHKVDAVFMKDGFFYFFHGTRQYKFDPKTKRILTLQKANSWFNCRKN

SEQ ID NO: 1221 - protein, 450 aa, Artificial Sequence
  MMP-1 variant R108N
FPATLETQEQDVDLVQKYLEKYYNLKNDGRQVEKRRNSGPVVEKLKQMQEFFGLKVTGKPDAETLKVMKQPRCGVPDVAQFVLTEGNPRWEQTHLTYRIENYTPDLPNADVDHAIEKAFQLWSNVTPLTFTKVSEGQADIMISFVRGDHRDNSPFDGPGGNLAHAFQPGPGIGGDAHFDEDERWTNNFREYNLHRVAAHELGHSLGLSHSTDIGALMYPSYTFSGDVQLAQDDIDGIQAIYGRSQNPVQPIGPQTPKACDSKLTFDAITTIRGEVMFFKDRFYMRTNPFYPEVELNFISVFWPQLPNGLEAAYEFADRDEVRFFKGNKYWAVQGQNVLHGYPKDIYSSFGFPRTVKHIDAALSEENTGKTYFFVANKYWRYDEYKRSMDPGYPKMIAHDFPGIGHKVDAVFMKDGFFYFFHGTRQYKFDPKTKRILTLQKANSWFNCRKN

SEQ ID NO: 1222 - protein, 450 aa, Artificial Sequence
  MMP-1 variant R108Q
FPATLETQEQDVDLVQKYLEKYYNLKNDGRQVEKRRNSGPVVEKLKQMQEFFGLKVTGKPDAETLKVMKQPRCGVPDVAQFVLTEGNPRWEQTHLTYRIENYTPDLPQADVDHAIEKAFQLWSNVTPLTFTKVSEGQADIMISFVRGDHRDNSPFDGPGGNLAHAFQPGPGIGGDAHFDEDERWTNNFREYNLHRVAAHELGHSLGLSHSTDIGALMYPSYTFSGDVQLAQDDIDGIQAIYGRSQNPVQPIGPQTPKACDSKLTFDAITTIRGEVMFFKDRFYMRTNPFYPEVELNFISVFWPQLPNGLEAAYEFADRDEVRFFKGNKYWAVQGQNVLHGYPKDIYSSFGFPRTVKHIDAALSEENTGKTYFFVANKYWRYDEYKRSMDPGYPKMIAHDFPGIGHKVDAVFMKDGFFYFFHGTRQYKFDPKTKRILTLQKANSWFNCRKN

SEQ ID NO: 1223 - protein, 450 aa, Artificial Sequence
  MMP-1 variant R108T
FPATLETQEQDVDLVQKYLEKYYNLKNDGRQVEKRRNSGPVVEKLKQMQEFFGLKVTGKPDAETLKVMKQPRCGVPDVAQFVLTEGNPRWEQTHLTYRIENYTPDLPTADVDHAIEKAFQLWSNVTPLTFTKVSEGQADIMISFVRGDHRDNSPFDGPGGNLAHAFQPGPGIGGDAHFDEDERWTNNFREYNLHRVAAHELGHSLGLSHSTDIGALMYPSYTFSGDVQLAQDDIDGIQAIYGRSQNPVQPIGPQTPKACDSKLTFDAITTIRGEVMFFKDRFYMRTNPFYPEVELNFISVFWPQLPNGLEAAYEFADRDEVRFFKGNKYWAVQGQNVLHGYPKDIYSSFGFPRTVKHIDAALSEENTGKTYFFVANKYWRYDEYKRSMDPGYPKMIAHDFPGIGHKVDAVFMKDGFFYFFHGTRQYKFDPKTKRILTLQKANSWFNCRKN

SEQ ID NO: 1224 - protein, 450 aa, Artificial Sequence
  MMP-1 variant R108Y
FPATLETQEQDVDLVQKYLEKYYNLKNDGRQVEKRRNSGPVVEKLKQMQEFFGLKVTGKPDAETLKVMKQPRCGVPDVAQFVLTEGNPRWEQTHLTYRIENYTPDLPYADVDHAIEKAFQLWSNVTPLTFTKVSEGQADIMISFVRGDHRDNSPFDGPGGNLAHAFQPGPGIGGDAHFDEDERWTNNFREYNLHRVAAHELGHSLGLSHSTDIGALMYPSYTFSGDVQLAQDDIDGIQAIYGRSQNPVQPIGPQTPKACDSKLTFDAITTIRGEVMFFKDRFYMRTNPFYPEVELNFISVFWPQLPNGLEAAYEFADRDEVRFFKGNKYWAVQGQNVLHGYPKDIYSSFGFPRTVKHIDAALSEENTGKTYFFVANKYWRYDEYKRSMDPGYPKMIAHDFPGIGHKVDAVFMKDGFFYFFHGTRQYKFDPKTKRILTLQKANSWFNCRKN

SEQ ID NO: 1225 - protein, 450 aa, Artificial Sequence
  MMP-1 variant R108S
FPATLETQEQDVDLVQKYLEKYYNLKNDGRQVEKRRNSGPVVEKLKQMQEFFGLKVTGKPDAETLKVMKQPRCGVPDVAQFVLTEGNPRWEQTHLTYRIENYTPDLPSADVDHAIEKAFQLWSNVTPLTFTKVSEGQADIMISFVRGDHRDNSPFDGPGGNLAHAFQPGPGIGGDAHFDEDERWTNNFREYNLHRVAAHELGHSLGLSHSTDIGALMYPSYTFSGDVQLAQDDIDGIQAIYGRSQNPVQPIGPQTPKACDSKLTFDAITTIRGEVMFFKDRFYMRTNPFYPEVELNFISVFWPQLPNGLEAAYEFADRDEVRFFKGNKYWAVQGQNVLHGYPKDIYSSFGFPRTVKHIDAALSEENTGKTYFFVANKYWRYDEYKRSMDPGYPKMIAHDFPGIGHKVDAVFMKDGFFYFFHGTRQYKFDPKTKRILTLQKANSWFNCRKN

SEQ ID NO: 1226 - protein, 450 aa, Artificial Sequence
  MMP-1 variant R108G
FPATLETQEQDVDLVQKYLEKYYNLKNDGRQVEKRRNSGPVVEKLKQMQEFFGLKVTGKPDAETLKVMKQPRCGVPDVAQFVLTEGNPRWEQTHLTYRIENYTPDLPGADVDHAIEKAFQLWSNVTPLTFTKVSEGQADIMISFVRGDHRDNSPFDGPGGNLAHAFQPGPGIGGDAHFDEDERWTNNFREYNLHRVAAHELGHSLGLSHSTDIGALMYPSYTFSGDVQLAQDDIDGIQAIYGRSQNPVQPIGPQTPKACDSKLTFDAITTIRGEVMFFKDRFYMRTNPFYPEVELNFISVFWPQLPNGLEAAYEFADRDEVRFFKGNKYWAVQGQNVLHGYPKDIYSSFGFPRTVKHIDAALSEENTGKTYFFVANKYWRYDEYKRSMDPGYPKMIAHDFPGIGHKVDAVFMKDGFFYFFHGTRQYKFDPKTKRILTLQKANSWFNCRKN

SEQ ID NO: 1227 - protein, 450 aa, Artificial Sequence
  MMP-1 variant R108F
FPATLETQEQDVDLVQKYLEKYYNLKNDGRQVEKRRNSGPVVEKLKQMQEFFGLKVTGKPDAETLKVMKQPRCGVPDVAQFVLTEGNPRWEQTHLTYRIENYTPDLPFADVDHAIEKAFQLWSNVTPLTFTKVSEGQADIMISFVRGDHRDNSPFDGPGGNLAHAFQPGPGIGGDAHFDEDERWTNNFREYNLHRVAAHELGHSLGLSHSTDIGALMYPSYTFSGDVQLAQDDIDGIQAIYGRSQNPVQPIGPQTPKACDSKLTFDAITTIRGEVMFFKDRFYMRTNPFYPEVELNFISVFWPQLPNGLEAAYEFADRDEVRFFKGNKYWAVQGQNVLHGYPKDIYSSFGFPRTVKHIDAALSEENTGKTYFFVANKYWRYDEYKRSMDPGYPKMIAHDFPGIGHKVDAVFMKDGFFYFFHGTRQYKFDPKTKRILTLQKANSWFNCRKN

SEQ ID NO: 1228 - protein, 450 aa, Artificial Sequence
  MMP-1 variant R108M
FPATLETQEQDVDLVQKYLEKYYNLKNDGRQVEKRRNSGPVVEKLKQMQEFFGLKVTGKPDAETLKVMKQPRCGVPDVAQFVLTEGNPRWEQTHLTYRIENYTPDLPMADVDHAIEKAFQLWSNVTPLTFTKVSEGQADIMISFVRGDHRDNSPFDGPGGNLAHAFQPGPGIGGDAHFDEDERWTNNFREYNLHRVAAHELGHSLGLSHSTDIGALMYPSYTFSGDVQLAQDDIDGIQAIYGRSQNPVQPIGPQTPKACDSKLTFDAITTIRGEVMFFKDRFYMRTNPFYPEVELNFISVFWPQLPNGLEAAYEFADRDEVRFFKGNKYWAVQGQNVLHGYPKDIYSSFGFPRTVKHIDAALSEENTGKTYFFVANKYWRYDEYKRSMDPGYPKMIAHDFPGIGHKVDAVFMKDGFFYFFHGTRQYKFDPKTKRILTLQKANSWFNCRKN

SEQ ID NO: 1229 - protein, 450 aa, Artificial Sequence
  MMP-1 variant R108W
FPATLETQEQDVDLVQKYLEKYYNLKNDGRQVEKRRNSGPVVEKLKQMQEFFGLKVTGKPDAETLKVMKQPRCGVPDVAQFVLTEGNPRWEQTHLTYRIENYTPDLPWADVDHAIEKAFQLWSNVTPLTFTKVSEGQADIMISFVRGDHRDNSPFDGPGGNLAHAFQPGPGIGGDAHFDEDERWTNNFREYNLHRVAAHELGHSLGLSHSTDIGALMYPSYTFSGDVQLAQDDIDGIQAIYGRSQNPVQPIGPQTPKACDSKLTFDAITTIRGEVMFFKDRFYMRTNPFYPEVELNFISVFWPQLPNGLEAAYEFADRDEVRFFKGNKYWAVQGQNVLHGYPKDIYSSFGFPRTVKHIDAALSEENTGKTYFFVANKYWRYDEYKRSMDPGYPKMIAHDFPGIGHKVDAVFMKDGFFYFFHGTRQYKFDPKTKRILTLQKANSWFNCRKN

SEQ ID NO: 1230 - protein, 450 aa, Artificial Sequence
  MMP-1 variant R108I
FPATLETQEQDVDLVQKYLEKYYNLKNDGRQVEKRRNSGPVVEKLKQMQEFFGLKVTGKPDAETLKVMKQPRCGVPDVAQFVLTEGNPRWEQTHLTYRIENYTPDLPIADVDHAIEKAFQLWSNVTPLTFTKVSEGQADIMISFVRGDHRDNSPFDGPGGNLAHAFQPGPGIGGDAHFDEDERWTNNFREYNLHRVAAHELGHSLGLSHSTDIGALMYPSYTFSGDVQLAQDDIDGIQAIYGRSQNPVQPIGPQTPKACDSKLTFDAITTIRGEVMFFKDRFYMRTNPFYPEVELNFISVFWPQLPNGLEAAYEFADRDEVRFFKGNKYWAVQGQNVLHGYPKDIYSSFGFPRTVKHIDAALSEENTGKTYFFVANKYWRYDEYKRSMDPGYPKMIAHDFPGIGHKVDAVFMKDGFFYFFHGTRQYKFDPKTKRILTLQKANSWFNCRKN

SEQ ID NO: 1231 - protein, 450 aa, Artificial Sequence
  MMP-1 variant R108V
FPATLETQEQDVDLVQKYLEKYYNLKNDGRQVEKRRNSGPVVEKLKQMQEFFGLKVTGKPDAETLKVMKQPRCGVPDVAQFVLTEGNPRWEQTHLTYRIENYTPDLPVADVDHAIEKAFQLWSNVTPLTFTKVSEGQADIMISFVRGDHRDNSPFDGPGGNLAHAFQPGPGIGGDAHFDEDERWTNNFREYNLHRVAAHELGHSLGLSHSTDIGALMYPSYTFSGDVQLAQDDIDGIQAIYGRSQNPVQPIGPQTPKACDSKLTFDAITTIRGEVMFFKDRFYMRTNPFYPEVELNFISVFWPQLPNGLEAAYEFADRDEVRFFKGNKYWAVQGQNVLHGYPKDIYSSFGFPRTVKHIDAALSEENTGKTYFFVANKYWRYDEYKRSMDPGYPKMIAHDFPGIGHKVDAVFMKDGFFYFFHGTRQYKFDPKTKRILTLQKANSWFNCRKN

SEQ ID NO: 1232 - protein, 450 aa, Artificial Sequence
  MMP-1 variant R108L
FPATLETQEQDVDLVQKYLEKYYNLKNDGRQVEKRRNSGPVVEKLKQMQEFFGLKVTGKPDAETLKVMKQPRCGVPDVAQFVLTEGNPRWEQTHLTYRIENYTPDLPLADVDHAIEKAFQLWSNVTPLTFTKVSEGQADIMISFVRGDHRDNSPFDGPGGNLAHAFQPGPGIGGDAHFDEDERWTNNFREYNLHRVAAHELGHSLGLSHSTDIGALMYPSYTFSGDVQLAQDDIDGIQAIYGRSQNPVQPIGPQTPKACDSKLTFDAITTIRGEVMFFKDRFYMRTNPFYPEVELNFISVFWPQLPNGLEAAYEFADRDEVRFFKGNKYWAVQGQNVLHGYPKDIYSSFGFPRTVKHIDAALSEENTGKTYFFVANKYWRYDEYKRSMDPGYPKMIAHDFPGIGHKVDAVFMKDGFFYFFHGTRQYKFDPKTKRILTLQKANSWFNCRKN

SEQ ID NO: 1233 - protein, 450 aa, Artificial Sequence
  MMP-1 variant R108A
FPATLETQEQDVDLVQKYLEKYYNLKNDGRQVEKRRNSGPVVEKLKQMQEFFGLKVTGKPDAETLKVMKQPRCGVPDVAQFVLTEGNPRWEQTHLTYRIENYTPDLPAADVDHAIEKAFQLWSNVTPLTFTKVSEGQADIMISFVRGDHRDNSPFDGPGGNLAHAFQPGPGIGGDAHFDEDERWTNNFREYNLHRVAAHELGHSLGLSHSTDIGALMYPSYTFSGDVQLAQDDIDGIQAIYGRSQNPVQPIGPQTPKACDSKLTFDAITTIRGEVMFFKDRFYMRTNPFYPEVELNFISVFWPQLPNGLEAAYEFADRDEVRFFKGNKYWAVQGQNVLHGYPKDIYSSFGFPRTVKHIDAALSEENTGKTYFFVANKYWRYDEYKRSMDPGYPKMIAHDFPGIGHKVDAVFMKDGFFYFFHGTRQYKFDPKTKRILTLQKANSWFNCRKN

SEQ ID NO: 1234 - protein, 450 aa, Artificial Sequence
  MMP-1 variant R108P
FPATLETQEQDVDLVQKYLEKYYNLKNDGRQVEKRRNSGPVVEKLKQMQEFFGLKVTGKPDAETLKVMKQPRCGVPDVAQFVLTEGNPRWEQTHLTYRIENYTPDLPPADVDHAIEKAFQLWSNVTPLTFTKVSEGQADIMISFVRGDHRDNSPFDGPGGNLAHAFQPGPGIGGDAHFDEDERWTNNFREYNLHRVAAHELGHSLGLSHSTDIGALMYPSYTFSGDVQLAQDDIDGIQAIYGRSQNPVQPIGPQTPKACDSKLTFDAITTIRGEVMFFKDRFYMRTNPFYPEVELNFISVFWPQLPNGLEAAYEFADRDEVRFFKGNKYWAVQGQNVLHGYPKDIYSSFGFPRTVKHIDAALSEENTGKTYFFVANKYWRYDEYKRSMDPGYPKMIAHDFPGIGHKVDAVFMKDGFFYFFHGTRQYKFDPKTKRILTLQKANSWFNCRKN

SEQ ID NO: 1235 - protein, 450 aa, Artificial Sequence
  MMP-1 variant A109D
FPATLETQEQDVDLVQKYLEKYYNLKNDGRQVEKRRNSGPVVEKLKQMQEFFGLKVTGKPDAETLKVMKQPRCGVPDVAQFVLTEGNPRWEQTHLTYRIENYTPDLPRDDVDHAIEKAFQLWSNVTPLTFTKVSEGQADIMISFVRGDHRDNSPFDGPGGNLAHAFQPGPGIGGDAHFDEDERWTNNFREYNLHRVAAHELGHSLGLSHSTDIGALMYPSYTFSGDVQLAQDDIDGIQAIYGRSQNPVQPIGPQTPKACDSKLTFDAITTIRGEVMFFKDRFYMRTNPFYPEVELNFISVFWPQLPNGLEAAYEFADRDEVRFFKGNKYWAVQGQNVLHGYPKDIYSSFGFPRTVKHIDAALSEENTGKTYFFVANKYWRYDEYKRSMDPGYPKMIAHDFPGIGHKVDAVFMKDGFFYFFHGTRQYKFDPKTKRILTLQKANSWFNCRKN

SEQ ID NO: 1236 - protein, 450 aa, Artificial Sequence
  MMP-1 variant A109E
FPATLETQEQDVDLVQKYLEKYYNLKNDGRQVEKRRNSGPVVEKLKQMQEFFGLKVTGKPDAETLKVMKQPRCGVPDVAQFVLTEGNPRWEQTHLTYRIENYTPDLPREDVDHAIEKAFQLWSNVTPLTFTKVSEGQADIMISFVRGDHRDNSPFDGPGGNLAHAFQPGPGIGGDAHFDEDERWTNNFREYNLHRVAAHELGHSLGLSHSTDIGALMYPSYTFSGDVQLAQDDIDGIQAIYGRSQNPVQPIGPQTPKACDSKLTFDAITTIRGEVMFFKDRFYMRTNPFYPEVELNFISVFWPQLPNGLEAAYEFADRDEVRFFKGNKYWAVQGQNVLHGYPKDIYSSFGFPRTVKHIDAALSEENTGKTYFFVANKYWRYDEYKRSMDPGYPKMIAHDFPGIGHKVDAVFMKDGFFYFFHGTRQYKFDPKTKRILTLQKANSWFNCRKN

SEQ ID NO: 1237 - protein, 450 aa, Artificial Sequence
  MMP-1 variant A109H
FPATLETQEQDVDLVQKYLEKYYNLKNDGRQVEKRRNSGPVVEKLKQMQEFFGLKVTGKPDAETLKVMKQPRCGVPDVAQFVLTEGNPRWEQTHLTYRIENYTPDLPRHDVDHAIEKAFQLWSNVTPLTFTKVSEGQADIMISFVRGDHRDNSPFDGPGGNLAHAFQPGPGIGGDAHFDEDERWTNNFREYNLHRVAAHELGHSLGLSHSTDIGALMYPSYTFSGDVQLAQDDIDGIQAIYGRSQNPVQPIGPQTPKACDSKLTFDAITTIRGEVMFFKDRFYMRTNPFYPEVELNFISVFWPQLPNGLEAAYEFADRDEVRFFKGNKYWAVQGQNVLHGYPKDIYSSFGFPRTVKHIDAALSEENTGKTYFFVANKYWRYDEYKRSMDPGYPKMIAHDFPGIGHKVDAVFMKDGFFYFFHGTRQYKFDPKTKRILTLQKANSWFNCRKN

SEQ ID NO: 1238 - protein, 450 aa, Artificial Sequence
  MMP-1 variant A109K
FPATLETQEQDVDLVQKYLEKYYNLKNDGRQVEKRRNSGPVVEKLKQMQEFFGLKVTGKPDAETLKVMKQPRCGVPDVAQFVLTEGNPRWEQTHLTYRIENYTPDLPRKDVDHAIEKAFQLWSNVTPLTFTKVSEGQADIMISFVRGDHRDNSPFDGPGGNLAHAFQPGPGIGGDAHFDEDERWTNNFREYNLHRVAAHELGHSLGLSHSTDIGALMYPSYTFSGDVQLAQDDIDGIQAIYGRSQNPVQPIGPQTPKACDSKLTFDAITTIRGEVMFFKDRFYMRTNPFYPEVELNFISVFWPQLPNGLEAAYEFADRDEVRFFKGNKYWAVQGQNVLHGYPKDIYSSFGFPRTVKHIDAALSEENTGKTYFFVANKYWRYDEYKRSMDPGYPKMIAHDFPGIGHKVDAVFMKDGFFYFFHGTRQYKFDPKTKRILTLQKANSWFNCRKN

SEQ ID NO: 1239 - protein, 450 aa, Artificial Sequence
  MMP-1 variant A109R
FPATLETQEQDVDLVQKYLEKYYNLKNDGRQVEKRRNSGPVVEKLKQMQEFFGLKVTGKPDAETLKVMKQPRCGVPDVAQFVLTEGNPRWEQTHLTYRIENYTPDLPRRDVDHAIEKAFQLWSNVTPLTFTKVSEGQADIMISFVRGDHRDNSPFDGPGGNLAHAFQPGPGIGGDAHFDEDERWTNNFREYNLHRVAAHELGHSLGLSHSTDIGALMYPSYTFSGDVQLAQDDIDGIQAIYGRSQNPVQPIGPQTPKACDSKLTFDAITTIRGEVMFFKDRFYMRTNPFYPEVELNFISVFWPQLPNGLEAAYEFADRDEVRFFKGNKYWAVQGQNVLHGYPKDIYSSFGFPRTVKHIDAALSEENTGKTYFFVANKYWRYDEYKRSMDPGYPKMIAHDFPGIGHKVDAVFMKDGFFYFFHGTRQYKFDPKTKRILTLQKANSWFNCRKN

SEQ ID NO: 1240 - protein, 450 aa, Artificial Sequence
  MMP-1 variant A109C
FPATLETQEQDVDLVQKYLEKYYNLKNDGRQVEKRRNSGPVVEKLKQMQEFFGLKVTGKPDAETLKVMKQPRCGVPDVAQFVLTEGNPRWEQTHLTYRIENYTPDLPRCDVDHAIEKAFQLWSNVTPLTFTKVSEGQADIMISFVRGDHRDNSPFDGPGGNLAHAFQPGPGIGGDAHFDEDERWTNNFREYNLHRVAAHELGHSLGLSHSTDIGALMYPSYTFSGDVQLAQDDIDGIQAIYGRSQNPVQPIGPQTPKACDSKLTFDAITTIRGEVMFFKDRFYMRTNPFYPEVELNFISVFWPQLPNGLEAAYEFADRDEVRFFKGNKYWAVQGQNVLHGYPKDIYSSFGFPRTVKHIDAALSEENTGKTYFFVANKYWRYDEYKRSMDPGYPKMIAHDFPGIGHKVDAVFMKDGFFYFFHGTRQYKFDPKTKRILTLQKANSWFNCRKN

SEQ ID NO: 1241 - protein, 450 aa, Artificial Sequence
  MMP-1 variant A109N
FPATLETQEQDVDLVQKYLEKYYNLKNDGRQVEKRRNSGPVVEKLKQMQEFFGLKVTGKPDAETLKVMKQPRCGVPDVAQFVLTEGNPRWEQTHLTYRIENYTPDLPRNDVDHAIEKAFQLWSNVTPLTFTKVSEGQADIMISFVRGDHRDNSPFDGPGGNLAHAFQPGPGIGGDAHFDEDERWTNNFREYNLHRVAAHELGHSLGLSHSTDIGALMYPSYTFSGDVQLAQDDIDGIQAIYGRSQNPVQPIGPQTPKACDSKLTFDAITTIRGEVMFFKDRFYMRTNPFYPEVELNFISVFWPQLPNGLEAAYEFADRDEVRFFKGNKYWAVQGQNVLHGYPKDIYSSFGFPRTVKHIDAALSEENTGKTYFFVANKYWRYDEYKRSMDPGYPKMIAHDFPGIGHKVDAVFMKDGFFYFFHGTRQYKFDPKTKRILTLQKANSWFNCRKN

SEQ ID NO: 1242 - protein, 450 aa, Artificial Sequence
  MMP-1 variant A109Q
FPATLETQEQDVDLVQKYLEKYYNLKNDGRQVEKRRNSGPVVEKLKQMQEFFGLKVTGKPDAETLKVMKQPRCGVPDVAQFVLTEGNPRWEQTHLTYRIENYTPDLPRQDVDHAIEKAFQLWSNVTPLTFTKVSEGQADIMISFVRGDHRDNSPFDGPGGNLAHAFQPGPGIGGDAHFDEDERWTNNFREYNLHRVAAHELGHSLGLSHSTDIGALMYPSYTFSGDVQLAQDDIDGIQAIYGRSQNPVQPIGPQTPKACDSKLTFDAITTIRGEVMFFKDRFYMRTNPFYPEVELNFISVFWPQLPNGLEAAYEFADRDEVRFFKGNKYWAVQGQNVLHGYPKDIYSSFGFPRTVKHIDAALSEENTGKTYFFVANKYWRYDEYKRSMDPGYPKMIAHDFPGIGHKVDAVFMKDGFFYFFHGTRQYKFDPKTKRILTLQKANSWFNCRKN

SEQ ID NO: 1243 - protein, 450 aa, Artificial Sequence
  MMP-1 variant A109T
FPATLETQEQDVDLVQKYLEKYYNLKNDGRQVEKRRNSGPVVEKLKQMQEFFGLKVTGKPDAETLKVMKQPRCGVPDVAQFVLTEGNPRWEQTHLTYRIENYTPDLPRTDVDHAIEKAFQLWSNVTPLTFTKVSEGQADIMISFVRGDHRDNSPFDGPGGNLAHAFQPGPGIGGDAHFDEDERWTNNFREYNLHRVAAHELGHSLGLSHSTDIGALMYPSYTFSGDVQLAQDDIDGIQAIYGRSQNPVQPIGPQTPKACDSKLTFDAITTIRGEVMFFKDRFYMRTNPFYPEVELNFISVFWPQLPNGLEAAYEFADRDEVRFFKGNKYWAVQGQNVLHGYPKDIYSSFGFPRTVKHIDAALSEENTGKTYFFVANKYWRYDEYKRSMDPGYPKMIAHDFPGIGHKVDAVFMKDGFFYFFHGTRQYKFDPKTKRILTLQKANSWFNCRKN

SEQ ID NO: 1244 - protein, 450 aa, Artificial Sequence
  MMP-1 variant A109Y
FPATLETQEQDVDLVQKYLEKYYNLKNDGRQVEKRRNSGPVVEKLKQMQEFFGLKVTGKPDAETLKVMKQPRCGVPDVAQFVLTEGNPRWEQTHLTYRIENYTPDLPRYDVDHAIEKAFQLWSNVTPLTFTKVSEGQADIMISFVRGDHRDNSPFDGPGGNLAHAFQPGPGIGGDAHFDEDERWTNNFREYNLHRVAAHELGHSLGLSHSTDIGALMYPSYTFSGDVQLAQDDIDGIQAIYGRSQNPVQPIGPQTPKACDSKLTFDAITTIRGEVMFFKDRFYMRTNPFYPEVELNFISVFWPQLPNGLEAAYEFADRDEVRFFKGNKYWAVQGQNVLHGYPKDIYSSFGFPRTVKHIDAALSEENTGKTYFFVANKYWRYDEYKRSMDPGYPKMIAHDFPGIGHKVDAVFMKDGFFYFFHGTRQYKFDPKTKRILTLQKANSWFNCRKN

SEQ ID NO: 1245 - protein, 450 aa, Artificial Sequence
  MMP-1 variant A109S
FPATLETQEQDVDLVQKYLEKYYNLKNDGRQVEKRRNSGPVVEKLKQMQEFFGLKVTGKPDAETLKVMKQPRCGVPDVAQFVLTEGNPRWEQTHLTYRIENYTPDLPRSDVDHAIEKAFQLWSNVTPLTFTKVSEGQADIMISFVRGDHRDNSPFDGPGGNLAHAFQPGPGIGGDAHFDEDERWTNNFREYNLHRVAAHELGHSLGLSHSTDIGALMYPSYTFSGDVQLAQDDIDGIQAIYGRSQNPVQPIGPQTPKACDSKLTFDAITTIRGEVMFFKDRFYMRTNPFYPEVELNFISVFWPQLPNGLEAAYEFADRDEVRFFKGNKYWAVQGQNVLHGYPKDIYSSFGFPRTVKHIDAALSEENTGKTYFFVANKYWRYDEYKRSMDPGYPKMIAHDFPGIGHKVDAVFMKDGFFYFFHGTRQYKFDPKTKRILTLQKANSWFNCRKN

SEQ ID NO: 1246 - protein, 450 aa, Artificial Sequence
  MMP-1 variant A109G
FPATLETQEQDVDLVQKYLEKYYNLKNDGRQVEKRRNSGPVVEKLKQMQEFFGLKVTGKPDAETLKVMKQPRCGVPDVAQFVLTEGNPRWEQTHLTYRIENYTPDLPRGDVDHAIEKAFQLWSNVTPLTFTKVSEGQADIMISFVRGDHRDNSPFDGPGGNLAHAFQPGPGIGGDAHFDEDERWTNNFREYNLHRVAAHELGHSLGLSHSTDIGALMYPSYTFSGDVQLAQDDIDGIQAIYGRSQNPVQPIGPQTPKACDSKLTFDAITTIRGEVMFFKDRFYMRTNPFYPEVELNFISVFWPQLPNGLEAAYEFADRDEVRFFKGNKYWAVQGQNVLHGYPKDIYSSFGFPRTVKHIDAALSEENTGKTYFFVANKYWRYDEYKRSMDPGYPKMIAHDFPGIGHKVDAVFMKDGFFYFFHGTRQYKFDPKTKRILTLQKANSWFNCRKN

SEQ ID NO: 1247 - protein, 450 aa, Artificial Sequence
  MMP-1 variant A109F
FPATLETQEQDVDLVQKYLEKYYNLKNDGRQVEKRRNSGPVVEKLKQMQEFFGLKVTGKPDAETLKVMKQPRCGVPDVAQFVLTEGNPRWEQTHLTYRIENYTPDLPRFDVDHAIEKAFQLWSNVTPLTFTKVSEGQADIMISFVRGDHRDNSPFDGPGGNLAHAFQPGPGIGGDAHFDEDERWTNNFREYNLHRVAAHELGHSLGLSHSTDIGALMYPSYTFSGDVQLAQDDIDGIQAIYGRSQNPVQPIGPQTPKACDSKLTFDAITTIRGEVMFFKDRFYMRTNPFYPEVELNFISVFWPQLPNGLEAAYEFADRDEVRFFKGNKYWAVQGQNVLHGYPKDIYSSFGFPRTVKHIDAALSEENTGKTYFFVANKYWRYDEYKRSMDPGYPKMIAHDFPGIGHKVDAVFMKDGFFYFFHGTRQYKFDPKTKRILTLQKANSWFNCRKN

SEQ ID NO: 1248 - protein, 450 aa, Artificial Sequence
  MMP-1 variant A109M
FPATLETQEQDVDLVQKYLEKYYNLKNDGRQVEKRRNSGPVVEKLKQMQEFFGLKVTGKPDAETLKVMKQPRCGVPDVAQFVLTEGNPRWEQTHLTYRIENYTPDLPRMDVDHAIEKAFQLWSNVTPLTFTKVSEGQADIMISFVRGDHRDNSPFDGPGGNLAHAFQPGPGIGGDAHFDEDERWTNNFREYNLHRVAAHELGHSLGLSHSTDIGALMYPSYTFSGDVQLAQDDIDGIQAIYGRSQNPVQPIGPQTPKACDSKLTFDAITTIRGEVMFFKDRFYMRTNPFYPEVELNFISVFWPQLPNGLEAAYEFADRDEVRFFKGNKYWAVQGQNVLHGYPKDIYSSFGFPRTVKHIDAALSEENTGKTYFFVANKYWRYDEYKRSMDPGYPKMIAHDFPGIGHKVDAVFMKDGFFYFFHGTRQYKFDPKTKRILTLQKANSWFNCRKN

SEQ ID NO: 1249 - protein, 450 aa, Artificial Sequence
  MMP-1 variant A109W
FPATLETQEQDVDLVQKYLEKYYNLKNDGRQVEKRRNSGPVVEKLKQMQEFFGLKVTGKPDAETLKVMKQPRCGVPDVAQFVLTEGNPRWEQTHLTYRIENYTPDLPRWDVDHAIEKAFQLWSNVTPLTFTKVSEGQADIMISFVRGDHRDNSPFDGPGGNLAHAFQPGPGIGGDAHFDEDERWTNNFREYNLHRVAAHELGHSLGLSHSTDIGALMYPSYTFSGDVQLAQDDIDGIQAIYGRSQNPVQPIGPQTPKACDSKLTFDAITTIRGEVMFFKDRFYMRTNPFYPEVELNFISVFWPQLPNGLEAAYEFADRDEVRFFKGNKYWAVQGQNVLHGYPKDIYSSFGFPRTVKHIDAALSEENTGKTYFFVANKYWRYDEYKRSMDPGYPKMIAHDFPGIGHKVDAVFMKDGFFYFFHGTRQYKFDPKTKRILTLQKANSWFNCRKN

SEQ ID NO: 1250 - protein, 450 aa, Artificial Sequence
  MMP-1 variant A109I
FPATLETQEQDVDLVQKYLEKYYNLKNDGRQVEKRRNSGPVVEKLKQMQEFFGLKVTGKPDAETLKVMKQPRCGVPDVAQFVLTEGNPRWEQTHLTYRIENYTPDLPRIDVDHAIEKAFQLWSNVTPLTFTKVSEGQADIMISFVRGDHRDNSPFDGPGGNLAHAFQPGPGIGGDAHFDEDERWTNNFREYNLHRVAAHELGHSLGLSHSTDIGALMYPSYTFSGDVQLAQDDIDGIQAIYGRSQNPVQPIGPQTPKACDSKLTFDAITTIRGEVMFFKDRFYMRTNPFYPEVELNFISVFWPQLPNGLEAAYEFADRDEVRFFKGNKYWAVQGQNVLHGYPKDIYSSFGFPRTVKHIDAALSEENTGKTYFFVANKYWRYDEYKRSMDPGYPKMIAHDFPGIGHKVDAVFMKDGFFYFFHGTRQYKFDPKTKRILTLQKANSWFNCRKN

SEQ ID NO: 1251 - protein, 450 aa, Artificial Sequence
  MMP-1 variant A109V
FPATLETQEQDVDLVQKYLEKYYNLKNDGRQVEKRRNSGPVVEKLKQMQEFFGLKVTGKPDAETLKVMKQPRCGVPDVAQFVLTEGNPRWEQTHLTYRIENYTPDLPRVDVDHAIEKAFQLWSNVTPLTFTKVSEGQADIMISFVRGDHRDNSPFDGPGGNLAHAFQPGPGIGGDAHFDEDERWTNNFREYNLHRVAAHELGHSLGLSHSTDIGALMYPSYTFSGDVQLAQDDIDGIQAIYGRSQNPVQPIGPQTPKACDSKLTFDAITTIRGEVMFFKDRFYMRTNPFYPEVELNFISVFWPQLPNGLEAAYEFADRDEVRFFKGNKYWAVQGQNVLHGYPKDIYSSFGFPRTVKHIDAALSEENTGKTYFFVANKYWRYDEYKRSMDPGYPKMIAHDFPGIGHKVDAVFMKDGFFYFFHGTRQYKFDPKTKRILTLQKANSWFNCRKN

SEQ ID NO: 1252 - protein, 450 aa, Artificial Sequence
  MMP-1 variant A109L
FPATLETQEQDVDLVQKYLEKYYNLKNDGRQVEKRRNSGPVVEKLKQMQEFFGLKVTGKPDAETLKVMKQPRCGVPDVAQFVLTEGNPRWEQTHLTYRIENYTPDLPRLDVDHAIEKAFQLWSNVTPLTFTKVSEGQADIMISFVRGDHRDNSPFDGPGGNLAHAFQPGPGIGGDAHFDEDERWTNNFREYNLHRVAAHELGHSLGLSHSTDIGALMYPSYTFSGDVQLAQDDIDGIQAIYGRSQNPVQPIGPQTPKACDSKLTFDAITTIRGEVMFFKDRFYMRTNPFYPEVELNFISVFWPQLPNGLEAAYEFADRDEVRFFKGNKYWAVQGQNVLHGYPKDIYSSFGFPRTVKHIDAALSEENTGKTYFFVANKYWRYDEYKRSMDPGYPKMIAHDFPGIGHKVDAVFMKDGFFYFFHGTRQYKFDPKTKRILTLQKANSWFNCRKN

SEQ ID NO: 1253 - protein, 450 aa, Artificial Sequence
  MMP-1 variant A109P
FPATLETQEQDVDLVQKYLEKYYNLKNDGRQVEKRRNSGPVVEKLKQMQEFFGLKVTGKPDAETLKVMKQPRCGVPDVAQFVLTEGNPRWEQTHLTYRIENYTPDLPRPDVDHAIEKAFQLWSNVTPLTFTKVSEGQADIMISFVRGDHRDNSPFDGPGGNLAHAFQPGPGIGGDAHFDEDERWTNNFREYNLHRVAAHELGHSLGLSHSTDIGALMYPSYTFSGDVQLAQDDIDGIQAIYGRSQNPVQPIGPQTPKACDSKLTFDAITTIRGEVMFFKDRFYMRTNPFYPEVELNFISVFWPQLPNGLEAAYEFADRDEVRFFKGNKYWAVQGQNVLHGYPKDIYSSFGFPRTVKHIDAALSEENTGKTYFFVANKYWRYDEYKRSMDPGYPKMIAHDFPGIGHKVDAVFMKDGFFYFFHGTRQYKFDPKTKRILTLQKANSWFNCRKN

SEQ ID NO: 1254 - protein, 450 aa, Artificial Sequence
  MMP-1 variant D110E
FPATLETQEQDVDLVQKYLEKYYNLKNDGRQVEKRRNSGPVVEKLKQMQEFFGLKVTGKPDAETLKVMKQPRCGVPDVAQFVLTEGNPRWEQTHLTYRIENYTPDLPRAEVDHAIEKAFQLWSNVTPLTFTKVSEGQADIMISFVRGDHRDNSPFDGPGGNLAHAFQPGPGIGGDAHFDEDERWTNNFREYNLHRVAAHELGHSLGLSHSTDIGALMYPSYTFSGDVQLAQDDIDGIQAIYGRSQNPVQPIGPQTPKACDSKLTFDAITTIRGEVMFFKDRFYMRTNPFYPEVELNFISVFWPQLPNGLEAAYEFADRDEVRFFKGNKYWAVQGQNVLHGYPKDIYSSFGFPRTVKHIDAALSEENTGKTYFFVANKYWRYDEYKRSMDPGYPKMIAHDFPGIGHKVDAVFMKDGFFYFFHGTRQYKFDPKTKRILTLQKANSWFNCRKN

SEQ ID NO: 1255 - protein, 450 aa, Artificial Sequence
  MMP-1 variant D110H
FPATLETQEQDVDLVQKYLEKYYNLKNDGRQVEKRRNSGPVVEKLKQMQEFFGLKVTGKPDAETLKVMKQPRCGVPDVAQFVLTEGNPRWEQTHLTYRIENYTPDLPRAHVDHAIEKAFQLWSNVTPLTFTKVSEGQADIMISFVRGDHRDNSPFDGPGGNLAHAFQPGPGIGGDAHFDEDERWTNNFREYNLHRVAAHELGHSLGLSHSTDIGALMYPSYTFSGDVQLAQDDIDGIQAIYGRSQNPVQPIGPQTPKACDSKLTFDAITTIRGEVMFFKDRFYMRTNPFYPEVELNFISVFWPQLPNGLEAAYEFADRDEVRFFKGNKYWAVQGQNVLHGYPKDIYSSFGFPRTVKHIDAALSEENTGKTYFFVANKYWRYDEYKRSMDPGYPKMIAHDFPGIGHKVDAVFMKDGFFYFFHGTRQYKFDPKTKRILTLQKANSWFNCRKN

SEQ ID NO: 1256 - protein, 450 aa, Artificial Sequence
  MMP-1 variant D110K
FPATLETQEQDVDLVQKYLEKYYNLKNDGRQVEKRRNSGPVVEKLKQMQEFFGLKVTGKPDAETLKVMKQPRCGVPDVAQFVLTEGNPRWEQTHLTYRIENYTPDLPRAKVDHAIEKAFQLWSNVTPLTFTKVSEGQADIMISFVRGDHRDNSPFDGPGGNLAHAFQPGPGIGGDAHFDEDERWTNNFREYNLHRVAAHELGHSLGLSHSTDIGALMYPSYTFSGDVQLAQDDIDGIQAIYGRSQNPVQPIGPQTPKACDSKLTFDAITTIRGEVMFFKDRFYMRTNPFYPEVELNFISVFWPQLPNGLEAAYEFADRDEVRFFKGNKYWAVQGQNVLHGYPKDIYSSFGFPRTVKHIDAALSEENTGKTYFFVANKYWRYDEYKRSMDPGYPKMIAHDFPGIGHKVDAVFMKDGFFYFFHGTRQYKFDPKTKRILTLQKANSWFNCRKN

SEQ ID NO: 1257 - protein, 450 aa, Artificial Sequence
  MMP-1 variant D110R
FPATLETQEQDVDLVQKYLEKYYNLKNDGRQVEKRRNSGPVVEKLKQMQEFFGLKVTGKPDAETLKVMKQPRCGVPDVAQFVLTEGNPRWEQTHLTYRIENYTPDLPRARVDHAIEKAFQLWSNVTPLTFTKVSEGQADIMISFVRGDHRDNSPFDGPGGNLAHAFQPGPGIGGDAHFDEDERWTNNFREYNLHRVAAHELGHSLGLSHSTDIGALMYPSYTFSGDVQLAQDDIDGIQAIYGRSQNPVQPIGPQTPKACDSKLTFDAITTIRGEVMFFKDRFYMRTNPFYPEVELNFISVFWPQLPNGLEAAYEFADRDEVRFFKGNKYWAVQGQNVLHGYPKDIYSSFGFPRTVKHIDAALSEENTGKTYFFVANKYWRYDEYKRSMDPGYPKMIAHDFPGIGHKVDAVFMKDGFFYFFHGTRQYKFDPKTKRILTLQKANSWFNCRKN

SEQ ID NO: 1258 - protein, 450 aa, Artificial Sequence
  MMP-1 variant D110C
FPATLETQEQDVDLVQKYLEKYYNLKNDGRQVEKRRNSGPVVEKLKQMQEFFGLKVTGKPDAETLKVMKQPRCGVPDVAQFVLTEGNPRWEQTHLTYRIENYTPDLPRACVDHAIEKAFQLWSNVTPLTFTKVSEGQADIMISFVRGDHRDNSPFDGPGGNLAHAFQPGPGIGGDAHFDEDERWTNNFREYNLHRVAAHELGHSLGLSHSTDIGALMYPSYTFSGDVQLAQDDIDGIQAIYGRSQNPVQPIGPQTPKACDSKLTFDAITTIRGEVMFFKDRFYMRTNPFYPEVELNFISVFWPQLPNGLEAAYEFADRDEVRFFKGNKYWAVQGQNVLHGYPKDIYSSFGFPRTVKHIDAALSEENTGKTYFFVANKYWRYDEYKRSMDPGYPKMIAHDFPGIGHKVDAVFMKDGFFYFFHGTRQYKFDPKTKRILTLQKANSWFNCRKN

SEQ ID NO: 1259 - protein, 450 aa, Artificial Sequence
  MMP-1 variant D110N
FPATLETQEQDVDLVQKYLEKYYNLKNDGRQVEKRRNSGPVVEKLKQMQEFFGLKVTGKPDAETLKVMKQPRCGVPDVAQFVLTEGNPRWEQTHLTYRIENYTPDLPRANVDHAIEKAFQLWSNVTPLTFTKVSEGQADIMISFVRGDHRDNSPFDGPGGNLAHAFQPGPGIGGDAHFDEDERWTNNFREYNLHRVAAHELGHSLGLSHSTDIGALMYPSYTFSGDVQLAQDDIDGIQAIYGRSQNPVQPIGPQTPKACDSKLTFDAITTIRGEVMFFKDRFYMRTNPFYPEVELNFISVFWPQLPNGLEAAYEFADRDEVRFFKGNKYWAVQGQNVLHGYPKDIYSSFGFPRTVKHIDAALSEENTGKTYFFVANKYWRYDEYKRSMDPGYPKMIAHDFPGIGHKVDAVFMKDGFFYFFHGTRQYKFDPKTKRILTLQKANSWFNCRKN

SEQ ID NO: 1260 - protein, 450 aa, Artificial Sequence
  MMP-1 variant D110Q
FPATLETQEQDVDLVQKYLEKYYNLKNDGRQVEKRRNSGPVVEKLKQMQEFFGLKVTGKPDAETLKVMKQPRCGVPDVAQFVLTEGNPRWEQTHLTYRIENYTPDLPRAQVDHAIEKAFQLWSNVTPLTFTKVSEGQADIMISFVRGDHRDNSPFDGPGGNLAHAFQPGPGIGGDAHFDEDERWTNNFREYNLHRVAAHELGHSLGLSHSTDIGALMYPSYTFSGDVQLAQDDIDGIQAIYGRSQNPVQPIGPQTPKACDSKLTFDAITTIRGEVMFFKDRFYMRTNPFYPEVELNFISVFWPQLPNGLEAAYEFADRDEVRFFKGNKYWAVQGQNVLHGYPKDIYSSFGFPRTVKHIDAALSEENTGKTYFFVANKYWRYDEYKRSMDPGYPKMIAHDFPGIGHKVDAVFMKDGFFYFFHGTRQYKFDPKTKRILTLQKANSWFNCRKN

SEQ ID NO: 1261 - protein, 450 aa, Artificial Sequence
  MMP-1 variant D110T
FPATLETQEQDVDLVQKYLEKYYNLKNDGRQVEKRRNSGPVVEKLKQMQEFFGLKVTGKPDAETLKVMKQPRCGVPDVAQFVLTEGNPRWEQTHLTYRIENYTPDLPRATVDHAIEKAFQLWSNVTPLTFTKVSEGQADIMISFVRGDHRDNSPFDGPGGNLAHAFQPGPGIGGDAHFDEDERWTNNFREYNLHRVAAHELGHSLGLSHSTDIGALMYPSYTFSGDVQLAQDDIDGIQAIYGRSQNPVQPIGPQTPKACDSKLTFDAITTIRGEVMFFKDRFYMRTNPFYPEVELNFISVFWPQLPNGLEAAYEFADRDEVRFFKGNKYWAVQGQNVLHGYPKDIYSSFGFPRTVKHIDAALSEENTGKTYFFVANKYWRYDEYKRSMDPGYPKMIAHDFPGIGHKVDAVFMKDGFFYFFHGTRQYKFDPKTKRILTLQKANSWFNCRKN

SEQ ID NO: 1262 - protein, 450 aa, Artificial Sequence
  MMP-1 variant D110Y
FPATLETQEQDVDLVQKYLEKYYNLKNDGRQVEKRRNSGPVVEKLKQMQEFFGLKVTGKPDAETLKVMKQPRCGVPDVAQFVLTEGNPRWEQTHLTYRIENYTPDLPRAYVDHAIEKAFQLWSNVTPLTFTKVSEGQADIMISFVRGDHRDNSPFDGPGGNLAHAFQPGPGIGGDAHFDEDERWTNNFREYNLHRVAAHELGHSLGLSHSTDIGALMYPSYTFSGDVQLAQDDIDGIQAIYGRSQNPVQPIGPQTPKACDSKLTFDAITTIRGEVMFFKDRFYMRTNPFYPEVELNFISVFWPQLPNGLEAAYEFADRDEVRFFKGNKYWAVQGQNVLHGYPKDIYSSFGFPRTVKHIDAALSEENTGKTYFFVANKYWRYDEYKRSMDPGYPKMIAHDFPGIGHKVDAVFMKDGFFYFFHGTRQYKFDPKTKRILTLQKANSWFNCRKN

SEQ ID NO: 1263 - protein, 450 aa, Artificial Sequence
  MMP-1 variant D110S
FPATLETQEQDVDLVQKYLEKYYNLKNDGRQVEKRRNSGPVVEKLKQMQEFFGLKVTGKPDAETLKVMKQPRCGVPDVAQFVLTEGNPRWEQTHLTYRIENYTPDLPRASVDHAIEKAFQLWSNVTPLTFTKVSEGQADIMISFVRGDHRDNSPFDGPGGNLAHAFQPGPGIGGDAHFDEDERWTNNFREYNLHRVAAHELGHSLGLSHSTDIGALMYPSYTFSGDVQLAQDDIDGIQAIYGRSQNPVQPIGPQTPKACDSKLTFDAITTIRGEVMFFKDRFYMRTNPFYPEVELNFISVFWPQLPNGLEAAYEFADRDEVRFFKGNKYWAVQGQNVLHGYPKDIYSSFGFPRTVKHIDAALSEENTGKTYFFVANKYWRYDEYKRSMDPGYPKMIAHDFPGIGHKVDAVFMKDGFFYFFHGTRQYKFDPKTKRILTLQKANSWFNCRKN

SEQ ID NO: 1264 - protein, 450 aa, Artificial Sequence
  MMP-1 variant D110G
FPATLETQEQDVDLVQKYLEKYYNLKNDGRQVEKRRNSGPVVEKLKQMQEFFGLKVTGKPDAETLKVMKQPRCGVPDVAQFVLTEGNPRWEQTHLTYRIENYTPDLPRAGVDHAIEKAFQLWSNVTPLTFTKVSEGQADIMISFVRGDHRDNSPFDGPGGNLAHAFQPGPGIGGDAHFDEDERWTNNFREYNLHRVAAHELGHSLGLSHSTDIGALMYPSYTFSGDVQLAQDDIDGIQAIYGRSQNPVQPIGPQTPKACDSKLTFDAITTIRGEVMFFKDRFYMRTNPFYPEVELNFISVFWPQLPNGLEAAYEFADRDEVRFFKGNKYWAVQGQNVLHGYPKDIYSSFGFPRTVKHIDAALSEENTGKTYFFVANKYWRYDEYKRSMDPGYPKMIAHDFPGIGHKVDAVFMKDGFFYFFHGTRQYKFDPKTKRILTLQKANSWFNCRKN

SEQ ID NO: 1265 - protein, 450 aa, Artificial Sequence
  MMP-1 variant D110F
FPATLETQEQDVDLVQKYLEKYYNLKNDGRQVEKRRNSGPVVEKLKQMQEFFGLKVTGKPDAETLKVMKQPRCGVPDVAQFVLTEGNPRWEQTHLTYRIENYTPDLPRAFVDHAIEKAFQLWSNVTPLTFTKVSEGQADIMISFVRGDHRDNSPFDGPGGNLAHAFQPGPGIGGDAHFDEDERWTNNFREYNLHRVAAHELGHSLGLSHSTDIGALMYPSYTFSGDVQLAQDDIDGIQAIYGRSQNPVQPIGPQTPKACDSKLTFDAITTIRGEVMFFKDRFYMRTNPFYPEVELNFISVFWPQLPNGLEAAYEFADRDEVRFFKGNKYWAVQGQNVLHGYPKDIYSSFGFPRTVKHIDAALSEENTGKTYFFVANKYWRYDEYKRSMDPGYPKMIAHDFPGIGHKVDAVFMKDGFFYFFHGTRQYKFDPKTKRILTLQKANSWFNCRKN

SEQ ID NO: 1266 - protein, 450 aa, Artificial Sequence
  MMP-1 variant D110M
FPATLETQEQDVDLVQKYLEKYYNLKNDGRQVEKRRNSGPVVEKLKQMQEFFGLKVTGKPDAETLKVMKQPRCGVPDVAQFVLTEGNPRWEQTHLTYRIENYTPDLPRAMVDHAIEKAFQLWSNVTPLTFTKVSEGQADIMISFVRGDHRDNSPFDGPGGNLAHAFQPGPGIGGDAHFDEDERWTNNFREYNLHRVAAHELGHSLGLSHSTDIGALMYPSYTFSGDVQLAQDDIDGIQAIYGRSQNPVQPIGPQTPKACDSKLTFDAITTIRGEVMFFKDRFYMRTNPFYPEVELNFISVFWPQLPNGLEAAYEFADRDEVRFFKGNKYWAVQGQNVLHGYPKDIYSSFGFPRTVKHIDAALSEENTGKTYFFVANKYWRYDEYKRSMDPGYPKMIAHDFPGIGHKVDAVFMKDGFFYFFHGTRQYKFDPKTKRILTLQKANSWFNCRKN

SEQ ID NO: 1267 - protein, 450 aa, Artificial Sequence
  MMP-1 variant D110W
FPATLETQEQDVDLVQKYLEKYYNLKNDGRQVEKRRNSGPVVEKLKQMQEFFGLKVTGKPDAETLKVMKQPRCGVPDVAQFVLTEGNPRWEQTHLTYRIENYTPDLPRAWVDHAIEKAFQLWSNVTPLTFTKVSEGQADIMISFVRGDHRDNSPFDGPGGNLAHAFQPGPGIGGDAHFDEDERWTNNFREYNLHRVAAHELGHSLGLSHSTDIGALMYPSYTFSGDVQLAQDDIDGIQAIYGRSQNPVQPIGPQTPKACDSKLTFDAITTIRGEVMFFKDRFYMRTNPFYPEVELNFISVFWPQLPNGLEAAYEFADRDEVRFFKGNKYWAVQGQNVLHGYPKDIYSSFGFPRTVKHIDAALSEENTGKTYFFVANKYWRYDEYKRSMDPGYPKMIAHDFPGIGHKVDAVFMKDGFFYFFHGTRQYKFDPKTKRILTLQKANSWFNCRKN

SEQ ID NO: 1268 - protein, 450 aa, Artificial Sequence
  MMP-1 variant D110I
FPATLETQEQDVDLVQKYLEKYYNLKNDGRQVEKRRNSGPVVEKLKQMQEFFGLKVTGKPDAETLKVMKQPRCGVPDVAQFVLTEGNPRWEQTHLTYRIENYTPDLPRAIVDHAIEKAFQLWSNVTPLTFTKVSEGQADIMISFVRGDHRDNSPFDGPGGNLAHAFQPGPGIGGDAHFDEDERWTNNFREYNLHRVAAHELGHSLGLSHSTDIGALMYPSYTFSGDVQLAQDDIDGIQAIYGRSQNPVQPIGPQTPKACDSKLTFDAITTIRGEVMFFKDRFYMRTNPFYPEVELNFISVFWPQLPNGLEAAYEFADRDEVRFFKGNKYWAVQGQNVLHGYPKDIYSSFGFPRTVKHIDAALSEENTGKTYFFVANKYWRYDEYKRSMDPGYPKMIAHDFPGIGHKVDAVFMKDGFFYFFHGTRQYKFDPKTKRILTLQKANSWFNCRKN

SEQ ID NO: 1269 - protein, 450 aa, Artificial Sequence
  MMP-1 variant D110V
FPATLETQEQDVDLVQKYLEKYYNLKNDGRQVEKRRNSGPVVEKLKQMQEFFGLKVTGKPDAETLKVMKQPRCGVPDVAQFVLTEGNPRWEQTHLTYRIENYTPDLPRAVVDHAIEKAFQLWSNVTPLTFTKVSEGQADIMISFVRGDHRDNSPFDGPGGNLAHAFQPGPGIGGDAHFDEDERWTNNFREYNLHRVAAHELGHSLGLSHSTDIGALMYPSYTFSGDVQLAQDDIDGIQAIYGRSQNPVQPIGPQTPKACDSKLTFDAITTIRGEVMFFKDRFYMRTNPFYPEVELNFISVFWPQLPNGLEAAYEFADRDEVRFFKGNKYWAVQGQNVLHGYPKDIYSSFGFPRTVKHIDAALSEENTGKTYFFVANKYWRYDEYKRSMDPGYPKMIAHDFPGIGHKVDAVFMKDGFFYFFHGTRQYKFDPKTKRILTLQKANSWFNCRKN

SEQ ID NO: 1270 - protein, 450 aa, Artificial Sequence
  MMP-1 variant D110L
FPATLETQEQDVDLVQKYLEKYYNLKNDGRQVEKRRNSGPVVEKLKQMQEFFGLKVTGKPDAETLKVMKQPRCGVPDVAQFVLTEGNPRWEQTHLTYRIENYTPDLPRALVDHAIEKAFQLWSNVTPLTFTKVSEGQADIMISFVRGDHRDNSPFDGPGGNLAHAFQPGPGIGGDAHFDEDERWTNNFREYNLHRVAAHELGHSLGLSHSTDIGALMYPSYTFSGDVQLAQDDIDGIQAIYGRSQNPVQPIGPQTPKACDSKLTFDAITTIRGEVMFFKDRFYMRTNPFYPEVELNFISVFWPQLPNGLEAAYEFADRDEVRFFKGNKYWAVQGQNVLHGYPKDIYSSFGFPRTVKHIDAALSEENTGKTYFFVANKYWRYDEYKRSMDPGYPKMIAHDFPGIGHKVDAVFMKDGFFYFFHGTRQYKFDPKTKRILTLQKANSWFNCRKN

SEQ ID NO: 1271 - protein, 450 aa, Artificial Sequence
  MMP-1 variant D110A
FPATLETQEQDVDLVQKYLEKYYNLKNDGRQVEKRRNSGPVVEKLKQMQEFFGLKVTGKPDAETLKVMKQPRCGVPDVAQFVLTEGNPRWEQTHLTYRIENYTPDLPRAAVDHAIEKAFQLWSNVTPLTFTKVSEGQADIMISFVRGDHRDNSPFDGPGGNLAHAFQPGPGIGGDAHFDEDERWTNNFREYNLHRVAAHELGHSLGLSHSTDIGALMYPSYTFSGDVQLAQDDIDGIQAIYGRSQNPVQPIGPQTPKACDSKLTFDAITTIRGEVMFFKDRFYMRTNPFYPEVELNFISVFWPQLPNGLEAAYEFADRDEVRFFKGNKYWAVQGQNVLHGYPKDIYSSFGFPRTVKHIDAALSEENTGKTYFFVANKYWRYDEYKRSMDPGYPKMIAHDFPGIGHKVDAVFMKDGFFYFFHGTRQYKFDPKTKRILTLQKANSWFNCRKN

SEQ ID NO: 1272 - protein, 450 aa, Artificial Sequence
  MMP-1 variant D110P
FPATLETQEQDVDLVQKYLEKYYNLKNDGRQVEKRRNSGPVVEKLKQMQEFFGLKVTGKPDAETLKVMKQPRCGVPDVAQFVLTEGNPRWEQTHLTYRIENYTPDLPRAPVDHAIEKAFQLWSNVTPLTFTKVSEGQADIMISFVRGDHRDNSPFDGPGGNLAHAFQPGPGIGGDAHFDEDERWTNNFREYNLHRVAAHELGHSLGLSHSTDIGALMYPSYTFSGDVQLAQDDIDGIQAIYGRSQNPVQPIGPQTPKACDSKLTFDAITTIRGEVMFFKDRFYMRTNPFYPEVELNFISVFWPQLPNGLEAAYEFADRDEVRFFKGNKYWAVQGQNVLHGYPKDIYSSFGFPRTVKHIDAALSEENTGKTYFFVANKYWRYDEYKRSMDPGYPKMIAHDFPGIGHKVDAVFMKDGFFYFFHGTRQYKFDPKTKRILTLQKANSWFNCRKN

SEQ ID NO: 1273 - protein, 450 aa, Artificial Sequence
  MMP-1 variant V111D
FPATLETQEQDVDLVQKYLEKYYNLKNDGRQVEKRRNSGPVVEKLKQMQEFFGLKVTGKPDAETLKVMKQPRCGVPDVAQFVLTEGNPRWEQTHLTYRIENYTPDLPRADDDHAIEKAFQLWSNVTPLTFTKVSEGQADIMISFVRGDHRDNSPFDGPGGNLAHAFQPGPGIGGDAHFDEDERWTNNFREYNLHRVAAHELGHSLGLSHSTDIGALMYPSYTFSGDVQLAQDDIDGIQAIYGRSQNPVQPIGPQTPKACDSKLTFDAITTIRGEVMFFKDRFYMRTNPFYPEVELNFISVFWPQLPNGLEAAYEFADRDEVRFFKGNKYWAVQGQNVLHGYPKDIYSSFGFPRTVKHIDAALSEENTGKTYFFVANKYWRYDEYKRSMDPGYPKMIAHDFPGIGHKVDAVFMKDGFFYFFHGTRQYKFDPKTKRILTLQKANSWFNCRKN

SEQ ID NO: 1274 - protein, 450 aa, Artificial Sequence
  MMP-1 variant V111E
FPATLETQEQDVDLVQKYLEKYYNLKNDGRQVEKRRNSGPVVEKLKQMQEFFGLKVTGKPDAETLKVMKQPRCGVPDVAQFVLTEGNPRWEQTHLTYRIENYTPDLPRADEDHAIEKAFQLWSNVTPLTFTKVSEGQADIMISFVRGDHRDNSPFDGPGGNLAHAFQPGPGIGGDAHFDEDERWTNNFREYNLHRVAAHELGHSLGLSHSTDIGALMYPSYTFSGDVQLAQDDIDGIQAIYGRSQNPVQPIGPQTPKACDSKLTFDAITTIRGEVMFFKDRFYMRTNPFYPEVELNFISVFWPQLPNGLEAAYEFADRDEVRFFKGNKYWAVQGQNVLHGYPKDIYSSFGFPRTVKHIDAALSEENTGKTYFFVANKYWRYDEYKRSMDPGYPKMIAHDFPGIGHKVDAVFMKDGFFYFFHGTRQYKFDPKTKRILTLQKANSWFNCRKN

SEQ ID NO: 1275 - protein, 450 aa, Artificial Sequence
  MMP-1 variant V111H
FPATLETQEQDVDLVQKYLEKYYNLKNDGRQVEKRRNSGPVVEKLKQMQEFFGLKVTGKPDAETLKVMKQPRCGVPDVAQFVLTEGNPRWEQTHLTYRIENYTPDLPRADHDHAIEKAFQLWSNVTPLTFTKVSEGQADIMISFVRGDHRDNSPFDGPGGNLAHAFQPGPGIGGDAHFDEDERWTNNFREYNLHRVAAHELGHSLGLSHSTDIGALMYPSYTFSGDVQLAQDDIDGIQAIYGRSQNPVQPIGPQTPKACDSKLTFDAITTIRGEVMFFKDRFYMRTNPFYPEVELNFISVFWPQLPNGLEAAYEFADRDEVRFFKGNKYWAVQGQNVLHGYPKDIYSSFGFPRTVKHIDAALSEENTGKTYFFVANKYWRYDEYKRSMDPGYPKMIAHDFPGIGHKVDAVFMKDGFFYFFHGTRQYKFDPKTKRILTLQKANSWFNCRKN

SEQ ID NO: 1276 - protein, 450 aa, Artificial Sequence
  MMP-1 variant V111K
FPATLETQEQDVDLVQKYLEKYYNLKNDGRQVEKRRNSGPVVEKLKQMQEFFGLKVTGKPDAETLKVMKQPRCGVPDVAQFVLTEGNPRWEQTHLTYRIENYTPDLPRADKDHAIEKAFQLWSNVTPLTFTKVSEGQADIMISFVRGDHRDNSPFDGPGGNLAHAFQPGPGIGGDAHFDEDERWTNNFREYNLHRVAAHELGHSLGLSHSTDIGALMYPSYTFSGDVQLAQDDIDGIQAIYGRSQNPVQPIGPQTPKACDSKLTFDAITTIRGEVMFFKDRFYMRTNPFYPEVELNFISVFWPQLPNGLEAAYEFADRDEVRFFKGNKYWAVQGQNVLHGYPKDIYSSFGFPRTVKHIDAALSEENTGKTYFFVANKYWRYDEYKRSMDPGYPKMIAHDFPGIGHKVDAVFMKDGFFYFFHGTRQYKFDPKTKRILTLQKANSWFNCRKN

SEQ ID NO: 1277 - protein, 450 aa, Artificial Sequence
  MMP-1 variant V111R
FPATLETQEQDVDLVQKYLEKYYNLKNDGRQVEKRRNSGPVVEKLKQMQEFFGLKVTGKPDAETLKVMKQPRCGVPDVAQFVLTEGNPRWEQTHLTYRIENYTPDLPRADRDHAIEKAFQLWSNVTPLTFTKVSEGQADIMISFVRGDHRDNSPFDGPGGNLAHAFQPGPGIGGDAHFDEDERWTNNFREYNLHRVAAHELGHSLGLSHSTDIGALMYPSYTFSGDVQLAQDDIDGIQAIYGRSQNPVQPIGPQTPKACDSKLTFDAITTIRGEVMFFKDRFYMRTNPFYPEVELNFISVFWPQLPNGLEAAYEFADRDEVRFFKGNKYWAVQGQNVLHGYPKDIYSSFGFPRTVKHIDAALSEENTGKTYFFVANKYWRYDEYKRSMDPGYPKMIAHDFPGIGHKVDAVFMKDGFFYFFHGTRQYKFDPKTKRILTLQKANSWFNCRKN

SEQ ID NO: 1278 - protein, 450 aa, Artificial Sequence
  MMP-1 variant V111C
FPATLETQEQDVDLVQKYLEKYYNLKNDGRQVEKRRNSGPVVEKLKQMQEFFGLKVTGKPDAETLKVMKQPRCGVPDVAQFVLTEGNPRWEQTHLTYRIENYTPDLPRADCDHAIEKAFQLWSNVTPLTFTKVSEGQADIMISFVRGDHRDNSPFDGPGGNLAHAFQPGPGIGGDAHFDEDERWTNNFREYNLHRVAAHELGHSLGLSHSTDIGALMYPSYTFSGDVQLAQDDIDGIQAIYGRSQNPVQPIGPQTPKACDSKLTFDAITTIRGEVMFFKDRFYMRTNPFYPEVELNFISVFWPQLPNGLEAAYEFADRDEVRFFKGNKYWAVQGQNVLHGYPKDIYSSFGFPRTVKHIDAALSEENTGKTYFFVANKYWRYDEYKRSMDPGYPKMIAHDFPGIGHKVDAVFMKDGFFYFFHGTRQYKFDPKTKRILTLQKANSWFNCRKN

SEQ ID NO: 1279 - protein, 450 aa, Artificial Sequence
  MMP-1 variant V111N
FPATLETQEQDVDLVQKYLEKYYNLKNDGRQVEKRRNSGPVVEKLKQMQEFFGLKVTGKPDAETLKVMKQPRCGVPDVAQFVLTEGNPRWEQTHLTYRIENYTPDLPRADNDHAIEKAFQLWSNVTPLTFTKVSEGQADIMISFVRGDHRDNSPFDGPGGNLAHAFQPGPGIGGDAHFDEDERWTNNFREYNLHRVAAHELGHSLGLSHSTDIGALMYPSYTFSGDVQLAQDDIDGIQAIYGRSQNPVQPIGPQTPKACDSKLTFDAITTIRGEVMFFKDRFYMRTNPFYPEVELNFISVFWPQLPNGLEAAYEFADRDEVRFFKGNKYWAVQGQNVLHGYPKDIYSSFGFPRTVKHIDAALSEENTGKTYFFVANKYWRYDEYKRSMDPGYPKMIAHDFPGIGHKVDAVFMKDGFFYFFHGTRQYKFDPKTKRILTLQKANSWFNCRKN

SEQ ID NO: 1280 - protein, 450 aa, Artificial Sequence
  MMP-1 variant V111Q
FPATLETQEQDVDLVQKYLEKYYNLKNDGRQVEKRRNSGPVVEKLKQMQEFFGLKVTGKPDAETLKVMKQPRCGVPDVAQFVLTEGNPRWEQTHLTYRIENYTPDLPRADQDHAIEKAFQLWSNVTPLTFTKVSEGQADIMISFVRGDHRDNSPFDGPGGNLAHAFQPGPGIGGDAHFDEDERWTNNFREYNLHRVAAHELGHSLGLSHSTDIGALMYPSYTFSGDVQLAQDDIDGIQAIYGRSQNPVQPIGPQTPKACDSKLTFDAITTIRGEVMFFKDRFYMRTNPFYPEVELNFISVFWPQLPNGLEAAYEFADRDEVRFFKGNKYWAVQGQNVLHGYPKDIYSSFGFPRTVKHIDAALSEENTGKTYFFVANKYWRYDEYKRSMDPGYPKMIAHDFPGIGHKVDAVFMKDGFFYFFHGTRQYKFDPKTKRILTLQKANSWFNCRKN

SEQ ID NO: 1281 - protein, 450 aa, Artificial Sequence
  MMP-1 variant V111T
FPATLETQEQDVDLVQKYLEKYYNLKNDGRQVEKRRNSGPVVEKLKQMQEFFGLKVTGKPDAETLKVMKQPRCGVPDVAQFVLTEGNPRWEQTHLTYRIENYTPDLPRADTDHAIEKAFQLWSNVTPLTFTKVSEGQADIMISFVRGDHRDNSPFDGPGGNLAHAFQPGPGIGGDAHFDEDERWTNNFREYNLHRVAAHELGHSLGLSHSTDIGALMYPSYTFSGDVQLAQDDIDGIQAIYGRSQNPVQPIGPQTPKACDSKLTFDAITTIRGEVMFFKDRFYMRTNPFYPEVELNFISVFWPQLPNGLEAAYEFADRDEVRFFKGNKYWAVQGQNVLHGYPKDIYSSFGFPRTVKHIDAALSEENTGKTYFFVANKYWRYDEYKRSMDPGYPKMIAHDFPGIGHKVDAVFMKDGFFYFFHGTRQYKFDPKTKRILTLQKANSWFNCRKN

SEQ ID NO: 1282 - protein, 450 aa, Artificial Sequence
  MMP-1 variant V111Y
FPATLETQEQDVDLVQKYLEKYYNLKNDGRQVEKRRNSGPVVEKLKQMQEFFGLKVTGKPDAETLKVMKQPRCGVPDVAQFVLTEGNPRWEQTHLTYRIENYTPDLPRADYDHAIEKAFQLWSNVTPLTFTKVSEGQADIMISFVRGDHRDNSPFDGPGGNLAHAFQPGPGIGGDAHFDEDERWTNNFREYNLHRVAAHELGHSLGLSHSTDIGALMYPSYTFSGDVQLAQDDIDGIQAIYGRSQNPVQPIGPQTPKACDSKLTFDAITTIRGEVMFFKDRFYMRTNPFYPEVELNFISVFWPQLPNGLEAAYEFADRDEVRFFKGNKYWAVQGQNVLHGYPKDIYSSFGFPRTVKHIDAALSEENTGKTYFFVANKYWRYDEYKRSMDPGYPKMIAHDFPGIGHKVDAVFMKDGFFYFFHGTRQYKFDPKTKRILTLQKANSWFNCRKN

SEQ ID NO: 1283 - protein, 450 aa, Artificial Sequence
  MMP-1 variant V111S
FPATLETQEQDVDLVQKYLEKYYNLKNDGRQVEKRRNSGPVVEKLKQMQEFFGLKVTGKPDAETLKVMKQPRCGVPDVAQFVLTEGNPRWEQTHLTYRIENYTPDLPRADSDHAIEKAFQLWSNVTPLTFTKVSEGQADIMISFVRGDHRDNSPFDGPGGNLAHAFQPGPGIGGDAHFDEDERWTNNFREYNLHRVAAHELGHSLGLSHSTDIGALMYPSYTFSGDVQLAQDDIDGIQAIYGRSQNPVQPIGPQTPKACDSKLTFDAITTIRGEVMFFKDRFYMRTNPFYPEVELNFISVFWPQLPNGLEAAYEFADRDEVRFFKGNKYWAVQGQNVLHGYPKDIYSSFGFPRTVKHIDAALSEENTGKTYFFVANKYWRYDEYKRSMDPGYPKMIAHDFPGIGHKVDAVFMKDGFFYFFHGTRQYKFDPKTKRILTLQKANSWFNCRKN

SEQ ID NO: 1284 - protein, 450 aa, Artificial Sequence
  MMP-1 variant V111G
FPATLETQEQDVDLVQKYLEKYYNLKNDGRQVEKRRNSGPVVEKLKQMQEFFGLKVTGKPDAETLKVMKQPRCGVPDVAQFVLTEGNPRWEQTHLTYRIENYTPDLPRADGDHAIEKAFQLWSNVTPLTFTKVSEGQADIMISFVRGDHRDNSPFDGPGGNLAHAFQPGPGIGGDAHFDEDERWTNNFREYNLHRVAAHELGHSLGLSHSTDIGALMYPSYTFSGDVQLAQDDIDGIQAIYGRSQNPVQPIGPQTPKACDSKLTFDAITTIRGEVMFFKDRFYMRTNPFYPEVELNFISVFWPQLPNGLEAAYEFADRDEVRFFKGNKYWAVQGQNVLHGYPKDIYSSFGFPRTVKHIDAALSEENTGKTYFFVANKYWRYDEYKRSMDPGYPKMIAHDFPGIGHKVDAVFMKDGFFYFFHGTRQYKFDPKTKRILTLQKANSWFNCRKN

SEQ ID NO: 1285 - protein, 450 aa, Artificial Sequence
  MMP-1 variant V111F
FPATLETQEQDVDLVQKYLEKYYNLKNDGRQVEKRRNSGPVVEKLKQMQEFFGLKVTGKPDAETLKVMKQPRCGVPDVAQFVLTEGNPRWEQTHLTYRIENYTPDLPRADFDHAIEKAFQLWSNVTPLTFTKVSEGQADIMISFVRGDHRDNSPFDGPGGNLAHAFQPGPGIGGDAHFDEDERWTNNFREYNLHRVAAHELGHSLGLSHSTDIGALMYPSYTFSGDVQLAQDDIDGIQAIYGRSQNPVQPIGPQTPKACDSKLTFDAITTIRGEVMFFKDRFYMRTNPFYPEVELNFISVFWPQLPNGLEAAYEFADRDEVRFFKGNKYWAVQGQNVLHGYPKDIYSSFGFPRTVKHIDAALSEENTGKTYFFVANKYWRYDEYKRSMDPGYPKMIAHDFPGIGHKVDAVFMKDGFFYFFHGTRQYKFDPKTKRILTLQKANSWFNCRKN

SEQ ID NO: 1286 - protein, 450 aa, Artificial Sequence
  MMP-1 variant V111M
FPATLETQEQDVDLVQKYLEKYYNLKNDGRQVEKRRNSGPVVEKLKQMQEFFGLKVTGKPDAETLKVMKQPRCGVPDVAQFVLTEGNPRWEQTHLTYRIENYTPDLPRADMDHAIEKAFQLWSNVTPLTFTKVSEGQADIMISFVRGDHRDNSPFDGPGGNLAHAFQPGPGIGGDAHFDEDERWTNNFREYNLHRVAAHELGHSLGLSHSTDIGALMYPSYTFSGDVQLAQDDIDGIQAIYGRSQNPVQPIGPQTPKACDSKLTFDAITTIRGEVMFFKDRFYMRTNPFYPEVELNFISVFWPQLPNGLEAAYEFADRDEVRFFKGNKYWAVQGQNVLHGYPKDIYSSFGFPRTVKHIDAALSEENTGKTYFFVANKYWRYDEYKRSMDPGYPKMIAHDFPGIGHKVDAVFMKDGFFYFFHGTRQYKFDPKTKRILTLQKANSWFNCRKN

SEQ ID NO: 1287 - protein, 450 aa, Artificial Sequence
  MMP-1 variant V111W
FPATLETQEQDVDLVQKYLEKYYNLKNDGRQVEKRRNSGPVVEKLKQMQEFFGLKVTGKPDAETLKVMKQPRCGVPDVAQFVLTEGNPRWEQTHLTYRIENYTPDLPRADWDHAIEKAFQLWSNVTPLTFTKVSEGQADIMISFVRGDHRDNSPFDGPGGNLAHAFQPGPGIGGDAHFDEDERWTNNFREYNLHRVAAHELGHSLGLSHSTDIGALMYPSYTFSGDVQLAQDDIDGIQAIYGRSQNPVQPIGPQTPKACDSKLTFDAITTIRGEVMFFKDRFYMRTNPFYPEVELNFISVFWPQLPNGLEAAYEFADRDEVRFFKGNKYWAVQGQNVLHGYPKDIYSSFGFPRTVKHIDAALSEENTGKTYFFVANKYWRYDEYKRSMDPGYPKMIAHDFPGIGHKVDAVFMKDGFFYFFHGTRQYKFDPKTKRILTLQKANSWFNCRKN

SEQ ID NO: 1288 - protein, 450 aa, Artificial Sequence
  MMP-1 variant V111I
FPATLETQEQDVDLVQKYLEKYYNLKNDGRQVEKRRNSGPVVEKLKQMQEFFGLKVTGKPDAETLKVMKQPRCGVPDVAQFVLTEGNPRWEQTHLTYRIENYTPDLPRADIDHAIEKAFQLWSNVTPLTFTKVSEGQADIMISFVRGDHRDNSPFDGPGGNLAHAFQPGPGIGGDAHFDEDERWTNNFREYNLHRVAAHELGHSLGLSHSTDIGALMYPSYTFSGDVQLAQDDIDGIQAIYGRSQNPVQPIGPQTPKACDSKLTFDAITTIRGEVMFFKDRFYMRTNPFYPEVELNFISVFWPQLPNGLEAAYEFADRDEVRFFKGNKYWAVQGQNVLHGYPKDIYSSFGFPRTVKHIDAALSEENTGKTYFFVANKYWRYDEYKRSMDPGYPKMIAHDFPGIGHKVDAVFMKDGFFYFFHGTRQYKFDPKTKRILTLQKANSWFNCRKN

SEQ ID NO: 1289 - protein, 450 aa, Artificial Sequence
  MMP-1 variant V111L
FPATLETQEQDVDLVQKYLEKYYNLKNDGRQVEKRRNSGPVVEKLKQMQEFFGLKVTGKPDAETLKVMKQPRCGVPDVAQFVLTEGNPRWEQTHLTYRIENYTPDLPRADLDHAIEKAFQLWSNVTPLTFTKVSEGQADIMISFVRGDHRDNSPFDGPGGNLAHAFQPGPGIGGDAHFDEDERWTNNFREYNLHRVAAHELGHSLGLSHSTDIGALMYPSYTFSGDVQLAQDDIDGIQAIYGRSQNPVQPIGPQTPKACDSKLTFDAITTIRGEVMFFKDRFYMRTNPFYPEVELNFISVFWPQLPNGLEAAYEFADRDEVRFFKGNKYWAVQGQNVLHGYPKDIYSSFGFPRTVKHIDAALSEENTGKTYFFVANKYWRYDEYKRSMDPGYPKMIAHDFPGIGHKVDAVFMKDGFFYFFHGTRQYKFDPKTKRILTLQKANSWFNCRKN

SEQ ID NO: 1290 - protein, 450 aa, Artificial Sequence
  MMP-1 variant V111A
FPATLETQEQDVDLVQKYLEKYYNLKNDGRQVEKRRNSGPVVEKLKQMQEFFGLKVTGKPDAETLKVMKQPRCGVPDVAQFVLTEGNPRWEQTHLTYRIENYTPDLPRADADHAIEKAFQLWSNVTPLTFTKVSEGQADIMISFVRGDHRDNSPFDGPGGNLAHAFQPGPGIGGDAHFDEDERWTNNFREYNLHRVAAHELGHSLGLSHSTDIGALMYPSYTFSGDVQLAQDDIDGIQAIYGRSQNPVQPIGPQTPKACDSKLTFDAITTIRGEVMFFKDRFYMRTNPFYPEVELNFISVFWPQLPNGLEAAYEFADRDEVRFFKGNKYWAVQGQNVLHGYPKDIYSSFGFPRTVKHIDAALSEENTGKTYFFVANKYWRYDEYKRSMDPGYPKMIAHDFPGIGHKVDAVFMKDGFFYFFHGTRQYKFDPKTKRILTLQKANSWFNCRKN

SEQ ID NO: 1291 - protein, 450 aa, Artificial Sequence
  MMP-1 variant V111P
FPATLETQEQDVDLVQKYLEKYYNLKNDGRQVEKRRNSGPVVEKLKQMQEFFGLKVTGKPDAETLKVMKQPRCGVPDVAQFVLTEGNPRWEQTHLTYRIENYTPDLPRADPDHAIEKAFQLWSNVTPLTFTKVSEGQADIMISFVRGDHRDNSPFDGPGGNLAHAFQPGPGIGGDAHFDEDERWTNNFREYNLHRVAAHELGHSLGLSHSTDIGALMYPSYTFSGDVQLAQDDIDGIQAIYGRSQNPVQPIGPQTPKACDSKLTFDAITTIRGEVMFFKDRFYMRTNPFYPEVELNFISVFWPQLPNGLEAAYEFADRDEVRFFKGNKYWAVQGQNVLHGYPKDIYSSFGFPRTVKHIDAALSEENTGKTYFFVANKYWRYDEYKRSMDPGYPKMIAHDFPGIGHKVDAVFMKDGFFYFFHGTRQYKFDPKTKRILTLQKANSWFNCRKN

SEQ ID NO: 1292 - protein, 450 aa, Artificial Sequence
  MMP-1 variant D112E
FPATLETQEQDVDLVQKYLEKYYNLKNDGRQVEKRRNSGPVVEKLKQMQEFFGLKVTGKPDAETLKVMKQPRCGVPDVAQFVLTEGNPRWEQTHLTYRIENYTPDLPRADVEHAIEKAFQLWSNVTPLTFTKVSEGQADIMISFVRGDHRDNSPFDGPGGNLAHAFQPGPGIGGDAHFDEDERWTNNFREYNLHRVAAHELGHSLGLSHSTDIGALMYPSYTFSGDVQLAQDDIDGIQAIYGRSQNPVQPIGPQTPKACDSKLTFDAITTIRGEVMFFKDRFYMRTNPFYPEVELNFISVFWPQLPNGLEAAYEFADRDEVRFFKGNKYWAVQGQNVLHGYPKDIYSSFGFPRTVKHIDAALSEENTGKTYFFVANKYWRYDEYKRSMDPGYPKMIAHDFPGIGHKVDAVFMKDGFFYFFHGTRQYKFDPKTKRILTLQKANSWFNCRKN

SEQ ID NO: 1293 - protein, 450 aa, Artificial Sequence
  MMP-1 variant D112H
FPATLETQEQDVDLVQKYLEKYYNLKNDGRQVEKRRNSGPVVEKLKQMQEFFGLKVTGKPDAETLKVMKQPRCGVPDVAQFVLTEGNPRWEQTHLTYRIENYTPDLPRADVHHAIEKAFQLWSNVTPLTFTKVSEGQADIMISFVRGDHRDNSPFDGPGGNLAHAFQPGPGIGGDAHFDEDERWTNNFREYNLHRVAAHELGHSLGLSHSTDIGALMYPSYTFSGDVQLAQDDIDGIQAIYGRSQNPVQPIGPQTPKACDSKLTFDAITTIRGEVMFFKDRFYMRTNPFYPEVELNFISVFWPQLPNGLEAAYEFADRDEVRFFKGNKYWAVQGQNVLHGYPKDIYSSFGFPRTVKHIDAALSEENTGKTYFFVANKYWRYDEYKRSMDPGYPKMIAHDFPGIGHKVDAVFMKDGFFYFFHGTRQYKFDPKTKRILTLQKANSWFNCRKN

SEQ ID NO: 1294 - protein, 450 aa, Artificial Sequence
  MMP-1 variant D112K
FPATLETQEQDVDLVQKYLEKYYNLKNDGRQVEKRRNSGPVVEKLKQMQEFFGLKVTGKPDAETLKVMKQPRCGVPDVAQFVLTEGNPRWEQTHLTYRIENYTPDLPRADVKHAIEKAFQLWSNVTPLTFTKVSEGQADIMISFVRGDHRDNSPFDGPGGNLAHAFQPGPGIGGDAHFDEDERWTNNFREYNLHRVAAHELGHSLGLSHSTDIGALMYPSYTFSGDVQLAQDDIDGIQAIYGRSQNPVQPIGPQTPKACDSKLTFDAITTIRGEVMFFKDRFYMRTNPFYPEVELNFISVFWPQLPNGLEAAYEFADRDEVRFFKGNKYWAVQGQNVLHGYPKDIYSSFGFPRTVKHIDAALSEENTGKTYFFVANKYWRYDEYKRSMDPGYPKMIAHDFPGIGHKVDAVFMKDGFFYFFHGTRQYKFDPKTKRILTLQKANSWFNCRKN

SEQ ID NO: 1295 - protein, 450 aa, Artificial Sequence
  MMP-1 variant D112R
FPATLETQEQDVDLVQKYLEKYYNLKNDGRQVEKRRNSGPVVEKLKQMQEFFGLKVTGKPDAETLKVMKQPRCGVPDVAQFVLTEGNPRWEQTHLTYRIENYTPDLPRADVRHAIEKAFQLWSNVTPLTFTKVSEGQADIMISFVRGDHRDNSPFDGPGGNLAHAFQPGPGIGGDAHFDEDERWTNNFREYNLHRVAAHELGHSLGLSHSTDIGALMYPSYTFSGDVQLAQDDIDGIQAIYGRSQNPVQPIGPQTPKACDSKLTFDAITTIRGEVMFFKDRFYMRTNPFYPEVELNFISVFWPQLPNGLEAAYEFADRDEVRFFKGNKYWAVQGQNVLHGYPKDIYSSFGFPRTVKHIDAALSEENTGKTYFFVANKYWRYDEYKRSMDPGYPKMIAHDFPGIGHKVDAVFMKDGFFYFFHGTRQYKFDPKTKRILTLQKANSWFNCRKN

SEQ ID NO: 1296 - protein, 450 aa, Artificial Sequence
  MMP-1 variant D112C
FPATLETQEQDVDLVQKYLEKYYNLKNDGRQVEKRRNSGPVVEKLKQMQEFFGLKVTGKPDAETLKVMKQPRCGVPDVAQFVLTEGNPRWEQTHLTYRIENYTPDLPRADVCHAIEKAFQLWSNVTPLTFTKVSEGQADIMISFVRGDHRDNSPFDGPGGNLAHAFQPGPGIGGDAHFDEDERWTNNFREYNLHRVAAHELGHSLGLSHSTDIGALMYPSYTFSGDVQLAQDDIDGIQAIYGRSQNPVQPIGPQTPKACDSKLTFDAITTIRGEVMFFKDRFYMRTNPFYPEVELNFISVFWPQLPNGLEAAYEFADRDEVRFFKGNKYWAVQGQNVLHGYPKDIYSSFGFPRTVKHIDAALSEENTGKTYFFVANKYWRYDEYKRSMDPGYPKMIAHDFPGIGHKVDAVFMKDGFFYFFHGTRQYKFDPKTKRILTLQKANSWFNCRKN

SEQ ID NO: 1297 - protein, 450 aa, Artificial Sequence
  MMP-1 variant D112N
FPATLETQEQDVDLVQKYLEKYYNLKNDGRQVEKRRNSGPVVEKLKQMQEFFGLKVTGKPDAETLKVMKQPRCGVPDVAQFVLTEGNPRWEQTHLTYRIENYTPDLPRADVNHAIEKAFQLWSNVTPLTFTKVSEGQADIMISFVRGDHRDNSPFDGPGGNLAHAFQPGPGIGGDAHFDEDERWTNNFREYNLHRVAAHELGHSLGLSHSTDIGALMYPSYTFSGDVQLAQDDIDGIQAIYGRSQNPVQPIGPQTPKACDSKLTFDAITTIRGEVMFFKDRFYMRTNPFYPEVELNFISVFWPQLPNGLEAAYEFADRDEVRFFKGNKYWAVQGQNVLHGYPKDIYSSFGFPRTVKHIDAALSEENTGKTYFFVANKYWRYDEYKRSMDPGYPKMIAHDFPGIGHKVDAVFMKDGFFYFFHGTRQYKFDPKTKRILTLQKANSWFNCRKN

SEQ ID NO: 1298 - protein, 450 aa, Artificial Sequence
  MMP-1 variant D112Q
FPATLETQEQDVDLVQKYLEKYYNLKNDGRQVEKRRNSGPVVEKLKQMQEFFGLKVTGKPDAETLKVMKQPRCGVPDVAQFVLTEGNPRWEQTHLTYRIENYTPDLPRADVQHAIEKAFQLWSNVTPLTFTKVSEGQADIMISFVRGDHRDNSPFDGPGGNLAHAFQPGPGIGGDAHFDEDERWTNNFREYNLHRVAAHELGHSLGLSHSTDIGALMYPSYTFSGDVQLAQDDIDGIQAIYGRSQNPVQPIGPQTPKACDSKLTFDAITTIRGEVMFFKDRFYMRTNPFYPEVELNFISVFWPQLPNGLEAAYEFADRDEVRFFKGNKYWAVQGQNVLHGYPKDIYSSFGFPRTVKHIDAALSEENTGKTYFFVANKYWRYDEYKRSMDPGYPKMIAHDFPGIGHKVDAVFMKDGFFYFFHGTRQYKFDPKTKRILTLQKANSWFNCRKN

SEQ ID NO: 1299 - protein, 450 aa, Artificial Sequence
  MMP-1 variant D112T
FPATLETQEQDVDLVQKYLEKYYNLKNDGRQVEKRRNSGPVVEKLKQMQEFFGLKVTGKPDAETLKVMKQPRCGVPDVAQFVLTEGNPRWEQTHLTYRIENYTPDLPRADVTHAIEKAFQLWSNVTPLTFTKVSEGQADIMISFVRGDHRDNSPFDGPGGNLAHAFQPGPGIGGDAHFDEDERWTNNFREYNLHRVAAHELGHSLGLSHSTDIGALMYPSYTFSGDVQLAQDDIDGIQAIYGRSQNPVQPIGPQTPKACDSKLTFDAITTIRGEVMFFKDRFYMRTNPFYPEVELNFISVFWPQLPNGLEAAYEFADRDEVRFFKGNKYWAVQGQNVLHGYPKDIYSSFGFPRTVKHIDAALSEENTGKTYFFVANKYWRYDEYKRSMDPGYPKMIAHDFPGIGHKVDAVFMKDGFFYFFHGTRQYKFDPKTKRILTLQKANSWFNCRKN

SEQ ID NO: 1300 - protein, 450 aa, Artificial Sequence
  MMP-1 variant D112Y
FPATLETQEQDVDLVQKYLEKYYNLKNDGRQVEKRRNSGPVVEKLKQMQEFFGLKVTGKPDAETLKVMKQPRCGVPDVAQFVLTEGNPRWEQTHLTYRIENYTPDLPRADVYHAIEKAFQLWSNVTPLTFTKVSEGQADIMISFVRGDHRDNSPFDGPGGNLAHAFQPGPGIGGDAHFDEDERWTNNFREYNLHRVAAHELGHSLGLSHSTDIGALMYPSYTFSGDVQLAQDDIDGIQAIYGRSQNPVQPIGPQTPKACDSKLTFDAITTIRGEVMFFKDRFYMRTNPFYPEVELNFISVFWPQLPNGLEAAYEFADRDEVRFFKGNKYWAVQGQNVLHGYPKDIYSSFGFPRTVKHIDAALSEENTGKTYFFVANKYWRYDEYKRSMDPGYPKMIAHDFPGIGHKVDAVFMKDGFFYFFHGTRQYKFDPKTKRILTLQKANSWFNCRKN

SEQ ID NO: 1301 - protein, 450 aa, Artificial Sequence
  MMP-1 variant D112S
FPATLETQEQDVDLVQKYLEKYYNLKNDGRQVEKRRNSGPVVEKLKQMQEFFGLKVTGKPDAETLKVMKQPRCGVPDVAQFVLTEGNPRWEQTHLTYRIENYTPDLPRADVSHAIEKAFQLWSNVTPLTFTKVSEGQADIMISFVRGDHRDNSPFDGPGGNLAHAFQPGPGIGGDAHFDEDERWTNNFREYNLHRVAAHELGHSLGLSHSTDIGALMYPSYTFSGDVQLAQDDIDGIQAIYGRSQNPVQPIGPQTPKACDSKLTFDAITTIRGEVMFFKDRFYMRTNPFYPEVELNFISVFWPQLPNGLEAAYEFADRDEVRFFKGNKYWAVQGQNVLHGYPKDIYSSFGFPRTVKHIDAALSEENTGKTYFFVANKYWRYDEYKRSMDPGYPKMIAHDFPGIGHKVDAVFMKDGFFYFFHGTRQYKFDPKTKRILTLQKANSWFNCRKN

SEQ ID NO: 1302 - protein, 450 aa, Artificial Sequence
  MMP-1 variant D112G
FPATLETQEQDVDLVQKYLEKYYNLKNDGRQVEKRRNSGPVVEKLKQMQEFFGLKVTGKPDAETLKVMKQPRCGVPDVAQFVLTEGNPRWEQTHLTYRIENYTPDLPRADVGHAIEKAFQLWSNVTPLTFTKVSEGQADIMISFVRGDHRDNSPFDGPGGNLAHAFQPGPGIGGDAHFDEDERWTNNFREYNLHRVAAHELGHSLGLSHSTDIGALMYPSYTFSGDVQLAQDDIDGIQAIYGRSQNPVQPIGPQTPKACDSKLTFDAITTIRGEVMFFKDRFYMRTNPFYPEVELNFISVFWPQLPNGLEAAYEFADRDEVRFFKGNKYWAVQGQNVLHGYPKDIYSSFGFPRTVKHIDAALSEENTGKTYFFVANKYWRYDEYKRSMDPGYPKMIAHDFPGIGHKVDAVFMKDGFFYFFHGTRQYKFDPKTKRILTLQKANSWFNCRKN

SEQ ID NO: 1303 - protein, 450 aa, Artificial Sequence
  MMP-1 variant D112F
FPATLETQEQDVDLVQKYLEKYYNLKNDGRQVEKRRNSGPVVEKLKQMQEFFGLKVTGKPDAETLKVMKQPRCGVPDVAQFVLTEGNPRWEQTHLTYRIENYTPDLPRADVFHAIEKAFQLWSNVTPLTFTKVSEGQADIMISFVRGDHRDNSPFDGPGGNLAHAFQPGPGIGGDAHFDEDERWTNNFREYNLHRVAAHELGHSLGLSHSTDIGALMYPSYTFSGDVQLAQDDIDGIQAIYGRSQNPVQPIGPQTPKACDSKLTFDAITTIRGEVMFFKDRFYMRTNPFYPEVELNFISVFWPQLPNGLEAAYEFADRDEVRFFKGNKYWAVQGQNVLHGYPKDIYSSFGFPRTVKHIDAALSEENTGKTYFFVANKYWRYDEYKRSMDPGYPKMIAHDFPGIGHKVDAVFMKDGFFYFFHGTRQYKFDPKTKRILTLQKANSWFNCRKN

SEQ ID NO: 1304 - protein, 450 aa, Artificial Sequence
  MMP-1 variant D112M
FPATLETQEQDVDLVQKYLEKYYNLKNDGRQVEKRRNSGPVVEKLKQMQEFFGLKVTGKPDAETLKVMKQPRCGVPDVAQFVLTEGNPRWEQTHLTYRIENYTPDLPRADVMHAIEKAFQLWSNVTPLTFTKVSEGQADIMISFVRGDHRDNSPFDGPGGNLAHAFQPGPGIGGDAHFDEDERWTNNFREYNLHRVAAHELGHSLGLSHSTDIGALMYPSYTFSGDVQLAQDDIDGIQAIYGRSQNPVQPIGPQTPKACDSKLTFDAITTIRGEVMFFKDRFYMRTNPFYPEVELNFISVFWPQLPNGLEAAYEFADRDEVRFFKGNKYWAVQGQNVLHGYPKDIYSSFGFPRTVKHIDAALSEENTGKTYFFVANKYWRYDEYKRSMDPGYPKMIAHDFPGIGHKVDAVFMKDGFFYFFHGTRQYKFDPKTKRILTLQKANSWFNCRKN

SEQ ID NO: 1305 - protein, 450 aa, Artificial Sequence
  MMP-1 variant D112W
FPATLETQEQDVDLVQKYLEKYYNLKNDGRQVEKRRNSGPVVEKLKQMQEFFGLKVTGKPDAETLKVMKQPRCGVPDVAQFVLTEGNPRWEQTHLTYRIENYTPDLPRADVWHAIEKAFQLWSNVTPLTFTKVSEGQADIMISFVRGDHRDNSPFDGPGGNLAHAFQPGPGIGGDAHFDEDERWTNNFREYNLHRVAAHELGHSLGLSHSTDIGALMYPSYTFSGDVQLAQDDIDGIQAIYGRSQNPVQPIGPQTPKACDSKLTFDAITTIRGEVMFFKDRFYMRTNPFYPEVELNFISVFWPQLPNGLEAAYEFADRDEVRFFKGNKYWAVQGQNVLHGYPKDIYSSFGFPRTVKHIDAALSEENTGKTYFFVANKYWRYDEYKRSMDPGYPKMIAHDFPGIGHKVDAVFMKDGFFYFFHGTRQYKFDPKTKRILTLQKANSWFNCRKN

SEQ ID NO: 1306 - protein, 450 aa, Artificial Sequence
  MMP-1 variant D112I
FPATLETQEQDVDLVQKYLEKYYNLKNDGRQVEKRRNSGPVVEKLKQMQEFFGLKVTGKPDAETLKVMKQPRCGVPDVAQFVLTEGNPRWEQTHLTYRIENYTPDLPRADVIHAIEKAFQLWSNVTPLTFTKVSEGQADIMISFVRGDHRDNSPFDGPGGNLAHAFQPGPGIGGDAHFDEDERWTNNFREYNLHRVAAHELGHSLGLSHSTDIGALMYPSYTFSGDVQLAQDDIDGIQAIYGRSQNPVQPIGPQTPKACDSKLTFDAITTIRGEVMFFKDRFYMRTNPFYPEVELNFISVFWPQLPNGLEAAYEFADRDEVRFFKGNKYWAVQGQNVLHGYPKDIYSSFGFPRTVKHIDAALSEENTGKTYFFVANKYWRYDEYKRSMDPGYPKMIAHDFPGIGHKVDAVFMKDGFFYFFHGTRQYKFDPKTKRILTLQKANSWFNCRKN

SEQ ID NO: 1307 - protein, 450 aa, Artificial Sequence
  MMP-1 variant D112V
FPATLETQEQDVDLVQKYLEKYYNLKNDGRQVEKRRNSGPVVEKLKQMQEFFGLKVTGKPDAETLKVMKQPRCGVPDVAQFVLTEGNPRWEQTHLTYRIENYTPDLPRADVVHAIEKAFQLWSNVTPLTFTKVSEGQADIMISFVRGDHRDNSPFDGPGGNLAHAFQPGPGIGGDAHFDEDERWTNNFREYNLHRVAAHELGHSLGLSHSTDIGALMYPSYTFSGDVQLAQDDIDGIQAIYGRSQNPVQPIGPQTPKACDSKLTFDAITTIRGEVMFFKDRFYMRTNPFYPEVELNFISVFWPQLPNGLEAAYEFADRDEVRFFKGNKYWAVQGQNVLHGYPKDIYSSFGFPRTVKHIDAALSEENTGKTYFFVANKYWRYDEYKRSMDPGYPKMIAHDFPGIGHKVDAVFMKDGFFYFFHGTRQYKFDPKTKRILTLQKANSWFNCRKN

SEQ ID NO: 1308 - protein, 450 aa, Artificial Sequence
  MMP-1 variant D112L
FPATLETQEQDVDLVQKYLEKYYNLKNDGRQVEKRRNSGPVVEKLKQMQEFFGLKVTGKPDAETLKVMKQPRCGVPDVAQFVLTEGNPRWEQTHLTYRIENYTPDLPRADVLHAIEKAFQLWSNVTPLTFTKVSEGQADIMISFVRGDHRDNSPFDGPGGNLAHAFQPGPGIGGDAHFDEDERWTNNFREYNLHRVAAHELGHSLGLSHSTDIGALMYPSYTFSGDVQLAQDDIDGIQAIYGRSQNPVQPIGPQTPKACDSKLTFDAITTIRGEVMFFKDRFYMRTNPFYPEVELNFISVFWPQLPNGLEAAYEFADRDEVRFFKGNKYWAVQGQNVLHGYPKDIYSSFGFPRTVKHIDAALSEENTGKTYFFVANKYWRYDEYKRSMDPGYPKMIAHDFPGIGHKVDAVFMKDGFFYFFHGTRQYKFDPKTKRILTLQKANSWFNCRKN

SEQ ID NO: 1309 - protein, 450 aa, Artificial Sequence
  MMP-1 variant D112A
FPATLETQEQDVDLVQKYLEKYYNLKNDGRQVEKRRNSGPVVEKLKQMQEFFGLKVTGKPDAETLKVMKQPRCGVPDVAQFVLTEGNPRWEQTHLTYRIENYTPDLPRADVAHAIEKAFQLWSNVTPLTFTKVSEGQADIMISFVRGDHRDNSPFDGPGGNLAHAFQPGPGIGGDAHFDEDERWTNNFREYNLHRVAAHELGHSLGLSHSTDIGALMYPSYTFSGDVQLAQDDIDGIQAIYGRSQNPVQPIGPQTPKACDSKLTFDAITTIRGEVMFFKDRFYMRTNPFYPEVELNFISVFWPQLPNGLEAAYEFADRDEVRFFKGNKYWAVQGQNVLHGYPKDIYSSFGFPRTVKHIDAALSEENTGKTYFFVANKYWRYDEYKRSMDPGYPKMIAHDFPGIGHKVDAVFMKDGFFYFFHGTRQYKFDPKTKRILTLQKANSWFNCRKN

SEQ ID NO: 1310 - protein, 450 aa, Artificial Sequence
  MMP-1 variant D112P
FPATLETQEQDVDLVQKYLEKYYNLKNDGRQVEKRRNSGPVVEKLKQMQEFFGLKVTGKPDAETLKVMKQPRCGVPDVAQFVLTEGNPRWEQTHLTYRIENYTPDLPRADVPHAIEKAFQLWSNVTPLTFTKVSEGQADIMISFVRGDHRDNSPFDGPGGNLAHAFQPGPGIGGDAHFDEDERWTNNFREYNLHRVAAHELGHSLGLSHSTDIGALMYPSYTFSGDVQLAQDDIDGIQAIYGRSQNPVQPIGPQTPKACDSKLTFDAITTIRGEVMFFKDRFYMRTNPFYPEVELNFISVFWPQLPNGLEAAYEFADRDEVRFFKGNKYWAVQGQNVLHGYPKDIYSSFGFPRTVKHIDAALSEENTGKTYFFVANKYWRYDEYKRSMDPGYPKMIAHDFPGIGHKVDAVFMKDGFFYFFHGTRQYKFDPKTKRILTLQKANSWFNCRKN

SEQ ID NO: 1311 - protein, 450 aa, Artificial Sequence
  MMP-1 variant H113D
FPATLETQEQDVDLVQKYLEKYYNLKNDGRQVEKRRNSGPVVEKLKQMQEFFGLKVTGKPDAETLKVMKQPRCGVPDVAQFVLTEGNPRWEQTHLTYRIENYTPDLPRADVDDAIEKAFQLWSNVTPLTFTKVSEGQADIMISFVRGDHRDNSPFDGPGGNLAHAFQPGPGIGGDAHFDEDERWTNNFREYNLHRVAAHELGHSLGLSHSTDIGALMYPSYTFSGDVQLAQDDIDGIQAIYGRSQNPVQPIGPQTPKACDSKLTFDAITTIRGEVMFFKDRFYMRTNPFYPEVELNFISVFWPQLPNGLEAAYEFADRDEVRFFKGNKYWAVQGQNVLHGYPKDIYSSFGFPRTVKHIDAALSEENTGKTYFFVANKYWRYDEYKRSMDPGYPKMIAHDFPGIGHKVDAVFMKDGFFYFFHGTRQYKFDPKTKRILTLQKANSWFNCRKN

SEQ ID NO: 1312 - protein, 450 aa, Artificial Sequence
  MMP-1 variant H113E
FPATLETQEQDVDLVQKYLEKYYNLKNDGRQVEKRRNSGPVVEKLKQMQEFFGLKVTGKPDAETLKVMKQPRCGVPDVAQFVLTEGNPRWEQTHLTYRIENYTPDLPRADVDEAIEKAFQLWSNVTPLTFTKVSEGQADIMISFVRGDHRDNSPFDGPGGNLAHAFQPGPGIGGDAHFDEDERWTNNFREYNLHRVAAHELGHSLGLSHSTDIGALMYPSYTFSGDVQLAQDDIDGIQAIYGRSQNPVQPIGPQTPKACDSKLTFDAITTIRGEVMFFKDRFYMRTNPFYPEVELNFISVFWPQLPNGLEAAYEFADRDEVRFFKGNKYWAVQGQNVLHGYPKDIYSSFGFPRTVKHIDAALSEENTGKTYFFVANKYWRYDEYKRSMDPGYPKMIAHDFPGIGHKVDAVFMKDGFFYFFHGTRQYKFDPKTKRILTLQKANSWFNCRKN

SEQ ID NO: 1313 - protein, 450 aa, Artificial Sequence
  MMP-1 variant H113K
FPATLETQEQDVDLVQKYLEKYYNLKNDGRQVEKRRNSGPVVEKLKQMQEFFGLKVTGKPDAETLKVMKQPRCGVPDVAQFVLTEGNPRWEQTHLTYRIENYTPDLPRADVDKAIEKAFQLWSNVTPLTFTKVSEGQADIMISFVRGDHRDNSPFDGPGGNLAHAFQPGPGIGGDAHFDEDERWTNNFREYNLHRVAAHELGHSLGLSHSTDIGALMYPSYTFSGDVQLAQDDIDGIQAIYGRSQNPVQPIGPQTPKACDSKLTFDAITTIRGEVMFFKDRFYMRTNPFYPEVELNFISVFWPQLPNGLEAAYEFADRDEVRFFKGNKYWAVQGQNVLHGYPKDIYSSFGFPRTVKHIDAALSEENTGKTYFFVANKYWRYDEYKRSMDPGYPKMIAHDFPGIGHKVDAVFMKDGFFYFFHGTRQYKFDPKTKRILTLQKANSWFNCRKN

SEQ ID NO: 1314 - protein, 450 aa, Artificial Sequence
  MMP-1 variant H113R
FPATLETQEQDVDLVQKYLEKYYNLKNDGRQVEKRRNSGPVVEKLKQMQEFFGLKVTGKPDAETLKVMKQPRCGVPDVAQFVLTEGNPRWEQTHLTYRIENYTPDLPRADVDRAIEKAFQLWSNVTPLTFTKVSEGQADIMISFVRGDHRDNSPFDGPGGNLAHAFQPGPGIGGDAHFDEDERWTNNFREYNLHRVAAHELGHSLGLSHSTDIGALMYPSYTFSGDVQLAQDDIDGIQAIYGRSQNPVQPIGPQTPKACDSKLTFDAITTIRGEVMFFKDRFYMRTNPFYPEVELNFISVFWPQLPNGLEAAYEFADRDEVRFFKGNKYWAVQGQNVLHGYPKDIYSSFGFPRTVKHIDAALSEENTGKTYFFVANKYWRYDEYKRSMDPGYPKMIAHDFPGIGHKVDAVFMKDGFFYFFHGTRQYKFDPKTKRILTLQKANSWFNCRKN

SEQ ID NO: 1315 - protein, 450 aa, Artificial Sequence
  MMP-1 variant H113C
FPATLETQEQDVDLVQKYLEKYYNLKNDGRQVEKRRNSGPVVEKLKQMQEFFGLKVTGKPDAETLKVMKQPRCGVPDVAQFVLTEGNPRWEQTHLTYRIENYTPDLPRADVDCAIEKAFQLWSNVTPLTFTKVSEGQADIMISFVRGDHRDNSPFDGPGGNLAHAFQPGPGIGGDAHFDEDERWTNNFREYNLHRVAAHELGHSLGLSHSTDIGALMYPSYTFSGDVQLAQDDIDGIQAIYGRSQNPVQPIGPQTPKACDSKLTFDAITTIRGEVMFFKDRFYMRTNPFYPEVELNFISVFWPQLPNGLEAAYEFADRDEVRFFKGNKYWAVQGQNVLHGYPKDIYSSFGFPRTVKHIDAALSEENTGKTYFFVANKYWRYDEYKRSMDPGYPKMIAHDFPGIGHKVDAVFMKDGFFYFFHGTRQYKFDPKTKRILTLQKANSWFNCRKN

SEQ ID NO: 1316 - protein, 450 aa, Artificial Sequence
  MMP-1 variant H113N
FPATLETQEQDVDLVQKYLEKYYNLKNDGRQVEKRRNSGPVVEKLKQMQEFFGLKVTGKPDAETLKVMKQPRCGVPDVAQFVLTEGNPRWEQTHLTYRIENYTPDLPRADVDNAIEKAFQLWSNVTPLTFTKVSEGQADIMISFVRGDHRDNSPFDGPGGNLAHAFQPGPGIGGDAHFDEDERWTNNFREYNLHRVAAHELGHSLGLSHSTDIGALMYPSYTFSGDVQLAQDDIDGIQAIYGRSQNPVQPIGPQTPKACDSKLTFDAITTIRGEVMFFKDRFYMRTNPFYPEVELNFISVFWPQLPNGLEAAYEFADRDEVRFFKGNKYWAVQGQNVLHGYPKDIYSSFGFPRTVKHIDAALSEENTGKTYFFVANKYWRYDEYKRSMDPGYPKMIAHDFPGIGHKVDAVFMKDGFFYFFHGTRQYKFDPKTKRILTLQKANSWFNCRKN

SEQ ID NO: 1317 - protein, 450 aa, Artificial Sequence
  MMP-1 variant H113Q
FPATLETQEQDVDLVQKYLEKYYNLKNDGRQVEKRRNSGPVVEKLKQMQEFFGLKVTGKPDAETLKVMKQPRCGVPDVAQFVLTEGNPRWEQTHLTYRIENYTPDLPRADVDQAIEKAFQLWSNVTPLTFTKVSEGQADIMISFVRGDHRDNSPFDGPGGNLAHAFQPGPGIGGDAHFDEDERWTNNFREYNLHRVAAHELGHSLGLSHSTDIGALMYPSYTFSGDVQLAQDDIDGIQAIYGRSQNPVQPIGPQTPKACDSKLTFDAITTIRGEVMFFKDRFYMRTNPFYPEVELNFISVFWPQLPNGLEAAYEFADRDEVRFFKGNKYWAVQGQNVLHGYPKDIYSSFGFPRTVKHIDAALSEENTGKTYFFVANKYWRYDEYKRSMDPGYPKMIAHDFPGIGHKVDAVFMKDGFFYFFHGTRQYKFDPKTKRILTLQKANSWFNCRKN

SEQ ID NO: 1318 - protein, 450 aa, Artificial Sequence
  MMP-1 variant H113T
FPATLETQEQDVDLVQKYLEKYYNLKNDGRQVEKRRNSGPVVEKLKQMQEFFGLKVTGKPDAETLKVMKQPRCGVPDVAQFVLTEGNPRWEQTHLTYRIENYTPDLPRADVDTAIEKAFQLWSNVTPLTFTKVSEGQADIMISFVRGDHRDNSPFDGPGGNLAHAFQPGPGIGGDAHFDEDERWTNNFREYNLHRVAAHELGHSLGLSHSTDIGALMYPSYTFSGDVQLAQDDIDGIQAIYGRSQNPVQPIGPQTPKACDSKLTFDAITTIRGEVMFFKDRFYMRTNPFYPEVELNFISVFWPQLPNGLEAAYEFADRDEVRFFKGNKYWAVQGQNVLHGYPKDIYSSFGFPRTVKHIDAALSEENTGKTYFFVANKYWRYDEYKRSMDPGYPKMIAHDFPGIGHKVDAVFMKDGFFYFFHGTRQYKFDPKTKRILTLQKANSWFNCRKN

SEQ ID NO: 1319 - protein, 450 aa, Artificial Sequence
  MMP-1 variant H113Y
FPATLETQEQDVDLVQKYLEKYYNLKNDGRQVEKRRNSGPVVEKLKQMQEFFGLKVTGKPDAETLKVMKQPRCGVPDVAQFVLTEGNPRWEQTHLTYRIENYTPDLPRADVDYAIEKAFQLWSNVTPLTFTKVSEGQADIMISFVRGDHRDNSPFDGPGGNLAHAFQPGPGIGGDAHFDEDERWTNNFREYNLHRVAAHELGHSLGLSHSTDIGALMYPSYTFSGDVQLAQDDIDGIQAIYGRSQNPVQPIGPQTPKACDSKLTFDAITTIRGEVMFFKDRFYMRTNPFYPEVELNFISVFWPQLPNGLEAAYEFADRDEVRFFKGNKYWAVQGQNVLHGYPKDIYSSFGFPRTVKHIDAALSEENTGKTYFFVANKYWRYDEYKRSMDPGYPKMIAHDFPGIGHKVDAVFMKDGFFYFFHGTRQYKFDPKTKRILTLQKANSWFNCRKN

SEQ ID NO: 1320 - protein, 450 aa, Artificial Sequence
  MMP-1 variant H113S
FPATLETQEQDVDLVQKYLEKYYNLKNDGRQVEKRRNSGPVVEKLKQMQEFFGLKVTGKPDAETLKVMKQPRCGVPDVAQFVLTEGNPRWEQTHLTYRIENYTPDLPRADVDSAIEKAFQLWSNVTPLTFTKVSEGQADIMISFVRGDHRDNSPFDGPGGNLAHAFQPGPGIGGDAHFDEDERWTNNFREYNLHRVAAHELGHSLGLSHSTDIGALMYPSYTFSGDVQLAQDDIDGIQAIYGRSQNPVQPIGPQTPKACDSKLTFDAITTIRGEVMFFKDRFYMRTNPFYPEVELNFISVFWPQLPNGLEAAYEFADRDEVRFFKGNKYWAVQGQNVLHGYPKDIYSSFGFPRTVKHIDAALSEENTGKTYFFVANKYWRYDEYKRSMDPGYPKMIAHDFPGIGHKVDAVFMKDGFFYFFHGTRQYKFDPKTKRILTLQKANSWFNCRKN

SEQ ID NO: 1321 - protein, 450 aa, Artificial Sequence
  MMP-1 variant H113G
FPATLETQEQDVDLVQKYLEKYYNLKNDGRQVEKRRNSGPVVEKLKQMQEFFGLKVTGKPDAETLKVMKQPRCGVPDVAQFVLTEGNPRWEQTHLTYRIENYTPDLPRADVDGAIEKAFQLWSNVTPLTFTKVSEGQADIMISFVRGDHRDNSPFDGPGGNLAHAFQPGPGIGGDAHFDEDERWTNNFREYNLHRVAAHELGHSLGLSHSTDIGALMYPSYTFSGDVQLAQDDIDGIQAIYGRSQNPVQPIGPQTPKACDSKLTFDAITTIRGEVMFFKDRFYMRTNPFYPEVELNFISVFWPQLPNGLEAAYEFADRDEVRFFKGNKYWAVQGQNVLHGYPKDIYSSFGFPRTVKHIDAALSEENTGKTYFFVANKYWRYDEYKRSMDPGYPKMIAHDFPGIGHKVDAVFMKDGFFYFFHGTRQYKFDPKTKRILTLQKANSWFNCRKN

SEQ ID NO: 1322 - protein, 450 aa, Artificial Sequence
  MMP-1 variant H113F
FPATLETQEQDVDLVQKYLEKYYNLKNDGRQVEKRRNSGPVVEKLKQMQEFFGLKVTGKPDAETLKVMKQPRCGVPDVAQFVLTEGNPRWEQTHLTYRIENYTPDLPRADVDFAIEKAFQLWSNVTPLTFTKVSEGQADIMISFVRGDHRDNSPFDGPGGNLAHAFQPGPGIGGDAHFDEDERWTNNFREYNLHRVAAHELGHSLGLSHSTDIGALMYPSYTFSGDVQLAQDDIDGIQAIYGRSQNPVQPIGPQTPKACDSKLTFDAITTIRGEVMFFKDRFYMRTNPFYPEVELNFISVFWPQLPNGLEAAYEFADRDEVRFFKGNKYWAVQGQNVLHGYPKDIYSSFGFPRTVKHIDAALSEENTGKTYFFVANKYWRYDEYKRSMDPGYPKMIAHDFPGIGHKVDAVFMKDGFFYFFHGTRQYKFDPKTKRILTLQKANSWFNCRKN

SEQ ID NO: 1323 - protein, 450 aa, Artificial Sequence
  MMP-1 variant H113M
FPATLETQEQDVDLVQKYLEKYYNLKNDGRQVEKRRNSGPVVEKLKQMQEFFGLKVTGKPDAETLKVMKQPRCGVPDVAQFVLTEGNPRWEQTHLTYRIENYTPDLPRADVDMAIEKAFQLWSNVTPLTFTKVSEGQADIMISFVRGDHRDNSPFDGPGGNLAHAFQPGPGIGGDAHFDEDERWTNNFREYNLHRVAAHELGHSLGLSHSTDIGALMYPSYTFSGDVQLAQDDIDGIQAIYGRSQNPVQPIGPQTPKACDSKLTFDAITTIRGEVMFFKDRFYMRTNPFYPEVELNFISVFWPQLPNGLEAAYEFADRDEVRFFKGNKYWAVQGQNVLHGYPKDIYSSFGFPRTVKHIDAALSEENTGKTYFFVANKYWRYDEYKRSMDPGYPKMIAHDFPGIGHKVDAVFMKDGFFYFFHGTRQYKFDPKTKRILTLQKANSWFNCRKN

SEQ ID NO: 1324 - protein, 450 aa, Artificial Sequence
  MMP-1 variant H113W
FPATLETQEQDVDLVQKYLEKYYNLKNDGRQVEKRRNSGPVVEKLKQMQEFFGLKVTGKPDAETLKVMKQPRCGVPDVAQFVLTEGNPRWEQTHLTYRIENYTPDLPRADVDWAIEKAFQLWSNVTPLTFTKVSEGQADIMISFVRGDHRDNSPFDGPGGNLAHAFQPGPGIGGDAHFDEDERWTNNFREYNLHRVAAHELGHSLGLSHSTDIGALMYPSYTFSGDVQLAQDDIDGIQAIYGRSQNPVQPIGPQTPKACDSKLTFDAITTIRGEVMFFKDRFYMRTNPFYPEVELNFISVFWPQLPNGLEAAYEFADRDEVRFFKGNKYWAVQGQNVLHGYPKDIYSSFGFPRTVKHIDAALSEENTGKTYFFVANKYWRYDEYKRSMDPGYPKMIAHDFPGIGHKVDAVFMKDGFFYFFHGTRQYKFDPKTKRILTLQKANSWFNCRKN

SEQ ID NO: 1325 - protein, 450 aa, Artificial Sequence
  MMP-1 variant H113I
FPATLETQEQDVDLVQKYLEKYYNLKNDGRQVEKRRNSGPVVEKLKQMQEFFGLKVTGKPDAETLKVMKQPRCGVPDVAQFVLTEGNPRWEQTHLTYRIENYTPDLPRADVDIAIEKAFQLWSNVTPLTFTKVSEGQADIMISFVRGDHRDNSPFDGPGGNLAHAFQPGPGIGGDAHFDEDERWTNNFREYNLHRVAAHELGHSLGLSHSTDIGALMYPSYTFSGDVQLAQDDIDGIQAIYGRSQNPVQPIGPQTPKACDSKLTFDAITTIRGEVMFFKDRFYMRTNPFYPEVELNFISVFWPQLPNGLEAAYEFADRDEVRFFKGNKYWAVQGQNVLHGYPKDIYSSFGFPRTVKHIDAALSEENTGKTYFFVANKYWRYDEYKRSMDPGYPKMIAHDFPGIGHKVDAVFMKDGFFYFFHGTRQYKFDPKTKRILTLQKANSWFNCRKN

SEQ ID NO: 1326 - protein, 450 aa, Artificial Sequence
  MMP-1 variant H113V
FPATLETQEQDVDLVQKYLEKYYNLKNDGRQVEKRRNSGPVVEKLKQMQEFFGLKVTGKPDAETLKVMKQPRCGVPDVAQFVLTEGNPRWEQTHLTYRIENYTPDLPRADVDVAIEKAFQLWSNVTPLTFTKVSEGQADIMISFVRGDHRDNSPFDGPGGNLAHAFQPGPGIGGDAHFDEDERWTNNFREYNLHRVAAHELGHSLGLSHSTDIGALMYPSYTFSGDVQLAQDDIDGIQAIYGRSQNPVQPIGPQTPKACDSKLTFDAITTIRGEVMFFKDRFYMRTNPFYPEVELNFISVFWPQLPNGLEAAYEFADRDEVRFFKGNKYWAVQGQNVLHGYPKDIYSSFGFPRTVKHIDAALSEENTGKTYFFVANKYWRYDEYKRSMDPGYPKMIAHDFPGIGHKVDAVFMKDGFFYFFHGTRQYKFDPKTKRILTLQKANSWFNCRKN

SEQ ID NO: 1327 - protein, 450 aa, Artificial Sequence
  MMP-1 variant H113L
FPATLETQEQDVDLVQKYLEKYYNLKNDGRQVEKRRNSGPVVEKLKQMQEFFGLKVTGKPDAETLKVMKQPRCGVPDVAQFVLTEGNPRWEQTHLTYRIENYTPDLPRADVDLAIEKAFQLWSNVTPLTFTKVSEGQADIMISFVRGDHRDNSPFDGPGGNLAHAFQPGPGIGGDAHFDEDERWTNNFREYNLHRVAAHELGHSLGLSHSTDIGALMYPSYTFSGDVQLAQDDIDGIQAIYGRSQNPVQPIGPQTPKACDSKLTFDAITTIRGEVMFFKDRFYMRTNPFYPEVELNFISVFWPQLPNGLEAAYEFADRDEVRFFKGNKYWAVQGQNVLHGYPKDIYSSFGFPRTVKHIDAALSEENTGKTYFFVANKYWRYDEYKRSMDPGYPKMIAHDFPGIGHKVDAVFMKDGFFYFFHGTRQYKFDPKTKRILTLQKANSWFNCRKN

SEQ ID NO: 1328 - protein, 450 aa, Artificial Sequence
  MMP-1 variant H113A
FPATLETQEQDVDLVQKYLEKYYNLKNDGRQVEKRRNSGPVVEKLKQMQEFFGLKVTGKPDAETLKVMKQPRCGVPDVAQFVLTEGNPRWEQTHLTYRIENYTPDLPRADVDAAIEKAFQLWSNVTPLTFTKVSEGQADIMISFVRGDHRDNSPFDGPGGNLAHAFQPGPGIGGDAHFDEDERWTNNFREYNLHRVAAHELGHSLGLSHSTDIGALMYPSYTFSGDVQLAQDDIDGIQAIYGRSQNPVQPIGPQTPKACDSKLTFDAITTIRGEVMFFKDRFYMRTNPFYPEVELNFISVFWPQLPNGLEAAYEFADRDEVRFFKGNKYWAVQGQNVLHGYPKDIYSSFGFPRTVKHIDAALSEENTGKTYFFVANKYWRYDEYKRSMDPGYPKMIAHDFPGIGHKVDAVFMKDGFFYFFHGTRQYKFDPKTKRILTLQKANSWFNCRKN

SEQ ID NO: 1329 - protein, 450 aa, Artificial Sequence
  MMP-1 variant H113P
FPATLETQEQDVDLVQKYLEKYYNLKNDGRQVEKRRNSGPVVEKLKQMQEFFGLKVTGKPDAETLKVMKQPRCGVPDVAQFVLTEGNPRWEQTHLTYRIENYTPDLPRADVDPAIEKAFQLWSNVTPLTFTKVSEGQADIMISFVRGDHRDNSPFDGPGGNLAHAFQPGPGIGGDAHFDEDERWTNNFREYNLHRVAAHELGHSLGLSHSTDIGALMYPSYTFSGDVQLAQDDIDGIQAIYGRSQNPVQPIGPQTPKACDSKLTFDAITTIRGEVMFFKDRFYMRTNPFYPEVELNFISVFWPQLPNGLEAAYEFADRDEVRFFKGNKYWAVQGQNVLHGYPKDIYSSFGFPRTVKHIDAALSEENTGKTYFFVANKYWRYDEYKRSMDPGYPKMIAHDFPGIGHKVDAVFMKDGFFYFFHGTRQYKFDPKTKRILTLQKANSWFNCRKN

SEQ ID NO: 1330 - protein, 450 aa, Artificial Sequence
  MMP-1 variant A114D
FPATLETQEQDVDLVQKYLEKYYNLKNDGRQVEKRRNSGPVVEKLKQMQEFFGLKVTGKPDAETLKVMKQPRCGVPDVAQFVLTEGNPRWEQTHLTYRIENYTPDLPRADVDHDIEKAFQLWSNVTPLTFTKVSEGQADIMISFVRGDHRDNSPFDGPGGNLAHAFQPGPGIGGDAHFDEDERWTNNFREYNLHRVAAHELGHSLGLSHSTDIGALMYPSYTFSGDVQLAQDDIDGIQAIYGRSQNPVQPIGPQTPKACDSKLTFDAITTIRGEVMFFKDRFYMRTNPFYPEVELNFISVFWPQLPNGLEAAYEFADRDEVRFFKGNKYWAVQGQNVLHGYPKDIYSSFGFPRTVKHIDAALSEENTGKTYFFVANKYWRYDEYKRSMDPGYPKMIAHDFPGIGHKVDAVFMKDGFFYFFHGTRQYKFDPKTKRILTLQKANSWFNCRKN

SEQ ID NO: 1331 - protein, 450 aa, Artificial Sequence
  MMP-1 variant A114E
FPATLETQEQDVDLVQKYLEKYYNLKNDGRQVEKRRNSGPVVEKLKQMQEFFGLKVTGKPDAETLKVMKQPRCGVPDVAQFVLTEGNPRWEQTHLTYRIENYTPDLPRADVDHEIEKAFQLWSNVTPLTFTKVSEGQADIMISFVRGDHRDNSPFDGPGGNLAHAFQPGPGIGGDAHFDEDERWTNNFREYNLHRVAAHELGHSLGLSHSTDIGALMYPSYTFSGDVQLAQDDIDGIQAIYGRSQNPVQPIGPQTPKACDSKLTFDAITTIRGEVMFFKDRFYMRTNPFYPEVELNFISVFWPQLPNGLEAAYEFADRDEVRFFKGNKYWAVQGQNVLHGYPKDIYSSFGFPRTVKHIDAALSEENTGKTYFFVANKYWRYDEYKRSMDPGYPKMIAHDFPGIGHKVDAVFMKDGFFYFFHGTRQYKFDPKTKRILTLQKANSWFNCRKN

SEQ ID NO: 1332 - protein, 450 aa, Artificial Sequence
  MMP-1 variant A114H
FPATLETQEQDVDLVQKYLEKYYNLKNDGRQVEKRRNSGPVVEKLKQMQEFFGLKVTGKPDAETLKVMKQPRCGVPDVAQFVLTEGNPRWEQTHLTYRIENYTPDLPRADVDHHIEKAFQLWSNVTPLTFTKVSEGQADIMISFVRGDHRDNSPFDGPGGNLAHAFQPGPGIGGDAHFDEDERWTNNFREYNLHRVAAHELGHSLGLSHSTDIGALMYPSYTFSGDVQLAQDDIDGIQAIYGRSQNPVQPIGPQTPKACDSKLTFDAITTIRGEVMFFKDRFYMRTNPFYPEVELNFISVFWPQLPNGLEAAYEFADRDEVRFFKGNKYWAVQGQNVLHGYPKDIYSSFGFPRTVKHIDAALSEENTGKTYFFVANKYWRYDEYKRSMDPGYPKMIAHDFPGIGHKVDAVFMKDGFFYFFHGTRQYKFDPKTKRILTLQKANSWFNCRKN

SEQ ID NO: 1333 - protein, 450 aa, Artificial Sequence
  MMP-1 variant A114K
FPATLETQEQDVDLVQKYLEKYYNLKNDGRQVEKRRNSGPVVEKLKQMQEFFGLKVTGKPDAETLKVMKQPRCGVPDVAQFVLTEGNPRWEQTHLTYRIENYTPDLPRADVDHKIEKAFQLWSNVTPLTFTKVSEGQADIMISFVRGDHRDNSPFDGPGGNLAHAFQPGPGIGGDAHFDEDERWTNNFREYNLHRVAAHELGHSLGLSHSTDIGALMYPSYTFSGDVQLAQDDIDGIQAIYGRSQNPVQPIGPQTPKACDSKLTFDAITTIRGEVMFFKDRFYMRTNPFYPEVELNFISVFWPQLPNGLEAAYEFADRDEVRFFKGNKYWAVQGQNVLHGYPKDIYSSFGFPRTVKHIDAALSEENTGKTYFFVANKYWRYDEYKRSMDPGYPKMIAHDFPGIGHKVDAVFMKDGFFYFFHGTRQYKFDPKTKRILTLQKANSWFNCRKN

SEQ ID NO: 1334 - protein, 450 aa, Artificial Sequence
  MMP-1 variant A114R
FPATLETQEQDVDLVQKYLEKYYNLKNDGRQVEKRRNSGPVVEKLKQMQEFFGLKVTGKPDAETLKVMKQPRCGVPDVAQFVLTEGNPRWEQTHLTYRIENYTPDLPRADVDHRIEKAFQLWSNVTPLTFTKVSEGQADIMISFVRGDHRDNSPFDGPGGNLAHAFQPGPGIGGDAHFDEDERWTNNFREYNLHRVAAHELGHSLGLSHSTDIGALMYPSYTFSGDVQLAQDDIDGIQAIYGRSQNPVQPIGPQTPKACDSKLTFDAITTIRGEVMFFKDRFYMRTNPFYPEVELNFISVFWPQLPNGLEAAYEFADRDEVRFFKGNKYWAVQGQNVLHGYPKDIYSSFGFPRTVKHIDAALSEENTGKTYFFVANKYWRYDEYKRSMDPGYPKMIAHDFPGIGHKVDAVFMKDGFFYFFHGTRQYKFDPKTKRILTLQKANSWFNCRKN

SEQ ID NO: 1335 - protein, 450 aa, Artificial Sequence
  MMP-1 variant A114C
FPATLETQEQDVDLVQKYLEKYYNLKNDGRQVEKRRNSGPVVEKLKQMQEFFGLKVTGKPDAETLKVMKQPRCGVPDVAQFVLTEGNPRWEQTHLTYRIENYTPDLPRADVDHCIEKAFQLWSNVTPLTFTKVSEGQADIMISFVRGDHRDNSPFDGPGGNLAHAFQPGPGIGGDAHFDEDERWTNNFREYNLHRVAAHELGHSLGLSHSTDIGALMYPSYTFSGDVQLAQDDIDGIQAIYGRSQNPVQPIGPQTPKACDSKLTFDAITTIRGEVMFFKDRFYMRTNPFYPEVELNFISVFWPQLPNGLEAAYEFADRDEVRFFKGNKYWAVQGQNVLHGYPKDIYSSFGFPRTVKHIDAALSEENTGKTYFFVANKYWRYDEYKRSMDPGYPKMIAHDFPGIGHKVDAVFMKDGFFYFFHGTRQYKFDPKTKRILTLQKANSWFNCRKN

SEQ ID NO: 1336 - protein, 450 aa, Artificial Sequence
  MMP-1 variant A114N
FPATLETQEQDVDLVQKYLEKYYNLKNDGRQVEKRRNSGPVVEKLKQMQEFFGLKVTGKPDAETLKVMKQPRCGVPDVAQFVLTEGNPRWEQTHLTYRIENYTPDLPRADVDHNIEKAFQLWSNVTPLTFTKVSEGQADIMISFVRGDHRDNSPFDGPGGNLAHAFQPGPGIGGDAHFDEDERWTNNFREYNLHRVAAHELGHSLGLSHSTDIGALMYPSYTFSGDVQLAQDDIDGIQAIYGRSQNPVQPIGPQTPKACDSKLTFDAITTIRGEVMFFKDRFYMRTNPFYPEVELNFISVFWPQLPNGLEAAYEFADRDEVRFFKGNKYWAVQGQNVLHGYPKDIYSSFGFPRTVKHIDAALSEENTGKTYFFVANKYWRYDEYKRSMDPGYPKMIAHDFPGIGHKVDAVFMKDGFFYFFHGTRQYKFDPKTKRILTLQKANSWFNCRKN

SEQ ID NO: 1337 - protein, 450 aa, Artificial Sequence
  MMP-1 variant A114Q
FPATLETQEQDVDLVQKYLEKYYNLKNDGRQVEKRRNSGPVVEKLKQMQEFFGLKVTGKPDAETLKVMKQPRCGVPDVAQFVLTEGNPRWEQTHLTYRIENYTPDLPRADVDHQIEKAFQLWSNVTPLTFTKVSEGQADIMISFVRGDHRDNSPFDGPGGNLAHAFQPGPGIGGDAHFDEDERWTNNFREYNLHRVAAHELGHSLGLSHSTDIGALMYPSYTFSGDVQLAQDDIDGIQAIYGRSQNPVQPIGPQTPKACDSKLTFDAITTIRGEVMFFKDRFYMRTNPFYPEVELNFISVFWPQLPNGLEAAYEFADRDEVRFFKGNKYWAVQGQNVLHGYPKDIYSSFGFPRTVKHIDAALSEENTGKTYFFVANKYWRYDEYKRSMDPGYPKMIAHDFPGIGHKVDAVFMKDGFFYFFHGTRQYKFDPKTKRILTLQKANSWFNCRKN

SEQ ID NO: 1338 - protein, 450 aa, Artificial Sequence
  MMP-1 variant A114T
FPATLETQEQDVDLVQKYLEKYYNLKNDGRQVEKRRNSGPVVEKLKQMQEFFGLKVTGKPDAETLKVMKQPRCGVPDVAQFVLTEGNPRWEQTHLTYRIENYTPDLPRADVDHTIEKAFQLWSNVTPLTFTKVSEGQADIMISFVRGDHRDNSPFDGPGGNLAHAFQPGPGIGGDAHFDEDERWTNNFREYNLHRVAAHELGHSLGLSHSTDIGALMYPSYTFSGDVQLAQDDIDGIQAIYGRSQNPVQPIGPQTPKACDSKLTFDAITTIRGEVMFFKDRFYMRTNPFYPEVELNFISVFWPQLPNGLEAAYEFADRDEVRFFKGNKYWAVQGQNVLHGYPKDIYSSFGFPRTVKHIDAALSEENTGKTYFFVANKYWRYDEYKRSMDPGYPKMIAHDFPGIGHKVDAVFMKDGFFYFFHGTRQYKFDPKTKRILTLQKANSWFNCRKN

SEQ ID NO: 1339 - protein, 450 aa, Artificial Sequence
  MMP-1 variant A114Y
FPATLETQEQDVDLVQKYLEKYYNLKNDGRQVEKRRNSGPVVEKLKQMQEFFGLKVTGKPDAETLKVMKQPRCGVPDVAQFVLTEGNPRWEQTHLTYRIENYTPDLPRADVDHYIEKAFQLWSNVTPLTFTKVSEGQADIMISFVRGDHRDNSPFDGPGGNLAHAFQPGPGIGGDAHFDEDERWTNNFREYNLHRVAAHELGHSLGLSHSTDIGALMYPSYTFSGDVQLAQDDIDGIQAIYGRSQNPVQPIGPQTPKACDSKLTFDAITTIRGEVMFFKDRFYMRTNPFYPEVELNFISVFWPQLPNGLEAAYEFADRDEVRFFKGNKYWAVQGQNVLHGYPKDIYSSFGFPRTVKHIDAALSEENTGKTYFFVANKYWRYDEYKRSMDPGYPKMIAHDFPGIGHKVDAVFMKDGFFYFFHGTRQYKFDPKTKRILTLQKANSWFNCRKN

SEQ ID NO: 1340 - protein, 450 aa, Artificial Sequence
  MMP-1 variant A114S
FPATLETQEQDVDLVQKYLEKYYNLKNDGRQVEKRRNSGPVVEKLKQMQEFFGLKVTGKPDAETLKVMKQPRCGVPDVAQFVLTEGNPRWEQTHLTYRIENYTPDLPRADVDHSIEKAFQLWSNVTPLTFTKVSEGQADIMISFVRGDHRDNSPFDGPGGNLAHAFQPGPGIGGDAHFDEDERWTNNFREYNLHRVAAHELGHSLGLSHSTDIGALMYPSYTFSGDVQLAQDDIDGIQAIYGRSQNPVQPIGPQTPKACDSKLTFDAITTIRGEVMFFKDRFYMRTNPFYPEVELNFISVFWPQLPNGLEAAYEFADRDEVRFFKGNKYWAVQGQNVLHGYPKDIYSSFGFPRTVKHIDAALSEENTGKTYFFVANKYWRYDEYKRSMDPGYPKMIAHDFPGIGHKVDAVFMKDGFFYFFHGTRQYKFDPKTKRILTLQKANSWFNCRKN

SEQ ID NO: 1341 - protein, 450 aa, Artificial Sequence
  MMP-1 variant A114G
FPATLETQEQDVDLVQKYLEKYYNLKNDGRQVEKRRNSGPVVEKLKQMQEFFGLKVTGKPDAETLKVMKQPRCGVPDVAQFVLTEGNPRWEQTHLTYRIENYTPDLPRADVDHGIEKAFQLWSNVTPLTFTKVSEGQADIMISFVRGDHRDNSPFDGPGGNLAHAFQPGPGIGGDAHFDEDERWTNNFREYNLHRVAAHELGHSLGLSHSTDIGALMYPSYTFSGDVQLAQDDIDGIQAIYGRSQNPVQPIGPQTPKACDSKLTFDAITTIRGEVMFFKDRFYMRTNPFYPEVELNFISVFWPQLPNGLEAAYEFADRDEVRFFKGNKYWAVQGQNVLHGYPKDIYSSFGFPRTVKHIDAALSEENTGKTYFFVANKYWRYDEYKRSMDPGYPKMIAHDFPGIGHKVDAVFMKDGFFYFFHGTRQYKFDPKTKRILTLQKANSWFNCRKN

SEQ ID NO: 1342 - protein, 450 aa, Artificial Sequence
  MMP-1 variant A114F
FPATLETQEQDVDLVQKYLEKYYNLKNDGRQVEKRRNSGPVVEKLKQMQEFFGLKVTGKPDAETLKVMKQPRCGVPDVAQFVLTEGNPRWEQTHLTYRIENYTPDLPRADVDHFIEKAFQLWSNVTPLTFTKVSEGQADIMISFVRGDHRDNSPFDGPGGNLAHAFQPGPGIGGDAHFDEDERWTNNFREYNLHRVAAHELGHSLGLSHSTDIGALMYPSYTFSGDVQLAQDDIDGIQAIYGRSQNPVQPIGPQTPKACDSKLTFDAITTIRGEVMFFKDRFYMRTNPFYPEVELNFISVFWPQLPNGLEAAYEFADRDEVRFFKGNKYWAVQGQNVLHGYPKDIYSSFGFPRTVKHIDAALSEENTGKTYFFVANKYWRYDEYKRSMDPGYPKMIAHDFPGIGHKVDAVFMKDGFFYFFHGTRQYKFDPKTKRILTLQKANSWFNCRKN

SEQ ID NO: 1343 - protein, 450 aa, Artificial Sequence
  MMP-1 variant A114M
FPATLETQEQDVDLVQKYLEKYYNLKNDGRQVEKRRNSGPVVEKLKQMQEFFGLKVTGKPDAETLKVMKQPRCGVPDVAQFVLTEGNPRWEQTHLTYRIENYTPDLPRADVDHMIEKAFQLWSNVTPLTFTKVSEGQADIMISFVRGDHRDNSPFDGPGGNLAHAFQPGPGIGGDAHFDEDERWTNNFREYNLHRVAAHELGHSLGLSHSTDIGALMYPSYTFSGDVQLAQDDIDGIQAIYGRSQNPVQPIGPQTPKACDSKLTFDAITTIRGEVMFFKDRFYMRTNPFYPEVELNFISVFWPQLPNGLEAAYEFADRDEVRFFKGNKYWAVQGQNVLHGYPKDIYSSFGFPRTVKHIDAALSEENTGKTYFFVANKYWRYDEYKRSMDPGYPKMIAHDFPGIGHKVDAVFMKDGFFYFFHGTRQYKFDPKTKRILTLQKANSWFNCRKN

SEQ ID NO: 1344 - protein, 450 aa, Artificial Sequence
  MMP-1 variant A114W
FPATLETQEQDVDLVQKYLEKYYNLKNDGRQVEKRRNSGPVVEKLKQMQEFFGLKVTGKPDAETLKVMKQPRCGVPDVAQFVLTEGNPRWEQTHLTYRIENYTPDLPRADVDHWIEKAFQLWSNVTPLTFTKVSEGQADIMISFVRGDHRDNSPFDGPGGNLAHAFQPGPGIGGDAHFDEDERWTNNFREYNLHRVAAHELGHSLGLSHSTDIGALMYPSYTFSGDVQLAQDDIDGIQAIYGRSQNPVQPIGPQTPKACDSKLTFDAITTIRGEVMFFKDRFYMRTNPFYPEVELNFISVFWPQLPNGLEAAYEFADRDEVRFFKGNKYWAVQGQNVLHGYPKDIYSSFGFPRTVKHIDAALSEENTGKTYFFVANKYWRYDEYKRSMDPGYPKMIAHDFPGIGHKVDAVFMKDGFFYFFHGTRQYKFDPKTKRILTLQKANSWFNCRKN

SEQ ID NO: 1345 - protein, 450 aa, Artificial Sequence
  MMP-1 variant A114I
FPATLETQEQDVDLVQKYLEKYYNLKNDGRQVEKRRNSGPVVEKLKQMQEFFGLKVTGKPDAETLKVMKQPRCGVPDVAQFVLTEGNPRWEQTHLTYRIENYTPDLPRADVDHIIEKAFQLWSNVTPLTFTKVSEGQADIMISFVRGDHRDNSPFDGPGGNLAHAFQPGPGIGGDAHFDEDERWTNNFREYNLHRVAAHELGHSLGLSHSTDIGALMYPSYTFSGDVQLAQDDIDGIQAIYGRSQNPVQPIGPQTPKACDSKLTFDAITTIRGEVMFFKDRFYMRTNPFYPEVELNFISVFWPQLPNGLEAAYEFADRDEVRFFKGNKYWAVQGQNVLHGYPKDIYSSFGFPRTVKHIDAALSEENTGKTYFFVANKYWRYDEYKRSMDPGYPKMIAHDFPGIGHKVDAVFMKDGFFYFFHGTRQYKFDPKTKRILTLQKANSWFNCRKN

SEQ ID NO: 1346 - protein, 450 aa, Artificial Sequence
  MMP-1 variant A114V
FPATLETQEQDVDLVQKYLEKYYNLKNDGRQVEKRRNSGPVVEKLKQMQEFFGLKVTGKPDAETLKVMKQPRCGVPDVAQFVLTEGNPRWEQTHLTYRIENYTPDLPRADVDHVIEKAFQLWSNVTPLTFTKVSEGQADIMISFVRGDHRDNSPFDGPGGNLAHAFQPGPGIGGDAHFDEDERWTNNFREYNLHRVAAHELGHSLGLSHSTDIGALMYPSYTFSGDVQLAQDDIDGIQAIYGRSQNPVQPIGPQTPKACDSKLTFDAITTIRGEVMFFKDRFYMRTNPFYPEVELNFISVFWPQLPNGLEAAYEFADRDEVRFFKGNKYWAVQGQNVLHGYPKDIYSSFGFPRTVKHIDAALSEENTGKTYFFVANKYWRYDEYKRSMDPGYPKMIAHDFPGIGHKVDAVFMKDGFFYFFHGTRQYKFDPKTKRILTLQKANSWFNCRKN

SEQ ID NO: 1347 - protein, 450 aa, Artificial Sequence
  MMP-1 variant A114L
FPATLETQEQDVDLVQKYLEKYYNLKNDGRQVEKRRNSGPVVEKLKQMQEFFGLKVTGKPDAETLKVMKQPRCGVPDVAQFVLTEGNPRWEQTHLTYRIENYTPDLPRADVDHLIEKAFQLWSNVTPLTFTKVSEGQADIMISFVRGDHRDNSPFDGPGGNLAHAFQPGPGIGGDAHFDEDERWTNNFREYNLHRVAAHELGHSLGLSHSTDIGALMYPSYTFSGDVQLAQDDIDGIQAIYGRSQNPVQPIGPQTPKACDSKLTFDAITTIRGEVMFFKDRFYMRTNPFYPEVELNFISVFWPQLPNGLEAAYEFADRDEVRFFKGNKYWAVQGQNVLHGYPKDIYSSFGFPRTVKHIDAALSEENTGKTYFFVANKYWRYDEYKRSMDPGYPKMIAHDFPGIGHKVDAVFMKDGFFYFFHGTRQYKFDPKTKRILTLQKANSWFNCRKN

SEQ ID NO: 1348 - protein, 450 aa, Artificial Sequence
  MMP-1 variant A114P
FPATLETQEQDVDLVQKYLEKYYNLKNDGRQVEKRRNSGPVVEKLKQMQEFFGLKVTGKPDAETLKVMKQPRCGVPDVAQFVLTEGNPRWEQTHLTYRIENYTPDLPRADVDHPIEKAFQLWSNVTPLTFTKVSEGQADIMISFVRGDHRDNSPFDGPGGNLAHAFQPGPGIGGDAHFDEDERWTNNFREYNLHRVAAHELGHSLGLSHSTDIGALMYPSYTFSGDVQLAQDDIDGIQAIYGRSQNPVQPIGPQTPKACDSKLTFDAITTIRGEVMFFKDRFYMRTNPFYPEVELNFISVFWPQLPNGLEAAYEFADRDEVRFFKGNKYWAVQGQNVLHGYPKDIYSSFGFPRTVKHIDAALSEENTGKTYFFVANKYWRYDEYKRSMDPGYPKMIAHDFPGIGHKVDAVFMKDGFFYFFHGTRQYKFDPKTKRILTLQKANSWFNCRKN

SEQ ID NO: 1349 - protein, 450 aa, Artificial Sequence
  MMP-1 variant I115D
FPATLETQEQDVDLVQKYLEKYYNLKNDGRQVEKRRNSGPVVEKLKQMQEFFGLKVTGKPDAETLKVMKQPRCGVPDVAQFVLTEGNPRWEQTHLTYRIENYTPDLPRADVDHADEKAFQLWSNVTPLTFTKVSEGQADIMISFVRGDHRDNSPFDGPGGNLAHAFQPGPGIGGDAHFDEDERWTNNFREYNLHRVAAHELGHSLGLSHSTDIGALMYPSYTFSGDVQLAQDDIDGIQAIYGRSQNPVQPIGPQTPKACDSKLTFDAITTIRGEVMFFKDRFYMRTNPFYPEVELNFISVFWPQLPNGLEAAYEFADRDEVRFFKGNKYWAVQGQNVLHGYPKDIYSSFGFPRTVKHIDAALSEENTGKTYFFVANKYWRYDEYKRSMDPGYPKMIAHDFPGIGHKVDAVFMKDGFFYFFHGTRQYKFDPKTKRILTLQKANSWFNCRKN

SEQ ID NO: 1350 - protein, 450 aa, Artificial Sequence
  MMP-1 variant I115E
FPATLETQEQDVDLVQKYLEKYYNLKNDGRQVEKRRNSGPVVEKLKQMQEFFGLKVTGKPDAETLKVMKQPRCGVPDVAQFVLTEGNPRWEQTHLTYRIENYTPDLPRADVDHAEEKAFQLWSNVTPLTFTKVSEGQADIMISFVRGDHRDNSPFDGPGGNLAHAFQPGPGIGGDAHFDEDERWTNNFREYNLHRVAAHELGHSLGLSHSTDIGALMYPSYTFSGDVQLAQDDIDGIQAIYGRSQNPVQPIGPQTPKACDSKLTFDAITTIRGEVMFFKDRFYMRTNPFYPEVELNFISVFWPQLPNGLEAAYEFADRDEVRFFKGNKYWAVQGQNVLHGYPKDIYSSFGFPRTVKHIDAALSEENTGKTYFFVANKYWRYDEYKRSMDPGYPKMIAHDFPGIGHKVDAVFMKDGFFYFFHGTRQYKFDPKTKRILTLQKANSWFNCRKN

SEQ ID NO: 1351 - protein, 450 aa, Artificial Sequence
  MMP-1 variant I115H
FPATLETQEQDVDLVQKYLEKYYNLKNDGRQVEKRRNSGPVVEKLKQMQEFFGLKVTGKPDAETLKVMKQPRCGVPDVAQFVLTEGNPRWEQTHLTYRIENYTPDLPRADVDHAHEKAFQLWSNVTPLTFTKVSEGQADIMISFVRGDHRDNSPFDGPGGNLAHAFQPGPGIGGDAHFDEDERWTNNFREYNLHRVAAHELGHSLGLSHSTDIGALMYPSYTFSGDVQLAQDDIDGIQAIYGRSQNPVQPIGPQTPKACDSKLTFDAITTIRGEVMFFKDRFYMRTNPFYPEVELNFISVFWPQLPNGLEAAYEFADRDEVRFFKGNKYWAVQGQNVLHGYPKDIYSSFGFPRTVKHIDAALSEENTGKTYFFVANKYWRYDEYKRSMDPGYPKMIAHDFPGIGHKVDAVFMKDGFFYFFHGTRQYKFDPKTKRILTLQKANSWFNCRKN

SEQ ID NO: 1352 - protein, 450 aa, Artificial Sequence
  MMP-1 variant I115K
FPATLETQEQDVDLVQKYLEKYYNLKNDGRQVEKRRNSGPVVEKLKQMQEFFGLKVTGKPDAETLKVMKQPRCGVPDVAQFVLTEGNPRWEQTHLTYRIENYTPDLPRADVDHAKEKAFQLWSNVTPLTFTKVSEGQADIMISFVRGDHRDNSPFDGPGGNLAHAFQPGPGIGGDAHFDEDERWTNNFREYNLHRVAAHELGHSLGLSHSTDIGALMYPSYTFSGDVQLAQDDIDGIQAIYGRSQNPVQPIGPQTPKACDSKLTFDAITTIRGEVMFFKDRFYMRTNPFYPEVELNFISVFWPQLPNGLEAAYEFADRDEVRFFKGNKYWAVQGQNVLHGYPKDIYSSFGFPRTVKHIDAALSEENTGKTYFFVANKYWRYDEYKRSMDPGYPKMIAHDFPGIGHKVDAVFMKDGFFYFFHGTRQYKFDPKTKRILTLQKANSWFNCRKN

SEQ ID NO: 1353 - protein, 450 aa, Artificial Sequence
  MMP-1 variant I115R
FPATLETQEQDVDLVQKYLEKYYNLKNDGRQVEKRRNSGPVVEKLKQMQEFFGLKVTGKPDAETLKVMKQPRCGVPDVAQFVLTEGNPRWEQTHLTYRIENYTPDLPRADVDHAREKAFQLWSNVTPLTFTKVSEGQADIMISFVRGDHRDNSPFDGPGGNLAHAFQPGPGIGGDAHFDEDERWTNNFREYNLHRVAAHELGHSLGLSHSTDIGALMYPSYTFSGDVQLAQDDIDGIQAIYGRSQNPVQPIGPQTPKACDSKLTFDAITTIRGEVMFFKDRFYMRTNPFYPEVELNFISVFWPQLPNGLEAAYEFADRDEVRFFKGNKYWAVQGQNVLHGYPKDIYSSFGFPRTVKHIDAALSEENTGKTYFFVANKYWRYDEYKRSMDPGYPKMIAHDFPGIGHKVDAVFMKDGFFYFFHGTRQYKFDPKTKRILTLQKANSWFNCRKN

SEQ ID NO: 1354 - protein, 450 aa, Artificial Sequence
  MMP-1 variant I115C
FPATLETQEQDVDLVQKYLEKYYNLKNDGRQVEKRRNSGPVVEKLKQMQEFFGLKVTGKPDAETLKVMKQPRCGVPDVAQFVLTEGNPRWEQTHLTYRIENYTPDLPRADVDHACEKAFQLWSNVTPLTFTKVSEGQADIMISFVRGDHRDNSPFDGPGGNLAHAFQPGPGIGGDAHFDEDERWTNNFREYNLHRVAAHELGHSLGLSHSTDIGALMYPSYTFSGDVQLAQDDIDGIQAIYGRSQNPVQPIGPQTPKACDSKLTFDAITTIRGEVMFFKDRFYMRTNPFYPEVELNFISVFWPQLPNGLEAAYEFADRDEVRFFKGNKYWAVQGQNVLHGYPKDIYSSFGFPRTVKHIDAALSEENTGKTYFFVANKYWRYDEYKRSMDPGYPKMIAHDFPGIGHKVDAVFMKDGFFYFFHGTRQYKFDPKTKRILTLQKANSWFNCRKN

SEQ ID NO: 1355 - protein, 450 aa, Artificial Sequence
  MMP-1 variant I115N
FPATLETQEQDVDLVQKYLEKYYNLKNDGRQVEKRRNSGPVVEKLKQMQEFFGLKVTGKPDAETLKVMKQPRCGVPDVAQFVLTEGNPRWEQTHLTYRIENYTPDLPRADVDHANEKAFQLWSNVTPLTFTKVSEGQADIMISFVRGDHRDNSPFDGPGGNLAHAFQPGPGIGGDAHFDEDERWTNNFREYNLHRVAAHELGHSLGLSHSTDIGALMYPSYTFSGDVQLAQDDIDGIQAIYGRSQNPVQPIGPQTPKACDSKLTFDAITTIRGEVMFFKDRFYMRTNPFYPEVELNFISVFWPQLPNGLEAAYEFADRDEVRFFKGNKYWAVQGQNVLHGYPKDIYSSFGFPRTVKHIDAALSEENTGKTYFFVANKYWRYDEYKRSMDPGYPKMIAHDFPGIGHKVDAVFMKDGFFYFFHGTRQYKFDPKTKRILTLQKANSWFNCRKN

SEQ ID NO: 1356 - protein, 450 aa, Artificial Sequence
  MMP-1 variant I115Q
FPATLETQEQDVDLVQKYLEKYYNLKNDGRQVEKRRNSGPVVEKLKQMQEFFGLKVTGKPDAETLKVMKQPRCGVPDVAQFVLTEGNPRWEQTHLTYRIENYTPDLPRADVDHAQEKAFQLWSNVTPLTFTKVSEGQADIMISFVRGDHRDNSPFDGPGGNLAHAFQPGPGIGGDAHFDEDERWTNNFREYNLHRVAAHELGHSLGLSHSTDIGALMYPSYTFSGDVQLAQDDIDGIQAIYGRSQNPVQPIGPQTPKACDSKLTFDAITTIRGEVMFFKDRFYMRTNPFYPEVELNFISVFWPQLPNGLEAAYEFADRDEVRFFKGNKYWAVQGQNVLHGYPKDIYSSFGFPRTVKHIDAALSEENTGKTYFFVANKYWRYDEYKRSMDPGYPKMIAHDFPGIGHKVDAVFMKDGFFYFFHGTRQYKFDPKTKRILTLQKANSWFNCRKN

SEQ ID NO: 1357 - protein, 450 aa, Artificial Sequence
  MMP-1 variant I115T
FPATLETQEQDVDLVQKYLEKYYNLKNDGRQVEKRRNSGPVVEKLKQMQEFFGLKVTGKPDAETLKVMKQPRCGVPDVAQFVLTEGNPRWEQTHLTYRIENYTPDLPRADVDHATEKAFQLWSNVTPLTFTKVSEGQADIMISFVRGDHRDNSPFDGPGGNLAHAFQPGPGIGGDAHFDEDERWTNNFREYNLHRVAAHELGHSLGLSHSTDIGALMYPSYTFSGDVQLAQDDIDGIQAIYGRSQNPVQPIGPQTPKACDSKLTFDAITTIRGEVMFFKDRFYMRTNPFYPEVELNFISVFWPQLPNGLEAAYEFADRDEVRFFKGNKYWAVQGQNVLHGYPKDIYSSFGFPRTVKHIDAALSEENTGKTYFFVANKYWRYDEYKRSMDPGYPKMIAHDFPGIGHKVDAVFMKDGFFYFFHGTRQYKFDPKTKRILTLQKANSWFNCRKN

SEQ ID NO: 1358 - protein, 450 aa, Artificial Sequence
  MMP-1 variant I115Y
FPATLETQEQDVDLVQKYLEKYYNLKNDGRQVEKRRNSGPVVEKLKQMQEFFGLKVTGKPDAETLKVMKQPRCGVPDVAQFVLTEGNPRWEQTHLTYRIENYTPDLPRADVDHAYEKAFQLWSNVTPLTFTKVSEGQADIMISFVRGDHRDNSPFDGPGGNLAHAFQPGPGIGGDAHFDEDERWTNNFREYNLHRVAAHELGHSLGLSHSTDIGALMYPSYTFSGDVQLAQDDIDGIQAIYGRSQNPVQPIGPQTPKACDSKLTFDAITTIRGEVMFFKDRFYMRTNPFYPEVELNFISVFWPQLPNGLEAAYEFADRDEVRFFKGNKYWAVQGQNVLHGYPKDIYSSFGFPRTVKHIDAALSEENTGKTYFFVANKYWRYDEYKRSMDPGYPKMIAHDFPGIGHKVDAVFMKDGFFYFFHGTRQYKFDPKTKRILTLQKANSWFNCRKN

SEQ ID NO: 1359 - protein, 450 aa, Artificial Sequence
  MMP-1 variant I115S
FPATLETQEQDVDLVQKYLEKYYNLKNDGRQVEKRRNSGPVVEKLKQMQEFFGLKVTGKPDAETLKVMKQPRCGVPDVAQFVLTEGNPRWEQTHLTYRIENYTPDLPRADVDHASEKAFQLWSNVTPLTFTKVSEGQADIMISFVRGDHRDNSPFDGPGGNLAHAFQPGPGIGGDAHFDEDERWTNNFREYNLHRVAAHELGHSLGLSHSTDIGALMYPSYTFSGDVQLAQDDIDGIQAIYGRSQNPVQPIGPQTPKACDSKLTFDAITTIRGEVMFFKDRFYMRTNPFYPEVELNFISVFWPQLPNGLEAAYEFADRDEVRFFKGNKYWAVQGQNVLHGYPKDIYSSFGFPRTVKHIDAALSEENTGKTYFFVANKYWRYDEYKRSMDPGYPKMIAHDFPGIGHKVDAVFMKDGFFYFFHGTRQYKFDPKTKRILTLQKANSWFNCRKN

SEQ ID NO: 1360 - protein, 450 aa, Artificial Sequence
  MMP-1 variant I115G
FPATLETQEQDVDLVQKYLEKYYNLKNDGRQVEKRRNSGPVVEKLKQMQEFFGLKVTGKPDAETLKVMKQPRCGVPDVAQFVLTEGNPRWEQTHLTYRIENYTPDLPRADVDHAGEKAFQLWSNVTPLTFTKVSEGQADIMISFVRGDHRDNSPFDGPGGNLAHAFQPGPGIGGDAHFDEDERWTNNFREYNLHRVAAHELGHSLGLSHSTDIGALMYPSYTFSGDVQLAQDDIDGIQAIYGRSQNPVQPIGPQTPKACDSKLTFDAITTIRGEVMFFKDRFYMRTNPFYPEVELNFISVFWPQLPNGLEAAYEFADRDEVRFFKGNKYWAVQGQNVLHGYPKDIYSSFGFPRTVKHIDAALSEENTGKTYFFVANKYWRYDEYKRSMDPGYPKMIAHDFPGIGHKVDAVFMKDGFFYFFHGTRQYKFDPKTKRILTLQKANSWFNCRKN

SEQ ID NO: 1361 - protein, 450 aa, Artificial Sequence
  MMP-1 variant I115F
FPATLETQEQDVDLVQKYLEKYYNLKNDGRQVEKRRNSGPVVEKLKQMQEFFGLKVTGKPDAETLKVMKQPRCGVPDVAQFVLTEGNPRWEQTHLTYRIENYTPDLPRADVDHAFEKAFQLWSNVTPLTFTKVSEGQADIMISFVRGDHRDNSPFDGPGGNLAHAFQPGPGIGGDAHFDEDERWTNNFREYNLHRVAAHELGHSLGLSHSTDIGALMYPSYTFSGDVQLAQDDIDGIQAIYGRSQNPVQPIGPQTPKACDSKLTFDAITTIRGEVMFFKDRFYMRTNPFYPEVELNFISVFWPQLPNGLEAAYEFADRDEVRFFKGNKYWAVQGQNVLHGYPKDIYSSFGFPRTVKHIDAALSEENTGKTYFFVANKYWRYDEYKRSMDPGYPKMIAHDFPGIGHKVDAVFMKDGFFYFFHGTRQYKFDPKTKRILTLQKANSWFNCRKN

SEQ ID NO: 1362 - protein, 450 aa, Artificial Sequence
  MMP-1 variant I115M
FPATLETQEQDVDLVQKYLEKYYNLKNDGRQVEKRRNSGPVVEKLKQMQEFFGLKVTGKPDAETLKVMKQPRCGVPDVAQFVLTEGNPRWEQTHLTYRIENYTPDLPRADVDHAMEKAFQLWSNVTPLTFTKVSEGQADIMISFVRGDHRDNSPFDGPGGNLAHAFQPGPGIGGDAHFDEDERWTNNFREYNLHRVAAHELGHSLGLSHSTDIGALMYPSYTFSGDVQLAQDDIDGIQAIYGRSQNPVQPIGPQTPKACDSKLTFDAITTIRGEVMFFKDRFYMRTNPFYPEVELNFISVFWPQLPNGLEAAYEFADRDEVRFFKGNKYWAVQGQNVLHGYPKDIYSSFGFPRTVKHIDAALSEENTGKTYFFVANKYWRYDEYKRSMDPGYPKMIAHDFPGIGHKVDAVFMKDGFFYFFHGTRQYKFDPKTKRILTLQKANSWFNCRKN

SEQ ID NO: 1363 - protein, 450 aa, Artificial Sequence
  MMP-1 variant I115W
FPATLETQEQDVDLVQKYLEKYYNLKNDGRQVEKRRNSGPVVEKLKQMQEFFGLKVTGKPDAETLKVMKQPRCGVPDVAQFVLTEGNPRWEQTHLTYRIENYTPDLPRADVDHAWEKAFQLWSNVTPLTFTKVSEGQADIMISFVRGDHRDNSPFDGPGGNLAHAFQPGPGIGGDAHFDEDERWTNNFREYNLHRVAAHELGHSLGLSHSTDIGALMYPSYTFSGDVQLAQDDIDGIQAIYGRSQNPVQPIGPQTPKACDSKLTFDAITTIRGEVMFFKDRFYMRTNPFYPEVELNFISVFWPQLPNGLEAAYEFADRDEVRFFKGNKYWAVQGQNVLHGYPKDIYSSFGFPRTVKHIDAALSEENTGKTYFFVANKYWRYDEYKRSMDPGYPKMIAHDFPGIGHKVDAVFMKDGFFYFFHGTRQYKFDPKTKRILTLQKANSWFNCRKN

SEQ ID NO: 1364 - protein, 450 aa, Artificial Sequence
  MMP-1 variant I115V
FPATLETQEQDVDLVQKYLEKYYNLKNDGRQVEKRRNSGPVVEKLKQMQEFFGLKVTGKPDAETLKVMKQPRCGVPDVAQFVLTEGNPRWEQTHLTYRIENYTPDLPRADVDHAVEKAFQLWSNVTPLTFTKVSEGQADIMISFVRGDHRDNSPFDGPGGNLAHAFQPGPGIGGDAHFDEDERWTNNFREYNLHRVAAHELGHSLGLSHSTDIGALMYPSYTFSGDVQLAQDDIDGIQAIYGRSQNPVQPIGPQTPKACDSKLTFDAITTIRGEVMFFKDRFYMRTNPFYPEVELNFISVFWPQLPNGLEAAYEFADRDEVRFFKGNKYWAVQGQNVLHGYPKDIYSSFGFPRTVKHIDAALSEENTGKTYFFVANKYWRYDEYKRSMDPGYPKMIAHDFPGIGHKVDAVFMKDGFFYFFHGTRQYKFDPKTKRILTLQKANSWFNCRKN

SEQ ID NO: 1365 - protein, 450 aa, Artificial Sequence
  MMP-1 variant I115L
FPATLETQEQDVDLVQKYLEKYYNLKNDGRQVEKRRNSGPVVEKLKQMQEFFGLKVTGKPDAETLKVMKQPRCGVPDVAQFVLTEGNPRWEQTHLTYRIENYTPDLPRADVDHALEKAFQLWSNVTPLTFTKVSEGQADIMISFVRGDHRDNSPFDGPGGNLAHAFQPGPGIGGDAHFDEDERWTNNFREYNLHRVAAHELGHSLGLSHSTDIGALMYPSYTFSGDVQLAQDDIDGIQAIYGRSQNPVQPIGPQTPKACDSKLTFDAITTIRGEVMFFKDRFYMRTNPFYPEVELNFISVFWPQLPNGLEAAYEFADRDEVRFFKGNKYWAVQGQNVLHGYPKDIYSSFGFPRTVKHIDAALSEENTGKTYFFVANKYWRYDEYKRSMDPGYPKMIAHDFPGIGHKVDAVFMKDGFFYFFHGTRQYKFDPKTKRILTLQKANSWFNCRKN

SEQ ID NO: 1366 - protein, 450 aa, Artificial Sequence
  MMP-1 variant I115A
FPATLETQEQDVDLVQKYLEKYYNLKNDGRQVEKRRNSGPVVEKLKQMQEFFGLKVTGKPDAETLKVMKQPRCGVPDVAQFVLTEGNPRWEQTHLTYRIENYTPDLPRADVDHAAEKAFQLWSNVTPLTFTKVSEGQADIMISFVRGDHRDNSPFDGPGGNLAHAFQPGPGIGGDAHFDEDERWTNNFREYNLHRVAAHELGHSLGLSHSTDIGALMYPSYTFSGDVQLAQDDIDGIQAIYGRSQNPVQPIGPQTPKACDSKLTFDAITTIRGEVMFFKDRFYMRTNPFYPEVELNFISVFWPQLPNGLEAAYEFADRDEVRFFKGNKYWAVQGQNVLHGYPKDIYSSFGFPRTVKHIDAALSEENTGKTYFFVANKYWRYDEYKRSMDPGYPKMIAHDFPGIGHKVDAVFMKDGFFYFFHGTRQYKFDPKTKRILTLQKANSWFNCRKN

SEQ ID NO: 1367 - protein, 450 aa, Artificial Sequence
  MMP-1 variant I115P
FPATLETQEQDVDLVQKYLEKYYNLKNDGRQVEKRRNSGPVVEKLKQMQEFFGLKVTGKPDAETLKVMKQPRCGVPDVAQFVLTEGNPRWEQTHLTYRIENYTPDLPRADVDHAPEKAFQLWSNVTPLTFTKVSEGQADIMISFVRGDHRDNSPFDGPGGNLAHAFQPGPGIGGDAHFDEDERWTNNFREYNLHRVAAHELGHSLGLSHSTDIGALMYPSYTFSGDVQLAQDDIDGIQAIYGRSQNPVQPIGPQTPKACDSKLTFDAITTIRGEVMFFKDRFYMRTNPFYPEVELNFISVFWPQLPNGLEAAYEFADRDEVRFFKGNKYWAVQGQNVLHGYPKDIYSSFGFPRTVKHIDAALSEENTGKTYFFVANKYWRYDEYKRSMDPGYPKMIAHDFPGIGHKVDAVFMKDGFFYFFHGTRQYKFDPKTKRILTLQKANSWFNCRKN

SEQ ID NO: 1368 - protein, 450 aa, Artificial Sequence
  MMP-1 variant E116D
FPATLETQEQDVDLVQKYLEKYYNLKNDGRQVEKRRNSGPVVEKLKQMQEFFGLKVTGKPDAETLKVMKQPRCGVPDVAQFVLTEGNPRWEQTHLTYRIENYTPDLPRADVDHAIDKAFQLWSNVTPLTFTKVSEGQADIMISFVRGDHRDNSPFDGPGGNLAHAFQPGPGIGGDAHFDEDERWTNNFREYNLHRVAAHELGHSLGLSHSTDIGALMYPSYTFSGDVQLAQDDIDGIQAIYGRSQNPVQPIGPQTPKACDSKLTFDAITTIRGEVMFFKDRFYMRTNPFYPEVELNFISVFWPQLPNGLEAAYEFADRDEVRFFKGNKYWAVQGQNVLHGYPKDIYSSFGFPRTVKHIDAALSEENTGKTYFFVANKYWRYDEYKRSMDPGYPKMIAHDFPGIGHKVDAVFMKDGFFYFFHGTRQYKFDPKTKRILTLQKANSWFNCRKN

SEQ ID NO: 1369 - protein, 450 aa, Artificial Sequence
  MMP-1 variant E116H
FPATLETQEQDVDLVQKYLEKYYNLKNDGRQVEKRRNSGPVVEKLKQMQEFFGLKVTGKPDAETLKVMKQPRCGVPDVAQFVLTEGNPRWEQTHLTYRIENYTPDLPRADVDHAIHKAFQLWSNVTPLTFTKVSEGQADIMISFVRGDHRDNSPFDGPGGNLAHAFQPGPGIGGDAHFDEDERWTNNFREYNLHRVAAHELGHSLGLSHSTDIGALMYPSYTFSGDVQLAQDDIDGIQAIYGRSQNPVQPIGPQTPKACDSKLTFDAITTIRGEVMFFKDRFYMRTNPFYPEVELNFISVFWPQLPNGLEAAYEFADRDEVRFFKGNKYWAVQGQNVLHGYPKDIYSSFGFPRTVKHIDAALSEENTGKTYFFVANKYWRYDEYKRSMDPGYPKMIAHDFPGIGHKVDAVFMKDGFFYFFHGTRQYKFDPKTKRILTLQKANSWFNCRKN

SEQ ID NO: 1370 - protein, 450 aa, Artificial Sequence
  MMP-1 variant E116K
FPATLETQEQDVDLVQKYLEKYYNLKNDGRQVEKRRNSGPVVEKLKQMQEFFGLKVTGKPDAETLKVMKQPRCGVPDVAQFVLTEGNPRWEQTHLTYRIENYTPDLPRADVDHAIKKAFQLWSNVTPLTFTKVSEGQADIMISFVRGDHRDNSPFDGPGGNLAHAFQPGPGIGGDAHFDEDERWTNNFREYNLHRVAAHELGHSLGLSHSTDIGALMYPSYTFSGDVQLAQDDIDGIQAIYGRSQNPVQPIGPQTPKACDSKLTFDAITTIRGEVMFFKDRFYMRTNPFYPEVELNFISVFWPQLPNGLEAAYEFADRDEVRFFKGNKYWAVQGQNVLHGYPKDIYSSFGFPRTVKHIDAALSEENTGKTYFFVANKYWRYDEYKRSMDPGYPKMIAHDFPGIGHKVDAVFMKDGFFYFFHGTRQYKFDPKTKRILTLQKANSWFNCRKN

SEQ ID NO: 1371 - protein, 450 aa, Artificial Sequence
  MMP-1 variant E116R
FPATLETQEQDVDLVQKYLEKYYNLKNDGRQVEKRRNSGPVVEKLKQMQEFFGLKVTGKPDAETLKVMKQPRCGVPDVAQFVLTEGNPRWEQTHLTYRIENYTPDLPRADVDHAIRKAFQLWSNVTPLTFTKVSEGQADIMISFVRGDHRDNSPFDGPGGNLAHAFQPGPGIGGDAHFDEDERWTNNFREYNLHRVAAHELGHSLGLSHSTDIGALMYPSYTFSGDVQLAQDDIDGIQAIYGRSQNPVQPIGPQTPKACDSKLTFDAITTIRGEVMFFKDRFYMRTNPFYPEVELNFISVFWPQLPNGLEAAYEFADRDEVRFFKGNKYWAVQGQNVLHGYPKDIYSSFGFPRTVKHIDAALSEENTGKTYFFVANKYWRYDEYKRSMDPGYPKMIAHDFPGIGHKVDAVFMKDGFFYFFHGTRQYKFDPKTKRILTLQKANSWFNCRKN

SEQ ID NO: 1372 - protein, 450 aa, Artificial Sequence
  MMP-1 variant E116C
FPATLETQEQDVDLVQKYLEKYYNLKNDGRQVEKRRNSGPVVEKLKQMQEFFGLKVTGKPDAETLKVMKQPRCGVPDVAQFVLTEGNPRWEQTHLTYRIENYTPDLPRADVDHAICKAFQLWSNVTPLTFTKVSEGQADIMISFVRGDHRDNSPFDGPGGNLAHAFQPGPGIGGDAHFDEDERWTNNFREYNLHRVAAHELGHSLGLSHSTDIGALMYPSYTFSGDVQLAQDDIDGIQAIYGRSQNPVQPIGPQTPKACDSKLTFDAITTIRGEVMFFKDRFYMRTNPFYPEVELNFISVFWPQLPNGLEAAYEFADRDEVRFFKGNKYWAVQGQNVLHGYPKDIYSSFGFPRTVKHIDAALSEENTGKTYFFVANKYWRYDEYKRSMDPGYPKMIAHDFPGIGHKVDAVFMKDGFFYFFHGTRQYKFDPKTKRILTLQKANSWFNCRKN

SEQ ID NO: 1373 - protein, 450 aa, Artificial Sequence
  MMP-1 variant E116N
FPATLETQEQDVDLVQKYLEKYYNLKNDGRQVEKRRNSGPVVEKLKQMQEFFGLKVTGKPDAETLKVMKQPRCGVPDVAQFVLTEGNPRWEQTHLTYRIENYTPDLPRADVDHAINKAFQLWSNVTPLTFTKVSEGQADIMISFVRGDHRDNSPFDGPGGNLAHAFQPGPGIGGDAHFDEDERWTNNFREYNLHRVAAHELGHSLGLSHSTDIGALMYPSYTFSGDVQLAQDDIDGIQAIYGRSQNPVQPIGPQTPKACDSKLTFDAITTIRGEVMFFKDRFYMRTNPFYPEVELNFISVFWPQLPNGLEAAYEFADRDEVRFFKGNKYWAVQGQNVLHGYPKDIYSSFGFPRTVKHIDAALSEENTGKTYFFVANKYWRYDEYKRSMDPGYPKMIAHDFPGIGHKVDAVFMKDGFFYFFHGTRQYKFDPKTKRILTLQKANSWFNCRKN

SEQ ID NO: 1374 - protein, 450 aa, Artificial Sequence
  MMP-1 variant E116Q
FPATLETQEQDVDLVQKYLEKYYNLKNDGRQVEKRRNSGPVVEKLKQMQEFFGLKVTGKPDAETLKVMKQPRCGVPDVAQFVLTEGNPRWEQTHLTYRIENYTPDLPRADVDHAIQKAFQLWSNVTPLTFTKVSEGQADIMISFVRGDHRDNSPFDGPGGNLAHAFQPGPGIGGDAHFDEDERWTNNFREYNLHRVAAHELGHSLGLSHSTDIGALMYPSYTFSGDVQLAQDDIDGIQAIYGRSQNPVQPIGPQTPKACDSKLTFDAITTIRGEVMFFKDRFYMRTNPFYPEVELNFISVFWPQLPNGLEAAYEFADRDEVRFFKGNKYWAVQGQNVLHGYPKDIYSSFGFPRTVKHIDAALSEENTGKTYFFVANKYWRYDEYKRSMDPGYPKMIAHDFPGIGHKVDAVFMKDGFFYFFHGTRQYKFDPKTKRILTLQKANSWFNCRKN

SEQ ID NO: 1375 - protein, 450 aa, Artificial Sequence
  MMP-1 variant E116T
FPATLETQEQDVDLVQKYLEKYYNLKNDGRQVEKRRNSGPVVEKLKQMQEFFGLKVTGKPDAETLKVMKQPRCGVPDVAQFVLTEGNPRWEQTHLTYRIENYTPDLPRADVDHAITKAFQLWSNVTPLTFTKVSEGQADIMISFVRGDHRDNSPFDGPGGNLAHAFQPGPGIGGDAHFDEDERWTNNFREYNLHRVAAHELGHSLGLSHSTDIGALMYPSYTFSGDVQLAQDDIDGIQAIYGRSQNPVQPIGPQTPKACDSKLTFDAITTIRGEVMFFKDRFYMRTNPFYPEVELNFISVFWPQLPNGLEAAYEFADRDEVRFFKGNKYWAVQGQNVLHGYPKDIYSSFGFPRTVKHIDAALSEENTGKTYFFVANKYWRYDEYKRSMDPGYPKMIAHDFPGIGHKVDAVFMKDGFFYFFHGTRQYKFDPKTKRILTLQKANSWFNCRKN

SEQ ID NO: 1376 - protein, 450 aa, Artificial Sequence
  MMP-1 variant E116Y
FPATLETQEQDVDLVQKYLEKYYNLKNDGRQVEKRRNSGPVVEKLKQMQEFFGLKVTGKPDAETLKVMKQPRCGVPDVAQFVLTEGNPRWEQTHLTYRIENYTPDLPRADVDHAIYKAFQLWSNVTPLTFTKVSEGQADIMISFVRGDHRDNSPFDGPGGNLAHAFQPGPGIGGDAHFDEDERWTNNFREYNLHRVAAHELGHSLGLSHSTDIGALMYPSYTFSGDVQLAQDDIDGIQAIYGRSQNPVQPIGPQTPKACDSKLTFDAITTIRGEVMFFKDRFYMRTNPFYPEVELNFISVFWPQLPNGLEAAYEFADRDEVRFFKGNKYWAVQGQNVLHGYPKDIYSSFGFPRTVKHIDAALSEENTGKTYFFVANKYWRYDEYKRSMDPGYPKMIAHDFPGIGHKVDAVFMKDGFFYFFHGTRQYKFDPKTKRILTLQKANSWFNCRKN

SEQ ID NO: 1377 - protein, 450 aa, Artificial Sequence
  MMP-1 variant E116S
FPATLETQEQDVDLVQKYLEKYYNLKNDGRQVEKRRNSGPVVEKLKQMQEFFGLKVTGKPDAETLKVMKQPRCGVPDVAQFVLTEGNPRWEQTHLTYRIENYTPDLPRADVDHAISKAFQLWSNVTPLTFTKVSEGQADIMISFVRGDHRDNSPFDGPGGNLAHAFQPGPGIGGDAHFDEDERWTNNFREYNLHRVAAHELGHSLGLSHSTDIGALMYPSYTFSGDVQLAQDDIDGIQAIYGRSQNPVQPIGPQTPKACDSKLTFDAITTIRGEVMFFKDRFYMRTNPFYPEVELNFISVFWPQLPNGLEAAYEFADRDEVRFFKGNKYWAVQGQNVLHGYPKDIYSSFGFPRTVKHIDAALSEENTGKTYFFVANKYWRYDEYKRSMDPGYPKMIAHDFPGIGHKVDAVFMKDGFFYFFHGTRQYKFDPKTKRILTLQKANSWFNCRKN

SEQ ID NO: 1378 - protein, 450 aa, Artificial Sequence
  MMP-1 variant E116G
FPATLETQEQDVDLVQKYLEKYYNLKNDGRQVEKRRNSGPVVEKLKQMQEFFGLKVTGKPDAETLKVMKQPRCGVPDVAQFVLTEGNPRWEQTHLTYRIENYTPDLPRADVDHAIGKAFQLWSNVTPLTFTKVSEGQADIMISFVRGDHRDNSPFDGPGGNLAHAFQPGPGIGGDAHFDEDERWTNNFREYNLHRVAAHELGHSLGLSHSTDIGALMYPSYTFSGDVQLAQDDIDGIQAIYGRSQNPVQPIGPQTPKACDSKLTFDAITTIRGEVMFFKDRFYMRTNPFYPEVELNFISVFWPQLPNGLEAAYEFADRDEVRFFKGNKYWAVQGQNVLHGYPKDIYSSFGFPRTVKHIDAALSEENTGKTYFFVANKYWRYDEYKRSMDPGYPKMIAHDFPGIGHKVDAVFMKDGFFYFFHGTRQYKFDPKTKRILTLQKANSWFNCRKN

SEQ ID NO: 1379 - protein, 450 aa, Artificial Sequence
  MMP-1 variant E116F
FPATLETQEQDVDLVQKYLEKYYNLKNDGRQVEKRRNSGPVVEKLKQMQEFFGLKVTGKPDAETLKVMKQPRCGVPDVAQFVLTEGNPRWEQTHLTYRIENYTPDLPRADVDHAIFKAFQLWSNVTPLTFTKVSEGQADIMISFVRGDHRDNSPFDGPGGNLAHAFQPGPGIGGDAHFDEDERWTNNFREYNLHRVAAHELGHSLGLSHSTDIGALMYPSYTFSGDVQLAQDDIDGIQAIYGRSQNPVQPIGPQTPKACDSKLTFDAITTIRGEVMFFKDRFYMRTNPFYPEVELNFISVFWPQLPNGLEAAYEFADRDEVRFFKGNKYWAVQGQNVLHGYPKDIYSSFGFPRTVKHIDAALSEENTGKTYFFVANKYWRYDEYKRSMDPGYPKMIAHDFPGIGHKVDAVFMKDGFFYFFHGTRQYKFDPKTKRILTLQKANSWFNCRKN

SEQ ID NO: 1380 - protein, 450 aa, Artificial Sequence
  MMP-1 variant E116M
FPATLETQEQDVDLVQKYLEKYYNLKNDGRQVEKRRNSGPVVEKLKQMQEFFGLKVTGKPDAETLKVMKQPRCGVPDVAQFVLTEGNPRWEQTHLTYRIENYTPDLPRADVDHAIMKAFQLWSNVTPLTFTKVSEGQADIMISFVRGDHRDNSPFDGPGGNLAHAFQPGPGIGGDAHFDEDERWTNNFREYNLHRVAAHELGHSLGLSHSTDIGALMYPSYTFSGDVQLAQDDIDGIQAIYGRSQNPVQPIGPQTPKACDSKLTFDAITTIRGEVMFFKDRFYMRTNPFYPEVELNFISVFWPQLPNGLEAAYEFADRDEVRFFKGNKYWAVQGQNVLHGYPKDIYSSFGFPRTVKHIDAALSEENTGKTYFFVANKYWRYDEYKRSMDPGYPKMIAHDFPGIGHKVDAVFMKDGFFYFFHGTRQYKFDPKTKRILTLQKANSWFNCRKN

SEQ ID NO: 1381 - protein, 450 aa, Artificial Sequence
  MMP-1 variant E116W
FPATLETQEQDVDLVQKYLEKYYNLKNDGRQVEKRRNSGPVVEKLKQMQEFFGLKVTGKPDAETLKVMKQPRCGVPDVAQFVLTEGNPRWEQTHLTYRIENYTPDLPRADVDHAIWKAFQLWSNVTPLTFTKVSEGQADIMISFVRGDHRDNSPFDGPGGNLAHAFQPGPGIGGDAHFDEDERWTNNFREYNLHRVAAHELGHSLGLSHSTDIGALMYPSYTFSGDVQLAQDDIDGIQAIYGRSQNPVQPIGPQTPKACDSKLTFDAITTIRGEVMFFKDRFYMRTNPFYPEVELNFISVFWPQLPNGLEAAYEFADRDEVRFFKGNKYWAVQGQNVLHGYPKDIYSSFGFPRTVKHIDAALSEENTGKTYFFVANKYWRYDEYKRSMDPGYPKMIAHDFPGIGHKVDAVFMKDGFFYFFHGTRQYKFDPKTKRILTLQKANSWFNCRKN

SEQ ID NO: 1382 - protein, 450 aa, Artificial Sequence
  MMP-1 variant E116I
FPATLETQEQDVDLVQKYLEKYYNLKNDGRQVEKRRNSGPVVEKLKQMQEFFGLKVTGKPDAETLKVMKQPRCGVPDVAQFVLTEGNPRWEQTHLTYRIENYTPDLPRADVDHAIIKAFQLWSNVTPLTFTKVSEGQADIMISFVRGDHRDNSPFDGPGGNLAHAFQPGPGIGGDAHFDEDERWTNNFREYNLHRVAAHELGHSLGLSHSTDIGALMYPSYTFSGDVQLAQDDIDGIQAIYGRSQNPVQPIGPQTPKACDSKLTFDAITTIRGEVMFFKDRFYMRTNPFYPEVELNFISVFWPQLPNGLEAAYEFADRDEVRFFKGNKYWAVQGQNVLHGYPKDIYSSFGFPRTVKHIDAALSEENTGKTYFFVANKYWRYDEYKRSMDPGYPKMIAHDFPGIGHKVDAVFMKDGFFYFFHGTRQYKFDPKTKRILTLQKANSWFNCRKN

SEQ ID NO: 1383 - protein, 450 aa, Artificial Sequence
  MMP-1 variant E116V
FPATLETQEQDVDLVQKYLEKYYNLKNDGRQVEKRRNSGPVVEKLKQMQEFFGLKVTGKPDAETLKVMKQPRCGVPDVAQFVLTEGNPRWEQTHLTYRIENYTPDLPRADVDHAIVKAFQLWSNVTPLTFTKVSEGQADIMISFVRGDHRDNSPFDGPGGNLAHAFQPGPGIGGDAHFDEDERWTNNFREYNLHRVAAHELGHSLGLSHSTDIGALMYPSYTFSGDVQLAQDDIDGIQAIYGRSQNPVQPIGPQTPKACDSKLTFDAITTIRGEVMFFKDRFYMRTNPFYPEVELNFISVFWPQLPNGLEAAYEFADRDEVRFFKGNKYWAVQGQNVLHGYPKDIYSSFGFPRTVKHIDAALSEENTGKTYFFVANKYWRYDEYKRSMDPGYPKMIAHDFPGIGHKVDAVFMKDGFFYFFHGTRQYKFDPKTKRILTLQKANSWFNCRKN

SEQ ID NO: 1384 - protein, 450 aa, Artificial Sequence
  MMP-1 variant E116L
FPATLETQEQDVDLVQKYLEKYYNLKNDGRQVEKRRNSGPVVEKLKQMQEFFGLKVTGKPDAETLKVMKQPRCGVPDVAQFVLTEGNPRWEQTHLTYRIENYTPDLPRADVDHAILKAFQLWSNVTPLTFTKVSEGQADIMISFVRGDHRDNSPFDGPGGNLAHAFQPGPGIGGDAHFDEDERWTNNFREYNLHRVAAHELGHSLGLSHSTDIGALMYPSYTFSGDVQLAQDDIDGIQAIYGRSQNPVQPIGPQTPKACDSKLTFDAITTIRGEVMFFKDRFYMRTNPFYPEVELNFISVFWPQLPNGLEAAYEFADRDEVRFFKGNKYWAVQGQNVLHGYPKDIYSSFGFPRTVKHIDAALSEENTGKTYFFVANKYWRYDEYKRSMDPGYPKMIAHDFPGIGHKVDAVFMKDGFFYFFHGTRQYKFDPKTKRILTLQKANSWFNCRKN

SEQ ID NO: 1385 - protein, 450 aa, Artificial Sequence
  MMP-1 variant E116A
FPATLETQEQDVDLVQKYLEKYYNLKNDGRQVEKRRNSGPVVEKLKQMQEFFGLKVTGKPDAETLKVMKQPRCGVPDVAQFVLTEGNPRWEQTHLTYRIENYTPDLPRADVDHAIAKAFQLWSNVTPLTFTKVSEGQADIMISFVRGDHRDNSPFDGPGGNLAHAFQPGPGIGGDAHFDEDERWTNNFREYNLHRVAAHELGHSLGLSHSTDIGALMYPSYTFSGDVQLAQDDIDGIQAIYGRSQNPVQPIGPQTPKACDSKLTFDAITTIRGEVMFFKDRFYMRTNPFYPEVELNFISVFWPQLPNGLEAAYEFADRDEVRFFKGNKYWAVQGQNVLHGYPKDIYSSFGFPRTVKHIDAALSEENTGKTYFFVANKYWRYDEYKRSMDPGYPKMIAHDFPGIGHKVDAVFMKDGFFYFFHGTRQYKFDPKTKRILTLQKANSWFNCRKN

SEQ ID NO: 1386 - protein, 450 aa, Artificial Sequence
  MMP-1 variant E116P
FPATLETQEQDVDLVQKYLEKYYNLKNDGRQVEKRRNSGPVVEKLKQMQEFFGLKVTGKPDAETLKVMKQPRCGVPDVAQFVLTEGNPRWEQTHLTYRIENYTPDLPRADVDHAIPKAFQLWSNVTPLTFTKVSEGQADIMISFVRGDHRDNSPFDGPGGNLAHAFQPGPGIGGDAHFDEDERWTNNFREYNLHRVAAHELGHSLGLSHSTDIGALMYPSYTFSGDVQLAQDDIDGIQAIYGRSQNPVQPIGPQTPKACDSKLTFDAITTIRGEVMFFKDRFYMRTNPFYPEVELNFISVFWPQLPNGLEAAYEFADRDEVRFFKGNKYWAVQGQNVLHGYPKDIYSSFGFPRTVKHIDAALSEENTGKTYFFVANKYWRYDEYKRSMDPGYPKMIAHDFPGIGHKVDAVFMKDGFFYFFHGTRQYKFDPKTKRILTLQKANSWFNCRKN

SEQ ID NO: 1387 - protein, 450 aa, Artificial Sequence
  MMP-1 variant K117D
FPATLETQEQDVDLVQKYLEKYYNLKNDGRQVEKRRNSGPVVEKLKQMQEFFGLKVTGKPDAETLKVMKQPRCGVPDVAQFVLTEGNPRWEQTHLTYRIENYTPDLPRADVDHAIEDAFQLWSNVTPLTFTKVSEGQADIMISFVRGDHRDNSPFDGPGGNLAHAFQPGPGIGGDAHFDEDERWTNNFREYNLHRVAAHELGHSLGLSHSTDIGALMYPSYTFSGDVQLAQDDIDGIQAIYGRSQNPVQPIGPQTPKACDSKLTFDAITTIRGEVMFFKDRFYMRTNPFYPEVELNFISVFWPQLPNGLEAAYEFADRDEVRFFKGNKYWAVQGQNVLHGYPKDIYSSFGFPRTVKHIDAALSEENTGKTYFFVANKYWRYDEYKRSMDPGYPKMIAHDFPGIGHKVDAVFMKDGFFYFFHGTRQYKFDPKTKRILTLQKANSWFNCRKN

SEQ ID NO: 1388 - protein, 450 aa, Artificial Sequence
  MMP-1 variant K117E
FPATLETQEQDVDLVQKYLEKYYNLKNDGRQVEKRRNSGPVVEKLKQMQEFFGLKVTGKPDAETLKVMKQPRCGVPDVAQFVLTEGNPRWEQTHLTYRIENYTPDLPRADVDHAIEEAFQLWSNVTPLTFTKVSEGQADIMISFVRGDHRDNSPFDGPGGNLAHAFQPGPGIGGDAHFDEDERWTNNFREYNLHRVAAHELGHSLGLSHSTDIGALMYPSYTFSGDVQLAQDDIDGIQAIYGRSQNPVQPIGPQTPKACDSKLTFDAITTIRGEVMFFKDRFYMRTNPFYPEVELNFISVFWPQLPNGLEAAYEFADRDEVRFFKGNKYWAVQGQNVLHGYPKDIYSSFGFPRTVKHIDAALSEENTGKTYFFVANKYWRYDEYKRSMDPGYPKMIAHDFPGIGHKVDAVFMKDGFFYFFHGTRQYKFDPKTKRILTLQKANSWFNCRKN

SEQ ID NO: 1389 - protein, 450 aa, Artificial Sequence
  MMP-1 variant K117H
FPATLETQEQDVDLVQKYLEKYYNLKNDGRQVEKRRNSGPVVEKLKQMQEFFGLKVTGKPDAETLKVMKQPRCGVPDVAQFVLTEGNPRWEQTHLTYRIENYTPDLPRADVDHAIEHAFQLWSNVTPLTFTKVSEGQADIMISFVRGDHRDNSPFDGPGGNLAHAFQPGPGIGGDAHFDEDERWTNNFREYNLHRVAAHELGHSLGLSHSTDIGALMYPSYTFSGDVQLAQDDIDGIQAIYGRSQNPVQPIGPQTPKACDSKLTFDAITTIRGEVMFFKDRFYMRTNPFYPEVELNFISVFWPQLPNGLEAAYEFADRDEVRFFKGNKYWAVQGQNVLHGYPKDIYSSFGFPRTVKHIDAALSEENTGKTYFFVANKYWRYDEYKRSMDPGYPKMIAHDFPGIGHKVDAVFMKDGFFYFFHGTRQYKFDPKTKRILTLQKANSWFNCRKN

SEQ ID NO: 1390 - protein, 450 aa, Artificial Sequence
  MMP-1 variant K117R
FPATLETQEQDVDLVQKYLEKYYNLKNDGRQVEKRRNSGPVVEKLKQMQEFFGLKVTGKPDAETLKVMKQPRCGVPDVAQFVLTEGNPRWEQTHLTYRIENYTPDLPRADVDHAIERAFQLWSNVTPLTFTKVSEGQADIMISFVRGDHRDNSPFDGPGGNLAHAFQPGPGIGGDAHFDEDERWTNNFREYNLHRVAAHELGHSLGLSHSTDIGALMYPSYTFSGDVQLAQDDIDGIQAIYGRSQNPVQPIGPQTPKACDSKLTFDAITTIRGEVMFFKDRFYMRTNPFYPEVELNFISVFWPQLPNGLEAAYEFADRDEVRFFKGNKYWAVQGQNVLHGYPKDIYSSFGFPRTVKHIDAALSEENTGKTYFFVANKYWRYDEYKRSMDPGYPKMIAHDFPGIGHKVDAVFMKDGFFYFFHGTRQYKFDPKTKRILTLQKANSWFNCRKN

SEQ ID NO: 1391 - protein, 450 aa, Artificial Sequence
  MMP-1 variant K117C
FPATLETQEQDVDLVQKYLEKYYNLKNDGRQVEKRRNSGPVVEKLKQMQEFFGLKVTGKPDAETLKVMKQPRCGVPDVAQFVLTEGNPRWEQTHLTYRIENYTPDLPRADVDHAIECAFQLWSNVTPLTFTKVSEGQADIMISFVRGDHRDNSPFDGPGGNLAHAFQPGPGIGGDAHFDEDERWTNNFREYNLHRVAAHELGHSLGLSHSTDIGALMYPSYTFSGDVQLAQDDIDGIQAIYGRSQNPVQPIGPQTPKACDSKLTFDAITTIRGEVMFFKDRFYMRTNPFYPEVELNFISVFWPQLPNGLEAAYEFADRDEVRFFKGNKYWAVQGQNVLHGYPKDIYSSFGFPRTVKHIDAALSEENTGKTYFFVANKYWRYDEYKRSMDPGYPKMIAHDFPGIGHKVDAVFMKDGFFYFFHGTRQYKFDPKTKRILTLQKANSWFNCRKN

SEQ ID NO: 1392 - protein, 450 aa, Artificial Sequence
  MMP-1 variant K117N
FPATLETQEQDVDLVQKYLEKYYNLKNDGRQVEKRRNSGPVVEKLKQMQEFFGLKVTGKPDAETLKVMKQPRCGVPDVAQFVLTEGNPRWEQTHLTYRIENYTPDLPRADVDHAIENAFQLWSNVTPLTFTKVSEGQADIMISFVRGDHRDNSPFDGPGGNLAHAFQPGPGIGGDAHFDEDERWTNNFREYNLHRVAAHELGHSLGLSHSTDIGALMYPSYTFSGDVQLAQDDIDGIQAIYGRSQNPVQPIGPQTPKACDSKLTFDAITTIRGEVMFFKDRFYMRTNPFYPEVELNFISVFWPQLPNGLEAAYEFADRDEVRFFKGNKYWAVQGQNVLHGYPKDIYSSFGFPRTVKHIDAALSEENTGKTYFFVANKYWRYDEYKRSMDPGYPKMIAHDFPGIGHKVDAVFMKDGFFYFFHGTRQYKFDPKTKRILTLQKANSWFNCRKN

SEQ ID NO: 1393 - protein, 450 aa, Artificial Sequence
  MMP-1 variant K117Q
FPATLETQEQDVDLVQKYLEKYYNLKNDGRQVEKRRNSGPVVEKLKQMQEFFGLKVTGKPDAETLKVMKQPRCGVPDVAQFVLTEGNPRWEQTHLTYRIENYTPDLPRADVDHAIEQAFQLWSNVTPLTFTKVSEGQADIMISFVRGDHRDNSPFDGPGGNLAHAFQPGPGIGGDAHFDEDERWTNNFREYNLHRVAAHELGHSLGLSHSTDIGALMYPSYTFSGDVQLAQDDIDGIQAIYGRSQNPVQPIGPQTPKACDSKLTFDAITTIRGEVMFFKDRFYMRTNPFYPEVELNFISVFWPQLPNGLEAAYEFADRDEVRFFKGNKYWAVQGQNVLHGYPKDIYSSFGFPRTVKHIDAALSEENTGKTYFFVANKYWRYDEYKRSMDPGYPKMIAHDFPGIGHKVDAVFMKDGFFYFFHGTRQYKFDPKTKRILTLQKANSWFNCRKN

SEQ ID NO: 1394 - protein, 450 aa, Artificial Sequence
  MMP-1 variant K117T
FPATLETQEQDVDLVQKYLEKYYNLKNDGRQVEKRRNSGPVVEKLKQMQEFFGLKVTGKPDAETLKVMKQPRCGVPDVAQFVLTEGNPRWEQTHLTYRIENYTPDLPRADVDHAIETAFQLWSNVTPLTFTKVSEGQADIMISFVRGDHRDNSPFDGPGGNLAHAFQPGPGIGGDAHFDEDERWTNNFREYNLHRVAAHELGHSLGLSHSTDIGALMYPSYTFSGDVQLAQDDIDGIQAIYGRSQNPVQPIGPQTPKACDSKLTFDAITTIRGEVMFFKDRFYMRTNPFYPEVELNFISVFWPQLPNGLEAAYEFADRDEVRFFKGNKYWAVQGQNVLHGYPKDIYSSFGFPRTVKHIDAALSEENTGKTYFFVANKYWRYDEYKRSMDPGYPKMIAHDFPGIGHKVDAVFMKDGFFYFFHGTRQYKFDPKTKRILTLQKANSWFNCRKN

SEQ ID NO: 1395 - protein, 450 aa, Artificial Sequence
  MMP-1 variant K117Y
FPATLETQEQDVDLVQKYLEKYYNLKNDGRQVEKRRNSGPVVEKLKQMQEFFGLKVTGKPDAETLKVMKQPRCGVPDVAQFVLTEGNPRWEQTHLTYRIENYTPDLPRADVDHAIEYAFQLWSNVTPLTFTKVSEGQADIMISFVRGDHRDNSPFDGPGGNLAHAFQPGPGIGGDAHFDEDERWTNNFREYNLHRVAAHELGHSLGLSHSTDIGALMYPSYTFSGDVQLAQDDIDGIQAIYGRSQNPVQPIGPQTPKACDSKLTFDAITTIRGEVMFFKDRFYMRTNPFYPEVELNFISVFWPQLPNGLEAAYEFADRDEVRFFKGNKYWAVQGQNVLHGYPKDIYSSFGFPRTVKHIDAALSEENTGKTYFFVANKYWRYDEYKRSMDPGYPKMIAHDFPGIGHKVDAVFMKDGFFYFFHGTRQYKFDPKTKRILTLQKANSWFNCRKN

SEQ ID NO: 1396 - protein, 450 aa, Artificial Sequence
  MMP-1 variant K117S
FPATLETQEQDVDLVQKYLEKYYNLKNDGRQVEKRRNSGPVVEKLKQMQEFFGLKVTGKPDAETLKVMKQPRCGVPDVAQFVLTEGNPRWEQTHLTYRIENYTPDLPRADVDHAIESAFQLWSNVTPLTFTKVSEGQADIMISFVRGDHRDNSPFDGPGGNLAHAFQPGPGIGGDAHFDEDERWTNNFREYNLHRVAAHELGHSLGLSHSTDIGALMYPSYTFSGDVQLAQDDIDGIQAIYGRSQNPVQPIGPQTPKACDSKLTFDAITTIRGEVMFFKDRFYMRTNPFYPEVELNFISVFWPQLPNGLEAAYEFADRDEVRFFKGNKYWAVQGQNVLHGYPKDIYSSFGFPRTVKHIDAALSEENTGKTYFFVANKYWRYDEYKRSMDPGYPKMIAHDFPGIGHKVDAVFMKDGFFYFFHGTRQYKFDPKTKRILTLQKANSWFNCRKN

SEQ ID NO: 1397 - protein, 450 aa, Artificial Sequence
  MMP-1 variant K117G
FPATLETQEQDVDLVQKYLEKYYNLKNDGRQVEKRRNSGPVVEKLKQMQEFFGLKVTGKPDAETLKVMKQPRCGVPDVAQFVLTEGNPRWEQTHLTYRIENYTPDLPRADVDHAIEGAFQLWSNVTPLTFTKVSEGQADIMISFVRGDHRDNSPFDGPGGNLAHAFQPGPGIGGDAHFDEDERWTNNFREYNLHRVAAHELGHSLGLSHSTDIGALMYPSYTFSGDVQLAQDDIDGIQAIYGRSQNPVQPIGPQTPKACDSKLTFDAITTIRGEVMFFKDRFYMRTNPFYPEVELNFISVFWPQLPNGLEAAYEFADRDEVRFFKGNKYWAVQGQNVLHGYPKDIYSSFGFPRTVKHIDAALSEENTGKTYFFVANKYWRYDEYKRSMDPGYPKMIAHDFPGIGHKVDAVFMKDGFFYFFHGTRQYKFDPKTKRILTLQKANSWFNCRKN

SEQ ID NO: 1398 - protein, 450 aa, Artificial Sequence
  MMP-1 variant K117F
FPATLETQEQDVDLVQKYLEKYYNLKNDGRQVEKRRNSGPVVEKLKQMQEFFGLKVTGKPDAETLKVMKQPRCGVPDVAQFVLTEGNPRWEQTHLTYRIENYTPDLPRADVDHAIEFAFQLWSNVTPLTFTKVSEGQADIMISFVRGDHRDNSPFDGPGGNLAHAFQPGPGIGGDAHFDEDERWTNNFREYNLHRVAAHELGHSLGLSHSTDIGALMYPSYTFSGDVQLAQDDIDGIQAIYGRSQNPVQPIGPQTPKACDSKLTFDAITTIRGEVMFFKDRFYMRTNPFYPEVELNFISVFWPQLPNGLEAAYEFADRDEVRFFKGNKYWAVQGQNVLHGYPKDIYSSFGFPRTVKHIDAALSEENTGKTYFFVANKYWRYDEYKRSMDPGYPKMIAHDFPGIGHKVDAVFMKDGFFYFFHGTRQYKFDPKTKRILTLQKANSWFNCRKN

SEQ ID NO: 1399 - protein, 450 aa, Artificial Sequence
  MMP-1 variant K117M
FPATLETQEQDVDLVQKYLEKYYNLKNDGRQVEKRRNSGPVVEKLKQMQEFFGLKVTGKPDAETLKVMKQPRCGVPDVAQFVLTEGNPRWEQTHLTYRIENYTPDLPRADVDHAIEMAFQLWSNVTPLTFTKVSEGQADIMISFVRGDHRDNSPFDGPGGNLAHAFQPGPGIGGDAHFDEDERWTNNFREYNLHRVAAHELGHSLGLSHSTDIGALMYPSYTFSGDVQLAQDDIDGIQAIYGRSQNPVQPIGPQTPKACDSKLTFDAITTIRGEVMFFKDRFYMRTNPFYPEVELNFISVFWPQLPNGLEAAYEFADRDEVRFFKGNKYWAVQGQNVLHGYPKDIYSSFGFPRTVKHIDAALSEENTGKTYFFVANKYWRYDEYKRSMDPGYPKMIAHDFPGIGHKVDAVFMKDGFFYFFHGTRQYKFDPKTKRILTLQKANSWFNCRKN

SEQ ID NO: 1400 - protein, 450 aa, Artificial Sequence
  MMP-1 variant K117W
FPATLETQEQDVDLVQKYLEKYYNLKNDGRQVEKRRNSGPVVEKLKQMQEFFGLKVTGKPDAETLKVMKQPRCGVPDVAQFVLTEGNPRWEQTHLTYRIENYTPDLPRADVDHAIEWAFQLWSNVTPLTFTKVSEGQADIMISFVRGDHRDNSPFDGPGGNLAHAFQPGPGIGGDAHFDEDERWTNNFREYNLHRVAAHELGHSLGLSHSTDIGALMYPSYTFSGDVQLAQDDIDGIQAIYGRSQNPVQPIGPQTPKACDSKLTFDAITTIRGEVMFFKDRFYMRTNPFYPEVELNFISVFWPQLPNGLEAAYEFADRDEVRFFKGNKYWAVQGQNVLHGYPKDIYSSFGFPRTVKHIDAALSEENTGKTYFFVANKYWRYDEYKRSMDPGYPKMIAHDFPGIGHKVDAVFMKDGFFYFFHGTRQYKFDPKTKRILTLQKANSWFNCRKN

SEQ ID NO: 1401 - protein, 450 aa, Artificial Sequence
  MMP-1 variant K117I
FPATLETQEQDVDLVQKYLEKYYNLKNDGRQVEKRRNSGPVVEKLKQMQEFFGLKVTGKPDAETLKVMKQPRCGVPDVAQFVLTEGNPRWEQTHLTYRIENYTPDLPRADVDHAIEIAFQLWSNVTPLTFTKVSEGQADIMISFVRGDHRDNSPFDGPGGNLAHAFQPGPGIGGDAHFDEDERWTNNFREYNLHRVAAHELGHSLGLSHSTDIGALMYPSYTFSGDVQLAQDDIDGIQAIYGRSQNPVQPIGPQTPKACDSKLTFDAITTIRGEVMFFKDRFYMRTNPFYPEVELNFISVFWPQLPNGLEAAYEFADRDEVRFFKGNKYWAVQGQNVLHGYPKDIYSSFGFPRTVKHIDAALSEENTGKTYFFVANKYWRYDEYKRSMDPGYPKMIAHDFPGIGHKVDAVFMKDGFFYFFHGTRQYKFDPKTKRILTLQKANSWFNCRKN

SEQ ID NO: 1402 - protein, 450 aa, Artificial Sequence
  MMP-1 variant K117V
FPATLETQEQDVDLVQKYLEKYYNLKNDGRQVEKRRNSGPVVEKLKQMQEFFGLKVTGKPDAETLKVMKQPRCGVPDVAQFVLTEGNPRWEQTHLTYRIENYTPDLPRADVDHAIEVAFQLWSNVTPLTFTKVSEGQADIMISFVRGDHRDNSPFDGPGGNLAHAFQPGPGIGGDAHFDEDERWTNNFREYNLHRVAAHELGHSLGLSHSTDIGALMYPSYTFSGDVQLAQDDIDGIQAIYGRSQNPVQPIGPQTPKACDSKLTFDAITTIRGEVMFFKDRFYMRTNPFYPEVELNFISVFWPQLPNGLEAAYEFADRDEVRFFKGNKYWAVQGQNVLHGYPKDIYSSFGFPRTVKHIDAALSEENTGKTYFFVANKYWRYDEYKRSMDPGYPKMIAHDFPGIGHKVDAVFMKDGFFYFFHGTRQYKFDPKTKRILTLQKANSWFNCRKN

SEQ ID NO: 1403 - protein, 450 aa, Artificial Sequence
  MMP-1 variant K117L
FPATLETQEQDVDLVQKYLEKYYNLKNDGRQVEKRRNSGPVVEKLKQMQEFFGLKVTGKPDAETLKVMKQPRCGVPDVAQFVLTEGNPRWEQTHLTYRIENYTPDLPRADVDHAIELAFQLWSNVTPLTFTKVSEGQADIMISFVRGDHRDNSPFDGPGGNLAHAFQPGPGIGGDAHFDEDERWTNNFREYNLHRVAAHELGHSLGLSHSTDIGALMYPSYTFSGDVQLAQDDIDGIQAIYGRSQNPVQPIGPQTPKACDSKLTFDAITTIRGEVMFFKDRFYMRTNPFYPEVELNFISVFWPQLPNGLEAAYEFADRDEVRFFKGNKYWAVQGQNVLHGYPKDIYSSFGFPRTVKHIDAALSEENTGKTYFFVANKYWRYDEYKRSMDPGYPKMIAHDFPGIGHKVDAVFMKDGFFYFFHGTRQYKFDPKTKRILTLQKANSWFNCRKN

SEQ ID NO: 1404 - protein, 450 aa, Artificial Sequence
  MMP-1 variant K117A
FPATLETQEQDVDLVQKYLEKYYNLKNDGRQVEKRRNSGPVVEKLKQMQEFFGLKVTGKPDAETLKVMKQPRCGVPDVAQFVLTEGNPRWEQTHLTYRIENYTPDLPRADVDHAIEAAFQLWSNVTPLTFTKVSEGQADIMISFVRGDHRDNSPFDGPGGNLAHAFQPGPGIGGDAHFDEDERWTNNFREYNLHRVAAHELGHSLGLSHSTDIGALMYPSYTFSGDVQLAQDDIDGIQAIYGRSQNPVQPIGPQTPKACDSKLTFDAITTIRGEVMFFKDRFYMRTNPFYPEVELNFISVFWPQLPNGLEAAYEFADRDEVRFFKGNKYWAVQGQNVLHGYPKDIYSSFGFPRTVKHIDAALSEENTGKTYFFVANKYWRYDEYKRSMDPGYPKMIAHDFPGIGHKVDAVFMKDGFFYFFHGTRQYKFDPKTKRILTLQKANSWFNCRKN

SEQ ID NO: 1405 - protein, 450 aa, Artificial Sequence
  MMP-1 variant K117P
FPATLETQEQDVDLVQKYLEKYYNLKNDGRQVEKRRNSGPVVEKLKQMQEFFGLKVTGKPDAETLKVMKQPRCGVPDVAQFVLTEGNPRWEQTHLTYRIENYTPDLPRADVDHAIEPAFQLWSNVTPLTFTKVSEGQADIMISFVRGDHRDNSPFDGPGGNLAHAFQPGPGIGGDAHFDEDERWTNNFREYNLHRVAAHELGHSLGLSHSTDIGALMYPSYTFSGDVQLAQDDIDGIQAIYGRSQNPVQPIGPQTPKACDSKLTFDAITTIRGEVMFFKDRFYMRTNPFYPEVELNFISVFWPQLPNGLEAAYEFADRDEVRFFKGNKYWAVQGQNVLHGYPKDIYSSFGFPRTVKHIDAALSEENTGKTYFFVANKYWRYDEYKRSMDPGYPKMIAHDFPGIGHKVDAVFMKDGFFYFFHGTRQYKFDPKTKRILTLQKANSWFNCRKN

SEQ ID NO: 1406 - protein, 450 aa, Artificial Sequence
  MMP-1 variant A118D
FPATLETQEQDVDLVQKYLEKYYNLKNDGRQVEKRRNSGPVVEKLKQMQEFFGLKVTGKPDAETLKVMKQPRCGVPDVAQFVLTEGNPRWEQTHLTYRIENYTPDLPRADVDHAIEKDFQLWSNVTPLTFTKVSEGQADIMISFVRGDHRDNSPFDGPGGNLAHAFQPGPGIGGDAHFDEDERWTNNFREYNLHRVAAHELGHSLGLSHSTDIGALMYPSYTFSGDVQLAQDDIDGIQAIYGRSQNPVQPIGPQTPKACDSKLTFDAITTIRGEVMFFKDRFYMRTNPFYPEVELNFISVFWPQLPNGLEAAYEFADRDEVRFFKGNKYWAVQGQNVLHGYPKDIYSSFGFPRTVKHIDAALSEENTGKTYFFVANKYWRYDEYKRSMDPGYPKMIAHDFPGIGHKVDAVFMKDGFFYFFHGTRQYKFDPKTKRILTLQKANSWFNCRKN

SEQ ID NO: 1407 - protein, 450 aa, Artificial Sequence
  MMP-1 variant A118E
FPATLETQEQDVDLVQKYLEKYYNLKNDGRQVEKRRNSGPVVEKLKQMQEFFGLKVTGKPDAETLKVMKQPRCGVPDVAQFVLTEGNPRWEQTHLTYRIENYTPDLPRADVDHAIEKEFQLWSNVTPLTFTKVSEGQADIMISFVRGDHRDNSPFDGPGGNLAHAFQPGPGIGGDAHFDEDERWTNNFREYNLHRVAAHELGHSLGLSHSTDIGALMYPSYTFSGDVQLAQDDIDGIQAIYGRSQNPVQPIGPQTPKACDSKLTFDAITTIRGEVMFFKDRFYMRTNPFYPEVELNFISVFWPQLPNGLEAAYEFADRDEVRFFKGNKYWAVQGQNVLHGYPKDIYSSFGFPRTVKHIDAALSEENTGKTYFFVANKYWRYDEYKRSMDPGYPKMIAHDFPGIGHKVDAVFMKDGFFYFFHGTRQYKFDPKTKRILTLQKANSWFNCRKN

SEQ ID NO: 1408 - protein, 450 aa, Artificial Sequence
  MMP-1 variant A118H
FPATLETQEQDVDLVQKYLEKYYNLKNDGRQVEKRRNSGPVVEKLKQMQEFFGLKVTGKPDAETLKVMKQPRCGVPDVAQFVLTEGNPRWEQTHLTYRIENYTPDLPRADVDHAIEKHFQLWSNVTPLTFTKVSEGQADIMISFVRGDHRDNSPFDGPGGNLAHAFQPGPGIGGDAHFDEDERWTNNFREYNLHRVAAHELGHSLGLSHSTDIGALMYPSYTFSGDVQLAQDDIDGIQAIYGRSQNPVQPIGPQTPKACDSKLTFDAITTIRGEVMFFKDRFYMRTNPFYPEVELNFISVFWPQLPNGLEAAYEFADRDEVRFFKGNKYWAVQGQNVLHGYPKDIYSSFGFPRTVKHIDAALSEENTGKTYFFVANKYWRYDEYKRSMDPGYPKMIAHDFPGIGHKVDAVFMKDGFFYFFHGTRQYKFDPKTKRILTLQKANSWFNCRKN

SEQ ID NO: 1409 - protein, 450 aa, Artificial Sequence
  MMP-1 variant A118K
FPATLETQEQDVDLVQKYLEKYYNLKNDGRQVEKRRNSGPVVEKLKQMQEFFGLKVTGKPDAETLKVMKQPRCGVPDVAQFVLTEGNPRWEQTHLTYRIENYTPDLPRADVDHAIEKKFQLWSNVTPLTFTKVSEGQADIMISFVRGDHRDNSPFDGPGGNLAHAFQPGPGIGGDAHFDEDERWTNNFREYNLHRVAAHELGHSLGLSHSTDIGALMYPSYTFSGDVQLAQDDIDGIQAIYGRSQNPVQPIGPQTPKACDSKLTFDAITTIRGEVMFFKDRFYMRTNPFYPEVELNFISVFWPQLPNGLEAAYEFADRDEVRFFKGNKYWAVQGQNVLHGYPKDIYSSFGFPRTVKHIDAALSEENTGKTYFFVANKYWRYDEYKRSMDPGYPKMIAHDFPGIGHKVDAVFMKDGFFYFFHGTRQYKFDPKTKRILTLQKANSWFNCRKN

SEQ ID NO: 1410 - protein, 450 aa, Artificial Sequence; identical to SEQ ID NO: 1390
  MMP-1 variant A118R

SEQ ID NO: 1411 - protein, 450 aa, Artificial Sequence
  MMP-1 variant A118C
FPATLETQEQDVDLVQKYLEKYYNLKNDGRQVEKRRNSGPVVEKLKQMQEFFGLKVTGKPDAETLKVMKQPRCGVPDVAQFVLTEGNPRWEQTHLTYRIENYTPDLPRADVDHAIEKCFQLWSNVTPLTFTKVSEGQADIMISFVRGDHRDNSPFDGPGGNLAHAFQPGPGIGGDAHFDEDERWTNNFREYNLHRVAAHELGHSLGLSHSTDIGALMYPSYTFSGDVQLAQDDIDGIQAIYGRSQNPVQPIGPQTPKACDSKLTFDAITTIRGEVMFFKDRFYMRTNPFYPEVELNFISVFWPQLPNGLEAAYEFADRDEVRFFKGNKYWAVQGQNVLHGYPKDIYSSFGFPRTVKHIDAALSEENTGKTYFFVANKYWRYDEYKRSMDPGYPKMIAHDFPGIGHKVDAVFMKDGFFYFFHGTRQYKFDPKTKRILTLQKANSWFNCRKN

SEQ ID NO: 1412 - protein, 450 aa, Artificial Sequence
  MMP-1 variant A118N
FPATLETQEQDVDLVQKYLEKYYNLKNDGRQVEKRRNSGPVVEKLKQMQEFFGLKVTGKPDAETLKVMKQPRCGVPDVAQFVLTEGNPRWEQTHLTYRIENYTPDLPRADVDHAIEKNFQLWSNVTPLTFTKVSEGQADIMISFVRGDHRDNSPFDGPGGNLAHAFQPGPGIGGDAHFDEDERWTNNFREYNLHRVAAHELGHSLGLSHSTDIGALMYPSYTFSGDVQLAQDDIDGIQAIYGRSQNPVQPIGPQTPKACDSKLTFDAITTIRGEVMFFKDRFYMRTNPFYPEVELNFISVFWPQLPNGLEAAYEFADRDEVRFFKGNKYWAVQGQNVLHGYPKDIYSSFGFPRTVKHIDAALSEENTGKTYFFVANKYWRYDEYKRSMDPGYPKMIAHDFPGIGHKVDAVFMKDGFFYFFHGTRQYKFDPKTKRILTLQKANSWFNCRKN

SEQ ID NO: 1413 - protein, 450 aa, Artificial Sequence
  MMP-1 variant A118Q
FPATLETQEQDVDLVQKYLEKYYNLKNDGRQVEKRRNSGPVVEKLKQMQEFFGLKVTGKPDAETLKVMKQPRCGVPDVAQFVLTEGNPRWEQTHLTYRIENYTPDLPRADVDHAIEKQFQLWSNVTPLTFTKVSEGQADIMISFVRGDHRDNSPFDGPGGNLAHAFQPGPGIGGDAHFDEDERWTNNFREYNLHRVAAHELGHSLGLSHSTDIGALMYPSYTFSGDVQLAQDDIDGIQAIYGRSQNPVQPIGPQTPKACDSKLTFDAITTIRGEVMFFKDRFYMRTNPFYPEVELNFISVFWPQLPNGLEAAYEFADRDEVRFFKGNKYWAVQGQNVLHGYPKDIYSSFGFPRTVKHIDAALSEENTGKTYFFVANKYWRYDEYKRSMDPGYPKMIAHDFPGIGHKVDAVFMKDGFFYFFHGTRQYKFDPKTKRILTLQKANSWFNCRKN

SEQ ID NO: 1414 - protein, 450 aa, Artificial Sequence
  MMP-1 variant A118T
FPATLETQEQDVDLVQKYLEKYYNLKNDGRQVEKRRNSGPVVEKLKQMQEFFGLKVTGKPDAETLKVMKQPRCGVPDVAQFVLTEGNPRWEQTHLTYRIENYTPDLPRADVDHAIEKTFQLWSNVTPLTFTKVSEGQADIMISFVRGDHRDNSPFDGPGGNLAHAFQPGPGIGGDAHFDEDERWTNNFREYNLHRVAAHELGHSLGLSHSTDIGALMYPSYTFSGDVQLAQDDIDGIQAIYGRSQNPVQPIGPQTPKACDSKLTFDAITTIRGEVMFFKDRFYMRTNPFYPEVELNFISVFWPQLPNGLEAAYEFADRDEVRFFKGNKYWAVQGQNVLHGYPKDIYSSFGFPRTVKHIDAALSEENTGKTYFFVANKYWRYDEYKRSMDPGYPKMIAHDFPGIGHKVDAVFMKDGFFYFFHGTRQYKFDPKTKRILTLQKANSWFNCRKN

SEQ ID NO: 1415 - protein, 450 aa, Artificial Sequence
  MMP-1 variant A118Y
FPATLETQEQDVDLVQKYLEKYYNLKNDGRQVEKRRNSGPVVEKLKQMQEFFGLKVTGKPDAETLKVMKQPRCGVPDVAQFVLTEGNPRWEQTHLTYRIENYTPDLPRADVDHAIEKYFQLWSNVTPLTFTKVSEGQADIMISFVRGDHRDNSPFDGPGGNLAHAFQPGPGIGGDAHFDEDERWTNNFREYNLHRVAAHELGHSLGLSHSTDIGALMYPSYTFSGDVQLAQDDIDGIQAIYGRSQNPVQPIGPQTPKACDSKLTFDAITTIRGEVMFFKDRFYMRTNPFYPEVELNFISVFWPQLPNGLEAAYEFADRDEVRFFKGNKYWAVQGQNVLHGYPKDIYSSFGFPRTVKHIDAALSEENTGKTYFFVANKYWRYDEYKRSMDPGYPKMIAHDFPGIGHKVDAVFMKDGFFYFFHGTRQYKFDPKTKRILTLQKANSWFNCRKN

SEQ ID NO: 1416 - protein, 450 aa, Artificial Sequence
  MMP-1 variant A118S
FPATLETQEQDVDLVQKYLEKYYNLKNDGRQVEKRRNSGPVVEKLKQMQEFFGLKVTGKPDAETLKVMKQPRCGVPDVAQFVLTEGNPRWEQTHLTYRIENYTPDLPRADVDHAIEKSFQLWSNVTPLTFTKVSEGQADIMISFVRGDHRDNSPFDGPGGNLAHAFQPGPGIGGDAHFDEDERWTNNFREYNLHRVAAHELGHSLGLSHSTDIGALMYPSYTFSGDVQLAQDDIDGIQAIYGRSQNPVQPIGPQTPKACDSKLTFDAITTIRGEVMFFKDRFYMRTNPFYPEVELNFISVFWPQLPNGLEAAYEFADRDEVRFFKGNKYWAVQGQNVLHGYPKDIYSSFGFPRTVKHIDAALSEENTGKTYFFVANKYWRYDEYKRSMDPGYPKMIAHDFPGIGHKVDAVFMKDGFFYFFHGTRQYKFDPKTKRILTLQKANSWFNCRKN

SEQ ID NO: 1417 - protein, 450 aa, Artificial Sequence
  MMP-1 variant A118G
FPATLETQEQDVDLVQKYLEKYYNLKNDGRQVEKRRNSGPVVEKLKQMQEFFGLKVTGKPDAETLKVMKQPRCGVPDVAQFVLTEGNPRWEQTHLTYRIENYTPDLPRADVDHAIEKGFQLWSNVTPLTFTKVSEGQADIMISFVRGDHRDNSPFDGPGGNLAHAFQPGPGIGGDAHFDEDERWTNNFREYNLHRVAAHELGHSLGLSHSTDIGALMYPSYTFSGDVQLAQDDIDGIQAIYGRSQNPVQPIGPQTPKACDSKLTFDAITTIRGEVMFFKDRFYMRTNPFYPEVELNFISVFWPQLPNGLEAAYEFADRDEVRFFKGNKYWAVQGQNVLHGYPKDIYSSFGFPRTVKHIDAALSEENTGKTYFFVANKYWRYDEYKRSMDPGYPKMIAHDFPGIGHKVDAVFMKDGFFYFFHGTRQYKFDPKTKRILTLQKANSWFNCRKN

SEQ ID NO: 1418 - protein, 450 aa, Artificial Sequence
  MMP-1 variant A118F
FPATLETQEQDVDLVQKYLEKYYNLKNDGRQVEKRRNSGPVVEKLKQMQEFFGLKVTGKPDAETLKVMKQPRCGVPDVAQFVLTEGNPRWEQTHLTYRIENYTPDLPRADVDHAIEKFFQLWSNVTPLTFTKVSEGQADIMISFVRGDHRDNSPFDGPGGNLAHAFQPGPGIGGDAHFDEDERWTNNFREYNLHRVAAHELGHSLGLSHSTDIGALMYPSYTFSGDVQLAQDDIDGIQAIYGRSQNPVQPIGPQTPKACDSKLTFDAITTIRGEVMFFKDRFYMRTNPFYPEVELNFISVFWPQLPNGLEAAYEFADRDEVRFFKGNKYWAVQGQNVLHGYPKDIYSSFGFPRTVKHIDAALSEENTGKTYFFVANKYWRYDEYKRSMDPGYPKMIAHDFPGIGHKVDAVFMKDGFFYFFHGTRQYKFDPKTKRILTLQKANSWFNCRKN

SEQ ID NO: 1419 - protein, 450 aa, Artificial Sequence
  MMP-1 variant A118M
FPATLETQEQDVDLVQKYLEKYYNLKNDGRQVEKRRNSGPVVEKLKQMQEFFGLKVTGKPDAETLKVMKQPRCGVPDVAQFVLTEGNPRWEQTHLTYRIENYTPDLPRADVDHAIEKMFQLWSNVTPLTFTKVSEGQADIMISFVRGDHRDNSPFDGPGGNLAHAFQPGPGIGGDAHFDEDERWTNNFREYNLHRVAAHELGHSLGLSHSTDIGALMYPSYTFSGDVQLAQDDIDGIQAIYGRSQNPVQPIGPQTPKACDSKLTFDAITTIRGEVMFFKDRFYMRTNPFYPEVELNFISVFWPQLPNGLEAAYEFADRDEVRFFKGNKYWAVQGQNVLHGYPKDIYSSFGFPRTVKHIDAALSEENTGKTYFFVANKYWRYDEYKRSMDPGYPKMIAHDFPGIGHKVDAVFMKDGFFYFFHGTRQYKFDPKTKRILTLQKANSWFNCRKN

SEQ ID NO: 1420 - protein, 450 aa, Artificial Sequence
  MMP-1 variant A118W
FPATLETQEQDVDLVQKYLEKYYNLKNDGRQVEKRRNSGPVVEKLKQMQEFFGLKVTGKPDAETLKVMKQPRCGVPDVAQFVLTEGNPRWEQTHLTYRIENYTPDLPRADVDHAIEKWFQLWSNVTPLTFTKVSEGQADIMISFVRGDHRDNSPFDGPGGNLAHAFQPGPGIGGDAHFDEDERWTNNFREYNLHRVAAHELGHSLGLSHSTDIGALMYPSYTFSGDVQLAQDDIDGIQAIYGRSQNPVQPIGPQTPKACDSKLTFDAITTIRGEVMFFKDRFYMRTNPFYPEVELNFISVFWPQLPNGLEAAYEFADRDEVRFFKGNKYWAVQGQNVLHGYPKDIYSSFGFPRTVKHIDAALSEENTGKTYFFVANKYWRYDEYKRSMDPGYPKMIAHDFPGIGHKVDAVFMKDGFFYFFHGTRQYKFDPKTKRILTLQKANSWFNCRKN

SEQ ID NO: 1421 - protein, 450 aa, Artificial Sequence
  MMP-1 variant A118I
FPATLETQEQDVDLVQKYLEKYYNLKNDGRQVEKRRNSGPVVEKLKQMQEFFGLKVTGKPDAETLKVMKQPRCGVPDVAQFVLTEGNPRWEQTHLTYRIENYTPDLPRADVDHAIEKIFQLWSNVTPLTFTKVSEGQADIMISFVRGDHRDNSPFDGPGGNLAHAFQPGPGIGGDAHFDEDERWTNNFREYNLHRVAAHELGHSLGLSHSTDIGALMYPSYTFSGDVQLAQDDIDGIQAIYGRSQNPVQPIGPQTPKACDSKLTFDAITTIRGEVMFFKDRFYMRTNPFYPEVELNFISVFWPQLPNGLEAAYEFADRDEVRFFKGNKYWAVQGQNVLHGYPKDIYSSFGFPRTVKHIDAALSEENTGKTYFFVANKYWRYDEYKRSMDPGYPKMIAHDFPGIGHKVDAVFMKDGFFYFFHGTRQYKFDPKTKRILTLQKANSWFNCRKN

SEQ ID NO: 1422 - protein, 450 aa, Artificial Sequence
  MMP-1 variant A118V
FPATLETQEQDVDLVQKYLEKYYNLKNDGRQVEKRRNSGPVVEKLKQMQEFFGLKVTGKPDAETLKVMKQPRCGVPDVAQFVLTEGNPRWEQTHLTYRIENYTPDLPRADVDHAIEKVFQLWSNVTPLTFTKVSEGQADIMISFVRGDHRDNSPFDGPGGNLAHAFQPGPGIGGDAHFDEDERWTNNFREYNLHRVAAHELGHSLGLSHSTDIGALMYPSYTFSGDVQLAQDDIDGIQAIYGRSQNPVQPIGPQTPKACDSKLTFDAITTIRGEVMFFKDRFYMRTNPFYPEVELNFISVFWPQLPNGLEAAYEFADRDEVRFFKGNKYWAVQGQNVLHGYPKDIYSSFGFPRTVKHIDAALSEENTGKTYFFVANKYWRYDEYKRSMDPGYPKMIAHDFPGIGHKVDAVFMKDGFFYFFHGTRQYKFDPKTKRILTLQKANSWFNCRKN

SEQ ID NO: 1423 - protein, 450 aa, Artificial Sequence
  MMP-1 variant A118L
FPATLETQEQDVDLVQKYLEKYYNLKNDGRQVEKRRNSGPVVEKLKQMQEFFGLKVTGKPDAETLKVMKQPRCGVPDVAQFVLTEGNPRWEQTHLTYRIENYTPDLPRADVDHAIEKLFQLWSNVTPLTFTKVSEGQADIMISFVRGDHRDNSPFDGPGGNLAHAFQPGPGIGGDAHFDEDERWTNNFREYNLHRVAAHELGHSLGLSHSTDIGALMYPSYTFSGDVQLAQDDIDGIQAIYGRSQNPVQPIGPQTPKACDSKLTFDAITTIRGEVMFFKDRFYMRTNPFYPEVELNFISVFWPQLPNGLEAAYEFADRDEVRFFKGNKYWAVQGQNVLHGYPKDIYSSFGFPRTVKHIDAALSEENTGKTYFFVANKYWRYDEYKRSMDPGYPKMIAHDFPGIGHKVDAVFMKDGFFYFFHGTRQYKFDPKTKRILTLQKANSWFNCRKN

SEQ ID NO: 1424 - protein, 450 aa, Artificial Sequence
  MMP-1 variant A118P
FPATLETQEQDVDLVQKYLEKYYNLKNDGRQVEKRRNSGPVVEKLKQMQEFFGLKVTGKPDAETLKVMKQPRCGVPDVAQFVLTEGNPRWEQTHLTYRIENYTPDLPRADVDHAIEKPFQLWSNVTPLTFTKVSEGQADIMISFVRGDHRDNSPFDGPGGNLAHAFQPGPGIGGDAHFDEDERWTNNFREYNLHRVAAHELGHSLGLSHSTDIGALMYPSYTFSGDVQLAQDDIDGIQAIYGRSQNPVQPIGPQTPKACDSKLTFDAITTIRGEVMFFKDRFYMRTNPFYPEVELNFISVFWPQLPNGLEAAYEFADRDEVRFFKGNKYWAVQGQNVLHGYPKDIYSSFGFPRTVKHIDAALSEENTGKTYFFVANKYWRYDEYKRSMDPGYPKMIAHDFPGIGHKVDAVFMKDGFFYFFHGTRQYKFDPKTKRILTLQKANSWFNCRKN

SEQ ID NO: 1425 - protein, 450 aa, Artificial Sequence
  MMP-1 variant F119D
FPATLETQEQDVDLVQKYLEKYYNLKNDGRQVEKRRNSGPVVEKLKQMQEFFGLKVTGKPDAETLKVMKQPRCGVPDVAQFVLTEGNPRWEQTHLTYRIENYTPDLPRADVDHAIEKADQLWSNVTPLTFTKVSEGQADIMISFVRGDHRDNSPFDGPGGNLAHAFQPGPGIGGDAHFDEDERWTNNFREYNLHRVAAHELGHSLGLSHSTDIGALMYPSYTFSGDVQLAQDDIDGIQAIYGRSQNPVQPIGPQTPKACDSKLTFDAITTIRGEVMFFKDRFYMRTNPFYPEVELNFISVFWPQLPNGLEAAYEFADRDEVRFFKGNKYWAVQGQNVLHGYPKDIYSSFGFPRTVKHIDAALSEENTGKTYFFVANKYWRYDEYKRSMDPGYPKMIAHDFPGIGHKVDAVFMKDGFFYFFHGTRQYKFDPKTKRILTLQKANSWFNCRKN

SEQ ID NO: 1426 - protein, 450 aa, Artificial Sequence
  MMP-1 variant F119E
FPATLETQEQDVDLVQKYLEKYYNLKNDGRQVEKRRNSGPVVEKLKQMQEFFGLKVTGKPDAETLKVMKQPRCGVPDVAQFVLTEGNPRWEQTHLTYRIENYTPDLPRADVDHAIEKAEQLWSNVTPLTFTKVSEGQADIMISFVRGDHRDNSPFDGPGGNLAHAFQPGPGIGGDAHFDEDERWTNNFREYNLHRVAAHELGHSLGLSHSTDIGALMYPSYTFSGDVQLAQDDIDGIQAIYGRSQNPVQPIGPQTPKACDSKLTFDAITTIRGEVMFFKDRFYMRTNPFYPEVELNFISVFWPQLPNGLEAAYEFADRDEVRFFKGNKYWAVQGQNVLHGYPKDIYSSFGFPRTVKHIDAALSEENTGKTYFFVANKYWRYDEYKRSMDPGYPKMIAHDFPGIGHKVDAVFMKDGFFYFFHGTRQYKFDPKTKRILTLQKANSWFNCRKN

SEQ ID NO: 1427 - protein, 450 aa, Artificial Sequence
  MMP-1 variant F119H
FPATLETQEQDVDLVQKYLEKYYNLKNDGRQVEKRRNSGPVVEKLKQMQEFFGLKVTGKPDAETLKVMKQPRCGVPDVAQFVLTEGNPRWEQTHLTYRIENYTPDLPRADVDHAIEKAHQLWSNVTPLTFTKVSEGQADIMISFVRGDHRDNSPFDGPGGNLAHAFQPGPGIGGDAHFDEDERWTNNFREYNLHRVAAHELGHSLGLSHSTDIGALMYPSYTFSGDVQLAQDDIDGIQAIYGRSQNPVQPIGPQTPKACDSKLTFDAITTIRGEVMFFKDRFYMRTNPFYPEVELNFISVFWPQLPNGLEAAYEFADRDEVRFFKGNKYWAVQGQNVLHGYPKDIYSSFGFPRTVKHIDAALSEENTGKTYFFVANKYWRYDEYKRSMDPGYPKMIAHDFPGIGHKVDAVFMKDGFFYFFHGTRQYKFDPKTKRILTLQKANSWFNCRKN

SEQ ID NO: 1428 - protein, 450 aa, Artificial Sequence
  MMP-1 variant F119K
FPATLETQEQDVDLVQKYLEKYYNLKNDGRQVEKRRNSGPVVEKLKQMQEFFGLKVTGKPDAETLKVMKQPRCGVPDVAQFVLTEGNPRWEQTHLTYRIENYTPDLPRADVDHAIEKAKQLWSNVTPLTFTKVSEGQADIMISFVRGDHRDNSPFDGPGGNLAHAFQPGPGIGGDAHFDEDERWTNNFREYNLHRVAAHELGHSLGLSHSTDIGALMYPSYTFSGDVQLAQDDIDGIQAIYGRSQNPVQPIGPQTPKACDSKLTFDAITTIRGEVMFFKDRFYMRTNPFYPEVELNFISVFWPQLPNGLEAAYEFADRDEVRFFKGNKYWAVQGQNVLHGYPKDIYSSFGFPRTVKHIDAALSEENTGKTYFFVANKYWRYDEYKRSMDPGYPKMIAHDFPGIGHKVDAVFMKDGFFYFFHGTRQYKFDPKTKRILTLQKANSWFNCRKN

SEQ ID NO: 1429 - protein, 450 aa, Artificial Sequence
  MMP-1 variant F119R
FPATLETQEQDVDLVQKYLEKYYNLKNDGRQVEKRRNSGPVVEKLKQMQEFFGLKVTGKPDAETLKVMKQPRCGVPDVAQFVLTEGNPRWEQTHLTYRIENYTPDLPRADVDHAIEKARQLWSNVTPLTFTKVSEGQADIMISFVRGDHRDNSPFDGPGGNLAHAFQPGPGIGGDAHFDEDERWTNNFREYNLHRVAAHELGHSLGLSHSTDIGALMYPSYTFSGDVQLAQDDIDGIQAIYGRSQNPVQPIGPQTPKACDSKLTFDAITTIRGEVMFFKDRFYMRTNPFYPEVELNFISVFWPQLPNGLEAAYEFADRDEVRFFKGNKYWAVQGQNVLHGYPKDIYSSFGFPRTVKHIDAALSEENTGKTYFFVANKYWRYDEYKRSMDPGYPKMIAHDFPGIGHKVDAVFMKDGFFYFFHGTRQYKFDPKTKRILTLQKANSWFNCRKN

SEQ ID NO: 1430 - protein, 450 aa, Artificial Sequence
  MMP-1 variant F119C
FPATLETQEQDVDLVQKYLEKYYNLKNDGRQVEKRRNSGPVVEKLKQMQEFFGLKVTGKPDAETLKVMKQPRCGVPDVAQFVLTEGNPRWEQTHLTYRIENYTPDLPRADVDHAIEKACQLWSNVTPLTFTKVSEGQADIMISFVRGDHRDNSPFDGPGGNLAHAFQPGPGIGGDAHFDEDERWTNNFREYNLHRVAAHELGHSLGLSHSTDIGALMYPSYTFSGDVQLAQDDIDGIQAIYGRSQNPVQPIGPQTPKACDSKLTFDAITTIRGEVMFFKDRFYMRTNPFYPEVELNFISVFWPQLPNGLEAAYEFADRDEVRFFKGNKYWAVQGQNVLHGYPKDIYSSFGFPRTVKHIDAALSEENTGKTYFFVANKYWRYDEYKRSMDPGYPKMIAHDFPGIGHKVDAVFMKDGFFYFFHGTRQYKFDPKTKRILTLQKANSWFNCRKN

SEQ ID NO: 1431 - protein, 450 aa, Artificial Sequence
  MMP-1 variant F119N
FPATLETQEQDVDLVQKYLEKYYNLKNDGRQVEKRRNSGPVVEKLKQMQEFFGLKVTGKPDAETLKVMKQPRCGVPDVAQFVLTEGNPRWEQTHLTYRIENYTPDLPRADVDHAIEKANQLWSNVTPLTFTKVSEGQADIMISFVRGDHRDNSPFDGPGGNLAHAFQPGPGIGGDAHFDEDERWTNNFREYNLHRVAAHELGHSLGLSHSTDIGALMYPSYTFSGDVQLAQDDIDGIQAIYGRSQNPVQPIGPQTPKACDSKLTFDAITTIRGEVMFFKDRFYMRTNPFYPEVELNFISVFWPQLPNGLEAAYEFADRDEVRFFKGNKYWAVQGQNVLHGYPKDIYSSFGFPRTVKHIDAALSEENTGKTYFFVANKYWRYDEYKRSMDPGYPKMIAHDFPGIGHKVDAVFMKDGFFYFFHGTRQYKFDPKTKRILTLQKANSWFNCRKN

SEQ ID NO: 1432 - protein, 450 aa, Artificial Sequence
  MMP-1 variant F119Q
FPATLETQEQDVDLVQKYLEKYYNLKNDGRQVEKRRNSGPVVEKLKQMQEFFGLKVTGKPDAETLKVMKQPRCGVPDVAQFVLTEGNPRWEQTHLTYRIENYTPDLPRADVDHAIEKAQQLWSNVTPLTFTKVSEGQADIMISFVRGDHRDNSPFDGPGGNLAHAFQPGPGIGGDAHFDEDERWTNNFREYNLHRVAAHELGHSLGLSHSTDIGALMYPSYTFSGDVQLAQDDIDGIQAIYGRSQNPVQPIGPQTPKACDSKLTFDAITTIRGEVMFFKDRFYMRTNPFYPEVELNFISVFWPQLPNGLEAAYEFADRDEVRFFKGNKYWAVQGQNVLHGYPKDIYSSFGFPRTVKHIDAALSEENTGKTYFFVANKYWRYDEYKRSMDPGYPKMIAHDFPGIGHKVDAVFMKDGFFYFFHGTRQYKFDPKTKRILTLQKANSWFNCRKN

SEQ ID NO: 1433 - protein, 450 aa, Artificial Sequence
  MMP-1 variant F119T
FPATLETQEQDVDLVQKYLEKYYNLKNDGRQVEKRRNSGPVVEKLKQMQEFFGLKVTGKPDAETLKVMKQPRCGVPDVAQFVLTEGNPRWEQTHLTYRIENYTPDLPRADVDHAIEKATQLWSNVTPLTFTKVSEGQADIMISFVRGDHRDNSPFDGPGGNLAHAFQPGPGIGGDAHFDEDERWTNNFREYNLHRVAAHELGHSLGLSHSTDIGALMYPSYTFSGDVQLAQDDIDGIQAIYGRSQNPVQPIGPQTPKACDSKLTFDAITTIRGEVMFFKDRFYMRTNPFYPEVELNFISVFWPQLPNGLEAAYEFADRDEVRFFKGNKYWAVQGQNVLHGYPKDIYSSFGFPRTVKHIDAALSEENTGKTYFFVANKYWRYDEYKRSMDPGYPKMIAHDFPGIGHKVDAVFMKDGFFYFFHGTRQYKFDPKTKRILTLQKANSWFNCRKN

SEQ ID NO: 1434 - protein, 450 aa, Artificial Sequence
  MMP-1 variant F119Y
FPATLETQEQDVDLVQKYLEKYYNLKNDGRQVEKRRNSGPVVEKLKQMQEFFGLKVTGKPDAETLKVMKQPRCGVPDVAQFVLTEGNPRWEQTHLTYRIENYTPDLPRADVDHAIEKAYQLWSNVTPLTFTKVSEGQADIMISFVRGDHRDNSPFDGPGGNLAHAFQPGPGIGGDAHFDEDERWTNNFREYNLHRVAAHELGHSLGLSHSTDIGALMYPSYTFSGDVQLAQDDIDGIQAIYGRSQNPVQPIGPQTPKACDSKLTFDAITTIRGEVMFFKDRFYMRTNPFYPEVELNFISVFWPQLPNGLEAAYEFADRDEVRFFKGNKYWAVQGQNVLHGYPKDIYSSFGFPRTVKHIDAALSEENTGKTYFFVANKYWRYDEYKRSMDPGYPKMIAHDFPGIGHKVDAVFMKDGFFYFFHGTRQYKFDPKTKRILTLQKANSWFNCRKN

SEQ ID NO: 1435 - protein, 450 aa, Artificial Sequence
  MMP-1 variant F119S
FPATLETQEQDVDLVQKYLEKYYNLKNDGRQVEKRRNSGPVVEKLKQMQEFFGLKVTGKPDAETLKVMKQPRCGVPDVAQFVLTEGNPRWEQTHLTYRIENYTPDLPRADVDHAIEKASQLWSNVTPLTFTKVSEGQADIMISFVRGDHRDNSPFDGPGGNLAHAFQPGPGIGGDAHFDEDERWTNNFREYNLHRVAAHELGHSLGLSHSTDIGALMYPSYTFSGDVQLAQDDIDGIQAIYGRSQNPVQPIGPQTPKACDSKLTFDAITTIRGEVMFFKDRFYMRTNPFYPEVELNFISVFWPQLPNGLEAAYEFADRDEVRFFKGNKYWAVQGQNVLHGYPKDIYSSFGFPRTVKHIDAALSEENTGKTYFFVANKYWRYDEYKRSMDPGYPKMIAHDFPGIGHKVDAVFMKDGFFYFFHGTRQYKFDPKTKRILTLQKANSWFNCRKN

SEQ ID NO: 1436 - protein, 450 aa, Artificial Sequence
  MMP-1 variant F119G
FPATLETQEQDVDLVQKYLEKYYNLKNDGRQVEKRRNSGPVVEKLKQMQEFFGLKVTGKPDAETLKVMKQPRCGVPDVAQFVLTEGNPRWEQTHLTYRIENYTPDLPRADVDHAIEKAGQLWSNVTPLTFTKVSEGQADIMISFVRGDHRDNSPFDGPGGNLAHAFQPGPGIGGDAHFDEDERWTNNFREYNLHRVAAHELGHSLGLSHSTDIGALMYPSYTFSGDVQLAQDDIDGIQAIYGRSQNPVQPIGPQTPKACDSKLTFDAITTIRGEVMFFKDRFYMRTNPFYPEVELNFISVFWPQLPNGLEAAYEFADRDEVRFFKGNKYWAVQGQNVLHGYPKDIYSSFGFPRTVKHIDAALSEENTGKTYFFVANKYWRYDEYKRSMDPGYPKMIAHDFPGIGHKVDAVFMKDGFFYFFHGTRQYKFDPKTKRILTLQKANSWFNCRKN

SEQ ID NO: 1437 - protein, 450 aa, Artificial Sequence
  MMP-1 variant F119M
FPATLETQEQDVDLVQKYLEKYYNLKNDGRQVEKRRNSGPVVEKLKQMQEFFGLKVTGKPDAETLKVMKQPRCGVPDVAQFVLTEGNPRWEQTHLTYRIENYTPDLPRADVDHAIEKAMQLWSNVTPLTFTKVSEGQADIMISFVRGDHRDNSPFDGPGGNLAHAFQPGPGIGGDAHFDEDERWTNNFREYNLHRVAAHELGHSLGLSHSTDIGALMYPSYTFSGDVQLAQDDIDGIQAIYGRSQNPVQPIGPQTPKACDSKLTFDAITTIRGEVMFFKDRFYMRTNPFYPEVELNFISVFWPQLPNGLEAAYEFADRDEVRFFKGNKYWAVQGQNVLHGYPKDIYSSFGFPRTVKHIDAALSEENTGKTYFFVANKYWRYDEYKRSMDPGYPKMIAHDFPGIGHKVDAVFMKDGFFYFFHGTRQYKFDPKTKRILTLQKANSWFNCRKN

SEQ ID NO: 1438 - protein, 450 aa, Artificial Sequence
  MMP-1 variant F119W
FPATLETQEQDVDLVQKYLEKYYNLKNDGRQVEKRRNSGPVVEKLKQMQEFFGLKVTGKPDAETLKVMKQPRCGVPDVAQFVLTEGNPRWEQTHLTYRIENYTPDLPRADVDHAIEKAWQLWSNVTPLTFTKVSEGQADIMISFVRGDHRDNSPFDGPGGNLAHAFQPGPGIGGDAHFDEDERWTNNFREYNLHRVAAHELGHSLGLSHSTDIGALMYPSYTFSGDVQLAQDDIDGIQAIYGRSQNPVQPIGPQTPKACDSKLTFDAITTIRGEVMFFKDRFYMRTNPFYPEVELNFISVFWPQLPNGLEAAYEFADRDEVRFFKGNKYWAVQGQNVLHGYPKDIYSSFGFPRTVKHIDAALSEENTGKTYFFVANKYWRYDEYKRSMDPGYPKMIAHDFPGIGHKVDAVFMKDGFFYFFHGTRQYKFDPKTKRILTLQKANSWFNCRKN

SEQ ID NO: 1439 - protein, 450 aa, Artificial Sequence
  MMP-1 variant F119I
FPATLETQEQDVDLVQKYLEKYYNLKNDGRQVEKRRNSGPVVEKLKQMQEFFGLKVTGKPDAETLKVMKQPRCGVPDVAQFVLTEGNPRWEQTHLTYRIENYTPDLPRADVDHAIEKAIQLWSNVTPLTFTKVSEGQADIMISFVRGDHRDNSPFDGPGGNLAHAFQPGPGIGGDAHFDEDERWTNNFREYNLHRVAAHELGHSLGLSHSTDIGALMYPSYTFSGDVQLAQDDIDGIQAIYGRSQNPVQPIGPQTPKACDSKLTFDAITTIRGEVMFFKDRFYMRTNPFYPEVELNFISVFWPQLPNGLEAAYEFADRDEVRFFKGNKYWAVQGQNVLHGYPKDIYSSFGFPRTVKHIDAALSEENTGKTYFFVANKYWRYDEYKRSMDPGYPKMIAHDFPGIGHKVDAVFMKDGFFYFFHGTRQYKFDPKTKRILTLQKANSWFNCRKN

SEQ ID NO: 1440 - protein, 450 aa, Artificial Sequence
  MMP-1 variant F119V
FPATLETQEQDVDLVQKYLEKYYNLKNDGRQVEKRRNSGPVVEKLKQMQEFFGLKVTGKPDAETLKVMKQPRCGVPDVAQFVLTEGNPRWEQTHLTYRIENYTPDLPRADVDHAIEKAVQLWSNVTPLTFTKVSEGQADIMISFVRGDHRDNSPFDGPGGNLAHAFQPGPGIGGDAHFDEDERWTNNFREYNLHRVAAHELGHSLGLSHSTDIGALMYPSYTFSGDVQLAQDDIDGIQAIYGRSQNPVQPIGPQTPKACDSKLTFDAITTIRGEVMFFKDRFYMRTNPFYPEVELNFISVFWPQLPNGLEAAYEFADRDEVRFFKGNKYWAVQGQNVLHGYPKDIYSSFGFPRTVKHIDAALSEENTGKTYFFVANKYWRYDEYKRSMDPGYPKMIAHDFPGIGHKVDAVFMKDGFFYFFHGTRQYKFDPKTKRILTLQKANSWFNCRKN

SEQ ID NO: 1441 - protein, 450 aa, Artificial Sequence
  MMP-1 variant F119L
FPATLETQEQDVDLVQKYLEKYYNLKNDGRQVEKRRNSGPVVEKLKQMQEFFGLKVTGKPDAETLKVMKQPRCGVPDVAQFVLTEGNPRWEQTHLTYRIENYTPDLPRADVDHAIEKALQLWSNVTPLTFTKVSEGQADIMISFVRGDHRDNSPFDGPGGNLAHAFQPGPGIGGDAHFDEDERWTNNFREYNLHRVAAHELGHSLGLSHSTDIGALMYPSYTFSGDVQLAQDDIDGIQAIYGRSQNPVQPIGPQTPKACDSKLTFDAITTIRGEVMFFKDRFYMRTNPFYPEVELNFISVFWPQLPNGLEAAYEFADRDEVRFFKGNKYWAVQGQNVLHGYPKDIYSSFGFPRTVKHIDAALSEENTGKTYFFVANKYWRYDEYKRSMDPGYPKMIAHDFPGIGHKVDAVFMKDGFFYFFHGTRQYKFDPKTKRILTLQKANSWFNCRKN

SEQ ID NO: 1442 - protein, 450 aa, Artificial Sequence
  MMP-1 variant F119A
FPATLETQEQDVDLVQKYLEKYYNLKNDGRQVEKRRNSGPVVEKLKQMQEFFGLKVTGKPDAETLKVMKQPRCGVPDVAQFVLTEGNPRWEQTHLTYRIENYTPDLPRADVDHAIEKAAQLWSNVTPLTFTKVSEGQADIMISFVRGDHRDNSPFDGPGGNLAHAFQPGPGIGGDAHFDEDERWTNNFREYNLHRVAAHELGHSLGLSHSTDIGALMYPSYTFSGDVQLAQDDIDGIQAIYGRSQNPVQPIGPQTPKACDSKLTFDAITTIRGEVMFFKDRFYMRTNPFYPEVELNFISVFWPQLPNGLEAAYEFADRDEVRFFKGNKYWAVQGQNVLHGYPKDIYSSFGFPRTVKHIDAALSEENTGKTYFFVANKYWRYDEYKRSMDPGYPKMIAHDFPGIGHKVDAVFMKDGFFYFFHGTRQYKFDPKTKRILTLQKANSWFNCRKN

SEQ ID NO: 1443 - protein, 450 aa, Artificial Sequence
  MMP-1 variant F119P
FPATLETQEQDVDLVQKYLEKYYNLKNDGRQVEKRRNSGPVVEKLKQMQEFFGLKVTGKPDAETLKVMKQPRCGVPDVAQFVLTEGNPRWEQTHLTYRIENYTPDLPRADVDHAIEKAPQLWSNVTPLTFTKVSEGQADIMISFVRGDHRDNSPFDGPGGNLAHAFQPGPGIGGDAHFDEDERWTNNFREYNLHRVAAHELGHSLGLSHSTDIGALMYPSYTFSGDVQLAQDDIDGIQAIYGRSQNPVQPIGPQTPKACDSKLTFDAITTIRGEVMFFKDRFYMRTNPFYPEVELNFISVFWPQLPNGLEAAYEFADRDEVRFFKGNKYWAVQGQNVLHGYPKDIYSSFGFPRTVKHIDAALSEENTGKTYFFVANKYWRYDEYKRSMDPGYPKMIAHDFPGIGHKVDAVFMKDGFFYFFHGTRQYKFDPKTKRILTLQKANSWFNCRKN

SEQ ID NO: 1444 - protein, 450 aa, Artificial Sequence
  MMP-1 variant Q120D
FPATLETQEQDVDLVQKYLEKYYNLKNDGRQVEKRRNSGPVVEKLKQMQEFFGLKVTGKPDAETLKVMKQPRCGVPDVAQFVLTEGNPRWEQTHLTYRIENYTPDLPRADVDHAIEKAFDLWSNVTPLTFTKVSEGQADIMISFVRGDHRDNSPFDGPGGNLAHAFQPGPGIGGDAHFDEDERWTNNFREYNLHRVAAHELGHSLGLSHSTDIGALMYPSYTFSGDVQLAQDDIDGIQAIYGRSQNPVQPIGPQTPKACDSKLTFDAITTIRGEVMFFKDRFYMRTNPFYPEVELNFISVFWPQLPNGLEAAYEFADRDEVRFFKGNKYWAVQGQNVLHGYPKDIYSSFGFPRTVKHIDAALSEENTGKTYFFVANKYWRYDEYKRSMDPGYPKMIAHDFPGIGHKVDAVFMKDGFFYFFHGTRQYKFDPKTKRILTLQKANSWFNCRKN

SEQ ID NO: 1445 - protein, 450 aa, Artificial Sequence
  MMP-1 variant Q120E
FPATLETQEQDVDLVQKYLEKYYNLKNDGRQVEKRRNSGPVVEKLKQMQEFFGLKVTGKPDAETLKVMKQPRCGVPDVAQFVLTEGNPRWEQTHLTYRIENYTPDLPRADVDHAIEKAFELWSNVTPLTFTKVSEGQADIMISFVRGDHRDNSPFDGPGGNLAHAFQPGPGIGGDAHFDEDERWTNNFREYNLHRVAAHELGHSLGLSHSTDIGALMYPSYTFSGDVQLAQDDIDGIQAIYGRSQNPVQPIGPQTPKACDSKLTFDAITTIRGEVMFFKDRFYMRTNPFYPEVELNFISVFWPQLPNGLEAAYEFADRDEVRFFKGNKYWAVQGQNVLHGYPKDIYSSFGFPRTVKHIDAALSEENTGKTYFFVANKYWRYDEYKRSMDPGYPKMIAHDFPGIGHKVDAVFMKDGFFYFFHGTRQYKFDPKTKRILTLQKANSWFNCRKN

SEQ ID NO: 1446 - protein, 450 aa, Artificial Sequence
  MMP-1 variant Q120H
FPATLETQEQDVDLVQKYLEKYYNLKNDGRQVEKRRNSGPVVEKLKQMQEFFGLKVTGKPDAETLKVMKQPRCGVPDVAQFVLTEGNPRWEQTHLTYRIENYTPDLPRADVDHAIEKAFHLWSNVTPLTFTKVSEGQADIMISFVRGDHRDNSPFDGPGGNLAHAFQPGPGIGGDAHFDEDERWTNNFREYNLHRVAAHELGHSLGLSHSTDIGALMYPSYTFSGDVQLAQDDIDGIQAIYGRSQNPVQPIGPQTPKACDSKLTFDAITTIRGEVMFFKDRFYMRTNPFYPEVELNFISVFWPQLPNGLEAAYEFADRDEVRFFKGNKYWAVQGQNVLHGYPKDIYSSFGFPRTVKHIDAALSEENTGKTYFFVANKYWRYDEYKRSMDPGYPKMIAHDFPGIGHKVDAVFMKDGFFYFFHGTRQYKFDPKTKRILTLQKANSWFNCRKN

SEQ ID NO: 1447 - protein, 450 aa, Artificial Sequence
  MMP-1 variant Q120K
FPATLETQEQDVDLVQKYLEKYYNLKNDGRQVEKRRNSGPVVEKLKQMQEFFGLKVTGKPDAETLKVMKQPRCGVPDVAQFVLTEGNPRWEQTHLTYRIENYTPDLPRADVDHAIEKAFKLWSNVTPLTFTKVSEGQADIMISFVRGDHRDNSPFDGPGGNLAHAFQPGPGIGGDAHFDEDERWTNNFREYNLHRVAAHELGHSLGLSHSTDIGALMYPSYTFSGDVQLAQDDIDGIQAIYGRSQNPVQPIGPQTPKACDSKLTFDAITTIRGEVMFFKDRFYMRTNPFYPEVELNFISVFWPQLPNGLEAAYEFADRDEVRFFKGNKYWAVQGQNVLHGYPKDIYSSFGFPRTVKHIDAALSEENTGKTYFFVANKYWRYDEYKRSMDPGYPKMIAHDFPGIGHKVDAVFMKDGFFYFFHGTRQYKFDPKTKRILTLQKANSWFNCRKN

SEQ ID NO: 1448 - protein, 450 aa, Artificial Sequence
  MMP-1 variant Q120R
FPATLETQEQDVDLVQKYLEKYYNLKNDGRQVEKRRNSGPVVEKLKQMQEFFGLKVTGKPDAETLKVMKQPRCGVPDVAQFVLTEGNPRWEQTHLTYRIENYTPDLPRADVDHAIEKAFRLWSNVTPLTFTKVSEGQADIMISFVRGDHRDNSPFDGPGGNLAHAFQPGPGIGGDAHFDEDERWTNNFREYNLHRVAAHELGHSLGLSHSTDIGALMYPSYTFSGDVQLAQDDIDGIQAIYGRSQNPVQPIGPQTPKACDSKLTFDAITTIRGEVMFFKDRFYMRTNPFYPEVELNFISVFWPQLPNGLEAAYEFADRDEVRFFKGNKYWAVQGQNVLHGYPKDIYSSFGFPRTVKHIDAALSEENTGKTYFFVANKYWRYDEYKRSMDPGYPKMIAHDFPGIGHKVDAVFMKDGFFYFFHGTRQYKFDPKTKRILTLQKANSWFNCRKN

SEQ ID NO: 1449 - protein, 450 aa, Artificial Sequence
  MMP-1 variant Q120C
FPATLETQEQDVDLVQKYLEKYYNLKNDGRQVEKRRNSGPVVEKLKQMQEFFGLKVTGKPDAETLKVMKQPRCGVPDVAQFVLTEGNPRWEQTHLTYRIENYTPDLPRADVDHAIEKAFCLWSNVTPLTFTKVSEGQADIMISFVRGDHRDNSPFDGPGGNLAHAFQPGPGIGGDAHFDEDERWTNNFREYNLHRVAAHELGHSLGLSHSTDIGALMYPSYTFSGDVQLAQDDIDGIQAIYGRSQNPVQPIGPQTPKACDSKLTFDAITTIRGEVMFFKDRFYMRTNPFYPEVELNFISVFWPQLPNGLEAAYEFADRDEVRFFKGNKYWAVQGQNVLHGYPKDIYSSFGFPRTVKHIDAALSEENTGKTYFFVANKYWRYDEYKRSMDPGYPKMIAHDFPGIGHKVDAVFMKDGFFYFFHGTRQYKFDPKTKRILTLQKANSWFNCRKN

SEQ ID NO: 1450 - protein, 450 aa, Artificial Sequence
  MMP-1 variant Q120N
FPATLETQEQDVDLVQKYLEKYYNLKNDGRQVEKRRNSGPVVEKLKQMQEFFGLKVTGKPDAETLKVMKQPRCGVPDVAQFVLTEGNPRWEQTHLTYRIENYTPDLPRADVDHAIEKAFNLWSNVTPLTFTKVSEGQADIMISFVRGDHRDNSPFDGPGGNLAHAFQPGPGIGGDAHFDEDERWTNNFREYNLHRVAAHELGHSLGLSHSTDIGALMYPSYTFSGDVQLAQDDIDGIQAIYGRSQNPVQPIGPQTPKACDSKLTFDAITTIRGEVMFFKDRFYMRTNPFYPEVELNFISVFWPQLPNGLEAAYEFADRDEVRFFKGNKYWAVQGQNVLHGYPKDIYSSFGFPRTVKHIDAALSEENTGKTYFFVANKYWRYDEYKRSMDPGYPKMIAHDFPGIGHKVDAVFMKDGFFYFFHGTRQYKFDPKTKRILTLQKANSWFNCRKN

SEQ ID NO: 1451 - protein, 450 aa, Artificial Sequence
  MMP-1 variant Q120T
FPATLETQEQDVDLVQKYLEKYYNLKNDGRQVEKRRNSGPVVEKLKQMQEFFGLKVTGKPDAETLKVMKQPRCGVPDVAQFVLTEGNPRWEQTHLTYRIENYTPDLPRADVDHAIEKAFTLWSNVTPLTFTKVSEGQADIMISFVRGDHRDNSPFDGPGGNLAHAFQPGPGIGGDAHFDEDERWTNNFREYNLHRVAAHELGHSLGLSHSTDIGALMYPSYTFSGDVQLAQDDIDGIQAIYGRSQNPVQPIGPQTPKACDSKLTFDAITTIRGEVMFFKDRFYMRTNPFYPEVELNFISVFWPQLPNGLEAAYEFADRDEVRFFKGNKYWAVQGQNVLHGYPKDIYSSFGFPRTVKHIDAALSEENTGKTYFFVANKYWRYDEYKRSMDPGYPKMIAHDFPGIGHKVDAVFMKDGFFYFFHGTRQYKFDPKTKRILTLQKANSWFNCRKN

SEQ ID NO: 1452 - protein, 450 aa, Artificial Sequence
  MMP-1 variant Q120Y
FPATLETQEQDVDLVQKYLEKYYNLKNDGRQVEKRRNSGPVVEKLKQMQEFFGLKVTGKPDAETLKVMKQPRCGVPDVAQFVLTEGNPRWEQTHLTYRIENYTPDLPRADVDHAIEKAFYLWSNVTPLTFTKVSEGQADIMISFVRGDHRDNSPFDGPGGNLAHAFQPGPGIGGDAHFDEDERWTNNFREYNLHRVAAHELGHSLGLSHSTDIGALMYPSYTFSGDVQLAQDDIDGIQAIYGRSQNPVQPIGPQTPKACDSKLTFDAITTIRGEVMFFKDRFYMRTNPFYPEVELNFISVFWPQLPNGLEAAYEFADRDEVRFFKGNKYWAVQGQNVLHGYPKDIYSSFGFPRTVKHIDAALSEENTGKTYFFVANKYWRYDEYKRSMDPGYPKMIAHDFPGIGHKVDAVFMKDGFFYFFHGTRQYKFDPKTKRILTLQKANSWFNCRKN

SEQ ID NO: 1453 - protein, 450 aa, Artificial Sequence
  MMP-1 variant Q120S
FPATLETQEQDVDLVQKYLEKYYNLKNDGRQVEKRRNSGPVVEKLKQMQEFFGLKVTGKPDAETLKVMKQPRCGVPDVAQFVLTEGNPRWEQTHLTYRIENYTPDLPRADVDHAIEKAFSLWSNVTPLTFTKVSEGQADIMISFVRGDHRDNSPFDGPGGNLAHAFQPGPGIGGDAHFDEDERWTNNFREYNLHRVAAHELGHSLGLSHSTDIGALMYPSYTFSGDVQLAQDDIDGIQAIYGRSQNPVQPIGPQTPKACDSKLTFDAITTIRGEVMFFKDRFYMRTNPFYPEVELNFISVFWPQLPNGLEAAYEFADRDEVRFFKGNKYWAVQGQNVLHGYPKDIYSSFGFPRTVKHIDAALSEENTGKTYFFVANKYWRYDEYKRSMDPGYPKMIAHDFPGIGHKVDAVFMKDGFFYFFHGTRQYKFDPKTKRILTLQKANSWFNCRKN

SEQ ID NO: 1454 - protein, 450 aa, Artificial Sequence
  MMP-1 variant Q120G
FPATLETQEQDVDLVQKYLEKYYNLKNDGRQVEKRRNSGPVVEKLKQMQEFFGLKVTGKPDAETLKVMKQPRCGVPDVAQFVLTEGNPRWEQTHLTYRIENYTPDLPRADVDHAIEKAFGLWSNVTPLTFTKVSEGQADIMISFVRGDHRDNSPFDGPGGNLAHAFQPGPGIGGDAHFDEDERWTNNFREYNLHRVAAHELGHSLGLSHSTDIGALMYPSYTFSGDVQLAQDDIDGIQAIYGRSQNPVQPIGPQTPKACDSKLTFDAITTIRGEVMFFKDRFYMRTNPFYPEVELNFISVFWPQLPNGLEAAYEFADRDEVRFFKGNKYWAVQGQNVLHGYPKDIYSSFGFPRTVKHIDAALSEENTGKTYFFVANKYWRYDEYKRSMDPGYPKMIAHDFPGIGHKVDAVFMKDGFFYFFHGTRQYKFDPKTKRILTLQKANSWFNCRKN

SEQ ID NO: 1455 - protein, 450 aa, Artificial Sequence
  MMP-1 variant Q120F
FPATLETQEQDVDLVQKYLEKYYNLKNDGRQVEKRRNSGPVVEKLKQMQEFFGLKVTGKPDAETLKVMKQPRCGVPDVAQFVLTEGNPRWEQTHLTYRIENYTPDLPRADVDHAIEKAFFLWSNVTPLTFTKVSEGQADIMISFVRGDHRDNSPFDGPGGNLAHAFQPGPGIGGDAHFDEDERWTNNFREYNLHRVAAHELGHSLGLSHSTDIGALMYPSYTFSGDVQLAQDDIDGIQAIYGRSQNPVQPIGPQTPKACDSKLTFDAITTIRGEVMFFKDRFYMRTNPFYPEVELNFISVFWPQLPNGLEAAYEFADRDEVRFFKGNKYWAVQGQNVLHGYPKDIYSSFGFPRTVKHIDAALSEENTGKTYFFVANKYWRYDEYKRSMDPGYPKMIAHDFPGIGHKVDAVFMKDGFFYFFHGTRQYKFDPKTKRILTLQKANSWFNCRKN

SEQ ID NO: 1456 - protein, 450 aa, Artificial Sequence
  MMP-1 variant Q120M
FPATLETQEQDVDLVQKYLEKYYNLKNDGRQVEKRRNSGPVVEKLKQMQEFFGLKVTGKPDAETLKVMKQPRCGVPDVAQFVLTEGNPRWEQTHLTYRIENYTPDLPRADVDHAIEKAFMLWSNVTPLTFTKVSEGQADIMISFVRGDHRDNSPFDGPGGNLAHAFQPGPGIGGDAHFDEDERWTNNFREYNLHRVAAHELGHSLGLSHSTDIGALMYPSYTFSGDVQLAQDDIDGIQAIYGRSQNPVQPIGPQTPKACDSKLTFDAITTIRGEVMFFKDRFYMRTNPFYPEVELNFISVFWPQLPNGLEAAYEFADRDEVRFFKGNKYWAVQGQNVLHGYPKDIYSSFGFPRTVKHIDAALSEENTGKTYFFVANKYWRYDEYKRSMDPGYPKMIAHDFPGIGHKVDAVFMKDGFFYFFHGTRQYKFDPKTKRILTLQKANSWFNCRKN

SEQ ID NO: 1457 - protein, 450 aa, Artificial Sequence
  MMP-1 variant Q120W
FPATLETQEQDVDLVQKYLEKYYNLKNDGRQVEKRRNSGPVVEKLKQMQEFFGLKVTGKPDAETLKVMKQPRCGVPDVAQFVLTEGNPRWEQTHLTYRIENYTPDLPRADVDHAIEKAFWLWSNVTPLTFTKVSEGQADIMISFVRGDHRDNSPFDGPGGNLAHAFQPGPGIGGDAHFDEDERWTNNFREYNLHRVAAHELGHSLGLSHSTDIGALMYPSYTFSGDVQLAQDDIDGIQAIYGRSQNPVQPIGPQTPKACDSKLTFDAITTIRGEVMFFKDRFYMRTNPFYPEVELNFISVFWPQLPNGLEAAYEFADRDEVRFFKGNKYWAVQGQNVLHGYPKDIYSSFGFPRTVKHIDAALSEENTGKTYFFVANKYWRYDEYKRSMDPGYPKMIAHDFPGIGHKVDAVFMKDGFFYFFHGTRQYKFDPKTKRILTLQKANSWFNCRKN

SEQ ID NO: 1458 - protein, 450 aa, Artificial Sequence
  MMP-1 variant Q120I
FPATLETQEQDVDLVQKYLEKYYNLKNDGRQVEKRRNSGPVVEKLKQMQEFFGLKVTGKPDAETLKVMKQPRCGVPDVAQFVLTEGNPRWEQTHLTYRIENYTPDLPRADVDHAIEKAFILWSNVTPLTFTKVSEGQADIMISFVRGDHRDNSPFDGPGGNLAHAFQPGPGIGGDAHFDEDERWTNNFREYNLHRVAAHELGHSLGLSHSTDIGALMYPSYTFSGDVQLAQDDIDGIQAIYGRSQNPVQPIGPQTPKACDSKLTFDAITTIRGEVMFFKDRFYMRTNPFYPEVELNFISVFWPQLPNGLEAAYEFADRDEVRFFKGNKYWAVQGQNVLHGYPKDIYSSFGFPRTVKHIDAALSEENTGKTYFFVANKYWRYDEYKRSMDPGYPKMIAHDFPGIGHKVDAVFMKDGFFYFFHGTRQYKFDPKTKRILTLQKANSWFNCRKN

SEQ ID NO: 1459 - protein, 450 aa, Artificial Sequence
  MMP-1 variant Q120V
FPATLETQEQDVDLVQKYLEKYYNLKNDGRQVEKRRNSGPVVEKLKQMQEFFGLKVTGKPDAETLKVMKQPRCGVPDVAQFVLTEGNPRWEQTHLTYRIENYTPDLPRADVDHAIEKAFVLWSNVTPLTFTKVSEGQADIMISFVRGDHRDNSPFDGPGGNLAHAFQPGPGIGGDAHFDEDERWTNNFREYNLHRVAAHELGHSLGLSHSTDIGALMYPSYTFSGDVQLAQDDIDGIQAIYGRSQNPVQPIGPQTPKACDSKLTFDAITTIRGEVMFFKDRFYMRTNPFYPEVELNFISVFWPQLPNGLEAAYEFADRDEVRFFKGNKYWAVQGQNVLHGYPKDIYSSFGFPRTVKHIDAALSEENTGKTYFFVANKYWRYDEYKRSMDPGYPKMIAHDFPGIGHKVDAVFMKDGFFYFFHGTRQYKFDPKTKRILTLQKANSWFNCRKN

SEQ ID NO: 1460 - protein, 450 aa, Artificial Sequence
  MMP-1 variant Q120L
FPATLETQEQDVDLVQKYLEKYYNLKNDGRQVEKRRNSGPVVEKLKQMQEFFGLKVTGKPDAETLKVMKQPRCGVPDVAQFVLTEGNPRWEQTHLTYRIENYTPDLPRADVDHAIEKAFLLWSNVTPLTFTKVSEGQADIMISFVRGDHRDNSPFDGPGGNLAHAFQPGPGIGGDAHFDEDERWTNNFREYNLHRVAAHELGHSLGLSHSTDIGALMYPSYTFSGDVQLAQDDIDGIQAIYGRSQNPVQPIGPQTPKACDSKLTFDAITTIRGEVMFFKDRFYMRTNPFYPEVELNFISVFWPQLPNGLEAAYEFADRDEVRFFKGNKYWAVQGQNVLHGYPKDIYSSFGFPRTVKHIDAALSEENTGKTYFFVANKYWRYDEYKRSMDPGYPKMIAHDFPGIGHKVDAVFMKDGFFYFFHGTRQYKFDPKTKRILTLQKANSWFNCRKN

SEQ ID NO: 1461 - protein, 450 aa, Artificial Sequence
  MMP-1 variant Q120A
FPATLETQEQDVDLVQKYLEKYYNLKNDGRQVEKRRNSGPVVEKLKQMQEFFGLKVTGKPDAETLKVMKQPRCGVPDVAQFVLTEGNPRWEQTHLTYRIENYTPDLPRADVDHAIEKAFALWSNVTPLTFTKVSEGQADIMISFVRGDHRDNSPFDGPGGNLAHAFQPGPGIGGDAHFDEDERWTNNFREYNLHRVAAHELGHSLGLSHSTDIGALMYPSYTFSGDVQLAQDDIDGIQAIYGRSQNPVQPIGPQTPKACDSKLTFDAITTIRGEVMFFKDRFYMRTNPFYPEVELNFISVFWPQLPNGLEAAYEFADRDEVRFFKGNKYWAVQGQNVLHGYPKDIYSSFGFPRTVKHIDAALSEENTGKTYFFVANKYWRYDEYKRSMDPGYPKMIAHDFPGIGHKVDAVFMKDGFFYFFHGTRQYKFDPKTKRILTLQKANSWFNCRKN

SEQ ID NO: 1462 - protein, 450 aa, Artificial Sequence
  MMP-1 variant Q120P
FPATLETQEQDVDLVQKYLEKYYNLKNDGRQVEKRRNSGPVVEKLKQMQEFFGLKVTGKPDAETLKVMKQPRCGVPDVAQFVLTEGNPRWEQTHLTYRIENYTPDLPRADVDHAIEKAFPLWSNVTPLTFTKVSEGQADIMISFVRGDHRDNSPFDGPGGNLAHAFQPGPGIGGDAHFDEDERWTNNFREYNLHRVAAHELGHSLGLSHSTDIGALMYPSYTFSGDVQLAQDDIDGIQAIYGRSQNPVQPIGPQTPKACDSKLTFDAITTIRGEVMFFKDRFYMRTNPFYPEVELNFISVFWPQLPNGLEAAYEFADRDEVRFFKGNKYWAVQGQNVLHGYPKDIYSSFGFPRTVKHIDAALSEENTGKTYFFVANKYWRYDEYKRSMDPGYPKMIAHDFPGIGHKVDAVFMKDGFFYFFHGTRQYKFDPKTKRILTLQKANSWFNCRKN

SEQ ID NO: 1463 - protein, 450 aa, Artificial Sequence
  MMP-1 variant L121D
FPATLETQEQDVDLVQKYLEKYYNLKNDGRQVEKRRNSGPVVEKLKQMQEFFGLKVTGKPDAETLKVMKQPRCGVPDVAQFVLTEGNPRWEQTHLTYRIENYTPDLPRADVDHAIEKAFQDWSNVTPLTFTKVSEGQADIMISFVRGDHRDNSPFDGPGGNLAHAFQPGPGIGGDAHFDEDERWTNNFREYNLHRVAAHELGHSLGLSHSTDIGALMYPSYTFSGDVQLAQDDIDGIQAIYGRSQNPVQPIGPQTPKACDSKLTFDAITTIRGEVMFFKDRFYMRTNPFYPEVELNFISVFWPQLPNGLEAAYEFADRDEVRFFKGNKYWAVQGQNVLHGYPKDIYSSFGFPRTVKHIDAALSEENTGKTYFFVANKYWRYDEYKRSMDPGYPKMIAHDFPGIGHKVDAVFMKDGFFYFFHGTRQYKFDPKTKRILTLQKANSWFNCRKN

SEQ ID NO: 1464 - protein, 450 aa, Artificial Sequence
  MMP-1 variant L121E
FPATLETQEQDVDLVQKYLEKYYNLKNDGRQVEKRRNSGPVVEKLKQMQEFFGLKVTGKPDAETLKVMKQPRCGVPDVAQFVLTEGNPRWEQTHLTYRIENYTPDLPRADVDHAIEKAFQEWSNVTPLTFTKVSEGQADIMISFVRGDHRDNSPFDGPGGNLAHAFQPGPGIGGDAHFDEDERWTNNFREYNLHRVAAHELGHSLGLSHSTDIGALMYPSYTFSGDVQLAQDDIDGIQAIYGRSQNPVQPIGPQTPKACDSKLTFDAITTIRGEVMFFKDRFYMRTNPFYPEVELNFISVFWPQLPNGLEAAYEFADRDEVRFFKGNKYWAVQGQNVLHGYPKDIYSSFGFPRTVKHIDAALSEENTGKTYFFVANKYWRYDEYKRSMDPGYPKMIAHDFPGIGHKVDAVFMKDGFFYFFHGTRQYKFDPKTKRILTLQKANSWFNCRKN

SEQ ID NO: 1465 - protein, 450 aa, Artificial Sequence
  MMP-1 variant L121H
FPATLETQEQDVDLVQKYLEKYYNLKNDGRQVEKRRNSGPVVEKLKQMQEFFGLKVTGKPDAETLKVMKQPRCGVPDVAQFVLTEGNPRWEQTHLTYRIENYTPDLPRADVDHAIEKAFQHWSNVTPLTFTKVSEGQADIMISFVRGDHRDNSPFDGPGGNLAHAFQPGPGIGGDAHFDEDERWTNNFREYNLHRVAAHELGHSLGLSHSTDIGALMYPSYTFSGDVQLAQDDIDGIQAIYGRSQNPVQPIGPQTPKACDSKLTFDAITTIRGEVMFFKDRFYMRTNPFYPEVELNFISVFWPQLPNGLEAAYEFADRDEVRFFKGNKYWAVQGQNVLHGYPKDIYSSFGFPRTVKHIDAALSEENTGKTYFFVANKYWRYDEYKRSMDPGYPKMIAHDFPGIGHKVDAVFMKDGFFYFFHGTRQYKFDPKTKRILTLQKANSWFNCRKN

SEQ ID NO: 1466 - protein, 450 aa, Artificial Sequence
  MMP-1 variant L121K
FPATLETQEQDVDLVQKYLEKYYNLKNDGRQVEKRRNSGPVVEKLKQMQEFFGLKVTGKPDAETLKVMKQPRCGVPDVAQFVLTEGNPRWEQTHLTYRIENYTPDLPRADVDHAIEKAFQKWSNVTPLTFTKVSEGQADIMISFVRGDHRDNSPFDGPGGNLAHAFQPGPGIGGDAHFDEDERWTNNFREYNLHRVAAHELGHSLGLSHSTDIGALMYPSYTFSGDVQLAQDDIDGIQAIYGRSQNPVQPIGPQTPKACDSKLTFDAITTIRGEVMFFKDRFYMRTNPFYPEVELNFISVFWPQLPNGLEAAYEFADRDEVRFFKGNKYWAVQGQNVLHGYPKDIYSSFGFPRTVKHIDAALSEENTGKTYFFVANKYWRYDEYKRSMDPGYPKMIAHDFPGIGHKVDAVFMKDGFFYFFHGTRQYKFDPKTKRILTLQKANSWFNCRKN

SEQ ID NO: 1467 - protein, 450 aa, Artificial Sequence
  MMP-1 variant L121R
FPATLETQEQDVDLVQKYLEKYYNLKNDGRQVEKRRNSGPVVEKLKQMQEFFGLKVTGKPDAETLKVMKQPRCGVPDVAQFVLTEGNPRWEQTHLTYRIENYTPDLPRADVDHAIEKAFQRWSNVTPLTFTKVSEGQADIMISFVRGDHRDNSPFDGPGGNLAHAFQPGPGIGGDAHFDEDERWTNNFREYNLHRVAAHELGHSLGLSHSTDIGALMYPSYTFSGDVQLAQDDIDGIQAIYGRSQNPVQPIGPQTPKACDSKLTFDAITTIRGEVMFFKDRFYMRTNPFYPEVELNFISVFWPQLPNGLEAAYEFADRDEVRFFKGNKYWAVQGQNVLHGYPKDIYSSFGFPRTVKHIDAALSEENTGKTYFFVANKYWRYDEYKRSMDPGYPKMIAHDFPGIGHKVDAVFMKDGFFYFFHGTRQYKFDPKTKRILTLQKANSWFNCRKN

SEQ ID NO: 1468 - protein, 450 aa, Artificial Sequence
  MMP-1 variant L121C
FPATLETQEQDVDLVQKYLEKYYNLKNDGRQVEKRRNSGPVVEKLKQMQEFFGLKVTGKPDAETLKVMKQPRCGVPDVAQFVLTEGNPRWEQTHLTYRIENYTPDLPRADVDHAIEKAFQCWSNVTPLTFTKVSEGQADIMISFVRGDHRDNSPFDGPGGNLAHAFQPGPGIGGDAHFDEDERWTNNFREYNLHRVAAHELGHSLGLSHSTDIGALMYPSYTFSGDVQLAQDDIDGIQAIYGRSQNPVQPIGPQTPKACDSKLTFDAITTIRGEVMFFKDRFYMRTNPFYPEVELNFISVFWPQLPNGLEAAYEFADRDEVRFFKGNKYWAVQGQNVLHGYPKDIYSSFGFPRTVKHIDAALSEENTGKTYFFVANKYWRYDEYKRSMDPGYPKMIAHDFPGIGHKVDAVFMKDGFFYFFHGTRQYKFDPKTKRILTLQKANSWFNCRKN

SEQ ID NO: 1469 - protein, 450 aa, Artificial Sequence
  MMP-1 variant L121N
FPATLETQEQDVDLVQKYLEKYYNLKNDGRQVEKRRNSGPVVEKLKQMQEFFGLKVTGKPDAETLKVMKQPRCGVPDVAQFVLTEGNPRWEQTHLTYRIENYTPDLPRADVDHAIEKAFQNWSNVTPLTFTKVSEGQADIMISFVRGDHRDNSPFDGPGGNLAHAFQPGPGIGGDAHFDEDERWTNNFREYNLHRVAAHELGHSLGLSHSTDIGALMYPSYTFSGDVQLAQDDIDGIQAIYGRSQNPVQPIGPQTPKACDSKLTFDAITTIRGEVMFFKDRFYMRTNPFYPEVELNFISVFWPQLPNGLEAAYEFADRDEVRFFKGNKYWAVQGQNVLHGYPKDIYSSFGFPRTVKHIDAALSEENTGKTYFFVANKYWRYDEYKRSMDPGYPKMIAHDFPGIGHKVDAVFMKDGFFYFFHGTRQYKFDPKTKRILTLQKANSWFNCRKN

SEQ ID NO: 1470 - protein, 450 aa, Artificial Sequence
  MMP-1 variant L121Q
FPATLETQEQDVDLVQKYLEKYYNLKNDGRQVEKRRNSGPVVEKLKQMQEFFGLKVTGKPDAETLKVMKQPRCGVPDVAQFVLTEGNPRWEQTHLTYRIENYTPDLPRADVDHAIEKAFQQWSNVTPLTFTKVSEGQADIMISFVRGDHRDNSPFDGPGGNLAHAFQPGPGIGGDAHFDEDERWTNNFREYNLHRVAAHELGHSLGLSHSTDIGALMYPSYTFSGDVQLAQDDIDGIQAIYGRSQNPVQPIGPQTPKACDSKLTFDAITTIRGEVMFFKDRFYMRTNPFYPEVELNFISVFWPQLPNGLEAAYEFADRDEVRFFKGNKYWAVQGQNVLHGYPKDIYSSFGFPRTVKHIDAALSEENTGKTYFFVANKYWRYDEYKRSMDPGYPKMIAHDFPGIGHKVDAVFMKDGFFYFFHGTRQYKFDPKTKRILTLQKANSWFNCRKN

SEQ ID NO: 1471 - protein, 450 aa, Artificial Sequence
  MMP-1 variant L121T
FPATLETQEQDVDLVQKYLEKYYNLKNDGRQVEKRRNSGPVVEKLKQMQEFFGLKVTGKPDAETLKVMKQPRCGVPDVAQFVLTEGNPRWEQTHLTYRIENYTPDLPRADVDHAIEKAFQTWSNVTPLTFTKVSEGQADIMISFVRGDHRDNSPFDGPGGNLAHAFQPGPGIGGDAHFDEDERWTNNFREYNLHRVAAHELGHSLGLSHSTDIGALMYPSYTFSGDVQLAQDDIDGIQAIYGRSQNPVQPIGPQTPKACDSKLTFDAITTIRGEVMFFKDRFYMRTNPFYPEVELNFISVFWPQLPNGLEAAYEFADRDEVRFFKGNKYWAVQGQNVLHGYPKDIYSSFGFPRTVKHIDAALSEENTGKTYFFVANKYWRYDEYKRSMDPGYPKMIAHDFPGIGHKVDAVFMKDGFFYFFHGTRQYKFDPKTKRILTLQKANSWFNCRKN

SEQ ID NO: 1472 - protein, 450 aa, Artificial Sequence
  MMP-1 variant L121Y
FPATLETQEQDVDLVQKYLEKYYNLKNDGRQVEKRRNSGPVVEKLKQMQEFFGLKVTGKPDAETLKVMKQPRCGVPDVAQFVLTEGNPRWEQTHLTYRIENYTPDLPRADVDHAIEKAFQYWSNVTPLTFTKVSEGQADIMISFVRGDHRDNSPFDGPGGNLAHAFQPGPGIGGDAHFDEDERWTNNFREYNLHRVAAHELGHSLGLSHSTDIGALMYPSYTFSGDVQLAQDDIDGIQAIYGRSQNPVQPIGPQTPKACDSKLTFDAITTIRGEVMFFKDRFYMRTNPFYPEVELNFISVFWPQLPNGLEAAYEFADRDEVRFFKGNKYWAVQGQNVLHGYPKDIYSSFGFPRTVKHIDAALSEENTGKTYFFVANKYWRYDEYKRSMDPGYPKMIAHDFPGIGHKVDAVFMKDGFFYFFHGTRQYKFDPKTKRILTLQKANSWFNCRKN

SEQ ID NO: 1473 - protein, 450 aa, Artificial Sequence
  MMP-1 variant L121S
FPATLETQEQDVDLVQKYLEKYYNLKNDGRQVEKRRNSGPVVEKLKQMQEFFGLKVTGKPDAETLKVMKQPRCGVPDVAQFVLTEGNPRWEQTHLTYRIENYTPDLPRADVDHAIEKAFQSWSNVTPLTFTKVSEGQADIMISFVRGDHRDNSPFDGPGGNLAHAFQPGPGIGGDAHFDEDERWTNNFREYNLHRVAAHELGHSLGLSHSTDIGALMYPSYTFSGDVQLAQDDIDGIQAIYGRSQNPVQPIGPQTPKACDSKLTFDAITTIRGEVMFFKDRFYMRTNPFYPEVELNFISVFWPQLPNGLEAAYEFADRDEVRFFKGNKYWAVQGQNVLHGYPKDIYSSFGFPRTVKHIDAALSEENTGKTYFFVANKYWRYDEYKRSMDPGYPKMIAHDFPGIGHKVDAVFMKDGFFYFFHGTRQYKFDPKTKRILTLQKANSWFNCRKN

SEQ ID NO: 1474 - protein, 450 aa, Artificial Sequence
  MMP-1 variant L121G
FPATLETQEQDVDLVQKYLEKYYNLKNDGRQVEKRRNSGPVVEKLKQMQEFFGLKVTGKPDAETLKVMKQPRCGVPDVAQFVLTEGNPRWEQTHLTYRIENYTPDLPRADVDHAIEKAFQGWSNVTPLTFTKVSEGQADIMISFVRGDHRDNSPFDGPGGNLAHAFQPGPGIGGDAHFDEDERWTNNFREYNLHRVAAHELGHSLGLSHSTDIGALMYPSYTFSGDVQLAQDDIDGIQAIYGRSQNPVQPIGPQTPKACDSKLTFDAITTIRGEVMFFKDRFYMRTNPFYPEVELNFISVFWPQLPNGLEAAYEFADRDEVRFFKGNKYWAVQGQNVLHGYPKDIYSSFGFPRTVKHIDAALSEENTGKTYFFVANKYWRYDEYKRSMDPGYPKMIAHDFPGIGHKVDAVFMKDGFFYFFHGTRQYKFDPKTKRILTLQKANSWFNCRKN

SEQ ID NO: 1475 - protein, 450 aa, Artificial Sequence
  MMP-1 variant L121F
FPATLETQEQDVDLVQKYLEKYYNLKNDGRQVEKRRNSGPVVEKLKQMQEFFGLKVTGKPDAETLKVMKQPRCGVPDVAQFVLTEGNPRWEQTHLTYRIENYTPDLPRADVDHAIEKAFQFWSNVTPLTFTKVSEGQADIMISFVRGDHRDNSPFDGPGGNLAHAFQPGPGIGGDAHFDEDERWTNNFREYNLHRVAAHELGHSLGLSHSTDIGALMYPSYTFSGDVQLAQDDIDGIQAIYGRSQNPVQPIGPQTPKACDSKLTFDAITTIRGEVMFFKDRFYMRTNPFYPEVELNFISVFWPQLPNGLEAAYEFADRDEVRFFKGNKYWAVQGQNVLHGYPKDIYSSFGFPRTVKHIDAALSEENTGKTYFFVANKYWRYDEYKRSMDPGYPKMIAHDFPGIGHKVDAVFMKDGFFYFFHGTRQYKFDPKTKRILTLQKANSWFNCRKN

SEQ ID NO: 1476 - protein, 450 aa, Artificial Sequence
  MMP-1 variant L121M
FPATLETQEQDVDLVQKYLEKYYNLKNDGRQVEKRRNSGPVVEKLKQMQEFFGLKVTGKPDAETLKVMKQPRCGVPDVAQFVLTEGNPRWEQTHLTYRIENYTPDLPRADVDHAIEKAFQMWSNVTPLTFTKVSEGQADIMISFVRGDHRDNSPFDGPGGNLAHAFQPGPGIGGDAHFDEDERWTNNFREYNLHRVAAHELGHSLGLSHSTDIGALMYPSYTFSGDVQLAQDDIDGIQAIYGRSQNPVQPIGPQTPKACDSKLTFDAITTIRGEVMFFKDRFYMRTNPFYPEVELNFISVFWPQLPNGLEAAYEFADRDEVRFFKGNKYWAVQGQNVLHGYPKDIYSSFGFPRTVKHIDAALSEENTGKTYFFVANKYWRYDEYKRSMDPGYPKMIAHDFPGIGHKVDAVFMKDGFFYFFHGTRQYKFDPKTKRILTLQKANSWFNCRKN

SEQ ID NO: 1477 - protein, 450 aa, Artificial Sequence
  MMP-1 variant L121W
FPATLETQEQDVDLVQKYLEKYYNLKNDGRQVEKRRNSGPVVEKLKQMQEFFGLKVTGKPDAETLKVMKQPRCGVPDVAQFVLTEGNPRWEQTHLTYRIENYTPDLPRADVDHAIEKAFQWWSNVTPLTFTKVSEGQADIMISFVRGDHRDNSPFDGPGGNLAHAFQPGPGIGGDAHFDEDERWTNNFREYNLHRVAAHELGHSLGLSHSTDIGALMYPSYTFSGDVQLAQDDIDGIQAIYGRSQNPVQPIGPQTPKACDSKLTFDAITTIRGEVMFFKDRFYMRTNPFYPEVELNFISVFWPQLPNGLEAAYEFADRDEVRFFKGNKYWAVQGQNVLHGYPKDIYSSFGFPRTVKHIDAALSEENTGKTYFFVANKYWRYDEYKRSMDPGYPKMIAHDFPGIGHKVDAVFMKDGFFYFFHGTRQYKFDPKTKRILTLQKANSWFNCRKN

SEQ ID NO: 1478 - protein, 450 aa, Artificial Sequence
  MMP-1 variant L121I
FPATLETQEQDVDLVQKYLEKYYNLKNDGRQVEKRRNSGPVVEKLKQMQEFFGLKVTGKPDAETLKVMKQPRCGVPDVAQFVLTEGNPRWEQTHLTYRIENYTPDLPRADVDHAIEKAFQIWSNVTPLTFTKVSEGQADIMISFVRGDHRDNSPFDGPGGNLAHAFQPGPGIGGDAHFDEDERWTNNFREYNLHRVAAHELGHSLGLSHSTDIGALMYPSYTFSGDVQLAQDDIDGIQAIYGRSQNPVQPIGPQTPKACDSKLTFDAITTIRGEVMFFKDRFYMRTNPFYPEVELNFISVFWPQLPNGLEAAYEFADRDEVRFFKGNKYWAVQGQNVLHGYPKDIYSSFGFPRTVKHIDAALSEENTGKTYFFVANKYWRYDEYKRSMDPGYPKMIAHDFPGIGHKVDAVFMKDGFFYFFHGTRQYKFDPKTKRILTLQKANSWFNCRKN

SEQ ID NO: 1479 - protein, 450 aa, Artificial Sequence
  MMP-1 variant L121V
FPATLETQEQDVDLVQKYLEKYYNLKNDGRQVEKRRNSGPVVEKLKQMQEFFGLKVTGKPDAETLKVMKQPRCGVPDVAQFVLTEGNPRWEQTHLTYRIENYTPDLPRADVDHAIEKAFQVWSNVTPLTFTKVSEGQADIMISFVRGDHRDNSPFDGPGGNLAHAFQPGPGIGGDAHFDEDERWTNNFREYNLHRVAAHELGHSLGLSHSTDIGALMYPSYTFSGDVQLAQDDIDGIQAIYGRSQNPVQPIGPQTPKACDSKLTFDAITTIRGEVMFFKDRFYMRTNPFYPEVELNFISVFWPQLPNGLEAAYEFADRDEVRFFKGNKYWAVQGQNVLHGYPKDIYSSFGFPRTVKHIDAALSEENTGKTYFFVANKYWRYDEYKRSMDPGYPKMIAHDFPGIGHKVDAVFMKDGFFYFFHGTRQYKFDPKTKRILTLQKANSWFNCRKN

SEQ ID NO: 1480 - protein, 450 aa, Artificial Sequence
  MMP-1 variant L121A
FPATLETQEQDVDLVQKYLEKYYNLKNDGRQVEKRRNSGPVVEKLKQMQEFFGLKVTGKPDAETLKVMKQPRCGVPDVAQFVLTEGNPRWEQTHLTYRIENYTPDLPRADVDHAIEKAFQAWSNVTPLTFTKVSEGQADIMISFVRGDHRDNSPFDGPGGNLAHAFQPGPGIGGDAHFDEDERWTNNFREYNLHRVAAHELGHSLGLSHSTDIGALMYPSYTFSGDVQLAQDDIDGIQAIYGRSQNPVQPIGPQTPKACDSKLTFDAITTIRGEVMFFKDRFYMRTNPFYPEVELNFISVFWPQLPNGLEAAYEFADRDEVRFFKGNKYWAVQGQNVLHGYPKDIYSSFGFPRTVKHIDAALSEENTGKTYFFVANKYWRYDEYKRSMDPGYPKMIAHDFPGIGHKVDAVFMKDGFFYFFHGTRQYKFDPKTKRILTLQKANSWFNCRKN

SEQ ID NO: 1481 - protein, 450 aa, Artificial Sequence
  MMP-1 variant L121P
FPATLETQEQDVDLVQKYLEKYYNLKNDGRQVEKRRNSGPVVEKLKQMQEFFGLKVTGKPDAETLKVMKQPRCGVPDVAQFVLTEGNPRWEQTHLTYRIENYTPDLPRADVDHAIEKAFQPWSNVTPLTFTKVSEGQADIMISFVRGDHRDNSPFDGPGGNLAHAFQPGPGIGGDAHFDEDERWTNNFREYNLHRVAAHELGHSLGLSHSTDIGALMYPSYTFSGDVQLAQDDIDGIQAIYGRSQNPVQPIGPQTPKACDSKLTFDAITTIRGEVMFFKDRFYMRTNPFYPEVELNFISVFWPQLPNGLEAAYEFADRDEVRFFKGNKYWAVQGQNVLHGYPKDIYSSFGFPRTVKHIDAALSEENTGKTYFFVANKYWRYDEYKRSMDPGYPKMIAHDFPGIGHKVDAVFMKDGFFYFFHGTRQYKFDPKTKRILTLQKANSWFNCRKN

SEQ ID NO: 1482 - protein, 450 aa, Artificial Sequence
  MMP-1 variant W122D
FPATLETQEQDVDLVQKYLEKYYNLKNDGRQVEKRRNSGPVVEKLKQMQEFFGLKVTGKPDAETLKVMKQPRCGVPDVAQFVLTEGNPRWEQTHLTYRIENYTPDLPRADVDHAIEKAFQLDSNVTPLTFTKVSEGQADIMISFVRGDHRDNSPFDGPGGNLAHAFQPGPGIGGDAHFDEDERWTNNFREYNLHRVAAHELGHSLGLSHSTDIGALMYPSYTFSGDVQLAQDDIDGIQAIYGRSQNPVQPIGPQTPKACDSKLTFDAITTIRGEVMFFKDRFYMRTNPFYPEVELNFISVFWPQLPNGLEAAYEFADRDEVRFFKGNKYWAVQGQNVLHGYPKDIYSSFGFPRTVKHIDAALSEENTGKTYFFVANKYWRYDEYKRSMDPGYPKMIAHDFPGIGHKVDAVFMKDGFFYFFHGTRQYKFDPKTKRILTLQKANSWFNCRKN

SEQ ID NO: 1483 - protein, 450 aa, Artificial Sequence
  MMP-1 variant W122E
FPATLETQEQDVDLVQKYLEKYYNLKNDGRQVEKRRNSGPVVEKLKQMQEFFGLKVTGKPDAETLKVMKQPRCGVPDVAQFVLTEGNPRWEQTHLTYRIENYTPDLPRADVDHAIEKAFQLESNVTPLTFTKVSEGQADIMISFVRGDHRDNSPFDGPGGNLAHAFQPGPGIGGDAHFDEDERWTNNFREYNLHRVAAHELGHSLGLSHSTDIGALMYPSYTFSGDVQLAQDDIDGIQAIYGRSQNPVQPIGPQTPKACDSKLTFDAITTIRGEVMFFKDRFYMRTNPFYPEVELNFISVFWPQLPNGLEAAYEFADRDEVRFFKGNKYWAVQGQNVLHGYPKDIYSSFGFPRTVKHIDAALSEENTGKTYFFVANKYWRYDEYKRSMDPGYPKMIAHDFPGIGHKVDAVFMKDGFFYFFHGTRQYKFDPKTKRILTLQKANSWFNCRKN

SEQ ID NO: 1484 - protein, 450 aa, Artificial Sequence
  MMP-1 variant W122H
FPATLETQEQDVDLVQKYLEKYYNLKNDGRQVEKRRNSGPVVEKLKQMQEFFGLKVTGKPDAETLKVMKQPRCGVPDVAQFVLTEGNPRWEQTHLTYRIENYTPDLPRADVDHAIEKAFQLHSNVTPLTFTKVSEGQADIMISFVRGDHRDNSPFDGPGGNLAHAFQPGPGIGGDAHFDEDERWTNNFREYNLHRVAAHELGHSLGLSHSTDIGALMYPSYTFSGDVQLAQDDIDGIQAIYGRSQNPVQPIGPQTPKACDSKLTFDAITTIRGEVMFFKDRFYMRTNPFYPEVELNFISVFWPQLPNGLEAAYEFADRDEVRFFKGNKYWAVQGQNVLHGYPKDIYSSFGFPRTVKHIDAALSEENTGKTYFFVANKYWRYDEYKRSMDPGYPKMIAHDFPGIGHKVDAVFMKDGFFYFFHGTRQYKFDPKTKRILTLQKANSWFNCRKN

SEQ ID NO: 1485 - protein, 450 aa, Artificial Sequence
  MMP-1 variant W122K
FPATLETQEQDVDLVQKYLEKYYNLKNDGRQVEKRRNSGPVVEKLKQMQEFFGLKVTGKPDAETLKVMKQPRCGVPDVAQFVLTEGNPRWEQTHLTYRIENYTPDLPRADVDHAIEKAFQLKSNVTPLTFTKVSEGQADIMISFVRGDHRDNSPFDGPGGNLAHAFQPGPGIGGDAHFDEDERWTNNFREYNLHRVAAHELGHSLGLSHSTDIGALMYPSYTFSGDVQLAQDDIDGIQAIYGRSQNPVQPIGPQTPKACDSKLTFDAITTIRGEVMFFKDRFYMRTNPFYPEVELNFISVFWPQLPNGLEAAYEFADRDEVRFFKGNKYWAVQGQNVLHGYPKDIYSSFGFPRTVKHIDAALSEENTGKTYFFVANKYWRYDEYKRSMDPGYPKMIAHDFPGIGHKVDAVFMKDGFFYFFHGTRQYKFDPKTKRILTLQKANSWFNCRKN

SEQ ID NO: 1486 - protein, 450 aa, Artificial Sequence
  MMP-1 variant W122R
FPATLETQEQDVDLVQKYLEKYYNLKNDGRQVEKRRNSGPVVEKLKQMQEFFGLKVTGKPDAETLKVMKQPRCGVPDVAQFVLTEGNPRWEQTHLTYRIENYTPDLPRADVDHAIEKAFQLRSNVTPLTFTKVSEGQADIMISFVRGDHRDNSPFDGPGGNLAHAFQPGPGIGGDAHFDEDERWTNNFREYNLHRVAAHELGHSLGLSHSTDIGALMYPSYTFSGDVQLAQDDIDGIQAIYGRSQNPVQPIGPQTPKACDSKLTFDAITTIRGEVMFFKDRFYMRTNPFYPEVELNFISVFWPQLPNGLEAAYEFADRDEVRFFKGNKYWAVQGQNVLHGYPKDIYSSFGFPRTVKHIDAALSEENTGKTYFFVANKYWRYDEYKRSMDPGYPKMIAHDFPGIGHKVDAVFMKDGFFYFFHGTRQYKFDPKTKRILTLQKANSWFNCRKN

SEQ ID NO: 1487 - protein, 450 aa, Artificial Sequence
  MMP-1 variant W122C
FPATLETQEQDVDLVQKYLEKYYNLKNDGRQVEKRRNSGPVVEKLKQMQEFFGLKVTGKPDAETLKVMKQPRCGVPDVAQFVLTEGNPRWEQTHLTYRIENYTPDLPRADVDHAIEKAFQLCSNVTPLTFTKVSEGQADIMISFVRGDHRDNSPFDGPGGNLAHAFQPGPGIGGDAHFDEDERWTNNFREYNLHRVAAHELGHSLGLSHSTDIGALMYPSYTFSGDVQLAQDDIDGIQAIYGRSQNPVQPIGPQTPKACDSKLTFDAITTIRGEVMFFKDRFYMRTNPFYPEVELNFISVFWPQLPNGLEAAYEFADRDEVRFFKGNKYWAVQGQNVLHGYPKDIYSSFGFPRTVKHIDAALSEENTGKTYFFVANKYWRYDEYKRSMDPGYPKMIAHDFPGIGHKVDAVFMKDGFFYFFHGTRQYKFDPKTKRILTLQKANSWFNCRKN

SEQ ID NO: 1488 - protein, 450 aa, Artificial Sequence
  MMP-1 variant W122N
FPATLETQEQDVDLVQKYLEKYYNLKNDGRQVEKRRNSGPVVEKLKQMQEFFGLKVTGKPDAETLKVMKQPRCGVPDVAQFVLTEGNPRWEQTHLTYRIENYTPDLPRADVDHAIEKAFQLNSNVTPLTFTKVSEGQADIMISFVRGDHRDNSPFDGPGGNLAHAFQPGPGIGGDAHFDEDERWTNNFREYNLHRVAAHELGHSLGLSHSTDIGALMYPSYTFSGDVQLAQDDIDGIQAIYGRSQNPVQPIGPQTPKACDSKLTFDAITTIRGEVMFFKDRFYMRTNPFYPEVELNFISVFWPQLPNGLEAAYEFADRDEVRFFKGNKYWAVQGQNVLHGYPKDIYSSFGFPRTVKHIDAALSEENTGKTYFFVANKYWRYDEYKRSMDPGYPKMIAHDFPGIGHKVDAVFMKDGFFYFFHGTRQYKFDPKTKRILTLQKANSWFNCRKN

SEQ ID NO: 1489 - protein, 450 aa, Artificial Sequence
  MMP-1 variant W122Q
FPATLETQEQDVDLVQKYLEKYYNLKNDGRQVEKRRNSGPVVEKLKQMQEFFGLKVTGKPDAETLKVMKQPRCGVPDVAQFVLTEGNPRWEQTHLTYRIENYTPDLPRADVDHAIEKAFQLQSNVTPLTFTKVSEGQADIMISFVRGDHRDNSPFDGPGGNLAHAFQPGPGIGGDAHFDEDERWTNNFREYNLHRVAAHELGHSLGLSHSTDIGALMYPSYTFSGDVQLAQDDIDGIQAIYGRSQNPVQPIGPQTPKACDSKLTFDAITTIRGEVMFFKDRFYMRTNPFYPEVELNFISVFWPQLPNGLEAAYEFADRDEVRFFKGNKYWAVQGQNVLHGYPKDIYSSFGFPRTVKHIDAALSEENTGKTYFFVANKYWRYDEYKRSMDPGYPKMIAHDFPGIGHKVDAVFMKDGFFYFFHGTRQYKFDPKTKRILTLQKANSWFNCRKN

SEQ ID NO: 1490 - protein, 450 aa, Artificial Sequence
  MMP-1 variant W122T
FPATLETQEQDVDLVQKYLEKYYNLKNDGRQVEKRRNSGPVVEKLKQMQEFFGLKVTGKPDAETLKVMKQPRCGVPDVAQFVLTEGNPRWEQTHLTYRIENYTPDLPRADVDHAIEKAFQLTSNVTPLTFTKVSEGQADIMISFVRGDHRDNSPFDGPGGNLAHAFQPGPGIGGDAHFDEDERWTNNFREYNLHRVAAHELGHSLGLSHSTDIGALMYPSYTFSGDVQLAQDDIDGIQAIYGRSQNPVQPIGPQTPKACDSKLTFDAITTIRGEVMFFKDRFYMRTNPFYPEVELNFISVFWPQLPNGLEAAYEFADRDEVRFFKGNKYWAVQGQNVLHGYPKDIYSSFGFPRTVKHIDAALSEENTGKTYFFVANKYWRYDEYKRSMDPGYPKMIAHDFPGIGHKVDAVFMKDGFFYFFHGTRQYKFDPKTKRILTLQKANSWFNCRKN

SEQ ID NO: 1491 - protein, 450 aa, Artificial Sequence
  MMP-1 variant W122Y
FPATLETQEQDVDLVQKYLEKYYNLKNDGRQVEKRRNSGPVVEKLKQMQEFFGLKVTGKPDAETLKVMKQPRCGVPDVAQFVLTEGNPRWEQTHLTYRIENYTPDLPRADVDHAIEKAFQLYSNVTPLTFTKVSEGQADIMISFVRGDHRDNSPFDGPGGNLAHAFQPGPGIGGDAHFDEDERWTNNFREYNLHRVAAHELGHSLGLSHSTDIGALMYPSYTFSGDVQLAQDDIDGIQAIYGRSQNPVQPIGPQTPKACDSKLTFDAITTIRGEVMFFKDRFYMRTNPFYPEVELNFISVFWPQLPNGLEAAYEFADRDEVRFFKGNKYWAVQGQNVLHGYPKDIYSSFGFPRTVKHIDAALSEENTGKTYFFVANKYWRYDEYKRSMDPGYPKMIAHDFPGIGHKVDAVFMKDGFFYFFHGTRQYKFDPKTKRILTLQKANSWFNCRKN

SEQ ID NO: 1492 - protein, 450 aa, Artificial Sequence
  MMP-1 variant W122S
FPATLETQEQDVDLVQKYLEKYYNLKNDGRQVEKRRNSGPVVEKLKQMQEFFGLKVTGKPDAETLKVMKQPRCGVPDVAQFVLTEGNPRWEQTHLTYRIENYTPDLPRADVDHAIEKAFQLSSNVTPLTFTKVSEGQADIMISFVRGDHRDNSPFDGPGGNLAHAFQPGPGIGGDAHFDEDERWTNNFREYNLHRVAAHELGHSLGLSHSTDIGALMYPSYTFSGDVQLAQDDIDGIQAIYGRSQNPVQPIGPQTPKACDSKLTFDAITTIRGEVMFFKDRFYMRTNPFYPEVELNFISVFWPQLPNGLEAAYEFADRDEVRFFKGNKYWAVQGQNVLHGYPKDIYSSFGFPRTVKHIDAALSEENTGKTYFFVANKYWRYDEYKRSMDPGYPKMIAHDFPGIGHKVDAVFMKDGFFYFFHGTRQYKFDPKTKRILTLQKANSWFNCRKN

SEQ ID NO: 1493 - protein, 450 aa, Artificial Sequence
  MMP-1 variant W122G
FPATLETQEQDVDLVQKYLEKYYNLKNDGRQVEKRRNSGPVVEKLKQMQEFFGLKVTGKPDAETLKVMKQPRCGVPDVAQFVLTEGNPRWEQTHLTYRIENYTPDLPRADVDHAIEKAFQLGSNVTPLTFTKVSEGQADIMISFVRGDHRDNSPFDGPGGNLAHAFQPGPGIGGDAHFDEDERWTNNFREYNLHRVAAHELGHSLGLSHSTDIGALMYPSYTFSGDVQLAQDDIDGIQAIYGRSQNPVQPIGPQTPKACDSKLTFDAITTIRGEVMFFKDRFYMRTNPFYPEVELNFISVFWPQLPNGLEAAYEFADRDEVRFFKGNKYWAVQGQNVLHGYPKDIYSSFGFPRTVKHIDAALSEENTGKTYFFVANKYWRYDEYKRSMDPGYPKMIAHDFPGIGHKVDAVFMKDGFFYFFHGTRQYKFDPKTKRILTLQKANSWFNCRKN

SEQ ID NO: 1494 - protein, 450 aa, Artificial Sequence
  MMP-1 variant W122F
FPATLETQEQDVDLVQKYLEKYYNLKNDGRQVEKRRNSGPVVEKLKQMQEFFGLKVTGKPDAETLKVMKQPRCGVPDVAQFVLTEGNPRWEQTHLTYRIENYTPDLPRADVDHAIEKAFQLFSNVTPLTFTKVSEGQADIMISFVRGDHRDNSPFDGPGGNLAHAFQPGPGIGGDAHFDEDERWTNNFREYNLHRVAAHELGHSLGLSHSTDIGALMYPSYTFSGDVQLAQDDIDGIQAIYGRSQNPVQPIGPQTPKACDSKLTFDAITTIRGEVMFFKDRFYMRTNPFYPEVELNFISVFWPQLPNGLEAAYEFADRDEVRFFKGNKYWAVQGQNVLHGYPKDIYSSFGFPRTVKHIDAALSEENTGKTYFFVANKYWRYDEYKRSMDPGYPKMIAHDFPGIGHKVDAVFMKDGFFYFFHGTRQYKFDPKTKRILTLQKANSWFNCRKN

SEQ ID NO: 1495 - protein, 450 aa, Artificial Sequence
  MMP-1 variant W122M
FPATLETQEQDVDLVQKYLEKYYNLKNDGRQVEKRRNSGPVVEKLKQMQEFFGLKVTGKPDAETLKVMKQPRCGVPDVAQFVLTEGNPRWEQTHLTYRIENYTPDLPRADVDHAIEKAFQLMSNVTPLTFTKVSEGQADIMISFVRGDHRDNSPFDGPGGNLAHAFQPGPGIGGDAHFDEDERWTNNFREYNLHRVAAHELGHSLGLSHSTDIGALMYPSYTFSGDVQLAQDDIDGIQAIYGRSQNPVQPIGPQTPKACDSKLTFDAITTIRGEVMFFKDRFYMRTNPFYPEVELNFISVFWPQLPNGLEAAYEFADRDEVRFFKGNKYWAVQGQNVLHGYPKDIYSSFGFPRTVKHIDAALSEENTGKTYFFVANKYWRYDEYKRSMDPGYPKMIAHDFPGIGHKVDAVFMKDGFFYFFHGTRQYKFDPKTKRILTLQKANSWFNCRKN

SEQ ID NO: 1496 - protein, 450 aa, Artificial Sequence
  MMP-1 variant W122I
FPATLETQEQDVDLVQKYLEKYYNLKNDGRQVEKRRNSGPVVEKLKQMQEFFGLKVTGKPDAETLKVMKQPRCGVPDVAQFVLTEGNPRWEQTHLTYRIENYTPDLPRADVDHAIEKAFQLISNVTPLTFTKVSEGQADIMISFVRGDHRDNSPFDGPGGNLAHAFQPGPGIGGDAHFDEDERWTNNFREYNLHRVAAHELGHSLGLSHSTDIGALMYPSYTFSGDVQLAQDDIDGIQAIYGRSQNPVQPIGPQTPKACDSKLTFDAITTIRGEVMFFKDRFYMRTNPFYPEVELNFISVFWPQLPNGLEAAYEFADRDEVRFFKGNKYWAVQGQNVLHGYPKDIYSSFGFPRTVKHIDAALSEENTGKTYFFVANKYWRYDEYKRSMDPGYPKMIAHDFPGIGHKVDAVFMKDGFFYFFHGTRQYKFDPKTKRILTLQKANSWFNCRKN

SEQ ID NO: 1497 - protein, 450 aa, Artificial Sequence
  MMP-1 variant W122V
FPATLETQEQDVDLVQKYLEKYYNLKNDGRQVEKRRNSGPVVEKLKQMQEFFGLKVTGKPDAETLKVMKQPRCGVPDVAQFVLTEGNPRWEQTHLTYRIENYTPDLPRADVDHAIEKAFQLVSNVTPLTFTKVSEGQADIMISFVRGDHRDNSPFDGPGGNLAHAFQPGPGIGGDAHFDEDERWTNNFREYNLHRVAAHELGHSLGLSHSTDIGALMYPSYTFSGDVQLAQDDIDGIQAIYGRSQNPVQPIGPQTPKACDSKLTFDAITTIRGEVMFFKDRFYMRTNPFYPEVELNFISVFWPQLPNGLEAAYEFADRDEVRFFKGNKYWAVQGQNVLHGYPKDIYSSFGFPRTVKHIDAALSEENTGKTYFFVANKYWRYDEYKRSMDPGYPKMIAHDFPGIGHKVDAVFMKDGFFYFFHGTRQYKFDPKTKRILTLQKANSWFNCRKN

SEQ ID NO: 1498 - protein, 450 aa, Artificial Sequence
  MMP-1 variant W122L
FPATLETQEQDVDLVQKYLEKYYNLKNDGRQVEKRRNSGPVVEKLKQMQEFFGLKVTGKPDAETLKVMKQPRCGVPDVAQFVLTEGNPRWEQTHLTYRIENYTPDLPRADVDHAIEKAFQLLSNVTPLTFTKVSEGQADIMISFVRGDHRDNSPFDGPGGNLAHAFQPGPGIGGDAHFDEDERWTNNFREYNLHRVAAHELGHSLGLSHSTDIGALMYPSYTFSGDVQLAQDDIDGIQAIYGRSQNPVQPIGPQTPKACDSKLTFDAITTIRGEVMFFKDRFYMRTNPFYPEVELNFISVFWPQLPNGLEAAYEFADRDEVRFFKGNKYWAVQGQNVLHGYPKDIYSSFGFPRTVKHIDAALSEENTGKTYFFVANKYWRYDEYKRSMDPGYPKMIAHDFPGIGHKVDAVFMKDGFFYFFHGTRQYKFDPKTKRILTLQKANSWFNCRKN

SEQ ID NO: 1499 - protein, 450 aa, Artificial Sequence
  MMP-1 variant W122A
FPATLETQEQDVDLVQKYLEKYYNLKNDGRQVEKRRNSGPVVEKLKQMQEFFGLKVTGKPDAETLKVMKQPRCGVPDVAQFVLTEGNPRWEQTHLTYRIENYTPDLPRADVDHAIEKAFQLASNVTPLTFTKVSEGQADIMISFVRGDHRDNSPFDGPGGNLAHAFQPGPGIGGDAHFDEDERWTNNFREYNLHRVAAHELGHSLGLSHSTDIGALMYPSYTFSGDVQLAQDDIDGIQAIYGRSQNPVQPIGPQTPKACDSKLTFDAITTIRGEVMFFKDRFYMRTNPFYPEVELNFISVFWPQLPNGLEAAYEFADRDEVRFFKGNKYWAVQGQNVLHGYPKDIYSSFGFPRTVKHIDAALSEENTGKTYFFVANKYWRYDEYKRSMDPGYPKMIAHDFPGIGHKVDAVFMKDGFFYFFHGTRQYKFDPKTKRILTLQKANSWFNCRKN

SEQ ID NO: 1500 - protein, 450 aa, Artificial Sequence
  MMP-1 variant W122P
FPATLETQEQDVDLVQKYLEKYYNLKNDGRQVEKRRNSGPVVEKLKQMQEFFGLKVTGKPDAETLKVMKQPRCGVPDVAQFVLTEGNPRWEQTHLTYRIENYTPDLPRADVDHAIEKAFQLPSNVTPLTFTKVSEGQADIMISFVRGDHRDNSPFDGPGGNLAHAFQPGPGIGGDAHFDEDERWTNNFREYNLHRVAAHELGHSLGLSHSTDIGALMYPSYTFSGDVQLAQDDIDGIQAIYGRSQNPVQPIGPQTPKACDSKLTFDAITTIRGEVMFFKDRFYMRTNPFYPEVELNFISVFWPQLPNGLEAAYEFADRDEVRFFKGNKYWAVQGQNVLHGYPKDIYSSFGFPRTVKHIDAALSEENTGKTYFFVANKYWRYDEYKRSMDPGYPKMIAHDFPGIGHKVDAVFMKDGFFYFFHGTRQYKFDPKTKRILTLQKANSWFNCRKN

SEQ ID NO: 1501 - protein, 450 aa, Artificial Sequence
  MMP-1 variant S123D
FPATLETQEQDVDLVQKYLEKYYNLKNDGRQVEKRRNSGPVVEKLKQMQEFFGLKVTGKPDAETLKVMKQPRCGVPDVAQFVLTEGNPRWEQTHLTYRIENYTPDLPRADVDHAIEKAFQLWDNVTPLTFTKVSEGQADIMISFVRGDHRDNSPFDGPGGNLAHAFQPGPGIGGDAHFDEDERWTNNFREYNLHRVAAHELGHSLGLSHSTDIGALMYPSYTFSGDVQLAQDDIDGIQAIYGRSQNPVQPIGPQTPKACDSKLTFDAITTIRGEVMFFKDRFYMRTNPFYPEVELNFISVFWPQLPNGLEAAYEFADRDEVRFFKGNKYWAVQGQNVLHGYPKDIYSSFGFPRTVKHIDAALSEENTGKTYFFVANKYWRYDEYKRSMDPGYPKMIAHDFPGIGHKVDAVFMKDGFFYFFHGTRQYKFDPKTKRILTLQKANSWFNCRKN

SEQ ID NO: 1502 - protein, 450 aa, Artificial Sequence
  MMP-1 variant S123E
FPATLETQEQDVDLVQKYLEKYYNLKNDGRQVEKRRNSGPVVEKLKQMQEFFGLKVTGKPDAETLKVMKQPRCGVPDVAQFVLTEGNPRWEQTHLTYRIENYTPDLPRADVDHAIEKAFQLWENVTPLTFTKVSEGQADIMISFVRGDHRDNSPFDGPGGNLAHAFQPGPGIGGDAHFDEDERWTNNFREYNLHRVAAHELGHSLGLSHSTDIGALMYPSYTFSGDVQLAQDDIDGIQAIYGRSQNPVQPIGPQTPKACDSKLTFDAITTIRGEVMFFKDRFYMRTNPFYPEVELNFISVFWPQLPNGLEAAYEFADRDEVRFFKGNKYWAVQGQNVLHGYPKDIYSSFGFPRTVKHIDAALSEENTGKTYFFVANKYWRYDEYKRSMDPGYPKMIAHDFPGIGHKVDAVFMKDGFFYFFHGTRQYKFDPKTKRILTLQKANSWFNCRKN

SEQ ID NO: 1503 - protein, 450 aa, Artificial Sequence
  MMP-1 variant S123H
FPATLETQEQDVDLVQKYLEKYYNLKNDGRQVEKRRNSGPVVEKLKQMQEFFGLKVTGKPDAETLKVMKQPRCGVPDVAQFVLTEGNPRWEQTHLTYRIENYTPDLPRADVDHAIEKAFQLWHNVTPLTFTKVSEGQADIMISFVRGDHRDNSPFDGPGGNLAHAFQPGPGIGGDAHFDEDERWTNNFREYNLHRVAAHELGHSLGLSHSTDIGALMYPSYTFSGDVQLAQDDIDGIQAIYGRSQNPVQPIGPQTPKACDSKLTFDAITTIRGEVMFFKDRFYMRTNPFYPEVELNFISVFWPQLPNGLEAAYEFADRDEVRFFKGNKYWAVQGQNVLHGYPKDIYSSFGFPRTVKHIDAALSEENTGKTYFFVANKYWRYDEYKRSMDPGYPKMIAHDFPGIGHKVDAVFMKDGFFYFFHGTRQYKFDPKTKRILTLQKANSWFNCRKN

SEQ ID NO: 1504 - protein, 450 aa, Artificial Sequence
  MMP-1 variant S123K
FPATLETQEQDVDLVQKYLEKYYNLKNDGRQVEKRRNSGPVVEKLKQMQEFFGLKVTGKPDAETLKVMKQPRCGVPDVAQFVLTEGNPRWEQTHLTYRIENYTPDLPRADVDHAIEKAFQLWKNVTPLTFTKVSEGQADIMISFVRGDHRDNSPFDGPGGNLAHAFQPGPGIGGDAHFDEDERWTNNFREYNLHRVAAHELGHSLGLSHSTDIGALMYPSYTFSGDVQLAQDDIDGIQAIYGRSQNPVQPIGPQTPKACDSKLTFDAITTIRGEVMFFKDRFYMRTNPFYPEVELNFISVFWPQLPNGLEAAYEFADRDEVRFFKGNKYWAVQGQNVLHGYPKDIYSSFGFPRTVKHIDAALSEENTGKTYFFVANKYWRYDEYKRSMDPGYPKMIAHDFPGIGHKVDAVFMKDGFFYFFHGTRQYKFDPKTKRILTLQKANSWFNCRKN

SEQ ID NO: 1505 - protein, 450 aa, Artificial Sequence
  MMP-1 variant S123R
FPATLETQEQDVDLVQKYLEKYYNLKNDGRQVEKRRNSGPVVEKLKQMQEFFGLKVTGKPDAETLKVMKQPRCGVPDVAQFVLTEGNPRWEQTHLTYRIENYTPDLPRADVDHAIEKAFQLWRNVTPLTFTKVSEGQADIMISFVRGDHRDNSPFDGPGGNLAHAFQPGPGIGGDAHFDEDERWTNNFREYNLHRVAAHELGHSLGLSHSTDIGALMYPSYTFSGDVQLAQDDIDGIQAIYGRSQNPVQPIGPQTPKACDSKLTFDAITTIRGEVMFFKDRFYMRTNPFYPEVELNFISVFWPQLPNGLEAAYEFADRDEVRFFKGNKYWAVQGQNVLHGYPKDIYSSFGFPRTVKHIDAALSEENTGKTYFFVANKYWRYDEYKRSMDPGYPKMIAHDFPGIGHKVDAVFMKDGFFYFFHGTRQYKFDPKTKRILTLQKANSWFNCRKN

SEQ ID NO: 1506 - protein, 450 aa, Artificial Sequence
  MMP-1 variant S123C
FPATLETQEQDVDLVQKYLEKYYNLKNDGRQVEKRRNSGPVVEKLKQMQEFFGLKVTGKPDAETLKVMKQPRCGVPDVAQFVLTEGNPRWEQTHLTYRIENYTPDLPRADVDHAIEKAFQLWCNVTPLTFTKVSEGQADIMISFVRGDHRDNSPFDGPGGNLAHAFQPGPGIGGDAHFDEDERWTNNFREYNLHRVAAHELGHSLGLSHSTDIGALMYPSYTFSGDVQLAQDDIDGIQAIYGRSQNPVQPIGPQTPKACDSKLTFDAITTIRGEVMFFKDRFYMRTNPFYPEVELNFISVFWPQLPNGLEAAYEFADRDEVRFFKGNKYWAVQGQNVLHGYPKDIYSSFGFPRTVKHIDAALSEENTGKTYFFVANKYWRYDEYKRSMDPGYPKMIAHDFPGIGHKVDAVFMKDGFFYFFHGTRQYKFDPKTKRILTLQKANSWFNCRKN

SEQ ID NO: 1507 - protein, 450 aa, Artificial Sequence
  MMP-1 variant S123N
FPATLETQEQDVDLVQKYLEKYYNLKNDGRQVEKRRNSGPVVEKLKQMQEFFGLKVTGKPDAETLKVMKQPRCGVPDVAQFVLTEGNPRWEQTHLTYRIENYTPDLPRADVDHAIEKAFQLWNNVTPLTFTKVSEGQADIMISFVRGDHRDNSPFDGPGGNLAHAFQPGPGIGGDAHFDEDERWTNNFREYNLHRVAAHELGHSLGLSHSTDIGALMYPSYTFSGDVQLAQDDIDGIQAIYGRSQNPVQPIGPQTPKACDSKLTFDAITTIRGEVMFFKDRFYMRTNPFYPEVELNFISVFWPQLPNGLEAAYEFADRDEVRFFKGNKYWAVQGQNVLHGYPKDIYSSFGFPRTVKHIDAALSEENTGKTYFFVANKYWRYDEYKRSMDPGYPKMIAHDFPGIGHKVDAVFMKDGFFYFFHGTRQYKFDPKTKRILTLQKANSWFNCRKN

SEQ ID NO: 1508 - protein, 450 aa, Artificial Sequence
  MMP-1 variant S123Q
FPATLETQEQDVDLVQKYLEKYYNLKNDGRQVEKRRNSGPVVEKLKQMQEFFGLKVTGKPDAETLKVMKQPRCGVPDVAQFVLTEGNPRWEQTHLTYRIENYTPDLPRADVDHAIEKAFQLWQNVTPLTFTKVSEGQADIMISFVRGDHRDNSPFDGPGGNLAHAFQPGPGIGGDAHFDEDERWTNNFREYNLHRVAAHELGHSLGLSHSTDIGALMYPSYTFSGDVQLAQDDIDGIQAIYGRSQNPVQPIGPQTPKACDSKLTFDAITTIRGEVMFFKDRFYMRTNPFYPEVELNFISVFWPQLPNGLEAAYEFADRDEVRFFKGNKYWAVQGQNVLHGYPKDIYSSFGFPRTVKHIDAALSEENTGKTYFFVANKYWRYDEYKRSMDPGYPKMIAHDFPGIGHKVDAVFMKDGFFYFFHGTRQYKFDPKTKRILTLQKANSWFNCRKN

SEQ ID NO: 1509 - protein, 450 aa, Artificial Sequence
  MMP-1 variant S123T
FPATLETQEQDVDLVQKYLEKYYNLKNDGRQVEKRRNSGPVVEKLKQMQEFFGLKVTGKPDAETLKVMKQPRCGVPDVAQFVLTEGNPRWEQTHLTYRIENYTPDLPRADVDHAIEKAFQLWTNVTPLTFTKVSEGQADIMISFVRGDHRDNSPFDGPGGNLAHAFQPGPGIGGDAHFDEDERWTNNFREYNLHRVAAHELGHSLGLSHSTDIGALMYPSYTFSGDVQLAQDDIDGIQAIYGRSQNPVQPIGPQTPKACDSKLTFDAITTIRGEVMFFKDRFYMRTNPFYPEVELNFISVFWPQLPNGLEAAYEFADRDEVRFFKGNKYWAVQGQNVLHGYPKDIYSSFGFPRTVKHIDAALSEENTGKTYFFVANKYWRYDEYKRSMDPGYPKMIAHDFPGIGHKVDAVFMKDGFFYFFHGTRQYKFDPKTKRILTLQKANSWFNCRKN

SEQ ID NO: 1510 - protein, 450 aa, Artificial Sequence
  MMP-1 variant S123Y
FPATLETQEQDVDLVQKYLEKYYNLKNDGRQVEKRRNSGPVVEKLKQMQEFFGLKVTGKPDAETLKVMKQPRCGVPDVAQFVLTEGNPRWEQTHLTYRIENYTPDLPRADVDHAIEKAFQLWYNVTPLTFTKVSEGQADIMISFVRGDHRDNSPFDGPGGNLAHAFQPGPGIGGDAHFDEDERWTNNFREYNLHRVAAHELGHSLGLSHSTDIGALMYPSYTFSGDVQLAQDDIDGIQAIYGRSQNPVQPIGPQTPKACDSKLTFDAITTIRGEVMFFKDRFYMRTNPFYPEVELNFISVFWPQLPNGLEAAYEFADRDEVRFFKGNKYWAVQGQNVLHGYPKDIYSSFGFPRTVKHIDAALSEENTGKTYFFVANKYWRYDEYKRSMDPGYPKMIAHDFPGIGHKVDAVFMKDGFFYFFHGTRQYKFDPKTKRILTLQKANSWFNCRKN

SEQ ID NO: 1511 - protein, 450 aa, Artificial Sequence
  MMP-1 variant S123G
FPATLETQEQDVDLVQKYLEKYYNLKNDGRQVEKRRNSGPVVEKLKQMQEFFGLKVTGKPDAETLKVMKQPRCGVPDVAQFVLTEGNPRWEQTHLTYRIENYTPDLPRADVDHAIEKAFQLWGNVTPLTFTKVSEGQADIMISFVRGDHRDNSPFDGPGGNLAHAFQPGPGIGGDAHFDEDERWTNNFREYNLHRVAAHELGHSLGLSHSTDIGALMYPSYTFSGDVQLAQDDIDGIQAIYGRSQNPVQPIGPQTPKACDSKLTFDAITTIRGEVMFFKDRFYMRTNPFYPEVELNFISVFWPQLPNGLEAAYEFADRDEVRFFKGNKYWAVQGQNVLHGYPKDIYSSFGFPRTVKHIDAALSEENTGKTYFFVANKYWRYDEYKRSMDPGYPKMIAHDFPGIGHKVDAVFMKDGFFYFFHGTRQYKFDPKTKRILTLQKANSWFNCRKN

SEQ ID NO: 1512 - protein, 450 aa, Artificial Sequence
  MMP-1 variant S123F
FPATLETQEQDVDLVQKYLEKYYNLKNDGRQVEKRRNSGPVVEKLKQMQEFFGLKVTGKPDAETLKVMKQPRCGVPDVAQFVLTEGNPRWEQTHLTYRIENYTPDLPRADVDHAIEKAFQLWFNVTPLTFTKVSEGQADIMISFVRGDHRDNSPFDGPGGNLAHAFQPGPGIGGDAHFDEDERWTNNFREYNLHRVAAHELGHSLGLSHSTDIGALMYPSYTFSGDVQLAQDDIDGIQAIYGRSQNPVQPIGPQTPKACDSKLTFDAITTIRGEVMFFKDRFYMRTNPFYPEVELNFISVFWPQLPNGLEAAYEFADRDEVRFFKGNKYWAVQGQNVLHGYPKDIYSSFGFPRTVKHIDAALSEENTGKTYFFVANKYWRYDEYKRSMDPGYPKMIAHDFPGIGHKVDAVFMKDGFFYFFHGTRQYKFDPKTKRILTLQKANSWFNCRKN

SEQ ID NO: 1513 - protein, 450 aa, Artificial Sequence
  MMP-1 variant S123M
FPATLETQEQDVDLVQKYLEKYYNLKNDGRQVEKRRNSGPVVEKLKQMQEFFGLKVTGKPDAETLKVMKQPRCGVPDVAQFVLTEGNPRWEQTHLTYRIENYTPDLPRADVDHAIEKAFQLWMNVTPLTFTKVSEGQADIMISFVRGDHRDNSPFDGPGGNLAHAFQPGPGIGGDAHFDEDERWTNNFREYNLHRVAAHELGHSLGLSHSTDIGALMYPSYTFSGDVQLAQDDIDGIQAIYGRSQNPVQPIGPQTPKACDSKLTFDAITTIRGEVMFFKDRFYMRTNPFYPEVELNFISVFWPQLPNGLEAAYEFADRDEVRFFKGNKYWAVQGQNVLHGYPKDIYSSFGFPRTVKHIDAALSEENTGKTYFFVANKYWRYDEYKRSMDPGYPKMIAHDFPGIGHKVDAVFMKDGFFYFFHGTRQYKFDPKTKRILTLQKANSWFNCRKN

SEQ ID NO: 1514 - protein, 450 aa, Artificial Sequence
  MMP-1 variant S123W
FPATLETQEQDVDLVQKYLEKYYNLKNDGRQVEKRRNSGPVVEKLKQMQEFFGLKVTGKPDAETLKVMKQPRCGVPDVAQFVLTEGNPRWEQTHLTYRIENYTPDLPRADVDHAIEKAFQLWWNVTPLTFTKVSEGQADIMISFVRGDHRDNSPFDGPGGNLAHAFQPGPGIGGDAHFDEDERWTNNFREYNLHRVAAHELGHSLGLSHSTDIGALMYPSYTFSGDVQLAQDDIDGIQAIYGRSQNPVQPIGPQTPKACDSKLTFDAITTIRGEVMFFKDRFYMRTNPFYPEVELNFISVFWPQLPNGLEAAYEFADRDEVRFFKGNKYWAVQGQNVLHGYPKDIYSSFGFPRTVKHIDAALSEENTGKTYFFVANKYWRYDEYKRSMDPGYPKMIAHDFPGIGHKVDAVFMKDGFFYFFHGTRQYKFDPKTKRILTLQKANSWFNCRKN

SEQ ID NO: 1515 - protein, 450 aa, Artificial Sequence
  MMP-1 variant S123I
FPATLETQEQDVDLVQKYLEKYYNLKNDGRQVEKRRNSGPVVEKLKQMQEFFGLKVTGKPDAETLKVMKQPRCGVPDVAQFVLTEGNPRWEQTHLTYRIENYTPDLPRADVDHAIEKAFQLWINVTPLTFTKVSEGQADIMISFVRGDHRDNSPFDGPGGNLAHAFQPGPGIGGDAHFDEDERWTNNFREYNLHRVAAHELGHSLGLSHSTDIGALMYPSYTFSGDVQLAQDDIDGIQAIYGRSQNPVQPIGPQTPKACDSKLTFDAITTIRGEVMFFKDRFYMRTNPFYPEVELNFISVFWPQLPNGLEAAYEFADRDEVRFFKGNKYWAVQGQNVLHGYPKDIYSSFGFPRTVKHIDAALSEENTGKTYFFVANKYWRYDEYKRSMDPGYPKMIAHDFPGIGHKVDAVFMKDGFFYFFHGTRQYKFDPKTKRILTLQKANSWFNCRKN

SEQ ID NO: 1516 - protein, 450 aa, Artificial Sequence
  MMP-1 variant S123V
FPATLETQEQDVDLVQKYLEKYYNLKNDGRQVEKRRNSGPVVEKLKQMQEFFGLKVTGKPDAETLKVMKQPRCGVPDVAQFVLTEGNPRWEQTHLTYRIENYTPDLPRADVDHAIEKAFQLWVNVTPLTFTKVSEGQADIMISFVRGDHRDNSPFDGPGGNLAHAFQPGPGIGGDAHFDEDERWTNNFREYNLHRVAAHELGHSLGLSHSTDIGALMYPSYTFSGDVQLAQDDIDGIQAIYGRSQNPVQPIGPQTPKACDSKLTFDAITTIRGEVMFFKDRFYMRTNPFYPEVELNFISVFWPQLPNGLEAAYEFADRDEVRFFKGNKYWAVQGQNVLHGYPKDIYSSFGFPRTVKHIDAALSEENTGKTYFFVANKYWRYDEYKRSMDPGYPKMIAHDFPGIGHKVDAVFMKDGFFYFFHGTRQYKFDPKTKRILTLQKANSWFNCRKN

SEQ ID NO: 1517 - protein, 450 aa, Artificial Sequence
  MMP-1 variant S123L
FPATLETQEQDVDLVQKYLEKYYNLKNDGRQVEKRRNSGPVVEKLKQMQEFFGLKVTGKPDAETLKVMKQPRCGVPDVAQFVLTEGNPRWEQTHLTYRIENYTPDLPRADVDHAIEKAFQLWLNVTPLTFTKVSEGQADIMISFVRGDHRDNSPFDGPGGNLAHAFQPGPGIGGDAHFDEDERWTNNFREYNLHRVAAHELGHSLGLSHSTDIGALMYPSYTFSGDVQLAQDDIDGIQAIYGRSQNPVQPIGPQTPKACDSKLTFDAITTIRGEVMFFKDRFYMRTNPFYPEVELNFISVFWPQLPNGLEAAYEFADRDEVRFFKGNKYWAVQGQNVLHGYPKDIYSSFGFPRTVKHIDAALSEENTGKTYFFVANKYWRYDEYKRSMDPGYPKMIAHDFPGIGHKVDAVFMKDGFFYFFHGTRQYKFDPKTKRILTLQKANSWFNCRKN

SEQ ID NO: 1518 - protein, 450 aa, Artificial Sequence
  MMP-1 variant S123A
FPATLETQEQDVDLVQKYLEKYYNLKNDGRQVEKRRNSGPVVEKLKQMQEFFGLKVTGKPDAETLKVMKQPRCGVPDVAQFVLTEGNPRWEQTHLTYRIENYTPDLPRADVDHAIEKAFQLWANVTPLTFTKVSEGQADIMISFVRGDHRDNSPFDGPGGNLAHAFQPGPGIGGDAHFDEDERWTNNFREYNLHRVAAHELGHSLGLSHSTDIGALMYPSYTFSGDVQLAQDDIDGIQAIYGRSQNPVQPIGPQTPKACDSKLTFDAITTIRGEVMFFKDRFYMRTNPFYPEVELNFISVFWPQLPNGLEAAYEFADRDEVRFFKGNKYWAVQGQNVLHGYPKDIYSSFGFPRTVKHIDAALSEENTGKTYFFVANKYWRYDEYKRSMDPGYPKMIAHDFPGIGHKVDAVFMKDGFFYFFHGTRQYKFDPKTKRILTLQKANSWFNCRKN

SEQ ID NO: 1519 - protein, 450 aa, Artificial Sequence
  MMP-1 variant S123P
FPATLETQEQDVDLVQKYLEKYYNLKNDGRQVEKRRNSGPVVEKLKQMQEFFGLKVTGKPDAETLKVMKQPRCGVPDVAQFVLTEGNPRWEQTHLTYRIENYTPDLPRADVDHAIEKAFQLWPNVTPLTFTKVSEGQADIMISFVRGDHRDNSPFDGPGGNLAHAFQPGPGIGGDAHFDEDERWTNNFREYNLHRVAAHELGHSLGLSHSTDIGALMYPSYTFSGDVQLAQDDIDGIQAIYGRSQNPVQPIGPQTPKACDSKLTFDAITTIRGEVMFFKDRFYMRTNPFYPEVELNFISVFWPQLPNGLEAAYEFADRDEVRFFKGNKYWAVQGQNVLHGYPKDIYSSFGFPRTVKHIDAALSEENTGKTYFFVANKYWRYDEYKRSMDPGYPKMIAHDFPGIGHKVDAVFMKDGFFYFFHGTRQYKFDPKTKRILTLQKANSWFNCRKN

SEQ ID NO: 1520 - protein, 450 aa, Artificial Sequence
  MMP-1 variant N124D
FPATLETQEQDVDLVQKYLEKYYNLKNDGRQVEKRRNSGPVVEKLKQMQEFFGLKVTGKPDAETLKVMKQPRCGVPDVAQFVLTEGNPRWEQTHLTYRIENYTPDLPRADVDHAIEKAFQLWSDVTPLTFTKVSEGQADIMISFVRGDHRDNSPFDGPGGNLAHAFQPGPGIGGDAHFDEDERWTNNFREYNLHRVAAHELGHSLGLSHSTDIGALMYPSYTFSGDVQLAQDDIDGIQAIYGRSQNPVQPIGPQTPKACDSKLTFDAITTIRGEVMFFKDRFYMRTNPFYPEVELNFISVFWPQLPNGLEAAYEFADRDEVRFFKGNKYWAVQGQNVLHGYPKDIYSSFGFPRTVKHIDAALSEENTGKTYFFVANKYWRYDEYKRSMDPGYPKMIAHDFPGIGHKVDAVFMKDGFFYFFHGTRQYKFDPKTKRILTLQKANSWFNCRKN

SEQ ID NO: 1521 - protein, 450 aa, Artificial Sequence
  MMP-1 variant N124E
FPATLETQEQDVDLVQKYLEKYYNLKNDGRQVEKRRNSGPVVEKLKQMQEFFGLKVTGKPDAETLKVMKQPRCGVPDVAQFVLTEGNPRWEQTHLTYRIENYTPDLPRADVDHAIEKAFQLWSEVTPLTFTKVSEGQADIMISFVRGDHRDNSPFDGPGGNLAHAFQPGPGIGGDAHFDEDERWTNNFREYNLHRVAAHELGHSLGLSHSTDIGALMYPSYTFSGDVQLAQDDIDGIQAIYGRSQNPVQPIGPQTPKACDSKLTFDAITTIRGEVMFFKDRFYMRTNPFYPEVELNFISVFWPQLPNGLEAAYEFADRDEVRFFKGNKYWAVQGQNVLHGYPKDIYSSFGFPRTVKHIDAALSEENTGKTYFFVANKYWRYDEYKRSMDPGYPKMIAHDFPGIGHKVDAVFMKDGFFYFFHGTRQYKFDPKTKRILTLQKANSWFNCRKN

SEQ ID NO: 1522 - protein, 450 aa, Artificial Sequence
  MMP-1 variant N124H
FPATLETQEQDVDLVQKYLEKYYNLKNDGRQVEKRRNSGPVVEKLKQMQEFFGLKVTGKPDAETLKVMKQPRCGVPDVAQFVLTEGNPRWEQTHLTYRIENYTPDLPRADVDHAIEKAFQLWSHVTPLTFTKVSEGQADIMISFVRGDHRDNSPFDGPGGNLAHAFQPGPGIGGDAHFDEDERWTNNFREYNLHRVAAHELGHSLGLSHSTDIGALMYPSYTFSGDVQLAQDDIDGIQAIYGRSQNPVQPIGPQTPKACDSKLTFDAITTIRGEVMFFKDRFYMRTNPFYPEVELNFISVFWPQLPNGLEAAYEFADRDEVRFFKGNKYWAVQGQNVLHGYPKDIYSSFGFPRTVKHIDAALSEENTGKTYFFVANKYWRYDEYKRSMDPGYPKMIAHDFPGIGHKVDAVFMKDGFFYFFHGTRQYKFDPKTKRILTLQKANSWFNCRKN

SEQ ID NO: 1523 - protein, 450 aa, Artificial Sequence
  MMP-1 variant N124K
FPATLETQEQDVDLVQKYLEKYYNLKNDGRQVEKRRNSGPVVEKLKQMQEFFGLKVTGKPDAETLKVMKQPRCGVPDVAQFVLTEGNPRWEQTHLTYRIENYTPDLPRADVDHAIEKAFQLWSKVTPLTFTKVSEGQADIMISFVRGDHRDNSPFDGPGGNLAHAFQPGPGIGGDAHFDEDERWTNNFREYNLHRVAAHELGHSLGLSHSTDIGALMYPSYTFSGDVQLAQDDIDGIQAIYGRSQNPVQPIGPQTPKACDSKLTFDAITTIRGEVMFFKDRFYMRTNPFYPEVELNFISVFWPQLPNGLEAAYEFADRDEVRFFKGNKYWAVQGQNVLHGYPKDIYSSFGFPRTVKHIDAALSEENTGKTYFFVANKYWRYDEYKRSMDPGYPKMIAHDFPGIGHKVDAVFMKDGFFYFFHGTRQYKFDPKTKRILTLQKANSWFNCRKN

SEQ ID NO: 1524 - protein, 450 aa, Artificial Sequence
  MMP-1 variant N124R
FPATLETQEQDVDLVQKYLEKYYNLKNDGRQVEKRRNSGPVVEKLKQMQEFFGLKVTGKPDAETLKVMKQPRCGVPDVAQFVLTEGNPRWEQTHLTYRIENYTPDLPRADVDHAIEKAFQLWSRVTPLTFTKVSEGQADIMISFVRGDHRDNSPFDGPGGNLAHAFQPGPGIGGDAHFDEDERWTNNFREYNLHRVAAHELGHSLGLSHSTDIGALMYPSYTFSGDVQLAQDDIDGIQAIYGRSQNPVQPIGPQTPKACDSKLTFDAITTIRGEVMFFKDRFYMRTNPFYPEVELNFISVFWPQLPNGLEAAYEFADRDEVRFFKGNKYWAVQGQNVLHGYPKDIYSSFGFPRTVKHIDAALSEENTGKTYFFVANKYWRYDEYKRSMDPGYPKMIAHDFPGIGHKVDAVFMKDGFFYFFHGTRQYKFDPKTKRILTLQKANSWFNCRKN

SEQ ID NO: 1525 - protein, 450 aa, Artificial Sequence
  MMP-1 variant N124C
FPATLETQEQDVDLVQKYLEKYYNLKNDGRQVEKRRNSGPVVEKLKQMQEFFGLKVTGKPDAETLKVMKQPRCGVPDVAQFVLTEGNPRWEQTHLTYRIENYTPDLPRADVDHAIEKAFQLWSCVTPLTFTKVSEGQADIMISFVRGDHRDNSPFDGPGGNLAHAFQPGPGIGGDAHFDEDERWTNNFREYNLHRVAAHELGHSLGLSHSTDIGALMYPSYTFSGDVQLAQDDIDGIQAIYGRSQNPVQPIGPQTPKACDSKLTFDAITTIRGEVMFFKDRFYMRTNPFYPEVELNFISVFWPQLPNGLEAAYEFADRDEVRFFKGNKYWAVQGQNVLHGYPKDIYSSFGFPRTVKHIDAALSEENTGKTYFFVANKYWRYDEYKRSMDPGYPKMIAHDFPGIGHKVDAVFMKDGFFYFFHGTRQYKFDPKTKRILTLQKANSWFNCRKN

SEQ ID NO: 1526 - protein, 450 aa, Artificial Sequence
  MMP-1 variant N124Q
FPATLETQEQDVDLVQKYLEKYYNLKNDGRQVEKRRNSGPVVEKLKQMQEFFGLKVTGKPDAETLKVMKQPRCGVPDVAQFVLTEGNPRWEQTHLTYRIENYTPDLPRADVDHAIEKAFQLWSQVTPLTFTKVSEGQADIMISFVRGDHRDNSPFDGPGGNLAHAFQPGPGIGGDAHFDEDERWTNNFREYNLHRVAAHELGHSLGLSHSTDIGALMYPSYTFSGDVQLAQDDIDGIQAIYGRSQNPVQPIGPQTPKACDSKLTFDAITTIRGEVMFFKDRFYMRTNPFYPEVELNFISVFWPQLPNGLEAAYEFADRDEVRFFKGNKYWAVQGQNVLHGYPKDIYSSFGFPRTVKHIDAALSEENTGKTYFFVANKYWRYDEYKRSMDPGYPKMIAHDFPGIGHKVDAVFMKDGFFYFFHGTRQYKFDPKTKRILTLQKANSWFNCRKN

SEQ ID NO: 1527 - protein, 450 aa, Artificial Sequence
  MMP-1 variant N124T
FPATLETQEQDVDLVQKYLEKYYNLKNDGRQVEKRRNSGPVVEKLKQMQEFFGLKVTGKPDAETLKVMKQPRCGVPDVAQFVLTEGNPRWEQTHLTYRIENYTPDLPRADVDHAIEKAFQLWSTVTPLTFTKVSEGQADIMISFVRGDHRDNSPFDGPGGNLAHAFQPGPGIGGDAHFDEDERWTNNFREYNLHRVAAHELGHSLGLSHSTDIGALMYPSYTFSGDVQLAQDDIDGIQAIYGRSQNPVQPIGPQTPKACDSKLTFDAITTIRGEVMFFKDRFYMRTNPFYPEVELNFISVFWPQLPNGLEAAYEFADRDEVRFFKGNKYWAVQGQNVLHGYPKDIYSSFGFPRTVKHIDAALSEENTGKTYFFVANKYWRYDEYKRSMDPGYPKMIAHDFPGIGHKVDAVFMKDGFFYFFHGTRQYKFDPKTKRILTLQKANSWFNCRKN

SEQ ID NO: 1528 - protein, 450 aa, Artificial Sequence
  MMP-1 variant N124Y
FPATLETQEQDVDLVQKYLEKYYNLKNDGRQVEKRRNSGPVVEKLKQMQEFFGLKVTGKPDAETLKVMKQPRCGVPDVAQFVLTEGNPRWEQTHLTYRIENYTPDLPRADVDHAIEKAFQLWSYVTPLTFTKVSEGQADIMISFVRGDHRDNSPFDGPGGNLAHAFQPGPGIGGDAHFDEDERWTNNFREYNLHRVAAHELGHSLGLSHSTDIGALMYPSYTFSGDVQLAQDDIDGIQAIYGRSQNPVQPIGPQTPKACDSKLTFDAITTIRGEVMFFKDRFYMRTNPFYPEVELNFISVFWPQLPNGLEAAYEFADRDEVRFFKGNKYWAVQGQNVLHGYPKDIYSSFGFPRTVKHIDAALSEENTGKTYFFVANKYWRYDEYKRSMDPGYPKMIAHDFPGIGHKVDAVFMKDGFFYFFHGTRQYKFDPKTKRILTLQKANSWFNCRKN

SEQ ID NO: 1529 - protein, 450 aa, Artificial Sequence
  MMP-1 variant N124S
FPATLETQEQDVDLVQKYLEKYYNLKNDGRQVEKRRNSGPVVEKLKQMQEFFGLKVTGKPDAETLKVMKQPRCGVPDVAQFVLTEGNPRWEQTHLTYRIENYTPDLPRADVDHAIEKAFQLWSSVTPLTFTKVSEGQADIMISFVRGDHRDNSPFDGPGGNLAHAFQPGPGIGGDAHFDEDERWTNNFREYNLHRVAAHELGHSLGLSHSTDIGALMYPSYTFSGDVQLAQDDIDGIQAIYGRSQNPVQPIGPQTPKACDSKLTFDAITTIRGEVMFFKDRFYMRTNPFYPEVELNFISVFWPQLPNGLEAAYEFADRDEVRFFKGNKYWAVQGQNVLHGYPKDIYSSFGFPRTVKHIDAALSEENTGKTYFFVANKYWRYDEYKRSMDPGYPKMIAHDFPGIGHKVDAVFMKDGFFYFFHGTRQYKFDPKTKRILTLQKANSWFNCRKN

SEQ ID NO: 1530 - protein, 450 aa, Artificial Sequence
  MMP-1 variant N124G
FPATLETQEQDVDLVQKYLEKYYNLKNDGRQVEKRRNSGPVVEKLKQMQEFFGLKVTGKPDAETLKVMKQPRCGVPDVAQFVLTEGNPRWEQTHLTYRIENYTPDLPRADVDHAIEKAFQLWSGVTPLTFTKVSEGQADIMISFVRGDHRDNSPFDGPGGNLAHAFQPGPGIGGDAHFDEDERWTNNFREYNLHRVAAHELGHSLGLSHSTDIGALMYPSYTFSGDVQLAQDDIDGIQAIYGRSQNPVQPIGPQTPKACDSKLTFDAITTIRGEVMFFKDRFYMRTNPFYPEVELNFISVFWPQLPNGLEAAYEFADRDEVRFFKGNKYWAVQGQNVLHGYPKDIYSSFGFPRTVKHIDAALSEENTGKTYFFVANKYWRYDEYKRSMDPGYPKMIAHDFPGIGHKVDAVFMKDGFFYFFHGTRQYKFDPKTKRILTLQKANSWFNCRKN

SEQ ID NO: 1531 - protein, 450 aa, Artificial Sequence
  MMP-1 variant N124F
FPATLETQEQDVDLVQKYLEKYYNLKNDGRQVEKRRNSGPVVEKLKQMQEFFGLKVTGKPDAETLKVMKQPRCGVPDVAQFVLTEGNPRWEQTHLTYRIENYTPDLPRADVDHAIEKAFQLWSFVTPLTFTKVSEGQADIMISFVRGDHRDNSPFDGPGGNLAHAFQPGPGIGGDAHFDEDERWTNNFREYNLHRVAAHELGHSLGLSHSTDIGALMYPSYTFSGDVQLAQDDIDGIQAIYGRSQNPVQPIGPQTPKACDSKLTFDAITTIRGEVMFFKDRFYMRTNPFYPEVELNFISVFWPQLPNGLEAAYEFADRDEVRFFKGNKYWAVQGQNVLHGYPKDIYSSFGFPRTVKHIDAALSEENTGKTYFFVANKYWRYDEYKRSMDPGYPKMIAHDFPGIGHKVDAVFMKDGFFYFFHGTRQYKFDPKTKRILTLQKANSWFNCRKN

SEQ ID NO: 1532 - protein, 450 aa, Artificial Sequence
  MMP-1 variant N124M
FPATLETQEQDVDLVQKYLEKYYNLKNDGRQVEKRRNSGPVVEKLKQMQEFFGLKVTGKPDAETLKVMKQPRCGVPDVAQFVLTEGNPRWEQTHLTYRIENYTPDLPRADVDHAIEKAFQLWSMVTPLTFTKVSEGQADIMISFVRGDHRDNSPFDGPGGNLAHAFQPGPGIGGDAHFDEDERWTNNFREYNLHRVAAHELGHSLGLSHSTDIGALMYPSYTFSGDVQLAQDDIDGIQAIYGRSQNPVQPIGPQTPKACDSKLTFDAITTIRGEVMFFKDRFYMRTNPFYPEVELNFISVFWPQLPNGLEAAYEFADRDEVRFFKGNKYWAVQGQNVLHGYPKDIYSSFGFPRTVKHIDAALSEENTGKTYFFVANKYWRYDEYKRSMDPGYPKMIAHDFPGIGHKVDAVFMKDGFFYFFHGTRQYKFDPKTKRILTLQKANSWFNCRKN

SEQ ID NO: 1533 - protein, 450 aa, Artificial Sequence
  MMP-1 variant N124W
FPATLETQEQDVDLVQKYLEKYYNLKNDGRQVEKRRNSGPVVEKLKQMQEFFGLKVTGKPDAETLKVMKQPRCGVPDVAQFVLTEGNPRWEQTHLTYRIENYTPDLPRADVDHAIEKAFQLWSWVTPLTFTKVSEGQADIMISFVRGDHRDNSPFDGPGGNLAHAFQPGPGIGGDAHFDEDERWTNNFREYNLHRVAAHELGHSLGLSHSTDIGALMYPSYTFSGDVQLAQDDIDGIQAIYGRSQNPVQPIGPQTPKACDSKLTFDAITTIRGEVMFFKDRFYMRTNPFYPEVELNFISVFWPQLPNGLEAAYEFADRDEVRFFKGNKYWAVQGQNVLHGYPKDIYSSFGFPRTVKHIDAALSEENTGKTYFFVANKYWRYDEYKRSMDPGYPKMIAHDFPGIGHKVDAVFMKDGFFYFFHGTRQYKFDPKTKRILTLQKANSWFNCRKN

SEQ ID NO: 1534 - protein, 450 aa, Artificial Sequence
  MMP-1 variant N124I
FPATLETQEQDVDLVQKYLEKYYNLKNDGRQVEKRRNSGPVVEKLKQMQEFFGLKVTGKPDAETLKVMKQPRCGVPDVAQFVLTEGNPRWEQTHLTYRIENYTPDLPRADVDHAIEKAFQLWSIVTPLTFTKVSEGQADIMISFVRGDHRDNSPFDGPGGNLAHAFQPGPGIGGDAHFDEDERWTNNFREYNLHRVAAHELGHSLGLSHSTDIGALMYPSYTFSGDVQLAQDDIDGIQAIYGRSQNPVQPIGPQTPKACDSKLTFDAITTIRGEVMFFKDRFYMRTNPFYPEVELNFISVFWPQLPNGLEAAYEFADRDEVRFFKGNKYWAVQGQNVLHGYPKDIYSSFGFPRTVKHIDAALSEENTGKTYFFVANKYWRYDEYKRSMDPGYPKMIAHDFPGIGHKVDAVFMKDGFFYFFHGTRQYKFDPKTKRILTLQKANSWFNCRKN

SEQ ID NO: 1535 - protein, 450 aa, Artificial Sequence
  MMP-1 variant N124V
FPATLETQEQDVDLVQKYLEKYYNLKNDGRQVEKRRNSGPVVEKLKQMQEFFGLKVTGKPDAETLKVMKQPRCGVPDVAQFVLTEGNPRWEQTHLTYRIENYTPDLPRADVDHAIEKAFQLWSVVTPLTFTKVSEGQADIMISFVRGDHRDNSPFDGPGGNLAHAFQPGPGIGGDAHFDEDERWTNNFREYNLHRVAAHELGHSLGLSHSTDIGALMYPSYTFSGDVQLAQDDIDGIQAIYGRSQNPVQPIGPQTPKACDSKLTFDAITTIRGEVMFFKDRFYMRTNPFYPEVELNFISVFWPQLPNGLEAAYEFADRDEVRFFKGNKYWAVQGQNVLHGYPKDIYSSFGFPRTVKHIDAALSEENTGKTYFFVANKYWRYDEYKRSMDPGYPKMIAHDFPGIGHKVDAVFMKDGFFYFFHGTRQYKFDPKTKRILTLQKANSWFNCRKN

SEQ ID NO: 1536 - protein, 450 aa, Artificial Sequence
  MMP-1 variant N124L
FPATLETQEQDVDLVQKYLEKYYNLKNDGRQVEKRRNSGPVVEKLKQMQEFFGLKVTGKPDAETLKVMKQPRCGVPDVAQFVLTEGNPRWEQTHLTYRIENYTPDLPRADVDHAIEKAFQLWSLVTPLTFTKVSEGQADIMISFVRGDHRDNSPFDGPGGNLAHAFQPGPGIGGDAHFDEDERWTNNFREYNLHRVAAHELGHSLGLSHSTDIGALMYPSYTFSGDVQLAQDDIDGIQAIYGRSQNPVQPIGPQTPKACDSKLTFDAITTIRGEVMFFKDRFYMRTNPFYPEVELNFISVFWPQLPNGLEAAYEFADRDEVRFFKGNKYWAVQGQNVLHGYPKDIYSSFGFPRTVKHIDAALSEENTGKTYFFVANKYWRYDEYKRSMDPGYPKMIAHDFPGIGHKVDAVFMKDGFFYFFHGTRQYKFDPKTKRILTLQKANSWFNCRKN

SEQ ID NO: 1537 - protein, 450 aa, Artificial Sequence
  MMP-1 variant N124A
FPATLETQEQDVDLVQKYLEKYYNLKNDGRQVEKRRNSGPVVEKLKQMQEFFGLKVTGKPDAETLKVMKQPRCGVPDVAQFVLTEGNPRWEQTHLTYRIENYTPDLPRADVDHAIEKAFQLWSAVTPLTFTKVSEGQADIMISFVRGDHRDNSPFDGPGGNLAHAFQPGPGIGGDAHFDEDERWTNNFREYNLHRVAAHELGHSLGLSHSTDIGALMYPSYTFSGDVQLAQDDIDGIQAIYGRSQNPVQPIGPQTPKACDSKLTFDAITTIRGEVMFFKDRFYMRTNPFYPEVELNFISVFWPQLPNGLEAAYEFADRDEVRFFKGNKYWAVQGQNVLHGYPKDIYSSFGFPRTVKHIDAALSEENTGKTYFFVANKYWRYDEYKRSMDPGYPKMIAHDFPGIGHKVDAVFMKDGFFYFFHGTRQYKFDPKTKRILTLQKANSWFNCRKN

SEQ ID NO: 1538 - protein, 450 aa, Artificial Sequence
  MMP-1 variant N124P
FPATLETQEQDVDLVQKYLEKYYNLKNDGRQVEKRRNSGPVVEKLKQMQEFFGLKVTGKPDAETLKVMKQPRCGVPDVAQFVLTEGNPRWEQTHLTYRIENYTPDLPRADVDHAIEKAFQLWSPVTPLTFTKVSEGQADIMISFVRGDHRDNSPFDGPGGNLAHAFQPGPGIGGDAHFDEDERWTNNFREYNLHRVAAHELGHSLGLSHSTDIGALMYPSYTFSGDVQLAQDDIDGIQAIYGRSQNPVQPIGPQTPKACDSKLTFDAITTIRGEVMFFKDRFYMRTNPFYPEVELNFISVFWPQLPNGLEAAYEFADRDEVRFFKGNKYWAVQGQNVLHGYPKDIYSSFGFPRTVKHIDAALSEENTGKTYFFVANKYWRYDEYKRSMDPGYPKMIAHDFPGIGHKVDAVFMKDGFFYFFHGTRQYKFDPKTKRILTLQKANSWFNCRKN

SEQ ID NO: 1539 - protein, 450 aa, Artificial Sequence
  MMP-1 variant V125D
FPATLETQEQDVDLVQKYLEKYYNLKNDGRQVEKRRNSGPVVEKLKQMQEFFGLKVTGKPDAETLKVMKQPRCGVPDVAQFVLTEGNPRWEQTHLTYRIENYTPDLPRADVDHAIEKAFQLWSNDTPLTFTKVSEGQADIMISFVRGDHRDNSPFDGPGGNLAHAFQPGPGIGGDAHFDEDERWTNNFREYNLHRVAAHELGHSLGLSHSTDIGALMYPSYTFSGDVQLAQDDIDGIQAIYGRSQNPVQPIGPQTPKACDSKLTFDAITTIRGEVMFFKDRFYMRTNPFYPEVELNFISVFWPQLPNGLEAAYEFADRDEVRFFKGNKYWAVQGQNVLHGYPKDIYSSFGFPRTVKHIDAALSEENTGKTYFFVANKYWRYDEYKRSMDPGYPKMIAHDFPGIGHKVDAVFMKDGFFYFFHGTRQYKFDPKTKRILTLQKANSWFNCRKN

SEQ ID NO: 1540 - protein, 450 aa, Artificial Sequence
  MMP-1 variant V125E
FPATLETQEQDVDLVQKYLEKYYNLKNDGRQVEKRRNSGPVVEKLKQMQEFFGLKVTGKPDAETLKVMKQPRCGVPDVAQFVLTEGNPRWEQTHLTYRIENYTPDLPRADVDHAIEKAFQLWSNETPLTFTKVSEGQADIMISFVRGDHRDNSPFDGPGGNLAHAFQPGPGIGGDAHFDEDERWTNNFREYNLHRVAAHELGHSLGLSHSTDIGALMYPSYTFSGDVQLAQDDIDGIQAIYGRSQNPVQPIGPQTPKACDSKLTFDAITTIRGEVMFFKDRFYMRTNPFYPEVELNFISVFWPQLPNGLEAAYEFADRDEVRFFKGNKYWAVQGQNVLHGYPKDIYSSFGFPRTVKHIDAALSEENTGKTYFFVANKYWRYDEYKRSMDPGYPKMIAHDFPGIGHKVDAVFMKDGFFYFFHGTRQYKFDPKTKRILTLQKANSWFNCRKN

SEQ ID NO: 1541 - protein, 450 aa, Artificial Sequence
  MMP-1 variant V125H
FPATLETQEQDVDLVQKYLEKYYNLKNDGRQVEKRRNSGPVVEKLKQMQEFFGLKVTGKPDAETLKVMKQPRCGVPDVAQFVLTEGNPRWEQTHLTYRIENYTPDLPRADVDHAIEKAFQLWSNHTPLTFTKVSEGQADIMISFVRGDHRDNSPFDGPGGNLAHAFQPGPGIGGDAHFDEDERWTNNFREYNLHRVAAHELGHSLGLSHSTDIGALMYPSYTFSGDVQLAQDDIDGIQAIYGRSQNPVQPIGPQTPKACDSKLTFDAITTIRGEVMFFKDRFYMRTNPFYPEVELNFISVFWPQLPNGLEAAYEFADRDEVRFFKGNKYWAVQGQNVLHGYPKDIYSSFGFPRTVKHIDAALSEENTGKTYFFVANKYWRYDEYKRSMDPGYPKMIAHDFPGIGHKVDAVFMKDGFFYFFHGTRQYKFDPKTKRILTLQKANSWFNCRKN

SEQ ID NO: 1542 - protein, 450 aa, Artificial Sequence
  MMP-1 variant V125K
FPATLETQEQDVDLVQKYLEKYYNLKNDGRQVEKRRNSGPVVEKLKQMQEFFGLKVTGKPDAETLKVMKQPRCGVPDVAQFVLTEGNPRWEQTHLTYRIENYTPDLPRADVDHAIEKAFQLWSNKTPLTFTKVSEGQADIMISFVRGDHRDNSPFDGPGGNLAHAFQPGPGIGGDAHFDEDERWTNNFREYNLHRVAAHELGHSLGLSHSTDIGALMYPSYTFSGDVQLAQDDIDGIQAIYGRSQNPVQPIGPQTPKACDSKLTFDAITTIRGEVMFFKDRFYMRTNPFYPEVELNFISVFWPQLPNGLEAAYEFADRDEVRFFKGNKYWAVQGQNVLHGYPKDIYSSFGFPRTVKHIDAALSEENTGKTYFFVANKYWRYDEYKRSMDPGYPKMIAHDFPGIGHKVDAVFMKDGFFYFFHGTRQYKFDPKTKRILTLQKANSWFNCRKN

SEQ ID NO: 1543 - protein, 450 aa, Artificial Sequence
  MMP-1 variant V125R
FPATLETQEQDVDLVQKYLEKYYNLKNDGRQVEKRRNSGPVVEKLKQMQEFFGLKVTGKPDAETLKVMKQPRCGVPDVAQFVLTEGNPRWEQTHLTYRIENYTPDLPRADVDHAIEKAFQLWSNRTPLTFTKVSEGQADIMISFVRGDHRDNSPFDGPGGNLAHAFQPGPGIGGDAHFDEDERWTNNFREYNLHRVAAHELGHSLGLSHSTDIGALMYPSYTFSGDVQLAQDDIDGIQAIYGRSQNPVQPIGPQTPKACDSKLTFDAITTIRGEVMFFKDRFYMRTNPFYPEVELNFISVFWPQLPNGLEAAYEFADRDEVRFFKGNKYWAVQGQNVLHGYPKDIYSSFGFPRTVKHIDAALSEENTGKTYFFVANKYWRYDEYKRSMDPGYPKMIAHDFPGIGHKVDAVFMKDGFFYFFHGTRQYKFDPKTKRILTLQKANSWFNCRKN

SEQ ID NO: 1544 - protein, 450 aa, Artificial Sequence
  MMP-1 variant V125C
FPATLETQEQDVDLVQKYLEKYYNLKNDGRQVEKRRNSGPVVEKLKQMQEFFGLKVTGKPDAETLKVMKQPRCGVPDVAQFVLTEGNPRWEQTHLTYRIENYTPDLPRADVDHAIEKAFQLWSNCTPLTFTKVSEGQADIMISFVRGDHRDNSPFDGPGGNLAHAFQPGPGIGGDAHFDEDERWTNNFREYNLHRVAAHELGHSLGLSHSTDIGALMYPSYTFSGDVQLAQDDIDGIQAIYGRSQNPVQPIGPQTPKACDSKLTFDAITTIRGEVMFFKDRFYMRTNPFYPEVELNFISVFWPQLPNGLEAAYEFADRDEVRFFKGNKYWAVQGQNVLHGYPKDIYSSFGFPRTVKHIDAALSEENTGKTYFFVANKYWRYDEYKRSMDPGYPKMIAHDFPGIGHKVDAVFMKDGFFYFFHGTRQYKFDPKTKRILTLQKANSWFNCRKN

SEQ ID NO: 1545 - protein, 450 aa, Artificial Sequence
  MMP-1 variant V125N
FPATLETQEQDVDLVQKYLEKYYNLKNDGRQVEKRRNSGPVVEKLKQMQEFFGLKVTGKPDAETLKVMKQPRCGVPDVAQFVLTEGNPRWEQTHLTYRIENYTPDLPRADVDHAIEKAFQLWSNNTPLTFTKVSEGQADIMISFVRGDHRDNSPFDGPGGNLAHAFQPGPGIGGDAHFDEDERWTNNFREYNLHRVAAHELGHSLGLSHSTDIGALMYPSYTFSGDVQLAQDDIDGIQAIYGRSQNPVQPIGPQTPKACDSKLTFDAITTIRGEVMFFKDRFYMRTNPFYPEVELNFISVFWPQLPNGLEAAYEFADRDEVRFFKGNKYWAVQGQNVLHGYPKDIYSSFGFPRTVKHIDAALSEENTGKTYFFVANKYWRYDEYKRSMDPGYPKMIAHDFPGIGHKVDAVFMKDGFFYFFHGTRQYKFDPKTKRILTLQKANSWFNCRKN

SEQ ID NO: 1546 - protein, 450 aa, Artificial Sequence
  MMP-1 variant V125Q
FPATLETQEQDVDLVQKYLEKYYNLKNDGRQVEKRRNSGPVVEKLKQMQEFFGLKVTGKPDAETLKVMKQPRCGVPDVAQFVLTEGNPRWEQTHLTYRIENYTPDLPRADVDHAIEKAFQLWSNQTPLTFTKVSEGQADIMISFVRGDHRDNSPFDGPGGNLAHAFQPGPGIGGDAHFDEDERWTNNFREYNLHRVAAHELGHSLGLSHSTDIGALMYPSYTFSGDVQLAQDDIDGIQAIYGRSQNPVQPIGPQTPKACDSKLTFDAITTIRGEVMFFKDRFYMRTNPFYPEVELNFISVFWPQLPNGLEAAYEFADRDEVRFFKGNKYWAVQGQNVLHGYPKDIYSSFGFPRTVKHIDAALSEENTGKTYFFVANKYWRYDEYKRSMDPGYPKMIAHDFPGIGHKVDAVFMKDGFFYFFHGTRQYKFDPKTKRILTLQKANSWFNCRKN

SEQ ID NO: 1547 - protein, 450 aa, Artificial Sequence
  MMP-1 variant V125T
FPATLETQEQDVDLVQKYLEKYYNLKNDGRQVEKRRNSGPVVEKLKQMQEFFGLKVTGKPDAETLKVMKQPRCGVPDVAQFVLTEGNPRWEQTHLTYRIENYTPDLPRADVDHAIEKAFQLWSNTTPLTFTKVSEGQADIMISFVRGDHRDNSPFDGPGGNLAHAFQPGPGIGGDAHFDEDERWTNNFREYNLHRVAAHELGHSLGLSHSTDIGALMYPSYTFSGDVQLAQDDIDGIQAIYGRSQNPVQPIGPQTPKACDSKLTFDAITTIRGEVMFFKDRFYMRTNPFYPEVELNFISVFWPQLPNGLEAAYEFADRDEVRFFKGNKYWAVQGQNVLHGYPKDIYSSFGFPRTVKHIDAALSEENTGKTYFFVANKYWRYDEYKRSMDPGYPKMIAHDFPGIGHKVDAVFMKDGFFYFFHGTRQYKFDPKTKRILTLQKANSWFNCRKN

SEQ ID NO: 1548 - protein, 450 aa, Artificial Sequence
  MMP-1 variant V125Y
FPATLETQEQDVDLVQKYLEKYYNLKNDGRQVEKRRNSGPVVEKLKQMQEFFGLKVTGKPDAETLKVMKQPRCGVPDVAQFVLTEGNPRWEQTHLTYRIENYTPDLPRADVDHAIEKAFQLWSNYTPLTFTKVSEGQADIMISFVRGDHRDNSPFDGPGGNLAHAFQPGPGIGGDAHFDEDERWTNNFREYNLHRVAAHELGHSLGLSHSTDIGALMYPSYTFSGDVQLAQDDIDGIQAIYGRSQNPVQPIGPQTPKACDSKLTFDAITTIRGEVMFFKDRFYMRTNPFYPEVELNFISVFWPQLPNGLEAAYEFADRDEVRFFKGNKYWAVQGQNVLHGYPKDIYSSFGFPRTVKHIDAALSEENTGKTYFFVANKYWRYDEYKRSMDPGYPKMIAHDFPGIGHKVDAVFMKDGFFYFFHGTRQYKFDPKTKRILTLQKANSWFNCRKN

SEQ ID NO: 1549 - protein, 450 aa, Artificial Sequence
  MMP-1 variant V125S
FPATLETQEQDVDLVQKYLEKYYNLKNDGRQVEKRRNSGPVVEKLKQMQEFFGLKVTGKPDAETLKVMKQPRCGVPDVAQFVLTEGNPRWEQTHLTYRIENYTPDLPRADVDHAIEKAFQLWSNSTPLTFTKVSEGQADIMISFVRGDHRDNSPFDGPGGNLAHAFQPGPGIGGDAHFDEDERWTNNFREYNLHRVAAHELGHSLGLSHSTDIGALMYPSYTFSGDVQLAQDDIDGIQAIYGRSQNPVQPIGPQTPKACDSKLTFDAITTIRGEVMFFKDRFYMRTNPFYPEVELNFISVFWPQLPNGLEAAYEFADRDEVRFFKGNKYWAVQGQNVLHGYPKDIYSSFGFPRTVKHIDAALSEENTGKTYFFVANKYWRYDEYKRSMDPGYPKMIAHDFPGIGHKVDAVFMKDGFFYFFHGTRQYKFDPKTKRILTLQKANSWFNCRKN

SEQ ID NO: 1550 - protein, 450 aa, Artificial Sequence
  MMP-1 variant V125G
FPATLETQEQDVDLVQKYLEKYYNLKNDGRQVEKRRNSGPVVEKLKQMQEFFGLKVTGKPDAETLKVMKQPRCGVPDVAQFVLTEGNPRWEQTHLTYRIENYTPDLPRADVDHAIEKAFQLWSNGTPLTFTKVSEGQADIMISFVRGDHRDNSPFDGPGGNLAHAFQPGPGIGGDAHFDEDERWTNNFREYNLHRVAAHELGHSLGLSHSTDIGALMYPSYTFSGDVQLAQDDIDGIQAIYGRSQNPVQPIGPQTPKACDSKLTFDAITTIRGEVMFFKDRFYMRTNPFYPEVELNFISVFWPQLPNGLEAAYEFADRDEVRFFKGNKYWAVQGQNVLHGYPKDIYSSFGFPRTVKHIDAALSEENTGKTYFFVANKYWRYDEYKRSMDPGYPKMIAHDFPGIGHKVDAVFMKDGFFYFFHGTRQYKFDPKTKRILTLQKANSWFNCRKN

SEQ ID NO: 1551 - protein, 450 aa, Artificial Sequence
  MMP-1 variant V125F
FPATLETQEQDVDLVQKYLEKYYNLKNDGRQVEKRRNSGPVVEKLKQMQEFFGLKVTGKPDAETLKVMKQPRCGVPDVAQFVLTEGNPRWEQTHLTYRIENYTPDLPRADVDHAIEKAFQLWSNFTPLTFTKVSEGQADIMISFVRGDHRDNSPFDGPGGNLAHAFQPGPGIGGDAHFDEDERWTNNFREYNLHRVAAHELGHSLGLSHSTDIGALMYPSYTFSGDVQLAQDDIDGIQAIYGRSQNPVQPIGPQTPKACDSKLTFDAITTIRGEVMFFKDRFYMRTNPFYPEVELNFISVFWPQLPNGLEAAYEFADRDEVRFFKGNKYWAVQGQNVLHGYPKDIYSSFGFPRTVKHIDAALSEENTGKTYFFVANKYWRYDEYKRSMDPGYPKMIAHDFPGIGHKVDAVFMKDGFFYFFHGTRQYKFDPKTKRILTLQKANSWFNCRKN

SEQ ID NO: 1552 - protein, 450 aa, Artificial Sequence
  MMP-1 variant V125M
FPATLETQEQDVDLVQKYLEKYYNLKNDGRQVEKRRNSGPVVEKLKQMQEFFGLKVTGKPDAETLKVMKQPRCGVPDVAQFVLTEGNPRWEQTHLTYRIENYTPDLPRADVDHAIEKAFQLWSNMTPLTFTKVSEGQADIMISFVRGDHRDNSPFDGPGGNLAHAFQPGPGIGGDAHFDEDERWTNNFREYNLHRVAAHELGHSLGLSHSTDIGALMYPSYTFSGDVQLAQDDIDGIQAIYGRSQNPVQPIGPQTPKACDSKLTFDAITTIRGEVMFFKDRFYMRTNPFYPEVELNFISVFWPQLPNGLEAAYEFADRDEVRFFKGNKYWAVQGQNVLHGYPKDIYSSFGFPRTVKHIDAALSEENTGKTYFFVANKYWRYDEYKRSMDPGYPKMIAHDFPGIGHKVDAVFMKDGFFYFFHGTRQYKFDPKTKRILTLQKANSWFNCRKN

SEQ ID NO: 1553 - protein, 450 aa, Artificial Sequence
  MMP-1 variant V125W
FPATLETQEQDVDLVQKYLEKYYNLKNDGRQVEKRRNSGPVVEKLKQMQEFFGLKVTGKPDAETLKVMKQPRCGVPDVAQFVLTEGNPRWEQTHLTYRIENYTPDLPRADVDHAIEKAFQLWSNWTPLTFTKVSEGQADIMISFVRGDHRDNSPFDGPGGNLAHAFQPGPGIGGDAHFDEDERWTNNFREYNLHRVAAHELGHSLGLSHSTDIGALMYPSYTFSGDVQLAQDDIDGIQAIYGRSQNPVQPIGPQTPKACDSKLTFDAITTIRGEVMFFKDRFYMRTNPFYPEVELNFISVFWPQLPNGLEAAYEFADRDEVRFFKGNKYWAVQGQNVLHGYPKDIYSSFGFPRTVKHIDAALSEENTGKTYFFVANKYWRYDEYKRSMDPGYPKMIAHDFPGIGHKVDAVFMKDGFFYFFHGTRQYKFDPKTKRILTLQKANSWFNCRKN

SEQ ID NO: 1554 - protein, 450 aa, Artificial Sequence
  MMP-1 variant V125I
FPATLETQEQDVDLVQKYLEKYYNLKNDGRQVEKRRNSGPVVEKLKQMQEFFGLKVTGKPDAETLKVMKQPRCGVPDVAQFVLTEGNPRWEQTHLTYRIENYTPDLPRADVDHAIEKAFQLWSNITPLTFTKVSEGQADIMISFVRGDHRDNSPFDGPGGNLAHAFQPGPGIGGDAHFDEDERWTNNFREYNLHRVAAHELGHSLGLSHSTDIGALMYPSYTFSGDVQLAQDDIDGIQAIYGRSQNPVQPIGPQTPKACDSKLTFDAITTIRGEVMFFKDRFYMRTNPFYPEVELNFISVFWPQLPNGLEAAYEFADRDEVRFFKGNKYWAVQGQNVLHGYPKDIYSSFGFPRTVKHIDAALSEENTGKTYFFVANKYWRYDEYKRSMDPGYPKMIAHDFPGIGHKVDAVFMKDGFFYFFHGTRQYKFDPKTKRILTLQKANSWFNCRKN

SEQ ID NO: 1555 - protein, 450 aa, Artificial Sequence
  MMP-1 variant V125L
FPATLETQEQDVDLVQKYLEKYYNLKNDGRQVEKRRNSGPVVEKLKQMQEFFGLKVTGKPDAETLKVMKQPRCGVPDVAQFVLTEGNPRWEQTHLTYRIENYTPDLPRADVDHAIEKAFQLWSNLTPLTFTKVSEGQADIMISFVRGDHRDNSPFDGPGGNLAHAFQPGPGIGGDAHFDEDERWTNNFREYNLHRVAAHELGHSLGLSHSTDIGALMYPSYTFSGDVQLAQDDIDGIQAIYGRSQNPVQPIGPQTPKACDSKLTFDAITTIRGEVMFFKDRFYMRTNPFYPEVELNFISVFWPQLPNGLEAAYEFADRDEVRFFKGNKYWAVQGQNVLHGYPKDIYSSFGFPRTVKHIDAALSEENTGKTYFFVANKYWRYDEYKRSMDPGYPKMIAHDFPGIGHKVDAVFMKDGFFYFFHGTRQYKFDPKTKRILTLQKANSWFNCRKN

SEQ ID NO: 1556 - protein, 450 aa, Artificial Sequence
  MMP-1 variant V125A
FPATLETQEQDVDLVQKYLEKYYNLKNDGRQVEKRRNSGPVVEKLKQMQEFFGLKVTGKPDAETLKVMKQPRCGVPDVAQFVLTEGNPRWEQTHLTYRIENYTPDLPRADVDHAIEKAFQLWSNATPLTFTKVSEGQADIMISFVRGDHRDNSPFDGPGGNLAHAFQPGPGIGGDAHFDEDERWTNNFREYNLHRVAAHELGHSLGLSHSTDIGALMYPSYTFSGDVQLAQDDIDGIQAIYGRSQNPVQPIGPQTPKACDSKLTFDAITTIRGEVMFFKDRFYMRTNPFYPEVELNFISVFWPQLPNGLEAAYEFADRDEVRFFKGNKYWAVQGQNVLHGYPKDIYSSFGFPRTVKHIDAALSEENTGKTYFFVANKYWRYDEYKRSMDPGYPKMIAHDFPGIGHKVDAVFMKDGFFYFFHGTRQYKFDPKTKRILTLQKANSWFNCRKN

SEQ ID NO: 1557 - protein, 450 aa, Artificial Sequence
  MMP-1 variant V125P
FPATLETQEQDVDLVQKYLEKYYNLKNDGRQVEKRRNSGPVVEKLKQMQEFFGLKVTGKPDAETLKVMKQPRCGVPDVAQFVLTEGNPRWEQTHLTYRIENYTPDLPRADVDHAIEKAFQLWSNPTPLTFTKVSEGQADIMISFVRGDHRDNSPFDGPGGNLAHAFQPGPGIGGDAHFDEDERWTNNFREYNLHRVAAHELGHSLGLSHSTDIGALMYPSYTFSGDVQLAQDDIDGIQAIYGRSQNPVQPIGPQTPKACDSKLTFDAITTIRGEVMFFKDRFYMRTNPFYPEVELNFISVFWPQLPNGLEAAYEFADRDEVRFFKGNKYWAVQGQNVLHGYPKDIYSSFGFPRTVKHIDAALSEENTGKTYFFVANKYWRYDEYKRSMDPGYPKMIAHDFPGIGHKVDAVFMKDGFFYFFHGTRQYKFDPKTKRILTLQKANSWFNCRKN

SEQ ID NO: 1558 - protein, 450 aa, Artificial Sequence
  MMP-1 variant T126D
FPATLETQEQDVDLVQKYLEKYYNLKNDGRQVEKRRNSGPVVEKLKQMQEFFGLKVTGKPDAETLKVMKQPRCGVPDVAQFVLTEGNPRWEQTHLTYRIENYTPDLPRADVDHAIEKAFQLWSNVDPLTFTKVSEGQADIMISFVRGDHRDNSPFDGPGGNLAHAFQPGPGIGGDAHFDEDERWTNNFREYNLHRVAAHELGHSLGLSHSTDIGALMYPSYTFSGDVQLAQDDIDGIQAIYGRSQNPVQPIGPQTPKACDSKLTFDAITTIRGEVMFFKDRFYMRTNPFYPEVELNFISVFWPQLPNGLEAAYEFADRDEVRFFKGNKYWAVQGQNVLHGYPKDIYSSFGFPRTVKHIDAALSEENTGKTYFFVANKYWRYDEYKRSMDPGYPKMIAHDFPGIGHKVDAVFMKDGFFYFFHGTRQYKFDPKTKRILTLQKANSWFNCRKN

SEQ ID NO: 1559 - protein, 450 aa, Artificial Sequence
  MMP-1 variant T126E
FPATLETQEQDVDLVQKYLEKYYNLKNDGRQVEKRRNSGPVVEKLKQMQEFFGLKVTGKPDAETLKVMKQPRCGVPDVAQFVLTEGNPRWEQTHLTYRIENYTPDLPRADVDHAIEKAFQLWSNVEPLTFTKVSEGQADIMISFVRGDHRDNSPFDGPGGNLAHAFQPGPGIGGDAHFDEDERWTNNFREYNLHRVAAHELGHSLGLSHSTDIGALMYPSYTFSGDVQLAQDDIDGIQAIYGRSQNPVQPIGPQTPKACDSKLTFDAITTIRGEVMFFKDRFYMRTNPFYPEVELNFISVFWPQLPNGLEAAYEFADRDEVRFFKGNKYWAVQGQNVLHGYPKDIYSSFGFPRTVKHIDAALSEENTGKTYFFVANKYWRYDEYKRSMDPGYPKMIAHDFPGIGHKVDAVFMKDGFFYFFHGTRQYKFDPKTKRILTLQKANSWFNCRKN

SEQ ID NO: 1560 - protein, 450 aa, Artificial Sequence
  MMP-1 variant T126H
FPATLETQEQDVDLVQKYLEKYYNLKNDGRQVEKRRNSGPVVEKLKQMQEFFGLKVTGKPDAETLKVMKQPRCGVPDVAQFVLTEGNPRWEQTHLTYRIENYTPDLPRADVDHAIEKAFQLWSNVHPLTFTKVSEGQADIMISFVRGDHRDNSPFDGPGGNLAHAFQPGPGIGGDAHFDEDERWTNNFREYNLHRVAAHELGHSLGLSHSTDIGALMYPSYTFSGDVQLAQDDIDGIQAIYGRSQNPVQPIGPQTPKACDSKLTFDAITTIRGEVMFFKDRFYMRTNPFYPEVELNFISVFWPQLPNGLEAAYEFADRDEVRFFKGNKYWAVQGQNVLHGYPKDIYSSFGFPRTVKHIDAALSEENTGKTYFFVANKYWRYDEYKRSMDPGYPKMIAHDFPGIGHKVDAVFMKDGFFYFFHGTRQYKFDPKTKRILTLQKANSWFNCRKN

SEQ ID NO: 1561 - protein, 450 aa, Artificial Sequence
  MMP-1 variant T126K
FPATLETQEQDVDLVQKYLEKYYNLKNDGRQVEKRRNSGPVVEKLKQMQEFFGLKVTGKPDAETLKVMKQPRCGVPDVAQFVLTEGNPRWEQTHLTYRIENYTPDLPRADVDHAIEKAFQLWSNVKPLTFTKVSEGQADIMISFVRGDHRDNSPFDGPGGNLAHAFQPGPGIGGDAHFDEDERWTNNFREYNLHRVAAHELGHSLGLSHSTDIGALMYPSYTFSGDVQLAQDDIDGIQAIYGRSQNPVQPIGPQTPKACDSKLTFDAITTIRGEVMFFKDRFYMRTNPFYPEVELNFISVFWPQLPNGLEAAYEFADRDEVRFFKGNKYWAVQGQNVLHGYPKDIYSSFGFPRTVKHIDAALSEENTGKTYFFVANKYWRYDEYKRSMDPGYPKMIAHDFPGIGHKVDAVFMKDGFFYFFHGTRQYKFDPKTKRILTLQKANSWFNCRKN

SEQ ID NO: 1562 - protein, 450 aa, Artificial Sequence
  MMP-1 variant T126R
FPATLETQEQDVDLVQKYLEKYYNLKNDGRQVEKRRNSGPVVEKLKQMQEFFGLKVTGKPDAETLKVMKQPRCGVPDVAQFVLTEGNPRWEQTHLTYRIENYTPDLPRADVDHAIEKAFQLWSNVRPLTFTKVSEGQADIMISFVRGDHRDNSPFDGPGGNLAHAFQPGPGIGGDAHFDEDERWTNNFREYNLHRVAAHELGHSLGLSHSTDIGALMYPSYTFSGDVQLAQDDIDGIQAIYGRSQNPVQPIGPQTPKACDSKLTFDAITTIRGEVMFFKDRFYMRTNPFYPEVELNFISVFWPQLPNGLEAAYEFADRDEVRFFKGNKYWAVQGQNVLHGYPKDIYSSFGFPRTVKHIDAALSEENTGKTYFFVANKYWRYDEYKRSMDPGYPKMIAHDFPGIGHKVDAVFMKDGFFYFFHGTRQYKFDPKTKRILTLQKANSWFNCRKN

SEQ ID NO: 1563 - protein, 450 aa, Artificial Sequence
  MMP-1 variant T126C
FPATLETQEQDVDLVQKYLEKYYNLKNDGRQVEKRRNSGPVVEKLKQMQEFFGLKVTGKPDAETLKVMKQPRCGVPDVAQFVLTEGNPRWEQTHLTYRIENYTPDLPRADVDHAIEKAFQLWSNVCPLTFTKVSEGQADIMISFVRGDHRDNSPFDGPGGNLAHAFQPGPGIGGDAHFDEDERWTNNFREYNLHRVAAHELGHSLGLSHSTDIGALMYPSYTFSGDVQLAQDDIDGIQAIYGRSQNPVQPIGPQTPKACDSKLTFDAITTIRGEVMFFKDRFYMRTNPFYPEVELNFISVFWPQLPNGLEAAYEFADRDEVRFFKGNKYWAVQGQNVLHGYPKDIYSSFGFPRTVKHIDAALSEENTGKTYFFVANKYWRYDEYKRSMDPGYPKMIAHDFPGIGHKVDAVFMKDGFFYFFHGTRQYKFDPKTKRILTLQKANSWFNCRKN

SEQ ID NO: 1564 - protein, 450 aa, Artificial Sequence
  MMP-1 variant T126N
FPATLETQEQDVDLVQKYLEKYYNLKNDGRQVEKRRNSGPVVEKLKQMQEFFGLKVTGKPDAETLKVMKQPRCGVPDVAQFVLTEGNPRWEQTHLTYRIENYTPDLPRADVDHAIEKAFQLWSNVNPLTFTKVSEGQADIMISFVRGDHRDNSPFDGPGGNLAHAFQPGPGIGGDAHFDEDERWTNNFREYNLHRVAAHELGHSLGLSHSTDIGALMYPSYTFSGDVQLAQDDIDGIQAIYGRSQNPVQPIGPQTPKACDSKLTFDAITTIRGEVMFFKDRFYMRTNPFYPEVELNFISVFWPQLPNGLEAAYEFADRDEVRFFKGNKYWAVQGQNVLHGYPKDIYSSFGFPRTVKHIDAALSEENTGKTYFFVANKYWRYDEYKRSMDPGYPKMIAHDFPGIGHKVDAVFMKDGFFYFFHGTRQYKFDPKTKRILTLQKANSWFNCRKN

SEQ ID NO: 1565 - protein, 450 aa, Artificial Sequence
  MMP-1 variant T126Q
FPATLETQEQDVDLVQKYLEKYYNLKNDGRQVEKRRNSGPVVEKLKQMQEFFGLKVTGKPDAETLKVMKQPRCGVPDVAQFVLTEGNPRWEQTHLTYRIENYTPDLPRADVDHAIEKAFQLWSNVQPLTFTKVSEGQADIMISFVRGDHRDNSPFDGPGGNLAHAFQPGPGIGGDAHFDEDERWTNNFREYNLHRVAAHELGHSLGLSHSTDIGALMYPSYTFSGDVQLAQDDIDGIQAIYGRSQNPVQPIGPQTPKACDSKLTFDAITTIRGEVMFFKDRFYMRTNPFYPEVELNFISVFWPQLPNGLEAAYEFADRDEVRFFKGNKYWAVQGQNVLHGYPKDIYSSFGFPRTVKHIDAALSEENTGKTYFFVANKYWRYDEYKRSMDPGYPKMIAHDFPGIGHKVDAVFMKDGFFYFFHGTRQYKFDPKTKRILTLQKANSWFNCRKN

SEQ ID NO: 1566 - protein, 450 aa, Artificial Sequence
  MMP-1 variant T126Y
FPATLETQEQDVDLVQKYLEKYYNLKNDGRQVEKRRNSGPVVEKLKQMQEFFGLKVTGKPDAETLKVMKQPRCGVPDVAQFVLTEGNPRWEQTHLTYRIENYTPDLPRADVDHAIEKAFQLWSNVYPLTFTKVSEGQADIMISFVRGDHRDNSPFDGPGGNLAHAFQPGPGIGGDAHFDEDERWTNNFREYNLHRVAAHELGHSLGLSHSTDIGALMYPSYTFSGDVQLAQDDIDGIQAIYGRSQNPVQPIGPQTPKACDSKLTFDAITTIRGEVMFFKDRFYMRTNPFYPEVELNFISVFWPQLPNGLEAAYEFADRDEVRFFKGNKYWAVQGQNVLHGYPKDIYSSFGFPRTVKHIDAALSEENTGKTYFFVANKYWRYDEYKRSMDPGYPKMIAHDFPGIGHKVDAVFMKDGFFYFFHGTRQYKFDPKTKRILTLQKANSWFNCRKN

SEQ ID NO: 1567 - protein, 450 aa, Artificial Sequence
  MMP-1 variant T126S
FPATLETQEQDVDLVQKYLEKYYNLKNDGRQVEKRRNSGPVVEKLKQMQEFFGLKVTGKPDAETLKVMKQPRCGVPDVAQFVLTEGNPRWEQTHLTYRIENYTPDLPRADVDHAIEKAFQLWSNVSPLTFTKVSEGQADIMISFVRGDHRDNSPFDGPGGNLAHAFQPGPGIGGDAHFDEDERWTNNFREYNLHRVAAHELGHSLGLSHSTDIGALMYPSYTFSGDVQLAQDDIDGIQAIYGRSQNPVQPIGPQTPKACDSKLTFDAITTIRGEVMFFKDRFYMRTNPFYPEVELNFISVFWPQLPNGLEAAYEFADRDEVRFFKGNKYWAVQGQNVLHGYPKDIYSSFGFPRTVKHIDAALSEENTGKTYFFVANKYWRYDEYKRSMDPGYPKMIAHDFPGIGHKVDAVFMKDGFFYFFHGTRQYKFDPKTKRILTLQKANSWFNCRKN

SEQ ID NO: 1568 - protein, 450 aa, Artificial Sequence
  MMP-1 variant T126G
FPATLETQEQDVDLVQKYLEKYYNLKNDGRQVEKRRNSGPVVEKLKQMQEFFGLKVTGKPDAETLKVMKQPRCGVPDVAQFVLTEGNPRWEQTHLTYRIENYTPDLPRADVDHAIEKAFQLWSNVGPLTFTKVSEGQADIMISFVRGDHRDNSPFDGPGGNLAHAFQPGPGIGGDAHFDEDERWTNNFREYNLHRVAAHELGHSLGLSHSTDIGALMYPSYTFSGDVQLAQDDIDGIQAIYGRSQNPVQPIGPQTPKACDSKLTFDAITTIRGEVMFFKDRFYMRTNPFYPEVELNFISVFWPQLPNGLEAAYEFADRDEVRFFKGNKYWAVQGQNVLHGYPKDIYSSFGFPRTVKHIDAALSEENTGKTYFFVANKYWRYDEYKRSMDPGYPKMIAHDFPGIGHKVDAVFMKDGFFYFFHGTRQYKFDPKTKRILTLQKANSWFNCRKN

SEQ ID NO: 1569 - protein, 450 aa, Artificial Sequence
  MMP-1 variant T126F
FPATLETQEQDVDLVQKYLEKYYNLKNDGRQVEKRRNSGPVVEKLKQMQEFFGLKVTGKPDAETLKVMKQPRCGVPDVAQFVLTEGNPRWEQTHLTYRIENYTPDLPRADVDHAIEKAFQLWSNVFPLTFTKVSEGQADIMISFVRGDHRDNSPFDGPGGNLAHAFQPGPGIGGDAHFDEDERWTNNFREYNLHRVAAHELGHSLGLSHSTDIGALMYPSYTFSGDVQLAQDDIDGIQAIYGRSQNPVQPIGPQTPKACDSKLTFDAITTIRGEVMFFKDRFYMRTNPFYPEVELNFISVFWPQLPNGLEAAYEFADRDEVRFFKGNKYWAVQGQNVLHGYPKDIYSSFGFPRTVKHIDAALSEENTGKTYFFVANKYWRYDEYKRSMDPGYPKMIAHDFPGIGHKVDAVFMKDGFFYFFHGTRQYKFDPKTKRILTLQKANSWFNCRKN

SEQ ID NO: 1570 - protein, 450 aa, Artificial Sequence
  MMP-1 variant T126M
FPATLETQEQDVDLVQKYLEKYYNLKNDGRQVEKRRNSGPVVEKLKQMQEFFGLKVTGKPDAETLKVMKQPRCGVPDVAQFVLTEGNPRWEQTHLTYRIENYTPDLPRADVDHAIEKAFQLWSNVMPLTFTKVSEGQADIMISFVRGDHRDNSPFDGPGGNLAHAFQPGPGIGGDAHFDEDERWTNNFREYNLHRVAAHELGHSLGLSHSTDIGALMYPSYTFSGDVQLAQDDIDGIQAIYGRSQNPVQPIGPQTPKACDSKLTFDAITTIRGEVMFFKDRFYMRTNPFYPEVELNFISVFWPQLPNGLEAAYEFADRDEVRFFKGNKYWAVQGQNVLHGYPKDIYSSFGFPRTVKHIDAALSEENTGKTYFFVANKYWRYDEYKRSMDPGYPKMIAHDFPGIGHKVDAVFMKDGFFYFFHGTRQYKFDPKTKRILTLQKANSWFNCRKN

SEQ ID NO: 1571 - protein, 450 aa, Artificial Sequence
  MMP-1 variant T126W
FPATLETQEQDVDLVQKYLEKYYNLKNDGRQVEKRRNSGPVVEKLKQMQEFFGLKVTGKPDAETLKVMKQPRCGVPDVAQFVLTEGNPRWEQTHLTYRIENYTPDLPRADVDHAIEKAFQLWSNVWPLTFTKVSEGQADIMISFVRGDHRDNSPFDGPGGNLAHAFQPGPGIGGDAHFDEDERWTNNFREYNLHRVAAHELGHSLGLSHSTDIGALMYPSYTFSGDVQLAQDDIDGIQAIYGRSQNPVQPIGPQTPKACDSKLTFDAITTIRGEVMFFKDRFYMRTNPFYPEVELNFISVFWPQLPNGLEAAYEFADRDEVRFFKGNKYWAVQGQNVLHGYPKDIYSSFGFPRTVKHIDAALSEENTGKTYFFVANKYWRYDEYKRSMDPGYPKMIAHDFPGIGHKVDAVFMKDGFFYFFHGTRQYKFDPKTKRILTLQKANSWFNCRKN

SEQ ID NO: 1572 - protein, 450 aa, Artificial Sequence
  MMP-1 variant T126I
FPATLETQEQDVDLVQKYLEKYYNLKNDGRQVEKRRNSGPVVEKLKQMQEFFGLKVTGKPDAETLKVMKQPRCGVPDVAQFVLTEGNPRWEQTHLTYRIENYTPDLPRADVDHAIEKAFQLWSNVIPLTFTKVSEGQADIMISFVRGDHRDNSPFDGPGGNLAHAFQPGPGIGGDAHFDEDERWTNNFREYNLHRVAAHELGHSLGLSHSTDIGALMYPSYTFSGDVQLAQDDIDGIQAIYGRSQNPVQPIGPQTPKACDSKLTFDAITTIRGEVMFFKDRFYMRTNPFYPEVELNFISVFWPQLPNGLEAAYEFADRDEVRFFKGNKYWAVQGQNVLHGYPKDIYSSFGFPRTVKHIDAALSEENTGKTYFFVANKYWRYDEYKRSMDPGYPKMIAHDFPGIGHKVDAVFMKDGFFYFFHGTRQYKFDPKTKRILTLQKANSWFNCRKN

SEQ ID NO: 1573 - protein, 450 aa, Artificial Sequence
  MMP-1 variant T126V
FPATLETQEQDVDLVQKYLEKYYNLKNDGRQVEKRRNSGPVVEKLKQMQEFFGLKVTGKPDAETLKVMKQPRCGVPDVAQFVLTEGNPRWEQTHLTYRIENYTPDLPRADVDHAIEKAFQLWSNVVPLTFTKVSEGQADIMISFVRGDHRDNSPFDGPGGNLAHAFQPGPGIGGDAHFDEDERWTNNFREYNLHRVAAHELGHSLGLSHSTDIGALMYPSYTFSGDVQLAQDDIDGIQAIYGRSQNPVQPIGPQTPKACDSKLTFDAITTIRGEVMFFKDRFYMRTNPFYPEVELNFISVFWPQLPNGLEAAYEFADRDEVRFFKGNKYWAVQGQNVLHGYPKDIYSSFGFPRTVKHIDAALSEENTGKTYFFVANKYWRYDEYKRSMDPGYPKMIAHDFPGIGHKVDAVFMKDGFFYFFHGTRQYKFDPKTKRILTLQKANSWFNCRKN

SEQ ID NO: 1574 - protein, 450 aa, Artificial Sequence
  MMP-1 variant T126L
FPATLETQEQDVDLVQKYLEKYYNLKNDGRQVEKRRNSGPVVEKLKQMQEFFGLKVTGKPDAETLKVMKQPRCGVPDVAQFVLTEGNPRWEQTHLTYRIENYTPDLPRADVDHAIEKAFQLWSNVLPLTFTKVSEGQADIMISFVRGDHRDNSPFDGPGGNLAHAFQPGPGIGGDAHFDEDERWTNNFREYNLHRVAAHELGHSLGLSHSTDIGALMYPSYTFSGDVQLAQDDIDGIQAIYGRSQNPVQPIGPQTPKACDSKLTFDAITTIRGEVMFFKDRFYMRTNPFYPEVELNFISVFWPQLPNGLEAAYEFADRDEVRFFKGNKYWAVQGQNVLHGYPKDIYSSFGFPRTVKHIDAALSEENTGKTYFFVANKYWRYDEYKRSMDPGYPKMIAHDFPGIGHKVDAVFMKDGFFYFFHGTRQYKFDPKTKRILTLQKANSWFNCRKN

SEQ ID NO: 1575 - protein, 450 aa, Artificial Sequence
  MMP-1 variant T126A
FPATLETQEQDVDLVQKYLEKYYNLKNDGRQVEKRRNSGPVVEKLKQMQEFFGLKVTGKPDAETLKVMKQPRCGVPDVAQFVLTEGNPRWEQTHLTYRIENYTPDLPRADVDHAIEKAFQLWSNVAPLTFTKVSEGQADIMISFVRGDHRDNSPFDGPGGNLAHAFQPGPGIGGDAHFDEDERWTNNFREYNLHRVAAHELGHSLGLSHSTDIGALMYPSYTFSGDVQLAQDDIDGIQAIYGRSQNPVQPIGPQTPKACDSKLTFDAITTIRGEVMFFKDRFYMRTNPFYPEVELNFISVFWPQLPNGLEAAYEFADRDEVRFFKGNKYWAVQGQNVLHGYPKDIYSSFGFPRTVKHIDAALSEENTGKTYFFVANKYWRYDEYKRSMDPGYPKMIAHDFPGIGHKVDAVFMKDGFFYFFHGTRQYKFDPKTKRILTLQKANSWFNCRKN

SEQ ID NO: 1576 - protein, 450 aa, Artificial Sequence
  MMP-1 variant T126P
FPATLETQEQDVDLVQKYLEKYYNLKNDGRQVEKRRNSGPVVEKLKQMQEFFGLKVTGKPDAETLKVMKQPRCGVPDVAQFVLTEGNPRWEQTHLTYRIENYTPDLPRADVDHAIEKAFQLWSNVPPLTFTKVSEGQADIMISFVRGDHRDNSPFDGPGGNLAHAFQPGPGIGGDAHFDEDERWTNNFREYNLHRVAAHELGHSLGLSHSTDIGALMYPSYTFSGDVQLAQDDIDGIQAIYGRSQNPVQPIGPQTPKACDSKLTFDAITTIRGEVMFFKDRFYMRTNPFYPEVELNFISVFWPQLPNGLEAAYEFADRDEVRFFKGNKYWAVQGQNVLHGYPKDIYSSFGFPRTVKHIDAALSEENTGKTYFFVANKYWRYDEYKRSMDPGYPKMIAHDFPGIGHKVDAVFMKDGFFYFFHGTRQYKFDPKTKRILTLQKANSWFNCRKN

SEQ ID NO: 1577 - protein, 450 aa, Artificial Sequence
  MMP-1 variant P127D
FPATLETQEQDVDLVQKYLEKYYNLKNDGRQVEKRRNSGPVVEKLKQMQEFFGLKVTGKPDAETLKVMKQPRCGVPDVAQFVLTEGNPRWEQTHLTYRIENYTPDLPRADVDHAIEKAFQLWSNVTDLTFTKVSEGQADIMISFVRGDHRDNSPFDGPGGNLAHAFQPGPGIGGDAHFDEDERWTNNFREYNLHRVAAHELGHSLGLSHSTDIGALMYPSYTFSGDVQLAQDDIDGIQAIYGRSQNPVQPIGPQTPKACDSKLTFDAITTIRGEVMFFKDRFYMRTNPFYPEVELNFISVFWPQLPNGLEAAYEFADRDEVRFFKGNKYWAVQGQNVLHGYPKDIYSSFGFPRTVKHIDAALSEENTGKTYFFVANKYWRYDEYKRSMDPGYPKMIAHDFPGIGHKVDAVFMKDGFFYFFHGTRQYKFDPKTKRILTLQKANSWFNCRKN

SEQ ID NO: 1578 - protein, 450 aa, Artificial Sequence
  MMP-1 variant P127E
FPATLETQEQDVDLVQKYLEKYYNLKNDGRQVEKRRNSGPVVEKLKQMQEFFGLKVTGKPDAETLKVMKQPRCGVPDVAQFVLTEGNPRWEQTHLTYRIENYTPDLPRADVDHAIEKAFQLWSNVTELTFTKVSEGQADIMISFVRGDHRDNSPFDGPGGNLAHAFQPGPGIGGDAHFDEDERWTNNFREYNLHRVAAHELGHSLGLSHSTDIGALMYPSYTFSGDVQLAQDDIDGIQAIYGRSQNPVQPIGPQTPKACDSKLTFDAITTIRGEVMFFKDRFYMRTNPFYPEVELNFISVFWPQLPNGLEAAYEFADRDEVRFFKGNKYWAVQGQNVLHGYPKDIYSSFGFPRTVKHIDAALSEENTGKTYFFVANKYWRYDEYKRSMDPGYPKMIAHDFPGIGHKVDAVFMKDGFFYFFHGTRQYKFDPKTKRILTLQKANSWFNCRKN

SEQ ID NO: 1579 - protein, 450 aa, Artificial Sequence
  MMP-1 variant P127H
FPATLETQEQDVDLVQKYLEKYYNLKNDGRQVEKRRNSGPVVEKLKQMQEFFGLKVTGKPDAETLKVMKQPRCGVPDVAQFVLTEGNPRWEQTHLTYRIENYTPDLPRADVDHAIEKAFQLWSNVTHLTFTKVSEGQADIMISFVRGDHRDNSPFDGPGGNLAHAFQPGPGIGGDAHFDEDERWTNNFREYNLHRVAAHELGHSLGLSHSTDIGALMYPSYTFSGDVQLAQDDIDGIQAIYGRSQNPVQPIGPQTPKACDSKLTFDAITTIRGEVMFFKDRFYMRTNPFYPEVELNFISVFWPQLPNGLEAAYEFADRDEVRFFKGNKYWAVQGQNVLHGYPKDIYSSFGFPRTVKHIDAALSEENTGKTYFFVANKYWRYDEYKRSMDPGYPKMIAHDFPGIGHKVDAVFMKDGFFYFFHGTRQYKFDPKTKRILTLQKANSWFNCRKN

SEQ ID NO: 1580 - protein, 450 aa, Artificial Sequence
  MMP-1 variant P127K
FPATLETQEQDVDLVQKYLEKYYNLKNDGRQVEKRRNSGPVVEKLKQMQEFFGLKVTGKPDAETLKVMKQPRCGVPDVAQFVLTEGNPRWEQTHLTYRIENYTPDLPRADVDHAIEKAFQLWSNVTKLTFTKVSEGQADIMISFVRGDHRDNSPFDGPGGNLAHAFQPGPGIGGDAHFDEDERWTNNFREYNLHRVAAHELGHSLGLSHSTDIGALMYPSYTFSGDVQLAQDDIDGIQAIYGRSQNPVQPIGPQTPKACDSKLTFDAITTIRGEVMFFKDRFYMRTNPFYPEVELNFISVFWPQLPNGLEAAYEFADRDEVRFFKGNKYWAVQGQNVLHGYPKDIYSSFGFPRTVKHIDAALSEENTGKTYFFVANKYWRYDEYKRSMDPGYPKMIAHDFPGIGHKVDAVFMKDGFFYFFHGTRQYKFDPKTKRILTLQKANSWFNCRKN

SEQ ID NO: 1581 - protein, 450 aa, Artificial Sequence
  MMP-1 variant P127R
FPATLETQEQDVDLVQKYLEKYYNLKNDGRQVEKRRNSGPVVEKLKQMQEFFGLKVTGKPDAETLKVMKQPRCGVPDVAQFVLTEGNPRWEQTHLTYRIENYTPDLPRADVDHAIEKAFQLWSNVTRLTFTKVSEGQADIMISFVRGDHRDNSPFDGPGGNLAHAFQPGPGIGGDAHFDEDERWTNNFREYNLHRVAAHELGHSLGLSHSTDIGALMYPSYTFSGDVQLAQDDIDGIQAIYGRSQNPVQPIGPQTPKACDSKLTFDAITTIRGEVMFFKDRFYMRTNPFYPEVELNFISVFWPQLPNGLEAAYEFADRDEVRFFKGNKYWAVQGQNVLHGYPKDIYSSFGFPRTVKHIDAALSEENTGKTYFFVANKYWRYDEYKRSMDPGYPKMIAHDFPGIGHKVDAVFMKDGFFYFFHGTRQYKFDPKTKRILTLQKANSWFNCRKN

SEQ ID NO: 1582 - protein, 450 aa, Artificial Sequence
  MMP-1 variant P127C
FPATLETQEQDVDLVQKYLEKYYNLKNDGRQVEKRRNSGPVVEKLKQMQEFFGLKVTGKPDAETLKVMKQPRCGVPDVAQFVLTEGNPRWEQTHLTYRIENYTPDLPRADVDHAIEKAFQLWSNVTCLTFTKVSEGQADIMISFVRGDHRDNSPFDGPGGNLAHAFQPGPGIGGDAHFDEDERWTNNFREYNLHRVAAHELGHSLGLSHSTDIGALMYPSYTFSGDVQLAQDDIDGIQAIYGRSQNPVQPIGPQTPKACDSKLTFDAITTIRGEVMFFKDRFYMRTNPFYPEVELNFISVFWPQLPNGLEAAYEFADRDEVRFFKGNKYWAVQGQNVLHGYPKDIYSSFGFPRTVKHIDAALSEENTGKTYFFVANKYWRYDEYKRSMDPGYPKMIAHDFPGIGHKVDAVFMKDGFFYFFHGTRQYKFDPKTKRILTLQKANSWFNCRKN

SEQ ID NO: 1583 - protein, 450 aa, Artificial Sequence
  MMP-1 variant P127N
FPATLETQEQDVDLVQKYLEKYYNLKNDGRQVEKRRNSGPVVEKLKQMQEFFGLKVTGKPDAETLKVMKQPRCGVPDVAQFVLTEGNPRWEQTHLTYRIENYTPDLPRADVDHAIEKAFQLWSNVTNLTFTKVSEGQADIMISFVRGDHRDNSPFDGPGGNLAHAFQPGPGIGGDAHFDEDERWTNNFREYNLHRVAAHELGHSLGLSHSTDIGALMYPSYTFSGDVQLAQDDIDGIQAIYGRSQNPVQPIGPQTPKACDSKLTFDAITTIRGEVMFFKDRFYMRTNPFYPEVELNFISVFWPQLPNGLEAAYEFADRDEVRFFKGNKYWAVQGQNVLHGYPKDIYSSFGFPRTVKHIDAALSEENTGKTYFFVANKYWRYDEYKRSMDPGYPKMIAHDFPGIGHKVDAVFMKDGFFYFFHGTRQYKFDPKTKRILTLQKANSWFNCRKN

SEQ ID NO: 1584 - protein, 450 aa, Artificial Sequence
  MMP-1 variant P127Q
FPATLETQEQDVDLVQKYLEKYYNLKNDGRQVEKRRNSGPVVEKLKQMQEFFGLKVTGKPDAETLKVMKQPRCGVPDVAQFVLTEGNPRWEQTHLTYRIENYTPDLPRADVDHAIEKAFQLWSNVTQLTFTKVSEGQADIMISFVRGDHRDNSPFDGPGGNLAHAFQPGPGIGGDAHFDEDERWTNNFREYNLHRVAAHELGHSLGLSHSTDIGALMYPSYTFSGDVQLAQDDIDGIQAIYGRSQNPVQPIGPQTPKACDSKLTFDAITTIRGEVMFFKDRFYMRTNPFYPEVELNFISVFWPQLPNGLEAAYEFADRDEVRFFKGNKYWAVQGQNVLHGYPKDIYSSFGFPRTVKHIDAALSEENTGKTYFFVANKYWRYDEYKRSMDPGYPKMIAHDFPGIGHKVDAVFMKDGFFYFFHGTRQYKFDPKTKRILTLQKANSWFNCRKN

SEQ ID NO: 1585 - protein, 450 aa, Artificial Sequence
  MMP-1 variant P127T
FPATLETQEQDVDLVQKYLEKYYNLKNDGRQVEKRRNSGPVVEKLKQMQEFFGLKVTGKPDAETLKVMKQPRCGVPDVAQFVLTEGNPRWEQTHLTYRIENYTPDLPRADVDHAIEKAFQLWSNVTTLTFTKVSEGQADIMISFVRGDHRDNSPFDGPGGNLAHAFQPGPGIGGDAHFDEDERWTNNFREYNLHRVAAHELGHSLGLSHSTDIGALMYPSYTFSGDVQLAQDDIDGIQAIYGRSQNPVQPIGPQTPKACDSKLTFDAITTIRGEVMFFKDRFYMRTNPFYPEVELNFISVFWPQLPNGLEAAYEFADRDEVRFFKGNKYWAVQGQNVLHGYPKDIYSSFGFPRTVKHIDAALSEENTGKTYFFVANKYWRYDEYKRSMDPGYPKMIAHDFPGIGHKVDAVFMKDGFFYFFHGTRQYKFDPKTKRILTLQKANSWFNCRKN

SEQ ID NO: 1586 - protein, 450 aa, Artificial Sequence
  MMP-1 variant P127Y
FPATLETQEQDVDLVQKYLEKYYNLKNDGRQVEKRRNSGPVVEKLKQMQEFFGLKVTGKPDAETLKVMKQPRCGVPDVAQFVLTEGNPRWEQTHLTYRIENYTPDLPRADVDHAIEKAFQLWSNVTYLTFTKVSEGQADIMISFVRGDHRDNSPFDGPGGNLAHAFQPGPGIGGDAHFDEDERWTNNFREYNLHRVAAHELGHSLGLSHSTDIGALMYPSYTFSGDVQLAQDDIDGIQAIYGRSQNPVQPIGPQTPKACDSKLTFDAITTIRGEVMFFKDRFYMRTNPFYPEVELNFISVFWPQLPNGLEAAYEFADRDEVRFFKGNKYWAVQGQNVLHGYPKDIYSSFGFPRTVKHIDAALSEENTGKTYFFVANKYWRYDEYKRSMDPGYPKMIAHDFPGIGHKVDAVFMKDGFFYFFHGTRQYKFDPKTKRILTLQKANSWFNCRKN

SEQ ID NO: 1587 - protein, 450 aa, Artificial Sequence
  MMP-1 variant P127S
FPATLETQEQDVDLVQKYLEKYYNLKNDGRQVEKRRNSGPVVEKLKQMQEFFGLKVTGKPDAETLKVMKQPRCGVPDVAQFVLTEGNPRWEQTHLTYRIENYTPDLPRADVDHAIEKAFQLWSNVTSLTFTKVSEGQADIMISFVRGDHRDNSPFDGPGGNLAHAFQPGPGIGGDAHFDEDERWTNNFREYNLHRVAAHELGHSLGLSHSTDIGALMYPSYTFSGDVQLAQDDIDGIQAIYGRSQNPVQPIGPQTPKACDSKLTFDAITTIRGEVMFFKDRFYMRTNPFYPEVELNFISVFWPQLPNGLEAAYEFADRDEVRFFKGNKYWAVQGQNVLHGYPKDIYSSFGFPRTVKHIDAALSEENTGKTYFFVANKYWRYDEYKRSMDPGYPKMIAHDFPGIGHKVDAVFMKDGFFYFFHGTRQYKFDPKTKRILTLQKANSWFNCRKN

SEQ ID NO: 1588 - protein, 450 aa, Artificial Sequence
  MMP-1 variant P127G
FPATLETQEQDVDLVQKYLEKYYNLKNDGRQVEKRRNSGPVVEKLKQMQEFFGLKVTGKPDAETLKVMKQPRCGVPDVAQFVLTEGNPRWEQTHLTYRIENYTPDLPRADVDHAIEKAFQLWSNVTGLTFTKVSEGQADIMISFVRGDHRDNSPFDGPGGNLAHAFQPGPGIGGDAHFDEDERWTNNFREYNLHRVAAHELGHSLGLSHSTDIGALMYPSYTFSGDVQLAQDDIDGIQAIYGRSQNPVQPIGPQTPKACDSKLTFDAITTIRGEVMFFKDRFYMRTNPFYPEVELNFISVFWPQLPNGLEAAYEFADRDEVRFFKGNKYWAVQGQNVLHGYPKDIYSSFGFPRTVKHIDAALSEENTGKTYFFVANKYWRYDEYKRSMDPGYPKMIAHDFPGIGHKVDAVFMKDGFFYFFHGTRQYKFDPKTKRILTLQKANSWFNCRKN

SEQ ID NO: 1589 - protein, 450 aa, Artificial Sequence
  MMP-1 variant P127F
FPATLETQEQDVDLVQKYLEKYYNLKNDGRQVEKRRNSGPVVEKLKQMQEFFGLKVTGKPDAETLKVMKQPRCGVPDVAQFVLTEGNPRWEQTHLTYRIENYTPDLPRADVDHAIEKAFQLWSNVTFLTFTKVSEGQADIMISFVRGDHRDNSPFDGPGGNLAHAFQPGPGIGGDAHFDEDERWTNNFREYNLHRVAAHELGHSLGLSHSTDIGALMYPSYTFSGDVQLAQDDIDGIQAIYGRSQNPVQPIGPQTPKACDSKLTFDAITTIRGEVMFFKDRFYMRTNPFYPEVELNFISVFWPQLPNGLEAAYEFADRDEVRFFKGNKYWAVQGQNVLHGYPKDIYSSFGFPRTVKHIDAALSEENTGKTYFFVANKYWRYDEYKRSMDPGYPKMIAHDFPGIGHKVDAVFMKDGFFYFFHGTRQYKFDPKTKRILTLQKANSWFNCRKN

SEQ ID NO: 1590 - protein, 450 aa, Artificial Sequence
  MMP-1 variant P127M
FPATLETQEQDVDLVQKYLEKYYNLKNDGRQVEKRRNSGPVVEKLKQMQEFFGLKVTGKPDAETLKVMKQPRCGVPDVAQFVLTEGNPRWEQTHLTYRIENYTPDLPRADVDHAIEKAFQLWSNVTMLTFTKVSEGQADIMISFVRGDHRDNSPFDGPGGNLAHAFQPGPGIGGDAHFDEDERWTNNFREYNLHRVAAHELGHSLGLSHSTDIGALMYPSYTFSGDVQLAQDDIDGIQAIYGRSQNPVQPIGPQTPKACDSKLTFDAITTIRGEVMFFKDRFYMRTNPFYPEVELNFISVFWPQLPNGLEAAYEFADRDEVRFFKGNKYWAVQGQNVLHGYPKDIYSSFGFPRTVKHIDAALSEENTGKTYFFVANKYWRYDEYKRSMDPGYPKMIAHDFPGIGHKVDAVFMKDGFFYFFHGTRQYKFDPKTKRILTLQKANSWFNCRKN

SEQ ID NO: 1591 - protein, 450 aa, Artificial Sequence
  MMP-1 variant P127W
FPATLETQEQDVDLVQKYLEKYYNLKNDGRQVEKRRNSGPVVEKLKQMQEFFGLKVTGKPDAETLKVMKQPRCGVPDVAQFVLTEGNPRWEQTHLTYRIENYTPDLPRADVDHAIEKAFQLWSNVTWLTFTKVSEGQADIMISFVRGDHRDNSPFDGPGGNLAHAFQPGPGIGGDAHFDEDERWTNNFREYNLHRVAAHELGHSLGLSHSTDIGALMYPSYTFSGDVQLAQDDIDGIQAIYGRSQNPVQPIGPQTPKACDSKLTFDAITTIRGEVMFFKDRFYMRTNPFYPEVELNFISVFWPQLPNGLEAAYEFADRDEVRFFKGNKYWAVQGQNVLHGYPKDIYSSFGFPRTVKHIDAALSEENTGKTYFFVANKYWRYDEYKRSMDPGYPKMIAHDFPGIGHKVDAVFMKDGFFYFFHGTRQYKFDPKTKRILTLQKANSWFNCRKN

SEQ ID NO: 1592 - protein, 450 aa, Artificial Sequence
  MMP-1 variant P127I
FPATLETQEQDVDLVQKYLEKYYNLKNDGRQVEKRRNSGPVVEKLKQMQEFFGLKVTGKPDAETLKVMKQPRCGVPDVAQFVLTEGNPRWEQTHLTYRIENYTPDLPRADVDHAIEKAFQLWSNVTILTFTKVSEGQADIMISFVRGDHRDNSPFDGPGGNLAHAFQPGPGIGGDAHFDEDERWTNNFREYNLHRVAAHELGHSLGLSHSTDIGALMYPSYTFSGDVQLAQDDIDGIQAIYGRSQNPVQPIGPQTPKACDSKLTFDAITTIRGEVMFFKDRFYMRTNPFYPEVELNFISVFWPQLPNGLEAAYEFADRDEVRFFKGNKYWAVQGQNVLHGYPKDIYSSFGFPRTVKHIDAALSEENTGKTYFFVANKYWRYDEYKRSMDPGYPKMIAHDFPGIGHKVDAVFMKDGFFYFFHGTRQYKFDPKTKRILTLQKANSWFNCRKN

SEQ ID NO: 1593 - protein, 450 aa, Artificial Sequence
  MMP-1 variant P127V
FPATLETQEQDVDLVQKYLEKYYNLKNDGRQVEKRRNSGPVVEKLKQMQEFFGLKVTGKPDAETLKVMKQPRCGVPDVAQFVLTEGNPRWEQTHLTYRIENYTPDLPRADVDHAIEKAFQLWSNVTVLTFTKVSEGQADIMISFVRGDHRDNSPFDGPGGNLAHAFQPGPGIGGDAHFDEDERWTNNFREYNLHRVAAHELGHSLGLSHSTDIGALMYPSYTFSGDVQLAQDDIDGIQAIYGRSQNPVQPIGPQTPKACDSKLTFDAITTIRGEVMFFKDRFYMRTNPFYPEVELNFISVFWPQLPNGLEAAYEFADRDEVRFFKGNKYWAVQGQNVLHGYPKDIYSSFGFPRTVKHIDAALSEENTGKTYFFVANKYWRYDEYKRSMDPGYPKMIAHDFPGIGHKVDAVFMKDGFFYFFHGTRQYKFDPKTKRILTLQKANSWFNCRKN

SEQ ID NO: 1594 - protein, 450 aa, Artificial Sequence
  MMP-1 variant P127L
FPATLETQEQDVDLVQKYLEKYYNLKNDGRQVEKRRNSGPVVEKLKQMQEFFGLKVTGKPDAETLKVMKQPRCGVPDVAQFVLTEGNPRWEQTHLTYRIENYTPDLPRADVDHAIEKAFQLWSNVTLLTFTKVSEGQADIMISFVRGDHRDNSPFDGPGGNLAHAFQPGPGIGGDAHFDEDERWTNNFREYNLHRVAAHELGHSLGLSHSTDIGALMYPSYTFSGDVQLAQDDIDGIQAIYGRSQNPVQPIGPQTPKACDSKLTFDAITTIRGEVMFFKDRFYMRTNPFYPEVELNFISVFWPQLPNGLEAAYEFADRDEVRFFKGNKYWAVQGQNVLHGYPKDIYSSFGFPRTVKHIDAALSEENTGKTYFFVANKYWRYDEYKRSMDPGYPKMIAHDFPGIGHKVDAVFMKDGFFYFFHGTRQYKFDPKTKRILTLQKANSWFNCRKN

SEQ ID NO: 1595 - protein, 450 aa, Artificial Sequence
  MMP-1 variant P127A
FPATLETQEQDVDLVQKYLEKYYNLKNDGRQVEKRRNSGPVVEKLKQMQEFFGLKVTGKPDAETLKVMKQPRCGVPDVAQFVLTEGNPRWEQTHLTYRIENYTPDLPRADVDHAIEKAFQLWSNVTALTFTKVSEGQADIMISFVRGDHRDNSPFDGPGGNLAHAFQPGPGIGGDAHFDEDERWTNNFREYNLHRVAAHELGHSLGLSHSTDIGALMYPSYTFSGDVQLAQDDIDGIQAIYGRSQNPVQPIGPQTPKACDSKLTFDAITTIRGEVMFFKDRFYMRTNPFYPEVELNFISVFWPQLPNGLEAAYEFADRDEVRFFKGNKYWAVQGQNVLHGYPKDIYSSFGFPRTVKHIDAALSEENTGKTYFFVANKYWRYDEYKRSMDPGYPKMIAHDFPGIGHKVDAVFMKDGFFYFFHGTRQYKFDPKTKRILTLQKANSWFNCRKN

SEQ ID NO: 1596 - protein, 450 aa, Artificial Sequence
  MMP-1 variant L128D
FPATLETQEQDVDLVQKYLEKYYNLKNDGRQVEKRRNSGPVVEKLKQMQEFFGLKVTGKPDAETLKVMKQPRCGVPDVAQFVLTEGNPRWEQTHLTYRIENYTPDLPRADVDHAIEKAFQLWSNVTPDTFTKVSEGQADIMISFVRGDHRDNSPFDGPGGNLAHAFQPGPGIGGDAHFDEDERWTNNFREYNLHRVAAHELGHSLGLSHSTDIGALMYPSYTFSGDVQLAQDDIDGIQAIYGRSQNPVQPIGPQTPKACDSKLTFDAITTIRGEVMFFKDRFYMRTNPFYPEVELNFISVFWPQLPNGLEAAYEFADRDEVRFFKGNKYWAVQGQNVLHGYPKDIYSSFGFPRTVKHIDAALSEENTGKTYFFVANKYWRYDEYKRSMDPGYPKMIAHDFPGIGHKVDAVFMKDGFFYFFHGTRQYKFDPKTKRILTLQKANSWFNCRKN

SEQ ID NO: 1597 - protein, 450 aa, Artificial Sequence
  MMP-1 variant L128E
FPATLETQEQDVDLVQKYLEKYYNLKNDGRQVEKRRNSGPVVEKLKQMQEFFGLKVTGKPDAETLKVMKQPRCGVPDVAQFVLTEGNPRWEQTHLTYRIENYTPDLPRADVDHAIEKAFQLWSNVTPETFTKVSEGQADIMISFVRGDHRDNSPFDGPGGNLAHAFQPGPGIGGDAHFDEDERWTNNFREYNLHRVAAHELGHSLGLSHSTDIGALMYPSYTFSGDVQLAQDDIDGIQAIYGRSQNPVQPIGPQTPKACDSKLTFDAITTIRGEVMFFKDRFYMRTNPFYPEVELNFISVFWPQLPNGLEAAYEFADRDEVRFFKGNKYWAVQGQNVLHGYPKDIYSSFGFPRTVKHIDAALSEENTGKTYFFVANKYWRYDEYKRSMDPGYPKMIAHDFPGIGHKVDAVFMKDGFFYFFHGTRQYKFDPKTKRILTLQKANSWFNCRKN

SEQ ID NO: 1598 - protein, 450 aa, Artificial Sequence
  MMP-1 variant L128H
FPATLETQEQDVDLVQKYLEKYYNLKNDGRQVEKRRNSGPVVEKLKQMQEFFGLKVTGKPDAETLKVMKQPRCGVPDVAQFVLTEGNPRWEQTHLTYRIENYTPDLPRADVDHAIEKAFQLWSNVTPHTFTKVSEGQADIMISFVRGDHRDNSPFDGPGGNLAHAFQPGPGIGGDAHFDEDERWTNNFREYNLHRVAAHELGHSLGLSHSTDIGALMYPSYTFSGDVQLAQDDIDGIQAIYGRSQNPVQPIGPQTPKACDSKLTFDAITTIRGEVMFFKDRFYMRTNPFYPEVELNFISVFWPQLPNGLEAAYEFADRDEVRFFKGNKYWAVQGQNVLHGYPKDIYSSFGFPRTVKHIDAALSEENTGKTYFFVANKYWRYDEYKRSMDPGYPKMIAHDFPGIGHKVDAVFMKDGFFYFFHGTRQYKFDPKTKRILTLQKANSWFNCRKN

SEQ ID NO: 1599 - protein, 450 aa, Artificial Sequence
  MMP-1 variant L128K
FPATLETQEQDVDLVQKYLEKYYNLKNDGRQVEKRRNSGPVVEKLKQMQEFFGLKVTGKPDAETLKVMKQPRCGVPDVAQFVLTEGNPRWEQTHLTYRIENYTPDLPRADVDHAIEKAFQLWSNVTPKTFTKVSEGQADIMISFVRGDHRDNSPFDGPGGNLAHAFQPGPGIGGDAHFDEDERWTNNFREYNLHRVAAHELGHSLGLSHSTDIGALMYPSYTFSGDVQLAQDDIDGIQAIYGRSQNPVQPIGPQTPKACDSKLTFDAITTIRGEVMFFKDRFYMRTNPFYPEVELNFISVFWPQLPNGLEAAYEFADRDEVRFFKGNKYWAVQGQNVLHGYPKDIYSSFGFPRTVKHIDAALSEENTGKTYFFVANKYWRYDEYKRSMDPGYPKMIAHDFPGIGHKVDAVFMKDGFFYFFHGTRQYKFDPKTKRILTLQKANSWFNCRKN

SEQ ID NO: 1600 - protein, 450 aa, Artificial Sequence
  MMP-1 variant L128R
FPATLETQEQDVDLVQKYLEKYYNLKNDGRQVEKRRNSGPVVEKLKQMQEFFGLKVTGKPDAETLKVMKQPRCGVPDVAQFVLTEGNPRWEQTHLTYRIENYTPDLPRADVDHAIEKAFQLWSNVTPRTFTKVSEGQADIMISFVRGDHRDNSPFDGPGGNLAHAFQPGPGIGGDAHFDEDERWTNNFREYNLHRVAAHELGHSLGLSHSTDIGALMYPSYTFSGDVQLAQDDIDGIQAIYGRSQNPVQPIGPQTPKACDSKLTFDAITTIRGEVMFFKDRFYMRTNPFYPEVELNFISVFWPQLPNGLEAAYEFADRDEVRFFKGNKYWAVQGQNVLHGYPKDIYSSFGFPRTVKHIDAALSEENTGKTYFFVANKYWRYDEYKRSMDPGYPKMIAHDFPGIGHKVDAVFMKDGFFYFFHGTRQYKFDPKTKRILTLQKANSWFNCRKN

SEQ ID NO: 1601 - protein, 450 aa, Artificial Sequence
  MMP-1 variant L128C
FPATLETQEQDVDLVQKYLEKYYNLKNDGRQVEKRRNSGPVVEKLKQMQEFFGLKVTGKPDAETLKVMKQPRCGVPDVAQFVLTEGNPRWEQTHLTYRIENYTPDLPRADVDHAIEKAFQLWSNVTPCTFTKVSEGQADIMISFVRGDHRDNSPFDGPGGNLAHAFQPGPGIGGDAHFDEDERWTNNFREYNLHRVAAHELGHSLGLSHSTDIGALMYPSYTFSGDVQLAQDDIDGIQAIYGRSQNPVQPIGPQTPKACDSKLTFDAITTIRGEVMFFKDRFYMRTNPFYPEVELNFISVFWPQLPNGLEAAYEFADRDEVRFFKGNKYWAVQGQNVLHGYPKDIYSSFGFPRTVKHIDAALSEENTGKTYFFVANKYWRYDEYKRSMDPGYPKMIAHDFPGIGHKVDAVFMKDGFFYFFHGTRQYKFDPKTKRILTLQKANSWFNCRKN

SEQ ID NO: 1602 - protein, 450 aa, Artificial Sequence
  MMP-1 variant L128N
FPATLETQEQDVDLVQKYLEKYYNLKNDGRQVEKRRNSGPVVEKLKQMQEFFGLKVTGKPDAETLKVMKQPRCGVPDVAQFVLTEGNPRWEQTHLTYRIENYTPDLPRADVDHAIEKAFQLWSNVTPNTFTKVSEGQADIMISFVRGDHRDNSPFDGPGGNLAHAFQPGPGIGGDAHFDEDERWTNNFREYNLHRVAAHELGHSLGLSHSTDIGALMYPSYTFSGDVQLAQDDIDGIQAIYGRSQNPVQPIGPQTPKACDSKLTFDAITTIRGEVMFFKDRFYMRTNPFYPEVELNFISVFWPQLPNGLEAAYEFADRDEVRFFKGNKYWAVQGQNVLHGYPKDIYSSFGFPRTVKHIDAALSEENTGKTYFFVANKYWRYDEYKRSMDPGYPKMIAHDFPGIGHKVDAVFMKDGFFYFFHGTRQYKFDPKTKRILTLQKANSWFNCRKN

SEQ ID NO: 1603 - protein, 450 aa, Artificial Sequence
  MMP-1 variant L128Q
FPATLETQEQDVDLVQKYLEKYYNLKNDGRQVEKRRNSGPVVEKLKQMQEFFGLKVTGKPDAETLKVMKQPRCGVPDVAQFVLTEGNPRWEQTHLTYRIENYTPDLPRADVDHAIEKAFQLWSNVTPQTFTKVSEGQADIMISFVRGDHRDNSPFDGPGGNLAHAFQPGPGIGGDAHFDEDERWTNNFREYNLHRVAAHELGHSLGLSHSTDIGALMYPSYTFSGDVQLAQDDIDGIQAIYGRSQNPVQPIGPQTPKACDSKLTFDAITTIRGEVMFFKDRFYMRTNPFYPEVELNFISVFWPQLPNGLEAAYEFADRDEVRFFKGNKYWAVQGQNVLHGYPKDIYSSFGFPRTVKHIDAALSEENTGKTYFFVANKYWRYDEYKRSMDPGYPKMIAHDFPGIGHKVDAVFMKDGFFYFFHGTRQYKFDPKTKRILTLQKANSWFNCRKN

SEQ ID NO: 1604 - protein, 450 aa, Artificial Sequence
  MMP-1 variant L128T
FPATLETQEQDVDLVQKYLEKYYNLKNDGRQVEKRRNSGPVVEKLKQMQEFFGLKVTGKPDAETLKVMKQPRCGVPDVAQFVLTEGNPRWEQTHLTYRIENYTPDLPRADVDHAIEKAFQLWSNVTPTTFTKVSEGQADIMISFVRGDHRDNSPFDGPGGNLAHAFQPGPGIGGDAHFDEDERWTNNFREYNLHRVAAHELGHSLGLSHSTDIGALMYPSYTFSGDVQLAQDDIDGIQAIYGRSQNPVQPIGPQTPKACDSKLTFDAITTIRGEVMFFKDRFYMRTNPFYPEVELNFISVFWPQLPNGLEAAYEFADRDEVRFFKGNKYWAVQGQNVLHGYPKDIYSSFGFPRTVKHIDAALSEENTGKTYFFVANKYWRYDEYKRSMDPGYPKMIAHDFPGIGHKVDAVFMKDGFFYFFHGTRQYKFDPKTKRILTLQKANSWFNCRKN

SEQ ID NO: 1605 - protein, 450 aa, Artificial Sequence
  MMP-1 variant L128Y
FPATLETQEQDVDLVQKYLEKYYNLKNDGRQVEKRRNSGPVVEKLKQMQEFFGLKVTGKPDAETLKVMKQPRCGVPDVAQFVLTEGNPRWEQTHLTYRIENYTPDLPRADVDHAIEKAFQLWSNVTPYTFTKVSEGQADIMISFVRGDHRDNSPFDGPGGNLAHAFQPGPGIGGDAHFDEDERWTNNFREYNLHRVAAHELGHSLGLSHSTDIGALMYPSYTFSGDVQLAQDDIDGIQAIYGRSQNPVQPIGPQTPKACDSKLTFDAITTIRGEVMFFKDRFYMRTNPFYPEVELNFISVFWPQLPNGLEAAYEFADRDEVRFFKGNKYWAVQGQNVLHGYPKDIYSSFGFPRTVKHIDAALSEENTGKTYFFVANKYWRYDEYKRSMDPGYPKMIAHDFPGIGHKVDAVFMKDGFFYFFHGTRQYKFDPKTKRILTLQKANSWFNCRKN

SEQ ID NO: 1606 - protein, 450 aa, Artificial Sequence
  MMP-1 variant L128S
FPATLETQEQDVDLVQKYLEKYYNLKNDGRQVEKRRNSGPVVEKLKQMQEFFGLKVTGKPDAETLKVMKQPRCGVPDVAQFVLTEGNPRWEQTHLTYRIENYTPDLPRADVDHAIEKAFQLWSNVTPSTFTKVSEGQADIMISFVRGDHRDNSPFDGPGGNLAHAFQPGPGIGGDAHFDEDERWTNNFREYNLHRVAAHELGHSLGLSHSTDIGALMYPSYTFSGDVQLAQDDIDGIQAIYGRSQNPVQPIGPQTPKACDSKLTFDAITTIRGEVMFFKDRFYMRTNPFYPEVELNFISVFWPQLPNGLEAAYEFADRDEVRFFKGNKYWAVQGQNVLHGYPKDIYSSFGFPRTVKHIDAALSEENTGKTYFFVANKYWRYDEYKRSMDPGYPKMIAHDFPGIGHKVDAVFMKDGFFYFFHGTRQYKFDPKTKRILTLQKANSWFNCRKN

SEQ ID NO: 1607 - protein, 450 aa, Artificial Sequence
  MMP-1 variant L128G
FPATLETQEQDVDLVQKYLEKYYNLKNDGRQVEKRRNSGPVVEKLKQMQEFFGLKVTGKPDAETLKVMKQPRCGVPDVAQFVLTEGNPRWEQTHLTYRIENYTPDLPRADVDHAIEKAFQLWSNVTPGTFTKVSEGQADIMISFVRGDHRDNSPFDGPGGNLAHAFQPGPGIGGDAHFDEDERWTNNFREYNLHRVAAHELGHSLGLSHSTDIGALMYPSYTFSGDVQLAQDDIDGIQAIYGRSQNPVQPIGPQTPKACDSKLTFDAITTIRGEVMFFKDRFYMRTNPFYPEVELNFISVFWPQLPNGLEAAYEFADRDEVRFFKGNKYWAVQGQNVLHGYPKDIYSSFGFPRTVKHIDAALSEENTGKTYFFVANKYWRYDEYKRSMDPGYPKMIAHDFPGIGHKVDAVFMKDGFFYFFHGTRQYKFDPKTKRILTLQKANSWFNCRKN

SEQ ID NO: 1608 - protein, 450 aa, Artificial Sequence
  MMP-1 variant L128F
FPATLETQEQDVDLVQKYLEKYYNLKNDGRQVEKRRNSGPVVEKLKQMQEFFGLKVTGKPDAETLKVMKQPRCGVPDVAQFVLTEGNPRWEQTHLTYRIENYTPDLPRADVDHAIEKAFQLWSNVTPFTFTKVSEGQADIMISFVRGDHRDNSPFDGPGGNLAHAFQPGPGIGGDAHFDEDERWTNNFREYNLHRVAAHELGHSLGLSHSTDIGALMYPSYTFSGDVQLAQDDIDGIQAIYGRSQNPVQPIGPQTPKACDSKLTFDAITTIRGEVMFFKDRFYMRTNPFYPEVELNFISVFWPQLPNGLEAAYEFADRDEVRFFKGNKYWAVQGQNVLHGYPKDIYSSFGFPRTVKHIDAALSEENTGKTYFFVANKYWRYDEYKRSMDPGYPKMIAHDFPGIGHKVDAVFMKDGFFYFFHGTRQYKFDPKTKRILTLQKANSWFNCRKN

SEQ ID NO: 1609 - protein, 450 aa, Artificial Sequence
  MMP-1 variant L128M
FPATLETQEQDVDLVQKYLEKYYNLKNDGRQVEKRRNSGPVVEKLKQMQEFFGLKVTGKPDAETLKVMKQPRCGVPDVAQFVLTEGNPRWEQTHLTYRIENYTPDLPRADVDHAIEKAFQLWSNVTPMTFTKVSEGQADIMISFVRGDHRDNSPFDGPGGNLAHAFQPGPGIGGDAHFDEDERWTNNFREYNLHRVAAHELGHSLGLSHSTDIGALMYPSYTFSGDVQLAQDDIDGIQAIYGRSQNPVQPIGPQTPKACDSKLTFDAITTIRGEVMFFKDRFYMRTNPFYPEVELNFISVFWPQLPNGLEAAYEFADRDEVRFFKGNKYWAVQGQNVLHGYPKDIYSSFGFPRTVKHIDAALSEENTGKTYFFVANKYWRYDEYKRSMDPGYPKMIAHDFPGIGHKVDAVFMKDGFFYFFHGTRQYKFDPKTKRILTLQKANSWFNCRKN

SEQ ID NO: 1610 - protein, 450 aa, Artificial Sequence
  MMP-1 variant L128W
FPATLETQEQDVDLVQKYLEKYYNLKNDGRQVEKRRNSGPVVEKLKQMQEFFGLKVTGKPDAETLKVMKQPRCGVPDVAQFVLTEGNPRWEQTHLTYRIENYTPDLPRADVDHAIEKAFQLWSNVTPWTFTKVSEGQADIMISFVRGDHRDNSPFDGPGGNLAHAFQPGPGIGGDAHFDEDERWTNNFREYNLHRVAAHELGHSLGLSHSTDIGALMYPSYTFSGDVQLAQDDIDGIQAIYGRSQNPVQPIGPQTPKACDSKLTFDAITTIRGEVMFFKDRFYMRTNPFYPEVELNFISVFWPQLPNGLEAAYEFADRDEVRFFKGNKYWAVQGQNVLHGYPKDIYSSFGFPRTVKHIDAALSEENTGKTYFFVANKYWRYDEYKRSMDPGYPKMIAHDFPGIGHKVDAVFMKDGFFYFFHGTRQYKFDPKTKRILTLQKANSWFNCRKN

SEQ ID NO: 1611 - protein, 450 aa, Artificial Sequence
  MMP-1 variant L128I
FPATLETQEQDVDLVQKYLEKYYNLKNDGRQVEKRRNSGPVVEKLKQMQEFFGLKVTGKPDAETLKVMKQPRCGVPDVAQFVLTEGNPRWEQTHLTYRIENYTPDLPRADVDHAIEKAFQLWSNVTPITFTKVSEGQADIMISFVRGDHRDNSPFDGPGGNLAHAFQPGPGIGGDAHFDEDERWTNNFREYNLHRVAAHELGHSLGLSHSTDIGALMYPSYTFSGDVQLAQDDIDGIQAIYGRSQNPVQPIGPQTPKACDSKLTFDAITTIRGEVMFFKDRFYMRTNPFYPEVELNFISVFWPQLPNGLEAAYEFADRDEVRFFKGNKYWAVQGQNVLHGYPKDIYSSFGFPRTVKHIDAALSEENTGKTYFFVANKYWRYDEYKRSMDPGYPKMIAHDFPGIGHKVDAVFMKDGFFYFFHGTRQYKFDPKTKRILTLQKANSWFNCRKN

SEQ ID NO: 1612 - protein, 450 aa, Artificial Sequence
  MMP-1 variant L128V
FPATLETQEQDVDLVQKYLEKYYNLKNDGRQVEKRRNSGPVVEKLKQMQEFFGLKVTGKPDAETLKVMKQPRCGVPDVAQFVLTEGNPRWEQTHLTYRIENYTPDLPRADVDHAIEKAFQLWSNVTPVTFTKVSEGQADIMISFVRGDHRDNSPFDGPGGNLAHAFQPGPGIGGDAHFDEDERWTNNFREYNLHRVAAHELGHSLGLSHSTDIGALMYPSYTFSGDVQLAQDDIDGIQAIYGRSQNPVQPIGPQTPKACDSKLTFDAITTIRGEVMFFKDRFYMRTNPFYPEVELNFISVFWPQLPNGLEAAYEFADRDEVRFFKGNKYWAVQGQNVLHGYPKDIYSSFGFPRTVKHIDAALSEENTGKTYFFVANKYWRYDEYKRSMDPGYPKMIAHDFPGIGHKVDAVFMKDGFFYFFHGTRQYKFDPKTKRILTLQKANSWFNCRKN

SEQ ID NO: 1613 - protein, 450 aa, Artificial Sequence
  MMP-1 variant L128P
FPATLETQEQDVDLVQKYLEKYYNLKNDGRQVEKRRNSGPVVEKLKQMQEFFGLKVTGKPDAETLKVMKQPRCGVPDVAQFVLTEGNPRWEQTHLTYRIENYTPDLPRADVDHAIEKAFQLWSNVTPATFTKVSEGQADIMISFVRGDHRDNSPFDGPGGNLAHAFQPGPGIGGDAHFDEDERWTNNFREYNLHRVAAHELGHSLGLSHSTDIGALMYPSYTFSGDVQLAQDDIDGIQAIYGRSQNPVQPIGPQTPKACDSKLTFDAITTIRGEVMFFKDRFYMRTNPFYPEVELNFISVFWPQLPNGLEAAYEFADRDEVRFFKGNKYWAVQGQNVLHGYPKDIYSSFGFPRTVKHIDAALSEENTGKTYFFVANKYWRYDEYKRSMDPGYPKMIAHDFPGIGHKVDAVFMKDGFFYFFHGTRQYKFDPKTKRILTLQKANSWFNCRKN

SEQ ID NO: 1614 - protein, 450 aa, Artificial Sequence
  MMP-1 variant L128P
FPATLETQEQDVDLVQKYLEKYYNLKNDGRQVEKRRNSGPVVEKLKQMQEFFGLKVTGKPDAETLKVMKQPRCGVPDVAQFVLTEGNPRWEQTHLTYRIENYTPDLPRADVDHAIEKAFQLWSNVTPPTFTKVSEGQADIMISFVRGDHRDNSPFDGPGGNLAHAFQPGPGIGGDAHFDEDERWTNNFREYNLHRVAAHELGHSLGLSHSTDIGALMYPSYTFSGDVQLAQDDIDGIQAIYGRSQNPVQPIGPQTPKACDSKLTFDAITTIRGEVMFFKDRFYMRTNPFYPEVELNFISVFWPQLPNGLEAAYEFADRDEVRFFKGNKYWAVQGQNVLHGYPKDIYSSFGFPRTVKHIDAALSEENTGKTYFFVANKYWRYDEYKRSMDPGYPKMIAHDFPGIGHKVDAVFMKDGFFYFFHGTRQYKFDPKTKRILTLQKANSWFNCRKN

SEQ ID NO: 1615 - protein, 450 aa, Artificial Sequence
  MMP-1 variant T129D
FPATLETQEQDVDLVQKYLEKYYNLKNDGRQVEKRRNSGPVVEKLKQMQEFFGLKVTGKPDAETLKVMKQPRCGVPDVAQFVLTEGNPRWEQTHLTYRIENYTPDLPRADVDHAIEKAFQLWSNVTPPDFTKVSEGQADIMISFVRGDHRDNSPFDGPGGNLAHAFQPGPGIGGDAHFDEDERWTNNFREYNLHRVAAHELGHSLGLSHSTDIGALMYPSYTFSGDVQLAQDDIDGIQAIYGRSQNPVQPIGPQTPKACDSKLTFDAITTIRGEVMFFKDRFYMRTNPFYPEVELNFISVFWPQLPNGLEAAYEFADRDEVRFFKGNKYWAVQGQNVLHGYPKDIYSSFGFPRTVKHIDAALSEENTGKTYFFVANKYWRYDEYKRSMDPGYPKMIAHDFPGIGHKVDAVFMKDGFFYFFHGTRQYKFDPKTKRILTLQKANSWFNCRKN

SEQ ID NO: 1616 - protein, 450 aa, Artificial Sequence
  MMP-1 variant T129E
FPATLETQEQDVDLVQKYLEKYYNLKNDGRQVEKRRNSGPVVEKLKQMQEFFGLKVTGKPDAETLKVMKQPRCGVPDVAQFVLTEGNPRWEQTHLTYRIENYTPDLPRADVDHAIEKAFQLWSNVTPLEFTKVSEGQADIMISFVRGDHRDNSPFDGPGGNLAHAFQPGPGIGGDAHFDEDERWTNNFREYNLHRVAAHELGHSLGLSHSTDIGALMYPSYTFSGDVQLAQDDIDGIQAIYGRSQNPVQPIGPQTPKACDSKLTFDAITTIRGEVMFFKDRFYMRTNPFYPEVELNFISVFWPQLPNGLEAAYEFADRDEVRFFKGNKYWAVQGQNVLHGYPKDIYSSFGFPRTVKHIDAALSEENTGKTYFFVANKYWRYDEYKRSMDPGYPKMIAHDFPGIGHKVDAVFMKDGFFYFFHGTRQYKFDPKTKRILTLQKANSWFNCRKN

SEQ ID NO: 1617 - protein, 450 aa, Artificial Sequence
  MMP-1 variant T129H
FPATLETQEQDVDLVQKYLEKYYNLKNDGRQVEKRRNSGPVVEKLKQMQEFFGLKVTGKPDAETLKVMKQPRCGVPDVAQFVLTEGNPRWEQTHLTYRIENYTPDLPRADVDHAIEKAFQLWSNVTPLHFTKVSEGQADIMISFVRGDHRDNSPFDGPGGNLAHAFQPGPGIGGDAHFDEDERWTNNFREYNLHRVAAHELGHSLGLSHSTDIGALMYPSYTFSGDVQLAQDDIDGIQAIYGRSQNPVQPIGPQTPKACDSKLTFDAITTIRGEVMFFKDRFYMRTNPFYPEVELNFISVFWPQLPNGLEAAYEFADRDEVRFFKGNKYWAVQGQNVLHGYPKDIYSSFGFPRTVKHIDAALSEENTGKTYFFVANKYWRYDEYKRSMDPGYPKMIAHDFPGIGHKVDAVFMKDGFFYFFHGTRQYKFDPKTKRILTLQKANSWFNCRKN

SEQ ID NO: 1618 - protein, 450 aa, Artificial Sequence
  MMP-1 variant T129K
FPATLETQEQDVDLVQKYLEKYYNLKNDGRQVEKRRNSGPVVEKLKQMQEFFGLKVTGKPDAETLKVMKQPRCGVPDVAQFVLTEGNPRWEQTHLTYRIENYTPDLPRADVDHAIEKAFQLWSNVTPLKFTKVSEGQADIMISFVRGDHRDNSPFDGPGGNLAHAFQPGPGIGGDAHFDEDERWTNNFREYNLHRVAAHELGHSLGLSHSTDIGALMYPSYTFSGDVQLAQDDIDGIQAIYGRSQNPVQPIGPQTPKACDSKLTFDAITTIRGEVMFFKDRFYMRTNPFYPEVELNFISVFWPQLPNGLEAAYEFADRDEVRFFKGNKYWAVQGQNVLHGYPKDIYSSFGFPRTVKHIDAALSEENTGKTYFFVANKYWRYDEYKRSMDPGYPKMIAHDFPGIGHKVDAVFMKDGFFYFFHGTRQYKFDPKTKRILTLQKANSWFNCRKN

SEQ ID NO: 1619 - protein, 450 aa, Artificial Sequence
  MMP-1 variant T129R
FPATLETQEQDVDLVQKYLEKYYNLKNDGRQVEKRRNSGPVVEKLKQMQEFFGLKVTGKPDAETLKVMKQPRCGVPDVAQFVLTEGNPRWEQTHLTYRIENYTPDLPRADVDHAIEKAFQLWSNVTPLRFTKVSEGQADIMISFVRGDHRDNSPFDGPGGNLAHAFQPGPGIGGDAHFDEDERWTNNFREYNLHRVAAHELGHSLGLSHSTDIGALMYPSYTFSGDVQLAQDDIDGIQAIYGRSQNPVQPIGPQTPKACDSKLTFDAITTIRGEVMFFKDRFYMRTNPFYPEVELNFISVFWPQLPNGLEAAYEFADRDEVRFFKGNKYWAVQGQNVLHGYPKDIYSSFGFPRTVKHIDAALSEENTGKTYFFVANKYWRYDEYKRSMDPGYPKMIAHDFPGIGHKVDAVFMKDGFFYFFHGTRQYKFDPKTKRILTLQKANSWFNCRKN

SEQ ID NO: 1620 - protein, 450 aa, Artificial Sequence
  MMP-1 variant T129C
FPATLETQEQDVDLVQKYLEKYYNLKNDGRQVEKRRNSGPVVEKLKQMQEFFGLKVTGKPDAETLKVMKQPRCGVPDVAQFVLTEGNPRWEQTHLTYRIENYTPDLPRADVDHAIEKAFQLWSNVTPLCFTKVSEGQADIMISFVRGDHRDNSPFDGPGGNLAHAFQPGPGIGGDAHFDEDERWTNNFREYNLHRVAAHELGHSLGLSHSTDIGALMYPSYTFSGDVQLAQDDIDGIQAIYGRSQNPVQPIGPQTPKACDSKLTFDAITTIRGEVMFFKDRFYMRTNPFYPEVELNFISVFWPQLPNGLEAAYEFADRDEVRFFKGNKYWAVQGQNVLHGYPKDIYSSFGFPRTVKHIDAALSEENTGKTYFFVANKYWRYDEYKRSMDPGYPKMIAHDFPGIGHKVDAVFMKDGFFYFFHGTRQYKFDPKTKRILTLQKANSWFNCRKN

SEQ ID NO: 1621 - protein, 450 aa, Artificial Sequence
  MMP-1 variant T129N
FPATLETQEQDVDLVQKYLEKYYNLKNDGRQVEKRRNSGPVVEKLKQMQEFFGLKVTGKPDAETLKVMKQPRCGVPDVAQFVLTEGNPRWEQTHLTYRIENYTPDLPRADVDHAIEKAFQLWSNVTPLNFTKVSEGQADIMISFVRGDHRDNSPFDGPGGNLAHAFQPGPGIGGDAHFDEDERWTNNFREYNLHRVAAHELGHSLGLSHSTDIGALMYPSYTFSGDVQLAQDDIDGIQAIYGRSQNPVQPIGPQTPKACDSKLTFDAITTIRGEVMFFKDRFYMRTNPFYPEVELNFISVFWPQLPNGLEAAYEFADRDEVRFFKGNKYWAVQGQNVLHGYPKDIYSSFGFPRTVKHIDAALSEENTGKTYFFVANKYWRYDEYKRSMDPGYPKMIAHDFPGIGHKVDAVFMKDGFFYFFHGTRQYKFDPKTKRILTLQKANSWFNCRKN

SEQ ID NO: 1622 - protein, 450 aa, Artificial Sequence
  MMP-1 variant T129Q
FPATLETQEQDVDLVQKYLEKYYNLKNDGRQVEKRRNSGPVVEKLKQMQEFFGLKVTGKPDAETLKVMKQPRCGVPDVAQFVLTEGNPRWEQTHLTYRIENYTPDLPRADVDHAIEKAFQLWSNVTPLQFTKVSEGQADIMISFVRGDHRDNSPFDGPGGNLAHAFQPGPGIGGDAHFDEDERWTNNFREYNLHRVAAHELGHSLGLSHSTDIGALMYPSYTFSGDVQLAQDDIDGIQAIYGRSQNPVQPIGPQTPKACDSKLTFDAITTIRGEVMFFKDRFYMRTNPFYPEVELNFISVFWPQLPNGLEAAYEFADRDEVRFFKGNKYWAVQGQNVLHGYPKDIYSSFGFPRTVKHIDAALSEENTGKTYFFVANKYWRYDEYKRSMDPGYPKMIAHDFPGIGHKVDAVFMKDGFFYFFHGTRQYKFDPKTKRILTLQKANSWFNCRKN

SEQ ID NO: 1623 - protein, 450 aa, Artificial Sequence
  MMP-1 variant T129Y
FPATLETQEQDVDLVQKYLEKYYNLKNDGRQVEKRRNSGPVVEKLKQMQEFFGLKVTGKPDAETLKVMKQPRCGVPDVAQFVLTEGNPRWEQTHLTYRIENYTPDLPRADVDHAIEKAFQLWSNVTPLYFTKVSEGQADIMISFVRGDHRDNSPFDGPGGNLAHAFQPGPGIGGDAHFDEDERWTNNFREYNLHRVAAHELGHSLGLSHSTDIGALMYPSYTFSGDVQLAQDDIDGIQAIYGRSQNPVQPIGPQTPKACDSKLTFDAITTIRGEVMFFKDRFYMRTNPFYPEVELNFISVFWPQLPNGLEAAYEFADRDEVRFFKGNKYWAVQGQNVLHGYPKDIYSSFGFPRTVKHIDAALSEENTGKTYFFVANKYWRYDEYKRSMDPGYPKMIAHDFPGIGHKVDAVFMKDGFFYFFHGTRQYKFDPKTKRILTLQKANSWFNCRKN

SEQ ID NO: 1624 - protein, 449 aa, Artificial Sequence
  MMP-1 variant T129S
FPATLETQEQDVDLVQKYLEKYYNLKNDGRQVEKRRNSGPVVEKLKQMQEFFGLKVTGKPDAETLKVMKQPRCGVPDVAQFVLTEGNPRWEQTHLTYRIENYTPDLPRADVDHAIEKAFQLWSNVTPLSTKVSEGQADIMISFVRGDHRDNSPFDGPGGNLAHAFQPGPGIGGDAHFDEDERWTNNFREYNLHRVAAHELGHSLGLSHSTDIGALMYPSYTFSGDVQLAQDDIDGIQAIYGRSQNPVQPIGPQTPKACDSKLTFDAITTIRGEVMFFKDRFYMRTNPFYPEVELNFISVFWPQLPNGLEAAYEFADRDEVRFFKGNKYWAVQGQNVLHGYPKDIYSSFGFPRTVKHIDAALSEENTGKTYFFVANKYWRYDEYKRSMDPGYPKMIAHDFPGIGHKVDAVFMKDGFFYFFHGTRQYKFDPKTKRILTLQKANSWFNCRKN

SEQ ID NO: 1625 - protein, 450 aa, Artificial Sequence
  MMP-1 variant T129G
FPATLETQEQDVDLVQKYLEKYYNLKNDGRQVEKRRNSGPVVEKLKQMQEFFGLKVTGKPDAETLKVMKQPRCGVPDVAQFVLTEGNPRWEQTHLTYRIENYTPDLPRADVDHAIEKAFQLWSNVTPLGFTKVSEGQADIMISFVRGDHRDNSPFDGPGGNLAHAFQPGPGIGGDAHFDEDERWTNNFREYNLHRVAAHELGHSLGLSHSTDIGALMYPSYTFSGDVQLAQDDIDGIQAIYGRSQNPVQPIGPQTPKACDSKLTFDAITTIRGEVMFFKDRFYMRTNPFYPEVELNFISVFWPQLPNGLEAAYEFADRDEVRFFKGNKYWAVQGQNVLHGYPKDIYSSFGFPRTVKHIDAALSEENTGKTYFFVANKYWRYDEYKRSMDPGYPKMIAHDFPGIGHKVDAVFMKDGFFYFFHGTRQYKFDPKTKRILTLQKANSWFNCRKN

SEQ ID NO: 1626 - protein, 450 aa, Artificial Sequence
  MMP-1 variant T129F
FPATLETQEQDVDLVQKYLEKYYNLKNDGRQVEKRRNSGPVVEKLKQMQEFFGLKVTGKPDAETLKVMKQPRCGVPDVAQFVLTEGNPRWEQTHLTYRIENYTPDLPRADVDHAIEKAFQLWSNVTPLFFTKVSEGQADIMISFVRGDHRDNSPFDGPGGNLAHAFQPGPGIGGDAHFDEDERWTNNFREYNLHRVAAHELGHSLGLSHSTDIGALMYPSYTFSGDVQLAQDDIDGIQAIYGRSQNPVQPIGPQTPKACDSKLTFDAITTIRGEVMFFKDRFYMRTNPFYPEVELNFISVFWPQLPNGLEAAYEFADRDEVRFFKGNKYWAVQGQNVLHGYPKDIYSSFGFPRTVKHIDAALSEENTGKTYFFVANKYWRYDEYKRSMDPGYPKMIAHDFPGIGHKVDAVFMKDGFFYFFHGTRQYKFDPKTKRILTLQKANSWFNCRKN

SEQ ID NO: 1627 - protein, 450 aa, Artificial Sequence
  MMP-1 variant T129M
FPATLETQEQDVDLVQKYLEKYYNLKNDGRQVEKRRNSGPVVEKLKQMQEFFGLKVTGKPDAETLKVMKQPRCGVPDVAQFVLTEGNPRWEQTHLTYRIENYTPDLPRADVDHAIEKAFQLWSNVTPLMFTKVSEGQADIMISFVRGDHRDNSPFDGPGGNLAHAFQPGPGIGGDAHFDEDERWTNNFREYNLHRVAAHELGHSLGLSHSTDIGALMYPSYTFSGDVQLAQDDIDGIQAIYGRSQNPVQPIGPQTPKACDSKLTFDAITTIRGEVMFFKDRFYMRTNPFYPEVELNFISVFWPQLPNGLEAAYEFADRDEVRFFKGNKYWAVQGQNVLHGYPKDIYSSFGFPRTVKHIDAALSEENTGKTYFFVANKYWRYDEYKRSMDPGYPKMIAHDFPGIGHKVDAVFMKDGFFYFFHGTRQYKFDPKTKRILTLQKANSWFNCRKN

SEQ ID NO: 1628 - protein, 450 aa, Artificial Sequence
  MMP-1 variant T129W
FPATLETQEQDVDLVQKYLEKYYNLKNDGRQVEKRRNSGPVVEKLKQMQEFFGLKVTGKPDAETLKVMKQPRCGVPDVAQFVLTEGNPRWEQTHLTYRIENYTPDLPRADVDHAIEKAFQLWSNVTPLWFTKVSEGQADIMISFVRGDHRDNSPFDGPGGNLAHAFQPGPGIGGDAHFDEDERWTNNFREYNLHRVAAHELGHSLGLSHSTDIGALMYPSYTFSGDVQLAQDDIDGIQAIYGRSQNPVQPIGPQTPKACDSKLTFDAITTIRGEVMFFKDRFYMRTNPFYPEVELNFISVFWPQLPNGLEAAYEFADRDEVRFFKGNKYWAVQGQNVLHGYPKDIYSSFGFPRTVKHIDAALSEENTGKTYFFVANKYWRYDEYKRSMDPGYPKMIAHDFPGIGHKVDAVFMKDGFFYFFHGTRQYKFDPKTKRILTLQKANSWFNCRKN

SEQ ID NO: 1629 - protein, 450 aa, Artificial Sequence
  MMP-1 variant T129I
FPATLETQEQDVDLVQKYLEKYYNLKNDGRQVEKRRNSGPVVEKLKQMQEFFGLKVTGKPDAETLKVMKQPRCGVPDVAQFVLTEGNPRWEQTHLTYRIENYTPDLPRADVDHAIEKAFQLWSNVTPLIFTKVSEGQADIMISFVRGDHRDNSPFDGPGGNLAHAFQPGPGIGGDAHFDEDERWTNNFREYNLHRVAAHELGHSLGLSHSTDIGALMYPSYTFSGDVQLAQDDIDGIQAIYGRSQNPVQPIGPQTPKACDSKLTFDAITTIRGEVMFFKDRFYMRTNPFYPEVELNFISVFWPQLPNGLEAAYEFADRDEVRFFKGNKYWAVQGQNVLHGYPKDIYSSFGFPRTVKHIDAALSEENTGKTYFFVANKYWRYDEYKRSMDPGYPKMIAHDFPGIGHKVDAVFMKDGFFYFFHGTRQYKFDPKTKRILTLQKANSWFNCRKN

SEQ ID NO: 1630 - protein, 450 aa, Artificial Sequence
  MMP-1 variant T129V
FPATLETQEQDVDLVQKYLEKYYNLKNDGRQVEKRRNSGPVVEKLKQMQEFFGLKVTGKPDAETLKVMKQPRCGVPDVAQFVLTEGNPRWEQTHLTYRIENYTPDLPRADVDHAIEKAFQLWSNVTPLVFTKVSEGQADIMISFVRGDHRDNSPFDGPGGNLAHAFQPGPGIGGDAHFDEDERWTNNFREYNLHRVAAHELGHSLGLSHSTDIGALMYPSYTFSGDVQLAQDDIDGIQAIYGRSQNPVQPIGPQTPKACDSKLTFDAITTIRGEVMFFKDRFYMRTNPFYPEVELNFISVFWPQLPNGLEAAYEFADRDEVRFFKGNKYWAVQGQNVLHGYPKDIYSSFGFPRTVKHIDAALSEENTGKTYFFVANKYWRYDEYKRSMDPGYPKMIAHDFPGIGHKVDAVFMKDGFFYFFHGTRQYKFDPKTKRILTLQKANSWFNCRKN

SEQ ID NO: 1631 - protein, 450 aa, Artificial Sequence
  MMP-1 variant T129L
FPATLETQEQDVDLVQKYLEKYYNLKNDGRQVEKRRNSGPVVEKLKQMQEFFGLKVTGKPDAETLKVMKQPRCGVPDVAQFVLTEGNPRWEQTHLTYRIENYTPDLPRADVDHAIEKAFQLWSNVTPLLFTKVSEGQADIMISFVRGDHRDNSPFDGPGGNLAHAFQPGPGIGGDAHFDEDERWTNNFREYNLHRVAAHELGHSLGLSHSTDIGALMYPSYTFSGDVQLAQDDIDGIQAIYGRSQNPVQPIGPQTPKACDSKLTFDAITTIRGEVMFFKDRFYMRTNPFYPEVELNFISVFWPQLPNGLEAAYEFADRDEVRFFKGNKYWAVQGQNVLHGYPKDIYSSFGFPRTVKHIDAALSEENTGKTYFFVANKYWRYDEYKRSMDPGYPKMIAHDFPGIGHKVDAVFMKDGFFYFFHGTRQYKFDPKTKRILTLQKANSWFNCRKN

SEQ ID NO: 1632 - protein, 450 aa, Artificial Sequence
  MMP-1 variant T129A
FPATLETQEQDVDLVQKYLEKYYNLKNDGRQVEKRRNSGPVVEKLKQMQEFFGLKVTGKPDAETLKVMKQPRCGVPDVAQFVLTEGNPRWEQTHLTYRIENYTPDLPRADVDHAIEKAFQLWSNVTPLAFTKVSEGQADIMISFVRGDHRDNSPFDGPGGNLAHAFQPGPGIGGDAHFDEDERWTNNFREYNLHRVAAHELGHSLGLSHSTDIGALMYPSYTFSGDVQLAQDDIDGIQAIYGRSQNPVQPIGPQTPKACDSKLTFDAITTIRGEVMFFKDRFYMRTNPFYPEVELNFISVFWPQLPNGLEAAYEFADRDEVRFFKGNKYWAVQGQNVLHGYPKDIYSSFGFPRTVKHIDAALSEENTGKTYFFVANKYWRYDEYKRSMDPGYPKMIAHDFPGIGHKVDAVFMKDGFFYFFHGTRQYKFDPKTKRILTLQKANSWFNCRKN

SEQ ID NO: 1633 - protein, 450 aa, Artificial Sequence
  MMP-1 variant T129P
FPATLETQEQDVDLVQKYLEKYYNLKNDGRQVEKRRNSGPVVEKLKQMQEFFGLKVTGKPDAETLKVMKQPRCGVPDVAQFVLTEGNPRWEQTHLTYRIENYTPDLPRADVDHAIEKAFQLWSNVTPLPFTKVSEGQADIMISFVRGDHRDNSPFDGPGGNLAHAFQPGPGIGGDAHFDEDERWTNNFREYNLHRVAAHELGHSLGLSHSTDIGALMYPSYTFSGDVQLAQDDIDGIQAIYGRSQNPVQPIGPQTPKACDSKLTFDAITTIRGEVMFFKDRFYMRTNPFYPEVELNFISVFWPQLPNGLEAAYEFADRDEVRFFKGNKYWAVQGQNVLHGYPKDIYSSFGFPRTVKHIDAALSEENTGKTYFFVANKYWRYDEYKRSMDPGYPKMIAHDFPGIGHKVDAVFMKDGFFYFFHGTRQYKFDPKTKRILTLQKANSWFNCRKN

SEQ ID NO: 1634 - protein, 450 aa, Artificial Sequence
  MMP-1 variant F130D
FPATLETQEQDVDLVQKYLEKYYNLKNDGRQVEKRRNSGPVVEKLKQMQEFFGLKVTGKPDAETLKVMKQPRCGVPDVAQFVLTEGNPRWEQTHLTYRIENYTPDLPRADVDHAIEKAFQLWSNVTPLTDTKVSEGQADIMISFVRGDHRDNSPFDGPGGNLAHAFQPGPGIGGDAHFDEDERWTNNFREYNLHRVAAHELGHSLGLSHSTDIGALMYPSYTFSGDVQLAQDDIDGIQAIYGRSQNPVQPIGPQTPKACDSKLTFDAITTIRGEVMFFKDRFYMRTNPFYPEVELNFISVFWPQLPNGLEAAYEFADRDEVRFFKGNKYWAVQGQNVLHGYPKDIYSSFGFPRTVKHIDAALSEENTGKTYFFVANKYWRYDEYKRSMDPGYPKMIAHDFPGIGHKVDAVFMKDGFFYFFHGTRQYKFDPKTKRILTLQKANSWFNCRKN

SEQ ID NO: 1635 - protein, 450 aa, Artificial Sequence
  MMP-1 variant F130E
FPATLETQEQDVDLVQKYLEKYYNLKNDGRQVEKRRNSGPVVEKLKQMQEFFGLKVTGKPDAETLKVMKQPRCGVPDVAQFVLTEGNPRWEQTHLTYRIENYTPDLPRADVDHAIEKAFQLWSNVTPLTETKVSEGQADIMISFVRGDHRDNSPFDGPGGNLAHAFQPGPGIGGDAHFDEDERWTNNFREYNLHRVAAHELGHSLGLSHSTDIGALMYPSYTFSGDVQLAQDDIDGIQAIYGRSQNPVQPIGPQTPKACDSKLTFDAITTIRGEVMFFKDRFYMRTNPFYPEVELNFISVFWPQLPNGLEAAYEFADRDEVRFFKGNKYWAVQGQNVLHGYPKDIYSSFGFPRTVKHIDAALSEENTGKTYFFVANKYWRYDEYKRSMDPGYPKMIAHDFPGIGHKVDAVFMKDGFFYFFHGTRQYKFDPKTKRILTLQKANSWFNCRKN

SEQ ID NO: 1636 - protein, 450 aa, Artificial Sequence
  MMP-1 variant F130H
FPATLETQEQDVDLVQKYLEKYYNLKNDGRQVEKRRNSGPVVEKLKQMQEFFGLKVTGKPDAETLKVMKQPRCGVPDVAQFVLTEGNPRWEQTHLTYRIENYTPDLPRADVDHAIEKAFQLWSNVTPLTHTKVSEGQADIMISFVRGDHRDNSPFDGPGGNLAHAFQPGPGIGGDAHFDEDERWTNNFREYNLHRVAAHELGHSLGLSHSTDIGALMYPSYTFSGDVQLAQDDIDGIQAIYGRSQNPVQPIGPQTPKACDSKLTFDAITTIRGEVMFFKDRFYMRTNPFYPEVELNFISVFWPQLPNGLEAAYEFADRDEVRFFKGNKYWAVQGQNVLHGYPKDIYSSFGFPRTVKHIDAALSEENTGKTYFFVANKYWRYDEYKRSMDPGYPKMIAHDFPGIGHKVDAVFMKDGFFYFFHGTRQYKFDPKTKRILTLQKANSWFNCRKN

SEQ ID NO: 1637 - protein, 450 aa, Artificial Sequence
  MMP-1 variant F130K
FPATLETQEQDVDLVQKYLEKYYNLKNDGRQVEKRRNSGPVVEKLKQMQEFFGLKVTGKPDAETLKVMKQPRCGVPDVAQFVLTEGNPRWEQTHLTYRIENYTPDLPRADVDHAIEKAFQLWSNVTPLTKTKVSEGQADIMISFVRGDHRDNSPFDGPGGNLAHAFQPGPGIGGDAHFDEDERWTNNFREYNLHRVAAHELGHSLGLSHSTDIGALMYPSYTFSGDVQLAQDDIDGIQAIYGRSQNPVQPIGPQTPKACDSKLTFDAITTIRGEVMFFKDRFYMRTNPFYPEVELNFISVFWPQLPNGLEAAYEFADRDEVRFFKGNKYWAVQGQNVLHGYPKDIYSSFGFPRTVKHIDAALSEENTGKTYFFVANKYWRYDEYKRSMDPGYPKMIAHDFPGIGHKVDAVFMKDGFFYFFHGTRQYKFDPKTKRILTLQKANSWFNCRKN

SEQ ID NO: 1638 - protein, 450 aa, Artificial Sequence
  MMP-1 variant F130R
FPATLETQEQDVDLVQKYLEKYYNLKNDGRQVEKRRNSGPVVEKLKQMQEFFGLKVTGKPDAETLKVMKQPRCGVPDVAQFVLTEGNPRWEQTHLTYRIENYTPDLPRADVDHAIEKAFQLWSNVTPLTRTKVSEGQADIMISFVRGDHRDNSPFDGPGGNLAHAFQPGPGIGGDAHFDEDERWTNNFREYNLHRVAAHELGHSLGLSHSTDIGALMYPSYTFSGDVQLAQDDIDGIQAIYGRSQNPVQPIGPQTPKACDSKLTFDAITTIRGEVMFFKDRFYMRTNPFYPEVELNFISVFWPQLPNGLEAAYEFADRDEVRFFKGNKYWAVQGQNVLHGYPKDIYSSFGFPRTVKHIDAALSEENTGKTYFFVANKYWRYDEYKRSMDPGYPKMIAHDFPGIGHKVDAVFMKDGFFYFFHGTRQYKFDPKTKRILTLQKANSWFNCRKN

SEQ ID NO: 1639 - protein, 450 aa, Artificial Sequence
  MMP-1 variant F130C
FPATLETQEQDVDLVQKYLEKYYNLKNDGRQVEKRRNSGPVVEKLKQMQEFFGLKVTGKPDAETLKVMKQPRCGVPDVAQFVLTEGNPRWEQTHLTYRIENYTPDLPRADVDHAIEKAFQLWSNVTPLTCTKVSEGQADIMISFVRGDHRDNSPFDGPGGNLAHAFQPGPGIGGDAHFDEDERWTNNFREYNLHRVAAHELGHSLGLSHSTDIGALMYPSYTFSGDVQLAQDDIDGIQAIYGRSQNPVQPIGPQTPKACDSKLTFDAITTIRGEVMFFKDRFYMRTNPFYPEVELNFISVFWPQLPNGLEAAYEFADRDEVRFFKGNKYWAVQGQNVLHGYPKDIYSSFGFPRTVKHIDAALSEENTGKTYFFVANKYWRYDEYKRSMDPGYPKMIAHDFPGIGHKVDAVFMKDGFFYFFHGTRQYKFDPKTKRILTLQKANSWFNCRKN

SEQ ID NO: 1640 - protein, 450 aa, Artificial Sequence
  MMP-1 variant F130N
FPATLETQEQDVDLVQKYLEKYYNLKNDGRQVEKRRNSGPVVEKLKQMQEFFGLKVTGKPDAETLKVMKQPRCGVPDVAQFVLTEGNPRWEQTHLTYRIENYTPDLPRADVDHAIEKAFQLWSNVTPLTNTKVSEGQADIMISFVRGDHRDNSPFDGPGGNLAHAFQPGPGIGGDAHFDEDERWTNNFREYNLHRVAAHELGHSLGLSHSTDIGALMYPSYTFSGDVQLAQDDIDGIQAIYGRSQNPVQPIGPQTPKACDSKLTFDAITTIRGEVMFFKDRFYMRTNPFYPEVELNFISVFWPQLPNGLEAAYEFADRDEVRFFKGNKYWAVQGQNVLHGYPKDIYSSFGFPRTVKHIDAALSEENTGKTYFFVANKYWRYDEYKRSMDPGYPKMIAHDFPGIGHKVDAVFMKDGFFYFFHGTRQYKFDPKTKRILTLQKANSWFNCRKN

SEQ ID NO: 1641 - protein, 450 aa, Artificial Sequence
  MMP-1 variant F130Q
FPATLETQEQDVDLVQKYLEKYYNLKNDGRQVEKRRNSGPVVEKLKQMQEFFGLKVTGKPDAETLKVMKQPRCGVPDVAQFVLTEGNPRWEQTHLTYRIENYTPDLPRADVDHAIEKAFQLWSNVTPLTQTKVSEGQADIMISFVRGDHRDNSPFDGPGGNLAHAFQPGPGIGGDAHFDEDERWTNNFREYNLHRVAAHELGHSLGLSHSTDIGALMYPSYTFSGDVQLAQDDIDGIQAIYGRSQNPVQPIGPQTPKACDSKLTFDAITTIRGEVMFFKDRFYMRTNPFYPEVELNFISVFWPQLPNGLEAAYEFADRDEVRFFKGNKYWAVQGQNVLHGYPKDIYSSFGFPRTVKHIDAALSEENTGKTYFFVANKYWRYDEYKRSMDPGYPKMIAHDFPGIGHKVDAVFMKDGFFYFFHGTRQYKFDPKTKRILTLQKANSWFNCRKN

SEQ ID NO: 1642 - protein, 450 aa, Artificial Sequence
  MMP-1 variant F130T
FPATLETQEQDVDLVQKYLEKYYNLKNDGRQVEKRRNSGPVVEKLKQMQEFFGLKVTGKPDAETLKVMKQPRCGVPDVAQFVLTEGNPRWEQTHLTYRIENYTPDLPRADVDHAIEKAFQLWSNVTPLTTTKVSEGQADIMISFVRGDHRDNSPFDGPGGNLAHAFQPGPGIGGDAHFDEDERWTNNFREYNLHRVAAHELGHSLGLSHSTDIGALMYPSYTFSGDVQLAQDDIDGIQAIYGRSQNPVQPIGPQTPKACDSKLTFDAITTIRGEVMFFKDRFYMRTNPFYPEVELNFISVFWPQLPNGLEAAYEFADRDEVRFFKGNKYWAVQGQNVLHGYPKDIYSSFGFPRTVKHIDAALSEENTGKTYFFVANKYWRYDEYKRSMDPGYPKMIAHDFPGIGHKVDAVFMKDGFFYFFHGTRQYKFDPKTKRILTLQKANSWFNCRKN

SEQ ID NO: 1643 - protein, 450 aa, Artificial Sequence
  MMP-1 variant F130Y
FPATLETQEQDVDLVQKYLEKYYNLKNDGRQVEKRRNSGPVVEKLKQMQEFFGLKVTGKPDAETLKVMKQPRCGVPDVAQFVLTEGNPRWEQTHLTYRIENYTPDLPRADVDHAIEKAFQLWSNVTPLTYTKVSEGQADIMISFVRGDHRDNSPFDGPGGNLAHAFQPGPGIGGDAHFDEDERWTNNFREYNLHRVAAHELGHSLGLSHSTDIGALMYPSYTFSGDVQLAQDDIDGIQAIYGRSQNPVQPIGPQTPKACDSKLTFDAITTIRGEVMFFKDRFYMRTNPFYPEVELNFISVFWPQLPNGLEAAYEFADRDEVRFFKGNKYWAVQGQNVLHGYPKDIYSSFGFPRTVKHIDAALSEENTGKTYFFVANKYWRYDEYKRSMDPGYPKMIAHDFPGIGHKVDAVFMKDGFFYFFHGTRQYKFDPKTKRILTLQKANSWFNCRKN

SEQ ID NO: 1644 - protein, 450 aa, Artificial Sequence
  MMP-1 variant F130S
FPATLETQEQDVDLVQKYLEKYYNLKNDGRQVEKRRNSGPVVEKLKQMQEFFGLKVTGKPDAETLKVMKQPRCGVPDVAQFVLTEGNPRWEQTHLTYRIENYTPDLPRADVDHAIEKAFQLWSNVTPLTSTKVSEGQADIMISFVRGDHRDNSPFDGPGGNLAHAFQPGPGIGGDAHFDEDERWTNNFREYNLHRVAAHELGHSLGLSHSTDIGALMYPSYTFSGDVQLAQDDIDGIQAIYGRSQNPVQPIGPQTPKACDSKLTFDAITTIRGEVMFFKDRFYMRTNPFYPEVELNFISVFWPQLPNGLEAAYEFADRDEVRFFKGNKYWAVQGQNVLHGYPKDIYSSFGFPRTVKHIDAALSEENTGKTYFFVANKYWRYDEYKRSMDPGYPKMIAHDFPGIGHKVDAVFMKDGFFYFFHGTRQYKFDPKTKRILTLQKANSWFNCRKN

SEQ ID NO: 1645 - protein, 450 aa, Artificial Sequence
  MMP-1 variant F130G
FPATLETQEQDVDLVQKYLEKYYNLKNDGRQVEKRRNSGPVVEKLKQMQEFFGLKVTGKPDAETLKVMKQPRCGVPDVAQFVLTEGNPRWEQTHLTYRIENYTPDLPRADVDHAIEKAFQLWSNVTPLTGTKVSEGQADIMISFVRGDHRDNSPFDGPGGNLAHAFQPGPGIGGDAHFDEDERWTNNFREYNLHRVAAHELGHSLGLSHSTDIGALMYPSYTFSGDVQLAQDDIDGIQAIYGRSQNPVQPIGPQTPKACDSKLTFDAITTIRGEVMFFKDRFYMRTNPFYPEVELNFISVFWPQLPNGLEAAYEFADRDEVRFFKGNKYWAVQGQNVLHGYPKDIYSSFGFPRTVKHIDAALSEENTGKTYFFVANKYWRYDEYKRSMDPGYPKMIAHDFPGIGHKVDAVFMKDGFFYFFHGTRQYKFDPKTKRILTLQKANSWFNCRKN

SEQ ID NO: 1646 - protein, 450 aa, Artificial Sequence
  MMP-1 variant F130M
FPATLETQEQDVDLVQKYLEKYYNLKNDGRQVEKRRNSGPVVEKLKQMQEFFGLKVTGKPDAETLKVMKQPRCGVPDVAQFVLTEGNPRWEQTHLTYRIENYTPDLPRADVDHAIEKAFQLWSNVTPLTMTKVSEGQADIMISFVRGDHRDNSPFDGPGGNLAHAFQPGPGIGGDAHFDEDERWTNNFREYNLHRVAAHELGHSLGLSHSTDIGALMYPSYTFSGDVQLAQDDIDGIQAIYGRSQNPVQPIGPQTPKACDSKLTFDAITTIRGEVMFFKDRFYMRTNPFYPEVELNFISVFWPQLPNGLEAAYEFADRDEVRFFKGNKYWAVQGQNVLHGYPKDIYSSFGFPRTVKHIDAALSEENTGKTYFFVANKYWRYDEYKRSMDPGYPKMIAHDFPGIGHKVDAVFMKDGFFYFFHGTRQYKFDPKTKRILTLQKANSWFNCRKN

SEQ ID NO: 1647 - protein, 450 aa, Artificial Sequence
  MMP-1 variant F130W
FPATLETQEQDVDLVQKYLEKYYNLKNDGRQVEKRRNSGPVVEKLKQMQEFFGLKVTGKPDAETLKVMKQPRCGVPDVAQFVLTEGNPRWEQTHLTYRIENYTPDLPRADVDHAIEKAFQLWSNVTPLTWTKVSEGQADIMISFVRGDHRDNSPFDGPGGNLAHAFQPGPGIGGDAHFDEDERWTNNFREYNLHRVAAHELGHSLGLSHSTDIGALMYPSYTFSGDVQLAQDDIDGIQAIYGRSQNPVQPIGPQTPKACDSKLTFDAITTIRGEVMFFKDRFYMRTNPFYPEVELNFISVFWPQLPNGLEAAYEFADRDEVRFFKGNKYWAVQGQNVLHGYPKDIYSSFGFPRTVKHIDAALSEENTGKTYFFVANKYWRYDEYKRSMDPGYPKMIAHDFPGIGHKVDAVFMKDGFFYFFHGTRQYKFDPKTKRILTLQKANSWFNCRKN

SEQ ID NO: 1648 - protein, 450 aa, Artificial Sequence
  MMP-1 variant F130I
FPATLETQEQDVDLVQKYLEKYYNLKNDGRQVEKRRNSGPVVEKLKQMQEFFGLKVTGKPDAETLKVMKQPRCGVPDVAQFVLTEGNPRWEQTHLTYRIENYTPDLPRADVDHAIEKAFQLWSNVTPLTITKVSEGQADIMISFVRGDHRDNSPFDGPGGNLAHAFQPGPGIGGDAHFDEDERWTNNFREYNLHRVAAHELGHSLGLSHSTDIGALMYPSYTFSGDVQLAQDDIDGIQAIYGRSQNPVQPIGPQTPKACDSKLTFDAITTIRGEVMFFKDRFYMRTNPFYPEVELNFISVFWPQLPNGLEAAYEFADRDEVRFFKGNKYWAVQGQNVLHGYPKDIYSSFGFPRTVKHIDAALSEENTGKTYFFVANKYWRYDEYKRSMDPGYPKMIAHDFPGIGHKVDAVFMKDGFFYFFHGTRQYKFDPKTKRILTLQKANSWFNCRKN

SEQ ID NO: 1649 - protein, 450 aa, Artificial Sequence
  MMP-1 variant F130V
FPATLETQEQDVDLVQKYLEKYYNLKNDGRQVEKRRNSGPVVEKLKQMQEFFGLKVTGKPDAETLKVMKQPRCGVPDVAQFVLTEGNPRWEQTHLTYRIENYTPDLPRADVDHAIEKAFQLWSNVTPLTVTKVSEGQADIMISFVRGDHRDNSPFDGPGGNLAHAFQPGPGIGGDAHFDEDERWTNNFREYNLHRVAAHELGHSLGLSHSTDIGALMYPSYTFSGDVQLAQDDIDGIQAIYGRSQNPVQPIGPQTPKACDSKLTFDAITTIRGEVMFFKDRFYMRTNPFYPEVELNFISVFWPQLPNGLEAAYEFADRDEVRFFKGNKYWAVQGQNVLHGYPKDIYSSFGFPRTVKHIDAALSEENTGKTYFFVANKYWRYDEYKRSMDPGYPKMIAHDFPGIGHKVDAVFMKDGFFYFFHGTRQYKFDPKTKRILTLQKANSWFNCRKN

SEQ ID NO: 1650 - protein, 450 aa, Artificial Sequence
  MMP-1 variant F130L
FPATLETQEQDVDLVQKYLEKYYNLKNDGRQVEKRRNSGPVVEKLKQMQEFFGLKVTGKPDAETLKVMKQPRCGVPDVAQFVLTEGNPRWEQTHLTYRIENYTPDLPRADVDHAIEKAFQLWSNVTPLTLTKVSEGQADIMISFVRGDHRDNSPFDGPGGNLAHAFQPGPGIGGDAHFDEDERWTNNFREYNLHRVAAHELGHSLGLSHSTDIGALMYPSYTFSGDVQLAQDDIDGIQAIYGRSQNPVQPIGPQTPKACDSKLTFDAITTIRGEVMFFKDRFYMRTNPFYPEVELNFISVFWPQLPNGLEAAYEFADRDEVRFFKGNKYWAVQGQNVLHGYPKDIYSSFGFPRTVKHIDAALSEENTGKTYFFVANKYWRYDEYKRSMDPGYPKMIAHDFPGIGHKVDAVFMKDGFFYFFHGTRQYKFDPKTKRILTLQKANSWFNCRKN

SEQ ID NO: 1651 - protein, 450 aa, Artificial Sequence
  MMP-1 variant F130A
FPATLETQEQDVDLVQKYLEKYYNLKNDGRQVEKRRNSGPVVEKLKQMQEFFGLKVTGKPDAETLKVMKQPRCGVPDVAQFVLTEGNPRWEQTHLTYRIENYTPDLPRADVDHAIEKAFQLWSNVTPLTATKVSEGQADIMISFVRGDHRDNSPFDGPGGNLAHAFQPGPGIGGDAHFDEDERWTNNFREYNLHRVAAHELGHSLGLSHSTDIGALMYPSYTFSGDVQLAQDDIDGIQAIYGRSQNPVQPIGPQTPKACDSKLTFDAITTIRGEVMFFKDRFYMRTNPFYPEVELNFISVFWPQLPNGLEAAYEFADRDEVRFFKGNKYWAVQGQNVLHGYPKDIYSSFGFPRTVKHIDAALSEENTGKTYFFVANKYWRYDEYKRSMDPGYPKMIAHDFPGIGHKVDAVFMKDGFFYFFHGTRQYKFDPKTKRILTLQKANSWFNCRKN

SEQ ID NO: 1652 - protein, 450 aa, Artificial Sequence
  MMP-1 variant F130P
FPATLETQEQDVDLVQKYLEKYYNLKNDGRQVEKRRNSGPVVEKLKQMQEFFGLKVTGKPDAETLKVMKQPRCGVPDVAQFVLTEGNPRWEQTHLTYRIENYTPDLPRADVDHAIEKAFQLWSNVTPLTPTKVSEGQADIMISFVRGDHRDNSPFDGPGGNLAHAFQPGPGIGGDAHFDEDERWTNNFREYNLHRVAAHELGHSLGLSHSTDIGALMYPSYTFSGDVQLAQDDIDGIQAIYGRSQNPVQPIGPQTPKACDSKLTFDAITTIRGEVMFFKDRFYMRTNPFYPEVELNFISVFWPQLPNGLEAAYEFADRDEVRFFKGNKYWAVQGQNVLHGYPKDIYSSFGFPRTVKHIDAALSEENTGKTYFFVANKYWRYDEYKRSMDPGYPKMIAHDFPGIGHKVDAVFMKDGFFYFFHGTRQYKFDPKTKRILTLQKANSWFNCRKN

SEQ ID NO: 1653 - protein, 450 aa, Artificial Sequence
  MMP-1 variant T131D
FPATLETQEQDVDLVQKYLEKYYNLKNDGRQVEKRRNSGPVVEKLKQMQEFFGLKVTGKPDAETLKVMKQPRCGVPDVAQFVLTEGNPRWEQTHLTYRIENYTPDLPRADVDHAIEKAFQLWSNVTPLTFDKVSEGQADIMISFVRGDHRDNSPFDGPGGNLAHAFQPGPGIGGDAHFDEDERWTNNFREYNLHRVAAHELGHSLGLSHSTDIGALMYPSYTFSGDVQLAQDDIDGIQAIYGRSQNPVQPIGPQTPKACDSKLTFDAITTIRGEVMFFKDRFYMRTNPFYPEVELNFISVFWPQLPNGLEAAYEFADRDEVRFFKGNKYWAVQGQNVLHGYPKDIYSSFGFPRTVKHIDAALSEENTGKTYFFVANKYWRYDEYKRSMDPGYPKMIAHDFPGIGHKVDAVFMKDGFFYFFHGTRQYKFDPKTKRILTLQKANSWFNCRKN

SEQ ID NO: 1654 - protein, 450 aa, Artificial Sequence
  MMP-1 variant T131E
FPATLETQEQDVDLVQKYLEKYYNLKNDGRQVEKRRNSGPVVEKLKQMQEFFGLKVTGKPDAETLKVMKQPRCGVPDVAQFVLTEGNPRWEQTHLTYRIENYTPDLPRADVDHAIEKAFQLWSNVTPLTFEKVSEGQADIMISFVRGDHRDNSPFDGPGGNLAHAFQPGPGIGGDAHFDEDERWTNNFREYNLHRVAAHELGHSLGLSHSTDIGALMYPSYTFSGDVQLAQDDIDGIQAIYGRSQNPVQPIGPQTPKACDSKLTFDAITTIRGEVMFFKDRFYMRTNPFYPEVELNFISVFWPQLPNGLEAAYEFADRDEVRFFKGNKYWAVQGQNVLHGYPKDIYSSFGFPRTVKHIDAALSEENTGKTYFFVANKYWRYDEYKRSMDPGYPKMIAHDFPGIGHKVDAVFMKDGFFYFFHGTRQYKFDPKTKRILTLQKANSWFNCRKN

SEQ ID NO: 1655 - protein, 450 aa, Artificial Sequence
  MMP-1 variant T131H
FPATLETQEQDVDLVQKYLEKYYNLKNDGRQVEKRRNSGPVVEKLKQMQEFFGLKVTGKPDAETLKVMKQPRCGVPDVAQFVLTEGNPRWEQTHLTYRIENYTPDLPRADVDHAIEKAFQLWSNVTPLTFHKVSEGQADIMISFVRGDHRDNSPFDGPGGNLAHAFQPGPGIGGDAHFDEDERWTNNFREYNLHRVAAHELGHSLGLSHSTDIGALMYPSYTFSGDVQLAQDDIDGIQAIYGRSQNPVQPIGPQTPKACDSKLTFDAITTIRGEVMFFKDRFYMRTNPFYPEVELNFISVFWPQLPNGLEAAYEFADRDEVRFFKGNKYWAVQGQNVLHGYPKDIYSSFGFPRTVKHIDAALSEENTGKTYFFVANKYWRYDEYKRSMDPGYPKMIAHDFPGIGHKVDAVFMKDGFFYFFHGTRQYKFDPKTKRILTLQKANSWFNCRKN

SEQ ID NO: 1656 - protein, 450 aa, Artificial Sequence
  MMP-1 variant T131K
FPATLETQEQDVDLVQKYLEKYYNLKNDGRQVEKRRNSGPVVEKLKQMQEFFGLKVTGKPDAETLKVMKQPRCGVPDVAQFVLTEGNPRWEQTHLTYRIENYTPDLPRADVDHAIEKAFQLWSNVTPLTFKKVSEGQADIMISFVRGDHRDNSPFDGPGGNLAHAFQPGPGIGGDAHFDEDERWTNNFREYNLHRVAAHELGHSLGLSHSTDIGALMYPSYTFSGDVQLAQDDIDGIQAIYGRSQNPVQPIGPQTPKACDSKLTFDAITTIRGEVMFFKDRFYMRTNPFYPEVELNFISVFWPQLPNGLEAAYEFADRDEVRFFKGNKYWAVQGQNVLHGYPKDIYSSFGFPRTVKHIDAALSEENTGKTYFFVANKYWRYDEYKRSMDPGYPKMIAHDFPGIGHKVDAVFMKDGFFYFFHGTRQYKFDPKTKRILTLQKANSWFNCRKN

SEQ ID NO: 1657 - protein, 450 aa, Artificial Sequence
  MMP-1 variant T131R
FPATLETQEQDVDLVQKYLEKYYNLKNDGRQVEKRRNSGPVVEKLKQMQEFFGLKVTGKPDAETLKVMKQPRCGVPDVAQFVLTEGNPRWEQTHLTYRIENYTPDLPRADVDHAIEKAFQLWSNVTPLTFRKVSEGQADIMISFVRGDHRDNSPFDGPGGNLAHAFQPGPGIGGDAHFDEDERWTNNFREYNLHRVAAHELGHSLGLSHSTDIGALMYPSYTFSGDVQLAQDDIDGIQAIYGRSQNPVQPIGPQTPKACDSKLTFDAITTIRGEVMFFKDRFYMRTNPFYPEVELNFISVFWPQLPNGLEAAYEFADRDEVRFFKGNKYWAVQGQNVLHGYPKDIYSSFGFPRTVKHIDAALSEENTGKTYFFVANKYWRYDEYKRSMDPGYPKMIAHDFPGIGHKVDAVFMKDGFFYFFHGTRQYKFDPKTKRILTLQKANSWFNCRKN

SEQ ID NO: 1658 - protein, 450 aa, Artificial Sequence
  MMP-1 variant T131C
FPATLETQEQDVDLVQKYLEKYYNLKNDGRQVEKRRNSGPVVEKLKQMQEFFGLKVTGKPDAETLKVMKQPRCGVPDVAQFVLTEGNPRWEQTHLTYRIENYTPDLPRADVDHAIEKAFQLWSNVTPLTFCKVSEGQADIMISFVRGDHRDNSPFDGPGGNLAHAFQPGPGIGGDAHFDEDERWTNNFREYNLHRVAAHELGHSLGLSHSTDIGALMYPSYTFSGDVQLAQDDIDGIQAIYGRSQNPVQPIGPQTPKACDSKLTFDAITTIRGEVMFFKDRFYMRTNPFYPEVELNFISVFWPQLPNGLEAAYEFADRDEVRFFKGNKYWAVQGQNVLHGYPKDIYSSFGFPRTVKHIDAALSEENTGKTYFFVANKYWRYDEYKRSMDPGYPKMIAHDFPGIGHKVDAVFMKDGFFYFFHGTRQYKFDPKTKRILTLQKANSWFNCRKN

SEQ ID NO: 1659 - protein, 450 aa, Artificial Sequence
  MMP-1 variant T131N
FPATLETQEQDVDLVQKYLEKYYNLKNDGRQVEKRRNSGPVVEKLKQMQEFFGLKVTGKPDAETLKVMKQPRCGVPDVAQFVLTEGNPRWEQTHLTYRIENYTPDLPRADVDHAIEKAFQLWSNVTPLTFNKVSEGQADIMISFVRGDHRDNSPFDGPGGNLAHAFQPGPGIGGDAHFDEDERWTNNFREYNLHRVAAHELGHSLGLSHSTDIGALMYPSYTFSGDVQLAQDDIDGIQAIYGRSQNPVQPIGPQTPKACDSKLTFDAITTIRGEVMFFKDRFYMRTNPFYPEVELNFISVFWPQLPNGLEAAYEFADRDEVRFFKGNKYWAVQGQNVLHGYPKDIYSSFGFPRTVKHIDAALSEENTGKTYFFVANKYWRYDEYKRSMDPGYPKMIAHDFPGIGHKVDAVFMKDGFFYFFHGTRQYKFDPKTKRILTLQKANSWFNCRKN

SEQ ID NO: 1660 - protein, 450 aa, Artificial Sequence
  MMP-1 variant T131Q
FPATLETQEQDVDLVQKYLEKYYNLKNDGRQVEKRRNSGPVVEKLKQMQEFFGLKVTGKPDAETLKVMKQPRCGVPDVAQFVLTEGNPRWEQTHLTYRIENYTPDLPRADVDHAIEKAFQLWSNVTPLTFQKVSEGQADIMISFVRGDHRDNSPFDGPGGNLAHAFQPGPGIGGDAHFDEDERWTNNFREYNLHRVAAHELGHSLGLSHSTDIGALMYPSYTFSGDVQLAQDDIDGIQAIYGRSQNPVQPIGPQTPKACDSKLTFDAITTIRGEVMFFKDRFYMRTNPFYPEVELNFISVFWPQLPNGLEAAYEFADRDEVRFFKGNKYWAVQGQNVLHGYPKDIYSSFGFPRTVKHIDAALSEENTGKTYFFVANKYWRYDEYKRSMDPGYPKMIAHDFPGIGHKVDAVFMKDGFFYFFHGTRQYKFDPKTKRILTLQKANSWFNCRKN

SEQ ID NO: 1661 - protein, 450 aa, Artificial Sequence
  MMP-1 variant T131Y
FPATLETQEQDVDLVQKYLEKYYNLKNDGRQVEKRRNSGPVVEKLKQMQEFFGLKVTGKPDAETLKVMKQPRCGVPDVAQFVLTEGNPRWEQTHLTYRIENYTPDLPRADVDHAIEKAFQLWSNVTPLTFYKVSEGQADIMISFVRGDHRDNSPFDGPGGNLAHAFQPGPGIGGDAHFDEDERWTNNFREYNLHRVAAHELGHSLGLSHSTDIGALMYPSYTFSGDVQLAQDDIDGIQAIYGRSQNPVQPIGPQTPKACDSKLTFDAITTIRGEVMFFKDRFYMRTNPFYPEVELNFISVFWPQLPNGLEAAYEFADRDEVRFFKGNKYWAVQGQNVLHGYPKDIYSSFGFPRTVKHIDAALSEENTGKTYFFVANKYWRYDEYKRSMDPGYPKMIAHDFPGIGHKVDAVFMKDGFFYFFHGTRQYKFDPKTKRILTLQKANSWFNCRKN

SEQ ID NO: 1662 - protein, 450 aa, Artificial Sequence
  MMP-1 variant T131S
FPATLETQEQDVDLVQKYLEKYYNLKNDGRQVEKRRNSGPVVEKLKQMQEFFGLKVTGKPDAETLKVMKQPRCGVPDVAQFVLTEGNPRWEQTHLTYRIENYTPDLPRADVDHAIEKAFQLWSNVTPLTFSKVSEGQADIMISFVRGDHRDNSPFDGPGGNLAHAFQPGPGIGGDAHFDEDERWTNNFREYNLHRVAAHELGHSLGLSHSTDIGALMYPSYTFSGDVQLAQDDIDGIQAIYGRSQNPVQPIGPQTPKACDSKLTFDAITTIRGEVMFFKDRFYMRTNPFYPEVELNFISVFWPQLPNGLEAAYEFADRDEVRFFKGNKYWAVQGQNVLHGYPKDIYSSFGFPRTVKHIDAALSEENTGKTYFFVANKYWRYDEYKRSMDPGYPKMIAHDFPGIGHKVDAVFMKDGFFYFFHGTRQYKFDPKTKRILTLQKANSWFNCRKN

SEQ ID NO: 1663 - protein, 450 aa, Artificial Sequence
  MMP-1 variant T131G
FPATLETQEQDVDLVQKYLEKYYNLKNDGRQVEKRRNSGPVVEKLKQMQEFFGLKVTGKPDAETLKVMKQPRCGVPDVAQFVLTEGNPRWEQTHLTYRIENYTPDLPRADVDHAIEKAFQLWSNVTPLTFGKVSEGQADIMISFVRGDHRDNSPFDGPGGNLAHAFQPGPGIGGDAHFDEDERWTNNFREYNLHRVAAHELGHSLGLSHSTDIGALMYPSYTFSGDVQLAQDDIDGIQAIYGRSQNPVQPIGPQTPKACDSKLTFDAITTIRGEVMFFKDRFYMRTNPFYPEVELNFISVFWPQLPNGLEAAYEFADRDEVRFFKGNKYWAVQGQNVLHGYPKDIYSSFGFPRTVKHIDAALSEENTGKTYFFVANKYWRYDEYKRSMDPGYPKMIAHDFPGIGHKVDAVFMKDGFFYFFHGTRQYKFDPKTKRILTLQKANSWFNCRKN

SEQ ID NO: 1664 - protein, 450 aa, Artificial Sequence
  MMP-1 variant T131F
FPATLETQEQDVDLVQKYLEKYYNLKNDGRQVEKRRNSGPVVEKLKQMQEFFGLKVTGKPDAETLKVMKQPRCGVPDVAQFVLTEGNPRWEQTHLTYRIENYTPDLPRADVDHAIEKAFQLWSNVTPLTFFKVSEGQADIMISFVRGDHRDNSPFDGPGGNLAHAFQPGPGIGGDAHFDEDERWTNNFREYNLHRVAAHELGHSLGLSHSTDIGALMYPSYTFSGDVQLAQDDIDGIQAIYGRSQNPVQPIGPQTPKACDSKLTFDAITTIRGEVMFFKDRFYMRTNPFYPEVELNFISVFWPQLPNGLEAAYEFADRDEVRFFKGNKYWAVQGQNVLHGYPKDIYSSFGFPRTVKHIDAALSEENTGKTYFFVANKYWRYDEYKRSMDPGYPKMIAHDFPGIGHKVDAVFMKDGFFYFFHGTRQYKFDPKTKRILTLQKANSWFNCRKN

SEQ ID NO: 1665 - protein, 450 aa, Artificial Sequence
  MMP-1 variant T131M
FPATLETQEQDVDLVQKYLEKYYNLKNDGRQVEKRRNSGPVVEKLKQMQEFFGLKVTGKPDAETLKVMKQPRCGVPDVAQFVLTEGNPRWEQTHLTYRIENYTPDLPRADVDHAIEKAFQLWSNVTPLTFMKVSEGQADIMISFVRGDHRDNSPFDGPGGNLAHAFQPGPGIGGDAHFDEDERWTNNFREYNLHRVAAHELGHSLGLSHSTDIGALMYPSYTFSGDVQLAQDDIDGIQAIYGRSQNPVQPIGPQTPKACDSKLTFDAITTIRGEVMFFKDRFYMRTNPFYPEVELNFISVFWPQLPNGLEAAYEFADRDEVRFFKGNKYWAVQGQNVLHGYPKDIYSSFGFPRTVKHIDAALSEENTGKTYFFVANKYWRYDEYKRSMDPGYPKMIAHDFPGIGHKVDAVFMKDGFFYFFHGTRQYKFDPKTKRILTLQKANSWFNCRKN

SEQ ID NO: 1666 - protein, 450 aa, Artificial Sequence
  MMP-1 variant T131W
FPATLETQEQDVDLVQKYLEKYYNLKNDGRQVEKRRNSGPVVEKLKQMQEFFGLKVTGKPDAETLKVMKQPRCGVPDVAQFVLTEGNPRWEQTHLTYRIENYTPDLPRADVDHAIEKAFQLWSNVTPLTFWKVSEGQADIMISFVRGDHRDNSPFDGPGGNLAHAFQPGPGIGGDAHFDEDERWTNNFREYNLHRVAAHELGHSLGLSHSTDIGALMYPSYTFSGDVQLAQDDIDGIQAIYGRSQNPVQPIGPQTPKACDSKLTFDAITTIRGEVMFFKDRFYMRTNPFYPEVELNFISVFWPQLPNGLEAAYEFADRDEVRFFKGNKYWAVQGQNVLHGYPKDIYSSFGFPRTVKHIDAALSEENTGKTYFFVANKYWRYDEYKRSMDPGYPKMIAHDFPGIGHKVDAVFMKDGFFYFFHGTRQYKFDPKTKRILTLQKANSWFNCRKN

SEQ ID NO: 1667 - protein, 450 aa, Artificial Sequence
  MMP-1 variant T131I
FPATLETQEQDVDLVQKYLEKYYNLKNDGRQVEKRRNSGPVVEKLKQMQEFFGLKVTGKPDAETLKVMKQPRCGVPDVAQFVLTEGNPRWEQTHLTYRIENYTPDLPRADVDHAIEKAFQLWSNVTPLTFIKVSEGQADIMISFVRGDHRDNSPFDGPGGNLAHAFQPGPGIGGDAHFDEDERWTNNFREYNLHRVAAHELGHSLGLSHSTDIGALMYPSYTFSGDVQLAQDDIDGIQAIYGRSQNPVQPIGPQTPKACDSKLTFDAITTIRGEVMFFKDRFYMRTNPFYPEVELNFISVFWPQLPNGLEAAYEFADRDEVRFFKGNKYWAVQGQNVLHGYPKDIYSSFGFPRTVKHIDAALSEENTGKTYFFVANKYWRYDEYKRSMDPGYPKMIAHDFPGIGHKVDAVFMKDGFFYFFHGTRQYKFDPKTKRILTLQKANSWFNCRKN

SEQ ID NO: 1668 - protein, 450 aa, Artificial Sequence
  MMP-1 variant T131V
FPATLETQEQDVDLVQKYLEKYYNLKNDGRQVEKRRNSGPVVEKLKQMQEFFGLKVTGKPDAETLKVMKQPRCGVPDVAQFVLTEGNPRWEQTHLTYRIENYTPDLPRADVDHAIEKAFQLWSNVTPLTFVKVSEGQADIMISFVRGDHRDNSPFDGPGGNLAHAFQPGPGIGGDAHFDEDERWTNNFREYNLHRVAAHELGHSLGLSHSTDIGALMYPSYTFSGDVQLAQDDIDGIQAIYGRSQNPVQPIGPQTPKACDSKLTFDAITTIRGEVMFFKDRFYMRTNPFYPEVELNFISVFWPQLPNGLEAAYEFADRDEVRFFKGNKYWAVQGQNVLHGYPKDIYSSFGFPRTVKHIDAALSEENTGKTYFFVANKYWRYDEYKRSMDPGYPKMIAHDFPGIGHKVDAVFMKDGFFYFFHGTRQYKFDPKTKRILTLQKANSWFNCRKN

SEQ ID NO: 1669 - protein, 450 aa, Artificial Sequence
  MMP-1 variant T131L
FPATLETQEQDVDLVQKYLEKYYNLKNDGRQVEKRRNSGPVVEKLKQMQEFFGLKVTGKPDAETLKVMKQPRCGVPDVAQFVLTEGNPRWEQTHLTYRIENYTPDLPRADVDHAIEKAFQLWSNVTPLTFLKVSEGQADIMISFVRGDHRDNSPFDGPGGNLAHAFQPGPGIGGDAHFDEDERWTNNFREYNLHRVAAHELGHSLGLSHSTDIGALMYPSYTFSGDVQLAQDDIDGIQAIYGRSQNPVQPIGPQTPKACDSKLTFDAITTIRGEVMFFKDRFYMRTNPFYPEVELNFISVFWPQLPNGLEAAYEFADRDEVRFFKGNKYWAVQGQNVLHGYPKDIYSSFGFPRTVKHIDAALSEENTGKTYFFVANKYWRYDEYKRSMDPGYPKMIAHDFPGIGHKVDAVFMKDGFFYFFHGTRQYKFDPKTKRILTLQKANSWFNCRKN

SEQ ID NO: 1670 - protein, 450 aa, Artificial Sequence
  MMP-1 variant T131A
FPATLETQEQDVDLVQKYLEKYYNLKNDGRQVEKRRNSGPVVEKLKQMQEFFGLKVTGKPDAETLKVMKQPRCGVPDVAQFVLTEGNPRWEQTHLTYRIENYTPDLPRADVDHAIEKAFQLWSNVTPLTFAKVSEGQADIMISFVRGDHRDNSPFDGPGGNLAHAFQPGPGIGGDAHFDEDERWTNNFREYNLHRVAAHELGHSLGLSHSTDIGALMYPSYTFSGDVQLAQDDIDGIQAIYGRSQNPVQPIGPQTPKACDSKLTFDAITTIRGEVMFFKDRFYMRTNPFYPEVELNFISVFWPQLPNGLEAAYEFADRDEVRFFKGNKYWAVQGQNVLHGYPKDIYSSFGFPRTVKHIDAALSEENTGKTYFFVANKYWRYDEYKRSMDPGYPKMIAHDFPGIGHKVDAVFMKDGFFYFFHGTRQYKFDPKTKRILTLQKANSWFNCRKN

SEQ ID NO: 1671 - protein, 450 aa, Artificial Sequence
  MMP-1 variant T131P
FPATLETQEQDVDLVQKYLEKYYNLKNDGRQVEKRRNSGPVVEKLKQMQEFFGLKVTGKPDAETLKVMKQPRCGVPDVAQFVLTEGNPRWEQTHLTYRIENYTPDLPRADVDHAIEKAFQLWSNVTPLTFPKVSEGQADIMISFVRGDHRDNSPFDGPGGNLAHAFQPGPGIGGDAHFDEDERWTNNFREYNLHRVAAHELGHSLGLSHSTDIGALMYPSYTFSGDVQLAQDDIDGIQAIYGRSQNPVQPIGPQTPKACDSKLTFDAITTIRGEVMFFKDRFYMRTNPFYPEVELNFISVFWPQLPNGLEAAYEFADRDEVRFFKGNKYWAVQGQNVLHGYPKDIYSSFGFPRTVKHIDAALSEENTGKTYFFVANKYWRYDEYKRSMDPGYPKMIAHDFPGIGHKVDAVFMKDGFFYFFHGTRQYKFDPKTKRILTLQKANSWFNCRKN

SEQ ID NO: 1672 - protein, 450 aa, Artificial Sequence
  MMP-1 variant K132D
FPATLETQEQDVDLVQKYLEKYYNLKNDGRQVEKRRNSGPVVEKLKQMQEFFGLKVTGKPDAETLKVMKQPRCGVPDVAQFVLTEGNPRWEQTHLTYRIENYTPDLPRADVDHAIEKAFQLWSNVTPLTFTDVSEGQADIMISFVRGDHRDNSPFDGPGGNLAHAFQPGPGIGGDAHFDEDERWTNNFREYNLHRVAAHELGHSLGLSHSTDIGALMYPSYTFSGDVQLAQDDIDGIQAIYGRSQNPVQPIGPQTPKACDSKLTFDAITTIRGEVMFFKDRFYMRTNPFYPEVELNFISVFWPQLPNGLEAAYEFADRDEVRFFKGNKYWAVQGQNVLHGYPKDIYSSFGFPRTVKHIDAALSEENTGKTYFFVANKYWRYDEYKRSMDPGYPKMIAHDFPGIGHKVDAVFMKDGFFYFFHGTRQYKFDPKTKRILTLQKANSWFNCRKN

SEQ ID NO: 1673 - protein, 450 aa, Artificial Sequence
  MMP-1 variant K132E
FPATLETQEQDVDLVQKYLEKYYNLKNDGRQVEKRRNSGPVVEKLKQMQEFFGLKVTGKPDAETLKVMKQPRCGVPDVAQFVLTEGNPRWEQTHLTYRIENYTPDLPRADVDHAIEKAFQLWSNVTPLTFTEVSEGQADIMISFVRGDHRDNSPFDGPGGNLAHAFQPGPGIGGDAHFDEDERWTNNFREYNLHRVAAHELGHSLGLSHSTDIGALMYPSYTFSGDVQLAQDDIDGIQAIYGRSQNPVQPIGPQTPKACDSKLTFDAITTIRGEVMFFKDRFYMRTNPFYPEVELNFISVFWPQLPNGLEAAYEFADRDEVRFFKGNKYWAVQGQNVLHGYPKDIYSSFGFPRTVKHIDAALSEENTGKTYFFVANKYWRYDEYKRSMDPGYPKMIAHDFPGIGHKVDAVFMKDGFFYFFHGTRQYKFDPKTKRILTLQKANSWFNCRKN

SEQ ID NO: 1674 - protein, 450 aa, Artificial Sequence
  MMP-1 variant K132H
FPATLETQEQDVDLVQKYLEKYYNLKNDGRQVEKRRNSGPVVEKLKQMQEFFGLKVTGKPDAETLKVMKQPRCGVPDVAQFVLTEGNPRWEQTHLTYRIENYTPDLPRADVDHAIEKAFQLWSNVTPLTFTHVSEGQADIMISFVRGDHRDNSPFDGPGGNLAHAFQPGPGIGGDAHFDEDERWTNNFREYNLHRVAAHELGHSLGLSHSTDIGALMYPSYTFSGDVQLAQDDIDGIQAIYGRSQNPVQPIGPQTPKACDSKLTFDAITTIRGEVMFFKDRFYMRTNPFYPEVELNFISVFWPQLPNGLEAAYEFADRDEVRFFKGNKYWAVQGQNVLHGYPKDIYSSFGFPRTVKHIDAALSEENTGKTYFFVANKYWRYDEYKRSMDPGYPKMIAHDFPGIGHKVDAVFMKDGFFYFFHGTRQYKFDPKTKRILTLQKANSWFNCRKN

SEQ ID NO: 1675 - protein, 450 aa, Artificial Sequence
  MMP-1 variant K132R
FPATLETQEQDVDLVQKYLEKYYNLKNDGRQVEKRRNSGPVVEKLKQMQEFFGLKVTGKPDAETLKVMKQPRCGVPDVAQFVLTEGNPRWEQTHLTYRIENYTPDLPRADVDHAIEKAFQLWSNVTPLTFTRVSEGQADIMISFVRGDHRDNSPFDGPGGNLAHAFQPGPGIGGDAHFDEDERWTNNFREYNLHRVAAHELGHSLGLSHSTDIGALMYPSYTFSGDVQLAQDDIDGIQAIYGRSQNPVQPIGPQTPKACDSKLTFDAITTIRGEVMFFKDRFYMRTNPFYPEVELNFISVFWPQLPNGLEAAYEFADRDEVRFFKGNKYWAVQGQNVLHGYPKDIYSSFGFPRTVKHIDAALSEENTGKTYFFVANKYWRYDEYKRSMDPGYPKMIAHDFPGIGHKVDAVFMKDGFFYFFHGTRQYKFDPKTKRILTLQKANSWFNCRKN

SEQ ID NO: 1676 - protein, 450 aa, Artificial Sequence
  MMP-1 variant K132C
FPATLETQEQDVDLVQKYLEKYYNLKNDGRQVEKRRNSGPVVEKLKQMQEFFGLKVTGKPDAETLKVMKQPRCGVPDVAQFVLTEGNPRWEQTHLTYRIENYTPDLPRADVDHAIEKAFQLWSNVTPLTFTCVSEGQADIMISFVRGDHRDNSPFDGPGGNLAHAFQPGPGIGGDAHFDEDERWTNNFREYNLHRVAAHELGHSLGLSHSTDIGALMYPSYTFSGDVQLAQDDIDGIQAIYGRSQNPVQPIGPQTPKACDSKLTFDAITTIRGEVMFFKDRFYMRTNPFYPEVELNFISVFWPQLPNGLEAAYEFADRDEVRFFKGNKYWAVQGQNVLHGYPKDIYSSFGFPRTVKHIDAALSEENTGKTYFFVANKYWRYDEYKRSMDPGYPKMIAHDFPGIGHKVDAVFMKDGFFYFFHGTRQYKFDPKTKRILTLQKANSWFNCRKN

SEQ ID NO: 1677 - protein, 450 aa, Artificial Sequence
  MMP-1 variant K132N
FPATLETQEQDVDLVQKYLEKYYNLKNDGRQVEKRRNSGPVVEKLKQMQEFFGLKVTGKPDAETLKVMKQPRCGVPDVAQFVLTEGNPRWEQTHLTYRIENYTPDLPRADVDHAIEKAFQLWSNVTPLTFTNVSEGQADIMISFVRGDHRDNSPFDGPGGNLAHAFQPGPGIGGDAHFDEDERWTNNFREYNLHRVAAHELGHSLGLSHSTDIGALMYPSYTFSGDVQLAQDDIDGIQAIYGRSQNPVQPIGPQTPKACDSKLTFDAITTIRGEVMFFKDRFYMRTNPFYPEVELNFISVFWPQLPNGLEAAYEFADRDEVRFFKGNKYWAVQGQNVLHGYPKDIYSSFGFPRTVKHIDAALSEENTGKTYFFVANKYWRYDEYKRSMDPGYPKMIAHDFPGIGHKVDAVFMKDGFFYFFHGTRQYKFDPKTKRILTLQKANSWFNCRKN

SEQ ID NO: 1678 - protein, 450 aa, Artificial Sequence
  MMP-1 variant K132Q
FPATLETQEQDVDLVQKYLEKYYNLKNDGRQVEKRRNSGPVVEKLKQMQEFFGLKVTGKPDAETLKVMKQPRCGVPDVAQFVLTEGNPRWEQTHLTYRIENYTPDLPRADVDHAIEKAFQLWSNVTPLTFTQVSEGQADIMISFVRGDHRDNSPFDGPGGNLAHAFQPGPGIGGDAHFDEDERWTNNFREYNLHRVAAHELGHSLGLSHSTDIGALMYPSYTFSGDVQLAQDDIDGIQAIYGRSQNPVQPIGPQTPKACDSKLTFDAITTIRGEVMFFKDRFYMRTNPFYPEVELNFISVFWPQLPNGLEAAYEFADRDEVRFFKGNKYWAVQGQNVLHGYPKDIYSSFGFPRTVKHIDAALSEENTGKTYFFVANKYWRYDEYKRSMDPGYPKMIAHDFPGIGHKVDAVFMKDGFFYFFHGTRQYKFDPKTKRILTLQKANSWFNCRKN

SEQ ID NO: 1679 - protein, 450 aa, Artificial Sequence
  MMP-1 variant K132T
FPATLETQEQDVDLVQKYLEKYYNLKNDGRQVEKRRNSGPVVEKLKQMQEFFGLKVTGKPDAETLKVMKQPRCGVPDVAQFVLTEGNPRWEQTHLTYRIENYTPDLPRADVDHAIEKAFQLWSNVTPLTFTTVSEGQADIMISFVRGDHRDNSPFDGPGGNLAHAFQPGPGIGGDAHFDEDERWTNNFREYNLHRVAAHELGHSLGLSHSTDIGALMYPSYTFSGDVQLAQDDIDGIQAIYGRSQNPVQPIGPQTPKACDSKLTFDAITTIRGEVMFFKDRFYMRTNPFYPEVELNFISVFWPQLPNGLEAAYEFADRDEVRFFKGNKYWAVQGQNVLHGYPKDIYSSFGFPRTVKHIDAALSEENTGKTYFFVANKYWRYDEYKRSMDPGYPKMIAHDFPGIGHKVDAVFMKDGFFYFFHGTRQYKFDPKTKRILTLQKANSWFNCRKN

SEQ ID NO: 1680 - protein, 450 aa, Artificial Sequence
  MMP-1 variant K132Y
FPATLETQEQDVDLVQKYLEKYYNLKNDGRQVEKRRNSGPVVEKLKQMQEFFGLKVTGKPDAETLKVMKQPRCGVPDVAQFVLTEGNPRWEQTHLTYRIENYTPDLPRADVDHAIEKAFQLWSNVTPLTFTYVSEGQADIMISFVRGDHRDNSPFDGPGGNLAHAFQPGPGIGGDAHFDEDERWTNNFREYNLHRVAAHELGHSLGLSHSTDIGALMYPSYTFSGDVQLAQDDIDGIQAIYGRSQNPVQPIGPQTPKACDSKLTFDAITTIRGEVMFFKDRFYMRTNPFYPEVELNFISVFWPQLPNGLEAAYEFADRDEVRFFKGNKYWAVQGQNVLHGYPKDIYSSFGFPRTVKHIDAALSEENTGKTYFFVANKYWRYDEYKRSMDPGYPKMIAHDFPGIGHKVDAVFMKDGFFYFFHGTRQYKFDPKTKRILTLQKANSWFNCRKN

SEQ ID NO: 1681 - protein, 450 aa, Artificial Sequence
  MMP-1 variant K132S
FPATLETQEQDVDLVQKYLEKYYNLKNDGRQVEKRRNSGPVVEKLKQMQEFFGLKVTGKPDAETLKVMKQPRCGVPDVAQFVLTEGNPRWEQTHLTYRIENYTPDLPRADVDHAIEKAFQLWSNVTPLTFTSVSEGQADIMISFVRGDHRDNSPFDGPGGNLAHAFQPGPGIGGDAHFDEDERWTNNFREYNLHRVAAHELGHSLGLSHSTDIGALMYPSYTFSGDVQLAQDDIDGIQAIYGRSQNPVQPIGPQTPKACDSKLTFDAITTIRGEVMFFKDRFYMRTNPFYPEVELNFISVFWPQLPNGLEAAYEFADRDEVRFFKGNKYWAVQGQNVLHGYPKDIYSSFGFPRTVKHIDAALSEENTGKTYFFVANKYWRYDEYKRSMDPGYPKMIAHDFPGIGHKVDAVFMKDGFFYFFHGTRQYKFDPKTKRILTLQKANSWFNCRKN

SEQ ID NO: 1682 - protein, 450 aa, Artificial Sequence
  MMP-1 variant K132G
FPATLETQEQDVDLVQKYLEKYYNLKNDGRQVEKRRNSGPVVEKLKQMQEFFGLKVTGKPDAETLKVMKQPRCGVPDVAQFVLTEGNPRWEQTHLTYRIENYTPDLPRADVDHAIEKAFQLWSNVTPLTFTGVSEGQADIMISFVRGDHRDNSPFDGPGGNLAHAFQPGPGIGGDAHFDEDERWTNNFREYNLHRVAAHELGHSLGLSHSTDIGALMYPSYTFSGDVQLAQDDIDGIQAIYGRSQNPVQPIGPQTPKACDSKLTFDAITTIRGEVMFFKDRFYMRTNPFYPEVELNFISVFWPQLPNGLEAAYEFADRDEVRFFKGNKYWAVQGQNVLHGYPKDIYSSFGFPRTVKHIDAALSEENTGKTYFFVANKYWRYDEYKRSMDPGYPKMIAHDFPGIGHKVDAVFMKDGFFYFFHGTRQYKFDPKTKRILTLQKANSWFNCRKN

SEQ ID NO: 1683 - protein, 450 aa, Artificial Sequence
  MMP-1 variant K132F
FPATLETQEQDVDLVQKYLEKYYNLKNDGRQVEKRRNSGPVVEKLKQMQEFFGLKVTGKPDAETLKVMKQPRCGVPDVAQFVLTEGNPRWEQTHLTYRIENYTPDLPRADVDHAIEKAFQLWSNVTPLTFTFVSEGQADIMISFVRGDHRDNSPFDGPGGNLAHAFQPGPGIGGDAHFDEDERWTNNFREYNLHRVAAHELGHSLGLSHSTDIGALMYPSYTFSGDVQLAQDDIDGIQAIYGRSQNPVQPIGPQTPKACDSKLTFDAITTIRGEVMFFKDRFYMRTNPFYPEVELNFISVFWPQLPNGLEAAYEFADRDEVRFFKGNKYWAVQGQNVLHGYPKDIYSSFGFPRTVKHIDAALSEENTGKTYFFVANKYWRYDEYKRSMDPGYPKMIAHDFPGIGHKVDAVFMKDGFFYFFHGTRQYKFDPKTKRILTLQKANSWFNCRKN

SEQ ID NO: 1684 - protein, 450 aa, Artificial Sequence
  MMP-1 variant K132M
FPATLETQEQDVDLVQKYLEKYYNLKNDGRQVEKRRNSGPVVEKLKQMQEFFGLKVTGKPDAETLKVMKQPRCGVPDVAQFVLTEGNPRWEQTHLTYRIENYTPDLPRADVDHAIEKAFQLWSNVTPLTFTMVSEGQADIMISFVRGDHRDNSPFDGPGGNLAHAFQPGPGIGGDAHFDEDERWTNNFREYNLHRVAAHELGHSLGLSHSTDIGALMYPSYTFSGDVQLAQDDIDGIQAIYGRSQNPVQPIGPQTPKACDSKLTFDAITTIRGEVMFFKDRFYMRTNPFYPEVELNFISVFWPQLPNGLEAAYEFADRDEVRFFKGNKYWAVQGQNVLHGYPKDIYSSFGFPRTVKHIDAALSEENTGKTYFFVANKYWRYDEYKRSMDPGYPKMIAHDFPGIGHKVDAVFMKDGFFYFFHGTRQYKFDPKTKRILTLQKANSWFNCRKN

SEQ ID NO: 1685 - protein, 450 aa, Artificial Sequence
  MMP-1 variant K132W
FPATLETQEQDVDLVQKYLEKYYNLKNDGRQVEKRRNSGPVVEKLKQMQEFFGLKVTGKPDAETLKVMKQPRCGVPDVAQFVLTEGNPRWEQTHLTYRIENYTPDLPRADVDHAIEKAFQLWSNVTPLTFTWVSEGQADIMISFVRGDHRDNSPFDGPGGNLAHAFQPGPGIGGDAHFDEDERWTNNFREYNLHRVAAHELGHSLGLSHSTDIGALMYPSYTFSGDVQLAQDDIDGIQAIYGRSQNPVQPIGPQTPKACDSKLTFDAITTIRGEVMFFKDRFYMRTNPFYPEVELNFISVFWPQLPNGLEAAYEFADRDEVRFFKGNKYWAVQGQNVLHGYPKDIYSSFGFPRTVKHIDAALSEENTGKTYFFVANKYWRYDEYKRSMDPGYPKMIAHDFPGIGHKVDAVFMKDGFFYFFHGTRQYKFDPKTKRILTLQKANSWFNCRKN

SEQ ID NO: 1686 - protein, 450 aa, Artificial Sequence
  MMP-1 variant K132I
FPATLETQEQDVDLVQKYLEKYYNLKNDGRQVEKRRNSGPVVEKLKQMQEFFGLKVTGKPDAETLKVMKQPRCGVPDVAQFVLTEGNPRWEQTHLTYRIENYTPDLPRADVDHAIEKAFQLWSNVTPLTFTIVSEGQADIMISFVRGDHRDNSPFDGPGGNLAHAFQPGPGIGGDAHFDEDERWTNNFREYNLHRVAAHELGHSLGLSHSTDIGALMYPSYTFSGDVQLAQDDIDGIQAIYGRSQNPVQPIGPQTPKACDSKLTFDAITTIRGEVMFFKDRFYMRTNPFYPEVELNFISVFWPQLPNGLEAAYEFADRDEVRFFKGNKYWAVQGQNVLHGYPKDIYSSFGFPRTVKHIDAALSEENTGKTYFFVANKYWRYDEYKRSMDPGYPKMIAHDFPGIGHKVDAVFMKDGFFYFFHGTRQYKFDPKTKRILTLQKANSWFNCRKN

SEQ ID NO: 1687 - protein, 450 aa, Artificial Sequence
  MMP-1 variant K132V
FPATLETQEQDVDLVQKYLEKYYNLKNDGRQVEKRRNSGPVVEKLKQMQEFFGLKVTGKPDAETLKVMKQPRCGVPDVAQFVLTEGNPRWEQTHLTYRIENYTPDLPRADVDHAIEKAFQLWSNVTPLTFTVVSEGQADIMISFVRGDHRDNSPFDGPGGNLAHAFQPGPGIGGDAHFDEDERWTNNFREYNLHRVAAHELGHSLGLSHSTDIGALMYPSYTFSGDVQLAQDDIDGIQAIYGRSQNPVQPIGPQTPKACDSKLTFDAITTIRGEVMFFKDRFYMRTNPFYPEVELNFISVFWPQLPNGLEAAYEFADRDEVRFFKGNKYWAVQGQNVLHGYPKDIYSSFGFPRTVKHIDAALSEENTGKTYFFVANKYWRYDEYKRSMDPGYPKMIAHDFPGIGHKVDAVFMKDGFFYFFHGTRQYKFDPKTKRILTLQKANSWFNCRKN

SEQ ID NO: 1688 - protein, 450 aa, Artificial Sequence
  MMP-1 variant K132L
FPATLETQEQDVDLVQKYLEKYYNLKNDGRQVEKRRNSGPVVEKLKQMQEFFGLKVTGKPDAETLKVMKQPRCGVPDVAQFVLTEGNPRWEQTHLTYRIENYTPDLPRADVDHAIEKAFQLWSNVTPLTFTLVSEGQADIMISFVRGDHRDNSPFDGPGGNLAHAFQPGPGIGGDAHFDEDERWTNNFREYNLHRVAAHELGHSLGLSHSTDIGALMYPSYTFSGDVQLAQDDIDGIQAIYGRSQNPVQPIGPQTPKACDSKLTFDAITTIRGEVMFFKDRFYMRTNPFYPEVELNFISVFWPQLPNGLEAAYEFADRDEVRFFKGNKYWAVQGQNVLHGYPKDIYSSFGFPRTVKHIDAALSEENTGKTYFFVANKYWRYDEYKRSMDPGYPKMIAHDFPGIGHKVDAVFMKDGFFYFFHGTRQYKFDPKTKRILTLQKANSWFNCRKN

SEQ ID NO: 1689 - protein, 450 aa, Artificial Sequence
  MMP-1 variant K132A
FPATLETQEQDVDLVQKYLEKYYNLKNDGRQVEKRRNSGPVVEKLKQMQEFFGLKVTGKPDAETLKVMKQPRCGVPDVAQFVLTEGNPRWEQTHLTYRIENYTPDLPRADVDHAIEKAFQLWSNVTPLTFTAVSEGQADIMISFVRGDHRDNSPFDGPGGNLAHAFQPGPGIGGDAHFDEDERWTNNFREYNLHRVAAHELGHSLGLSHSTDIGALMYPSYTFSGDVQLAQDDIDGIQAIYGRSQNPVQPIGPQTPKACDSKLTFDAITTIRGEVMFFKDRFYMRTNPFYPEVELNFISVFWPQLPNGLEAAYEFADRDEVRFFKGNKYWAVQGQNVLHGYPKDIYSSFGFPRTVKHIDAALSEENTGKTYFFVANKYWRYDEYKRSMDPGYPKMIAHDFPGIGHKVDAVFMKDGFFYFFHGTRQYKFDPKTKRILTLQKANSWFNCRKN

SEQ ID NO: 1690 - protein, 450 aa, Artificial Sequence
  MMP-1 variant K132P
FPATLETQEQDVDLVQKYLEKYYNLKNDGRQVEKRRNSGPVVEKLKQMQEFFGLKVTGKPDAETLKVMKQPRCGVPDVAQFVLTEGNPRWEQTHLTYRIENYTPDLPRADVDHAIEKAFQLWSNVTPLTFTPVSEGQADIMISFVRGDHRDNSPFDGPGGNLAHAFQPGPGIGGDAHFDEDERWTNNFREYNLHRVAAHELGHSLGLSHSTDIGALMYPSYTFSGDVQLAQDDIDGIQAIYGRSQNPVQPIGPQTPKACDSKLTFDAITTIRGEVMFFKDRFYMRTNPFYPEVELNFISVFWPQLPNGLEAAYEFADRDEVRFFKGNKYWAVQGQNVLHGYPKDIYSSFGFPRTVKHIDAALSEENTGKTYFFVANKYWRYDEYKRSMDPGYPKMIAHDFPGIGHKVDAVFMKDGFFYFFHGTRQYKFDPKTKRILTLQKANSWFNCRKN

SEQ ID NO: 1691 - protein, 450 aa, Artificial Sequence
  MMP-1 variant V133D
FPATLETQEQDVDLVQKYLEKYYNLKNDGRQVEKRRNSGPVVEKLKQMQEFFGLKVTGKPDAETLKVMKQPRCGVPDVAQFVLTEGNPRWEQTHLTYRIENYTPDLPRADVDHAIEKAFQLWSNVTPLTFTKDSEGQADIMISFVRGDHRDNSPFDGPGGNLAHAFQPGPGIGGDAHFDEDERWTNNFREYNLHRVAAHELGHSLGLSHSTDIGALMYPSYTFSGDVQLAQDDIDGIQAIYGRSQNPVQPIGPQTPKACDSKLTFDAITTIRGEVMFFKDRFYMRTNPFYPEVELNFISVFWPQLPNGLEAAYEFADRDEVRFFKGNKYWAVQGQNVLHGYPKDIYSSFGFPRTVKHIDAALSEENTGKTYFFVANKYWRYDEYKRSMDPGYPKMIAHDFPGIGHKVDAVFMKDGFFYFFHGTRQYKFDPKTKRILTLQKANSWFNCRKN

SEQ ID NO: 1692 - protein, 450 aa, Artificial Sequence
  MMP-1 variant V133E
FPATLETQEQDVDLVQKYLEKYYNLKNDGRQVEKRRNSGPVVEKLKQMQEFFGLKVTGKPDAETLKVMKQPRCGVPDVAQFVLTEGNPRWEQTHLTYRIENYTPDLPRADVDHAIEKAFQLWSNVTPLTFTKESEGQADIMISFVRGDHRDNSPFDGPGGNLAHAFQPGPGIGGDAHFDEDERWTNNFREYNLHRVAAHELGHSLGLSHSTDIGALMYPSYTFSGDVQLAQDDIDGIQAIYGRSQNPVQPIGPQTPKACDSKLTFDAITTIRGEVMFFKDRFYMRTNPFYPEVELNFISVFWPQLPNGLEAAYEFADRDEVRFFKGNKYWAVQGQNVLHGYPKDIYSSFGFPRTVKHIDAALSEENTGKTYFFVANKYWRYDEYKRSMDPGYPKMIAHDFPGIGHKVDAVFMKDGFFYFFHGTRQYKFDPKTKRILTLQKANSWFNCRKN

SEQ ID NO: 1693 - protein, 450 aa, Artificial Sequence
  MMP-1 variant V133H
FPATLETQEQDVDLVQKYLEKYYNLKNDGRQVEKRRNSGPVVEKLKQMQEFFGLKVTGKPDAETLKVMKQPRCGVPDVAQFVLTEGNPRWEQTHLTYRIENYTPDLPRADVDHAIEKAFQLWSNVTPLTFTKHSEGQADIMISFVRGDHRDNSPFDGPGGNLAHAFQPGPGIGGDAHFDEDERWTNNFREYNLHRVAAHELGHSLGLSHSTDIGALMYPSYTFSGDVQLAQDDIDGIQAIYGRSQNPVQPIGPQTPKACDSKLTFDAITTIRGEVMFFKDRFYMRTNPFYPEVELNFISVFWPQLPNGLEAAYEFADRDEVRFFKGNKYWAVQGQNVLHGYPKDIYSSFGFPRTVKHIDAALSEENTGKTYFFVANKYWRYDEYKRSMDPGYPKMIAHDFPGIGHKVDAVFMKDGFFYFFHGTRQYKFDPKTKRILTLQKANSWFNCRKN

SEQ ID NO: 1694 - protein, 450 aa, Artificial Sequence
  MMP-1 variant V133K
FPATLETQEQDVDLVQKYLEKYYNLKNDGRQVEKRRNSGPVVEKLKQMQEFFGLKVTGKPDAETLKVMKQPRCGVPDVAQFVLTEGNPRWEQTHLTYRIENYTPDLPRADVDHAIEKAFQLWSNVTPLTFTKKSEGQADIMISFVRGDHRDNSPFDGPGGNLAHAFQPGPGIGGDAHFDEDERWTNNFREYNLHRVAAHELGHSLGLSHSTDIGALMYPSYTFSGDVQLAQDDIDGIQAIYGRSQNPVQPIGPQTPKACDSKLTFDAITTIRGEVMFFKDRFYMRTNPFYPEVELNFISVFWPQLPNGLEAAYEFADRDEVRFFKGNKYWAVQGQNVLHGYPKDIYSSFGFPRTVKHIDAALSEENTGKTYFFVANKYWRYDEYKRSMDPGYPKMIAHDFPGIGHKVDAVFMKDGFFYFFHGTRQYKFDPKTKRILTLQKANSWFNCRKN

SEQ ID NO: 1695 - protein, 450 aa, Artificial Sequence
  MMP-1 variant V133R
FPATLETQEQDVDLVQKYLEKYYNLKNDGRQVEKRRNSGPVVEKLKQMQEFFGLKVTGKPDAETLKVMKQPRCGVPDVAQFVLTEGNPRWEQTHLTYRIENYTPDLPRADVDHAIEKAFQLWSNVTPLTFTKRSEGQADIMISFVRGDHRDNSPFDGPGGNLAHAFQPGPGIGGDAHFDEDERWTNNFREYNLHRVAAHELGHSLGLSHSTDIGALMYPSYTFSGDVQLAQDDIDGIQAIYGRSQNPVQPIGPQTPKACDSKLTFDAITTIRGEVMFFKDRFYMRTNPFYPEVELNFISVFWPQLPNGLEAAYEFADRDEVRFFKGNKYWAVQGQNVLHGYPKDIYSSFGFPRTVKHIDAALSEENTGKTYFFVANKYWRYDEYKRSMDPGYPKMIAHDFPGIGHKVDAVFMKDGFFYFFHGTRQYKFDPKTKRILTLQKANSWFNCRKN

SEQ ID NO: 1696 - protein, 450 aa, Artificial Sequence
  MMP-1 variant V133C
FPATLETQEQDVDLVQKYLEKYYNLKNDGRQVEKRRNSGPVVEKLKQMQEFFGLKVTGKPDAETLKVMKQPRCGVPDVAQFVLTEGNPRWEQTHLTYRIENYTPDLPRADVDHAIEKAFQLWSNVTPLTFTKCSEGQADIMISFVRGDHRDNSPFDGPGGNLAHAFQPGPGIGGDAHFDEDERWTNNFREYNLHRVAAHELGHSLGLSHSTDIGALMYPSYTFSGDVQLAQDDIDGIQAIYGRSQNPVQPIGPQTPKACDSKLTFDAITTIRGEVMFFKDRFYMRTNPFYPEVELNFISVFWPQLPNGLEAAYEFADRDEVRFFKGNKYWAVQGQNVLHGYPKDIYSSFGFPRTVKHIDAALSEENTGKTYFFVANKYWRYDEYKRSMDPGYPKMIAHDFPGIGHKVDAVFMKDGFFYFFHGTRQYKFDPKTKRILTLQKANSWFNCRKN

SEQ ID NO: 1697 - protein, 450 aa, Artificial Sequence
  MMP-1 variant V133N
FPATLETQEQDVDLVQKYLEKYYNLKNDGRQVEKRRNSGPVVEKLKQMQEFFGLKVTGKPDAETLKVMKQPRCGVPDVAQFVLTEGNPRWEQTHLTYRIENYTPDLPRADVDHAIEKAFQLWSNVTPLTFTKNSEGQADIMISFVRGDHRDNSPFDGPGGNLAHAFQPGPGIGGDAHFDEDERWTNNFREYNLHRVAAHELGHSLGLSHSTDIGALMYPSYTFSGDVQLAQDDIDGIQAIYGRSQNPVQPIGPQTPKACDSKLTFDAITTIRGEVMFFKDRFYMRTNPFYPEVELNFISVFWPQLPNGLEAAYEFADRDEVRFFKGNKYWAVQGQNVLHGYPKDIYSSFGFPRTVKHIDAALSEENTGKTYFFVANKYWRYDEYKRSMDPGYPKMIAHDFPGIGHKVDAVFMKDGFFYFFHGTRQYKFDPKTKRILTLQKANSWFNCRKN

SEQ ID NO: 1698 - protein, 450 aa, Artificial Sequence
  MMP-1 variant V133Q
FPATLETQEQDVDLVQKYLEKYYNLKNDGRQVEKRRNSGPVVEKLKQMQEFFGLKVTGKPDAETLKVMKQPRCGVPDVAQFVLTEGNPRWEQTHLTYRIENYTPDLPRADVDHAIEKAFQLWSNVTPLTFTKQSEGQADIMISFVRGDHRDNSPFDGPGGNLAHAFQPGPGIGGDAHFDEDERWTNNFREYNLHRVAAHELGHSLGLSHSTDIGALMYPSYTFSGDVQLAQDDIDGIQAIYGRSQNPVQPIGPQTPKACDSKLTFDAITTIRGEVMFFKDRFYMRTNPFYPEVELNFISVFWPQLPNGLEAAYEFADRDEVRFFKGNKYWAVQGQNVLHGYPKDIYSSFGFPRTVKHIDAALSEENTGKTYFFVANKYWRYDEYKRSMDPGYPKMIAHDFPGIGHKVDAVFMKDGFFYFFHGTRQYKFDPKTKRILTLQKANSWFNCRKN

SEQ ID NO: 1699 - protein, 450 aa, Artificial Sequence
  MMP-1 variant V133T
FPATLETQEQDVDLVQKYLEKYYNLKNDGRQVEKRRNSGPVVEKLKQMQEFFGLKVTGKPDAETLKVMKQPRCGVPDVAQFVLTEGNPRWEQTHLTYRIENYTPDLPRADVDHAIEKAFQLWSNVTPLTFTKTSEGQADIMISFVRGDHRDNSPFDGPGGNLAHAFQPGPGIGGDAHFDEDERWTNNFREYNLHRVAAHELGHSLGLSHSTDIGALMYPSYTFSGDVQLAQDDIDGIQAIYGRSQNPVQPIGPQTPKACDSKLTFDAITTIRGEVMFFKDRFYMRTNPFYPEVELNFISVFWPQLPNGLEAAYEFADRDEVRFFKGNKYWAVQGQNVLHGYPKDIYSSFGFPRTVKHIDAALSEENTGKTYFFVANKYWRYDEYKRSMDPGYPKMIAHDFPGIGHKVDAVFMKDGFFYFFHGTRQYKFDPKTKRILTLQKANSWFNCRKN

SEQ ID NO: 1700 - protein, 450 aa, Artificial Sequence
  MMP-1 variant V133Y
FPATLETQEQDVDLVQKYLEKYYNLKNDGRQVEKRRNSGPVVEKLKQMQEFFGLKVTGKPDAETLKVMKQPRCGVPDVAQFVLTEGNPRWEQTHLTYRIENYTPDLPRADVDHAIEKAFQLWSNVTPLTFTKYSEGQADIMISFVRGDHRDNSPFDGPGGNLAHAFQPGPGIGGDAHFDEDERWTNNFREYNLHRVAAHELGHSLGLSHSTDIGALMYPSYTFSGDVQLAQDDIDGIQAIYGRSQNPVQPIGPQTPKACDSKLTFDAITTIRGEVMFFKDRFYMRTNPFYPEVELNFISVFWPQLPNGLEAAYEFADRDEVRFFKGNKYWAVQGQNVLHGYPKDIYSSFGFPRTVKHIDAALSEENTGKTYFFVANKYWRYDEYKRSMDPGYPKMIAHDFPGIGHKVDAVFMKDGFFYFFHGTRQYKFDPKTKRILTLQKANSWFNCRKN

SEQ ID NO: 1701 - protein, 450 aa, Artificial Sequence
  MMP-1 variant V133S
FPATLETQEQDVDLVQKYLEKYYNLKNDGRQVEKRRNSGPVVEKLKQMQEFFGLKVTGKPDAETLKVMKQPRCGVPDVAQFVLTEGNPRWEQTHLTYRIENYTPDLPRADVDHAIEKAFQLWSNVTPLTFTKSSEGQADIMISFVRGDHRDNSPFDGPGGNLAHAFQPGPGIGGDAHFDEDERWTNNFREYNLHRVAAHELGHSLGLSHSTDIGALMYPSYTFSGDVQLAQDDIDGIQAIYGRSQNPVQPIGPQTPKACDSKLTFDAITTIRGEVMFFKDRFYMRTNPFYPEVELNFISVFWPQLPNGLEAAYEFADRDEVRFFKGNKYWAVQGQNVLHGYPKDIYSSFGFPRTVKHIDAALSEENTGKTYFFVANKYWRYDEYKRSMDPGYPKMIAHDFPGIGHKVDAVFMKDGFFYFFHGTRQYKFDPKTKRILTLQKANSWFNCRKN

SEQ ID NO: 1702 - protein, 450 aa, Artificial Sequence
  MMP-1 variant V133G
FPATLETQEQDVDLVQKYLEKYYNLKNDGRQVEKRRNSGPVVEKLKQMQEFFGLKVTGKPDAETLKVMKQPRCGVPDVAQFVLTEGNPRWEQTHLTYRIENYTPDLPRADVDHAIEKAFQLWSNVTPLTFTKGSEGQADIMISFVRGDHRDNSPFDGPGGNLAHAFQPGPGIGGDAHFDEDERWTNNFREYNLHRVAAHELGHSLGLSHSTDIGALMYPSYTFSGDVQLAQDDIDGIQAIYGRSQNPVQPIGPQTPKACDSKLTFDAITTIRGEVMFFKDRFYMRTNPFYPEVELNFISVFWPQLPNGLEAAYEFADRDEVRFFKGNKYWAVQGQNVLHGYPKDIYSSFGFPRTVKHIDAALSEENTGKTYFFVANKYWRYDEYKRSMDPGYPKMIAHDFPGIGHKVDAVFMKDGFFYFFHGTRQYKFDPKTKRILTLQKANSWFNCRKN

SEQ ID NO: 1703 - protein, 450 aa, Artificial Sequence
  MMP-1 variant V133F
FPATLETQEQDVDLVQKYLEKYYNLKNDGRQVEKRRNSGPVVEKLKQMQEFFGLKVTGKPDAETLKVMKQPRCGVPDVAQFVLTEGNPRWEQTHLTYRIENYTPDLPRADVDHAIEKAFQLWSNVTPLTFTKFSEGQADIMISFVRGDHRDNSPFDGPGGNLAHAFQPGPGIGGDAHFDEDERWTNNFREYNLHRVAAHELGHSLGLSHSTDIGALMYPSYTFSGDVQLAQDDIDGIQAIYGRSQNPVQPIGPQTPKACDSKLTFDAITTIRGEVMFFKDRFYMRTNPFYPEVELNFISVFWPQLPNGLEAAYEFADRDEVRFFKGNKYWAVQGQNVLHGYPKDIYSSFGFPRTVKHIDAALSEENTGKTYFFVANKYWRYDEYKRSMDPGYPKMIAHDFPGIGHKVDAVFMKDGFFYFFHGTRQYKFDPKTKRILTLQKANSWFNCRKN

SEQ ID NO: 1704 - protein, 450 aa, Artificial Sequence
  MMP-1 variant V133M
FPATLETQEQDVDLVQKYLEKYYNLKNDGRQVEKRRNSGPVVEKLKQMQEFFGLKVTGKPDAETLKVMKQPRCGVPDVAQFVLTEGNPRWEQTHLTYRIENYTPDLPRADVDHAIEKAFQLWSNVTPLTFTKMSEGQADIMISFVRGDHRDNSPFDGPGGNLAHAFQPGPGIGGDAHFDEDERWTNNFREYNLHRVAAHELGHSLGLSHSTDIGALMYPSYTFSGDVQLAQDDIDGIQAIYGRSQNPVQPIGPQTPKACDSKLTFDAITTIRGEVMFFKDRFYMRTNPFYPEVELNFISVFWPQLPNGLEAAYEFADRDEVRFFKGNKYWAVQGQNVLHGYPKDIYSSFGFPRTVKHIDAALSEENTGKTYFFVANKYWRYDEYKRSMDPGYPKMIAHDFPGIGHKVDAVFMKDGFFYFFHGTRQYKFDPKTKRILTLQKANSWFNCRKN

SEQ ID NO: 1705 - protein, 450 aa, Artificial Sequence
  MMP-1 variant V133W
FPATLETQEQDVDLVQKYLEKYYNLKNDGRQVEKRRNSGPVVEKLKQMQEFFGLKVTGKPDAETLKVMKQPRCGVPDVAQFVLTEGNPRWEQTHLTYRIENYTPDLPRADVDHAIEKAFQLWSNVTPLTFTKWSEGQADIMISFVRGDHRDNSPFDGPGGNLAHAFQPGPGIGGDAHFDEDERWTNNFREYNLHRVAAHELGHSLGLSHSTDIGALMYPSYTFSGDVQLAQDDIDGIQAIYGRSQNPVQPIGPQTPKACDSKLTFDAITTIRGEVMFFKDRFYMRTNPFYPEVELNFISVFWPQLPNGLEAAYEFADRDEVRFFKGNKYWAVQGQNVLHGYPKDIYSSFGFPRTVKHIDAALSEENTGKTYFFVANKYWRYDEYKRSMDPGYPKMIAHDFPGIGHKVDAVFMKDGFFYFFHGTRQYKFDPKTKRILTLQKANSWFNCRKN

SEQ ID NO: 1706 - protein, 450 aa, Artificial Sequence
  MMP-1 variant V133I
FPATLETQEQDVDLVQKYLEKYYNLKNDGRQVEKRRNSGPVVEKLKQMQEFFGLKVTGKPDAETLKVMKQPRCGVPDVAQFVLTEGNPRWEQTHLTYRIENYTPDLPRADVDHAIEKAFQLWSNVTPLTFTKISEGQADIMISFVRGDHRDNSPFDGPGGNLAHAFQPGPGIGGDAHFDEDERWTNNFREYNLHRVAAHELGHSLGLSHSTDIGALMYPSYTFSGDVQLAQDDIDGIQAIYGRSQNPVQPIGPQTPKACDSKLTFDAITTIRGEVMFFKDRFYMRTNPFYPEVELNFISVFWPQLPNGLEAAYEFADRDEVRFFKGNKYWAVQGQNVLHGYPKDIYSSFGFPRTVKHIDAALSEENTGKTYFFVANKYWRYDEYKRSMDPGYPKMIAHDFPGIGHKVDAVFMKDGFFYFFHGTRQYKFDPKTKRILTLQKANSWFNCRKN

SEQ ID NO: 1707 - protein, 450 aa, Artificial Sequence
  MMP-1 variant V133L
FPATLETQEQDVDLVQKYLEKYYNLKNDGRQVEKRRNSGPVVEKLKQMQEFFGLKVTGKPDAETLKVMKQPRCGVPDVAQFVLTEGNPRWEQTHLTYRIENYTPDLPRADVDHAIEKAFQLWSNVTPLTFTKLSEGQADIMISFVRGDHRDNSPFDGPGGNLAHAFQPGPGIGGDAHFDEDERWTNNFREYNLHRVAAHELGHSLGLSHSTDIGALMYPSYTFSGDVQLAQDDIDGIQAIYGRSQNPVQPIGPQTPKACDSKLTFDAITTIRGEVMFFKDRFYMRTNPFYPEVELNFISVFWPQLPNGLEAAYEFADRDEVRFFKGNKYWAVQGQNVLHGYPKDIYSSFGFPRTVKHIDAALSEENTGKTYFFVANKYWRYDEYKRSMDPGYPKMIAHDFPGIGHKVDAVFMKDGFFYFFHGTRQYKFDPKTKRILTLQKANSWFNCRKN

SEQ ID NO: 1708 - protein, 450 aa, Artificial Sequence
  MMP-1 variant V133A
FPATLETQEQDVDLVQKYLEKYYNLKNDGRQVEKRRNSGPVVEKLKQMQEFFGLKVTGKPDAETLKVMKQPRCGVPDVAQFVLTEGNPRWEQTHLTYRIENYTPDLPRADVDHAIEKAFQLWSNVTPLTFTKASEGQADIMISFVRGDHRDNSPFDGPGGNLAHAFQPGPGIGGDAHFDEDERWTNNFREYNLHRVAAHELGHSLGLSHSTDIGALMYPSYTFSGDVQLAQDDIDGIQAIYGRSQNPVQPIGPQTPKACDSKLTFDAITTIRGEVMFFKDRFYMRTNPFYPEVELNFISVFWPQLPNGLEAAYEFADRDEVRFFKGNKYWAVQGQNVLHGYPKDIYSSFGFPRTVKHIDAALSEENTGKTYFFVANKYWRYDEYKRSMDPGYPKMIAHDFPGIGHKVDAVFMKDGFFYFFHGTRQYKFDPKTKRILTLQKANSWFNCRKN

SEQ ID NO: 1709 - protein, 450 aa, Artificial Sequence
  MMP-1 variant V133P
FPATLETQEQDVDLVQKYLEKYYNLKNDGRQVEKRRNSGPVVEKLKQMQEFFGLKVTGKPDAETLKVMKQPRCGVPDVAQFVLTEGNPRWEQTHLTYRIENYTPDLPRADVDHAIEKAFQLWSNVTPLTFTKPSEGQADIMISFVRGDHRDNSPFDGPGGNLAHAFQPGPGIGGDAHFDEDERWTNNFREYNLHRVAAHELGHSLGLSHSTDIGALMYPSYTFSGDVQLAQDDIDGIQAIYGRSQNPVQPIGPQTPKACDSKLTFDAITTIRGEVMFFKDRFYMRTNPFYPEVELNFISVFWPQLPNGLEAAYEFADRDEVRFFKGNKYWAVQGQNVLHGYPKDIYSSFGFPRTVKHIDAALSEENTGKTYFFVANKYWRYDEYKRSMDPGYPKMIAHDFPGIGHKVDAVFMKDGFFYFFHGTRQYKFDPKTKRILTLQKANSWFNCRKN

SEQ ID NO: 1710 - protein, 450 aa, Artificial Sequence
  MMP-1 variant S134D
FPATLETQEQDVDLVQKYLEKYYNLKNDGRQVEKRRNSGPVVEKLKQMQEFFGLKVTGKPDAETLKVMKQPRCGVPDVAQFVLTEGNPRWEQTHLTYRIENYTPDLPRADVDHAIEKAFQLWSNVTPLTFTKVDEGQADIMISFVRGDHRDNSPFDGPGGNLAHAFQPGPGIGGDAHFDEDERWTNNFREYNLHRVAAHELGHSLGLSHSTDIGALMYPSYTFSGDVQLAQDDIDGIQAIYGRSQNPVQPIGPQTPKACDSKLTFDAITTIRGEVMFFKDRFYMRTNPFYPEVELNFISVFWPQLPNGLEAAYEFADRDEVRFFKGNKYWAVQGQNVLHGYPKDIYSSFGFPRTVKHIDAALSEENTGKTYFFVANKYWRYDEYKRSMDPGYPKMIAHDFPGIGHKVDAVFMKDGFFYFFHGTRQYKFDPKTKRILTLQKANSWFNCRKN

SEQ ID NO: 1711 - protein, 450 aa, Artificial Sequence
  MMP-1 variant S134E
FPATLETQEQDVDLVQKYLEKYYNLKNDGRQVEKRRNSGPVVEKLKQMQEFFGLKVTGKPDAETLKVMKQPRCGVPDVAQFVLTEGNPRWEQTHLTYRIENYTPDLPRADVDHAIEKAFQLWSNVTPLTFTKVEEGQADIMISFVRGDHRDNSPFDGPGGNLAHAFQPGPGIGGDAHFDEDERWTNNFREYNLHRVAAHELGHSLGLSHSTDIGALMYPSYTFSGDVQLAQDDIDGIQAIYGRSQNPVQPIGPQTPKACDSKLTFDAITTIRGEVMFFKDRFYMRTNPFYPEVELNFISVFWPQLPNGLEAAYEFADRDEVRFFKGNKYWAVQGQNVLHGYPKDIYSSFGFPRTVKHIDAALSEENTGKTYFFVANKYWRYDEYKRSMDPGYPKMIAHDFPGIGHKVDAVFMKDGFFYFFHGTRQYKFDPKTKRILTLQKANSWFNCRKN

SEQ ID NO: 1712 - protein, 450 aa, Artificial Sequence
  MMP-1 variant S134H
FPATLETQEQDVDLVQKYLEKYYNLKNDGRQVEKRRNSGPVVEKLKQMQEFFGLKVTGKPDAETLKVMKQPRCGVPDVAQFVLTEGNPRWEQTHLTYRIENYTPDLPRADVDHAIEKAFQLWSNVTPLTFTKVHEGQADIMISFVRGDHRDNSPFDGPGGNLAHAFQPGPGIGGDAHFDEDERWTNNFREYNLHRVAAHELGHSLGLSHSTDIGALMYPSYTFSGDVQLAQDDIDGIQAIYGRSQNPVQPIGPQTPKACDSKLTFDAITTIRGEVMFFKDRFYMRTNPFYPEVELNFISVFWPQLPNGLEAAYEFADRDEVRFFKGNKYWAVQGQNVLHGYPKDIYSSFGFPRTVKHIDAALSEENTGKTYFFVANKYWRYDEYKRSMDPGYPKMIAHDFPGIGHKVDAVFMKDGFFYFFHGTRQYKFDPKTKRILTLQKANSWFNCRKN

SEQ ID NO: 1713 - protein, 450 aa, Artificial Sequence
  MMP-1 variant S134K
FPATLETQEQDVDLVQKYLEKYYNLKNDGRQVEKRRNSGPVVEKLKQMQEFFGLKVTGKPDAETLKVMKQPRCGVPDVAQFVLTEGNPRWEQTHLTYRIENYTPDLPRADVDHAIEKAFQLWSNVTPLTFTKVKEGQADIMISFVRGDHRDNSPFDGPGGNLAHAFQPGPGIGGDAHFDEDERWTNNFREYNLHRVAAHELGHSLGLSHSTDIGALMYPSYTFSGDVQLAQDDIDGIQAIYGRSQNPVQPIGPQTPKACDSKLTFDAITTIRGEVMFFKDRFYMRTNPFYPEVELNFISVFWPQLPNGLEAAYEFADRDEVRFFKGNKYWAVQGQNVLHGYPKDIYSSFGFPRTVKHIDAALSEENTGKTYFFVANKYWRYDEYKRSMDPGYPKMIAHDFPGIGHKVDAVFMKDGFFYFFHGTRQYKFDPKTKRILTLQKANSWFNCRKN

SEQ ID NO: 1714 - protein, 450 aa, Artificial Sequence
  MMP-1 variant S134R
FPATLETQEQDVDLVQKYLEKYYNLKNDGRQVEKRRNSGPVVEKLKQMQEFFGLKVTGKPDAETLKVMKQPRCGVPDVAQFVLTEGNPRWEQTHLTYRIENYTPDLPRADVDHAIEKAFQLWSNVTPLTFTKVREGQADIMISFVRGDHRDNSPFDGPGGNLAHAFQPGPGIGGDAHFDEDERWTNNFREYNLHRVAAHELGHSLGLSHSTDIGALMYPSYTFSGDVQLAQDDIDGIQAIYGRSQNPVQPIGPQTPKACDSKLTFDAITTIRGEVMFFKDRFYMRTNPFYPEVELNFISVFWPQLPNGLEAAYEFADRDEVRFFKGNKYWAVQGQNVLHGYPKDIYSSFGFPRTVKHIDAALSEENTGKTYFFVANKYWRYDEYKRSMDPGYPKMIAHDFPGIGHKVDAVFMKDGFFYFFHGTRQYKFDPKTKRILTLQKANSWFNCRKN

SEQ ID NO: 1715 - protein, 450 aa, Artificial Sequence
  MMP-1 variant S134C
FPATLETQEQDVDLVQKYLEKYYNLKNDGRQVEKRRNSGPVVEKLKQMQEFFGLKVTGKPDAETLKVMKQPRCGVPDVAQFVLTEGNPRWEQTHLTYRIENYTPDLPRADVDHAIEKAFQLWSNVTPLTFTKVCEGQADIMISFVRGDHRDNSPFDGPGGNLAHAFQPGPGIGGDAHFDEDERWTNNFREYNLHRVAAHELGHSLGLSHSTDIGALMYPSYTFSGDVQLAQDDIDGIQAIYGRSQNPVQPIGPQTPKACDSKLTFDAITTIRGEVMFFKDRFYMRTNPFYPEVELNFISVFWPQLPNGLEAAYEFADRDEVRFFKGNKYWAVQGQNVLHGYPKDIYSSFGFPRTVKHIDAALSEENTGKTYFFVANKYWRYDEYKRSMDPGYPKMIAHDFPGIGHKVDAVFMKDGFFYFFHGTRQYKFDPKTKRILTLQKANSWFNCRKN

SEQ ID NO: 1716 - protein, 450 aa, Artificial Sequence
  MMP-1 variant S134N
FPATLETQEQDVDLVQKYLEKYYNLKNDGRQVEKRRNSGPVVEKLKQMQEFFGLKVTGKPDAETLKVMKQPRCGVPDVAQFVLTEGNPRWEQTHLTYRIENYTPDLPRADVDHAIEKAFQLWSNVTPLTFTKVNEGQADIMISFVRGDHRDNSPFDGPGGNLAHAFQPGPGIGGDAHFDEDERWTNNFREYNLHRVAAHELGHSLGLSHSTDIGALMYPSYTFSGDVQLAQDDIDGIQAIYGRSQNPVQPIGPQTPKACDSKLTFDAITTIRGEVMFFKDRFYMRTNPFYPEVELNFISVFWPQLPNGLEAAYEFADRDEVRFFKGNKYWAVQGQNVLHGYPKDIYSSFGFPRTVKHIDAALSEENTGKTYFFVANKYWRYDEYKRSMDPGYPKMIAHDFPGIGHKVDAVFMKDGFFYFFHGTRQYKFDPKTKRILTLQKANSWFNCRKN

SEQ ID NO: 1717 - protein, 450 aa, Artificial Sequence
  MMP-1 variant S134Q
FPATLETQEQDVDLVQKYLEKYYNLKNDGRQVEKRRNSGPVVEKLKQMQEFFGLKVTGKPDAETLKVMKQPRCGVPDVAQFVLTEGNPRWEQTHLTYRIENYTPDLPRADVDHAIEKAFQLWSNVTPLTFTKVQEGQADIMISFVRGDHRDNSPFDGPGGNLAHAFQPGPGIGGDAHFDEDERWTNNFREYNLHRVAAHELGHSLGLSHSTDIGALMYPSYTFSGDVQLAQDDIDGIQAIYGRSQNPVQPIGPQTPKACDSKLTFDAITTIRGEVMFFKDRFYMRTNPFYPEVELNFISVFWPQLPNGLEAAYEFADRDEVRFFKGNKYWAVQGQNVLHGYPKDIYSSFGFPRTVKHIDAALSEENTGKTYFFVANKYWRYDEYKRSMDPGYPKMIAHDFPGIGHKVDAVFMKDGFFYFFHGTRQYKFDPKTKRILTLQKANSWFNCRKN

SEQ ID NO: 1718 - protein, 450 aa, Artificial Sequence
  MMP-1 variant S134T
FPATLETQEQDVDLVQKYLEKYYNLKNDGRQVEKRRNSGPVVEKLKQMQEFFGLKVTGKPDAETLKVMKQPRCGVPDVAQFVLTEGNPRWEQTHLTYRIENYTPDLPRADVDHAIEKAFQLWSNVTPLTFTKVTEGQADIMISFVRGDHRDNSPFDGPGGNLAHAFQPGPGIGGDAHFDEDERWTNNFREYNLHRVAAHELGHSLGLSHSTDIGALMYPSYTFSGDVQLAQDDIDGIQAIYGRSQNPVQPIGPQTPKACDSKLTFDAITTIRGEVMFFKDRFYMRTNPFYPEVELNFISVFWPQLPNGLEAAYEFADRDEVRFFKGNKYWAVQGQNVLHGYPKDIYSSFGFPRTVKHIDAALSEENTGKTYFFVANKYWRYDEYKRSMDPGYPKMIAHDFPGIGHKVDAVFMKDGFFYFFHGTRQYKFDPKTKRILTLQKANSWFNCRKN

SEQ ID NO: 1719 - protein, 450 aa, Artificial Sequence
  MMP-1 variant S134Y
FPATLETQEQDVDLVQKYLEKYYNLKNDGRQVEKRRNSGPVVEKLKQMQEFFGLKVTGKPDAETLKVMKQPRCGVPDVAQFVLTEGNPRWEQTHLTYRIENYTPDLPRADVDHAIEKAFQLWSNVTPLTFTKVYEGQADIMISFVRGDHRDNSPFDGPGGNLAHAFQPGPGIGGDAHFDEDERWTNNFREYNLHRVAAHELGHSLGLSHSTDIGALMYPSYTFSGDVQLAQDDIDGIQAIYGRSQNPVQPIGPQTPKACDSKLTFDAITTIRGEVMFFKDRFYMRTNPFYPEVELNFISVFWPQLPNGLEAAYEFADRDEVRFFKGNKYWAVQGQNVLHGYPKDIYSSFGFPRTVKHIDAALSEENTGKTYFFVANKYWRYDEYKRSMDPGYPKMIAHDFPGIGHKVDAVFMKDGFFYFFHGTRQYKFDPKTKRILTLQKANSWFNCRKN

SEQ ID NO: 1720 - protein, 450 aa, Artificial Sequence
  MMP-1 variant S134G
FPATLETQEQDVDLVQKYLEKYYNLKNDGRQVEKRRNSGPVVEKLKQMQEFFGLKVTGKPDAETLKVMKQPRCGVPDVAQFVLTEGNPRWEQTHLTYRIENYTPDLPRADVDHAIEKAFQLWSNVTPLTFTKVGEGQADIMISFVRGDHRDNSPFDGPGGNLAHAFQPGPGIGGDAHFDEDERWTNNFREYNLHRVAAHELGHSLGLSHSTDIGALMYPSYTFSGDVQLAQDDIDGIQAIYGRSQNPVQPIGPQTPKACDSKLTFDAITTIRGEVMFFKDRFYMRTNPFYPEVELNFISVFWPQLPNGLEAAYEFADRDEVRFFKGNKYWAVQGQNVLHGYPKDIYSSFGFPRTVKHIDAALSEENTGKTYFFVANKYWRYDEYKRSMDPGYPKMIAHDFPGIGHKVDAVFMKDGFFYFFHGTRQYKFDPKTKRILTLQKANSWFNCRKN

SEQ ID NO: 1721 - protein, 450 aa, Artificial Sequence
  MMP-1 variant S134F
FPATLETQEQDVDLVQKYLEKYYNLKNDGRQVEKRRNSGPVVEKLKQMQEFFGLKVTGKPDAETLKVMKQPRCGVPDVAQFVLTEGNPRWEQTHLTYRIENYTPDLPRADVDHAIEKAFQLWSNVTPLTFTKVFEGQADIMISFVRGDHRDNSPFDGPGGNLAHAFQPGPGIGGDAHFDEDERWTNNFREYNLHRVAAHELGHSLGLSHSTDIGALMYPSYTFSGDVQLAQDDIDGIQAIYGRSQNPVQPIGPQTPKACDSKLTFDAITTIRGEVMFFKDRFYMRTNPFYPEVELNFISVFWPQLPNGLEAAYEFADRDEVRFFKGNKYWAVQGQNVLHGYPKDIYSSFGFPRTVKHIDAALSEENTGKTYFFVANKYWRYDEYKRSMDPGYPKMIAHDFPGIGHKVDAVFMKDGFFYFFHGTRQYKFDPKTKRILTLQKANSWFNCRKN

SEQ ID NO: 1722 - protein, 450 aa, Artificial Sequence
  MMP-1 variant S134M
FPATLETQEQDVDLVQKYLEKYYNLKNDGRQVEKRRNSGPVVEKLKQMQEFFGLKVTGKPDAETLKVMKQPRCGVPDVAQFVLTEGNPRWEQTHLTYRIENYTPDLPRADVDHAIEKAFQLWSNVTPLTFTKVMEGQADIMISFVRGDHRDNSPFDGPGGNLAHAFQPGPGIGGDAHFDEDERWTNNFREYNLHRVAAHELGHSLGLSHSTDIGALMYPSYTFSGDVQLAQDDIDGIQAIYGRSQNPVQPIGPQTPKACDSKLTFDAITTIRGEVMFFKDRFYMRTNPFYPEVELNFISVFWPQLPNGLEAAYEFADRDEVRFFKGNKYWAVQGQNVLHGYPKDIYSSFGFPRTVKHIDAALSEENTGKTYFFVANKYWRYDEYKRSMDPGYPKMIAHDFPGIGHKVDAVFMKDGFFYFFHGTRQYKFDPKTKRILTLQKANSWFNCRKN

SEQ ID NO: 1723 - protein, 450 aa, Artificial Sequence
  MMP-1 variant S134W
FPATLETQEQDVDLVQKYLEKYYNLKNDGRQVEKRRNSGPVVEKLKQMQEFFGLKVTGKPDAETLKVMKQPRCGVPDVAQFVLTEGNPRWEQTHLTYRIENYTPDLPRADVDHAIEKAFQLWSNVTPLTFTKVWEGQADIMISFVRGDHRDNSPFDGPGGNLAHAFQPGPGIGGDAHFDEDERWTNNFREYNLHRVAAHELGHSLGLSHSTDIGALMYPSYTFSGDVQLAQDDIDGIQAIYGRSQNPVQPIGPQTPKACDSKLTFDAITTIRGEVMFFKDRFYMRTNPFYPEVELNFISVFWPQLPNGLEAAYEFADRDEVRFFKGNKYWAVQGQNVLHGYPKDIYSSFGFPRTVKHIDAALSEENTGKTYFFVANKYWRYDEYKRSMDPGYPKMIAHDFPGIGHKVDAVFMKDGFFYFFHGTRQYKFDPKTKRILTLQKANSWFNCRKN

SEQ ID NO: 1724 - protein, 450 aa, Artificial Sequence
  MMP-1 variant S134I
FPATLETQEQDVDLVQKYLEKYYNLKNDGRQVEKRRNSGPVVEKLKQMQEFFGLKVTGKPDAETLKVMKQPRCGVPDVAQFVLTEGNPRWEQTHLTYRIENYTPDLPRADVDHAIEKAFQLWSNVTPLTFTKVIEGQADIMISFVRGDHRDNSPFDGPGGNLAHAFQPGPGIGGDAHFDEDERWTNNFREYNLHRVAAHELGHSLGLSHSTDIGALMYPSYTFSGDVQLAQDDIDGIQAIYGRSQNPVQPIGPQTPKACDSKLTFDAITTIRGEVMFFKDRFYMRTNPFYPEVELNFISVFWPQLPNGLEAAYEFADRDEVRFFKGNKYWAVQGQNVLHGYPKDIYSSFGFPRTVKHIDAALSEENTGKTYFFVANKYWRYDEYKRSMDPGYPKMIAHDFPGIGHKVDAVFMKDGFFYFFHGTRQYKFDPKTKRILTLQKANSWFNCRKN

SEQ ID NO: 1725 - protein, 450 aa, Artificial Sequence
  MMP-1 variant S134V
FPATLETQEQDVDLVQKYLEKYYNLKNDGRQVEKRRNSGPVVEKLKQMQEFFGLKVTGKPDAETLKVMKQPRCGVPDVAQFVLTEGNPRWEQTHLTYRIENYTPDLPRADVDHAIEKAFQLWSNVTPLTFTKVVEGQADIMISFVRGDHRDNSPFDGPGGNLAHAFQPGPGIGGDAHFDEDERWTNNFREYNLHRVAAHELGHSLGLSHSTDIGALMYPSYTFSGDVQLAQDDIDGIQAIYGRSQNPVQPIGPQTPKACDSKLTFDAITTIRGEVMFFKDRFYMRTNPFYPEVELNFISVFWPQLPNGLEAAYEFADRDEVRFFKGNKYWAVQGQNVLHGYPKDIYSSFGFPRTVKHIDAALSEENTGKTYFFVANKYWRYDEYKRSMDPGYPKMIAHDFPGIGHKVDAVFMKDGFFYFFHGTRQYKFDPKTKRILTLQKANSWFNCRKN

SEQ ID NO: 1726 - protein, 450 aa, Artificial Sequence
  MMP-1 variant S134L
FPATLETQEQDVDLVQKYLEKYYNLKNDGRQVEKRRNSGPVVEKLKQMQEFFGLKVTGKPDAETLKVMKQPRCGVPDVAQFVLTEGNPRWEQTHLTYRIENYTPDLPRADVDHAIEKAFQLWSNVTPLTFTKVLEGQADIMISFVRGDHRDNSPFDGPGGNLAHAFQPGPGIGGDAHFDEDERWTNNFREYNLHRVAAHELGHSLGLSHSTDIGALMYPSYTFSGDVQLAQDDIDGIQAIYGRSQNPVQPIGPQTPKACDSKLTFDAITTIRGEVMFFKDRFYMRTNPFYPEVELNFISVFWPQLPNGLEAAYEFADRDEVRFFKGNKYWAVQGQNVLHGYPKDIYSSFGFPRTVKHIDAALSEENTGKTYFFVANKYWRYDEYKRSMDPGYPKMIAHDFPGIGHKVDAVFMKDGFFYFFHGTRQYKFDPKTKRILTLQKANSWFNCRKN

SEQ ID NO: 1727 - protein, 450 aa, Artificial Sequence
  MMP-1 variant S134A
FPATLETQEQDVDLVQKYLEKYYNLKNDGRQVEKRRNSGPVVEKLKQMQEFFGLKVTGKPDAETLKVMKQPRCGVPDVAQFVLTEGNPRWEQTHLTYRIENYTPDLPRADVDHAIEKAFQLWSNVTPLTFTKVAEGQADIMISFVRGDHRDNSPFDGPGGNLAHAFQPGPGIGGDAHFDEDERWTNNFREYNLHRVAAHELGHSLGLSHSTDIGALMYPSYTFSGDVQLAQDDIDGIQAIYGRSQNPVQPIGPQTPKACDSKLTFDAITTIRGEVMFFKDRFYMRTNPFYPEVELNFISVFWPQLPNGLEAAYEFADRDEVRFFKGNKYWAVQGQNVLHGYPKDIYSSFGFPRTVKHIDAALSEENTGKTYFFVANKYWRYDEYKRSMDPGYPKMIAHDFPGIGHKVDAVFMKDGFFYFFHGTRQYKFDPKTKRILTLQKANSWFNCRKN

SEQ ID NO: 1728 - protein, 450 aa, Artificial Sequence
  MMP-1 variant S134P
FPATLETQEQDVDLVQKYLEKYYNLKNDGRQVEKRRNSGPVVEKLKQMQEFFGLKVTGKPDAETLKVMKQPRCGVPDVAQFVLTEGNPRWEQTHLTYRIENYTPDLPRADVDHAIEKAFQLWSNVTPLTFTKVPEGQADIMISFVRGDHRDNSPFDGPGGNLAHAFQPGPGIGGDAHFDEDERWTNNFREYNLHRVAAHELGHSLGLSHSTDIGALMYPSYTFSGDVQLAQDDIDGIQAIYGRSQNPVQPIGPQTPKACDSKLTFDAITTIRGEVMFFKDRFYMRTNPFYPEVELNFISVFWPQLPNGLEAAYEFADRDEVRFFKGNKYWAVQGQNVLHGYPKDIYSSFGFPRTVKHIDAALSEENTGKTYFFVANKYWRYDEYKRSMDPGYPKMIAHDFPGIGHKVDAVFMKDGFFYFFHGTRQYKFDPKTKRILTLQKANSWFNCRKN

SEQ ID NO: 1729 - protein, 450 aa, Artificial Sequence
  MMP-1 variant E135D
FPATLETQEQDVDLVQKYLEKYYNLKNDGRQVEKRRNSGPVVEKLKQMQEFFGLKVTGKPDAETLKVMKQPRCGVPDVAQFVLTEGNPRWEQTHLTYRIENYTPDLPRADVDHAIEKAFQLWSNVTPLTFTKVSDGQADIMISFVRGDHRDNSPFDGPGGNLAHAFQPGPGIGGDAHFDEDERWTNNFREYNLHRVAAHELGHSLGLSHSTDIGALMYPSYTFSGDVQLAQDDIDGIQAIYGRSQNPVQPIGPQTPKACDSKLTFDAITTIRGEVMFFKDRFYMRTNPFYPEVELNFISVFWPQLPNGLEAAYEFADRDEVRFFKGNKYWAVQGQNVLHGYPKDIYSSFGFPRTVKHIDAALSEENTGKTYFFVANKYWRYDEYKRSMDPGYPKMIAHDFPGIGHKVDAVFMKDGFFYFFHGTRQYKFDPKTKRILTLQKANSWFNCRKN

SEQ ID NO: 1730 - protein, 450 aa, Artificial Sequence
  MMP-1 variant E135H
FPATLETQEQDVDLVQKYLEKYYNLKNDGRQVEKRRNSGPVVEKLKQMQEFFGLKVTGKPDAETLKVMKQPRCGVPDVAQFVLTEGNPRWEQTHLTYRIENYTPDLPRADVDHAIEKAFQLWSNVTPLTFTKVSHGQADIMISFVRGDHRDNSPFDGPGGNLAHAFQPGPGIGGDAHFDEDERWTNNFREYNLHRVAAHELGHSLGLSHSTDIGALMYPSYTFSGDVQLAQDDIDGIQAIYGRSQNPVQPIGPQTPKACDSKLTFDAITTIRGEVMFFKDRFYMRTNPFYPEVELNFISVFWPQLPNGLEAAYEFADRDEVRFFKGNKYWAVQGQNVLHGYPKDIYSSFGFPRTVKHIDAALSEENTGKTYFFVANKYWRYDEYKRSMDPGYPKMIAHDFPGIGHKVDAVFMKDGFFYFFHGTRQYKFDPKTKRILTLQKANSWFNCRKN

SEQ ID NO: 1731 - protein, 450 aa, Artificial Sequence
  MMP-1 variant E135K
FPATLETQEQDVDLVQKYLEKYYNLKNDGRQVEKRRNSGPVVEKLKQMQEFFGLKVTGKPDAETLKVMKQPRCGVPDVAQFVLTEGNPRWEQTHLTYRIENYTPDLPRADVDHAIEKAFQLWSNVTPLTFTKVSKGQADIMISFVRGDHRDNSPFDGPGGNLAHAFQPGPGIGGDAHFDEDERWTNNFREYNLHRVAAHELGHSLGLSHSTDIGALMYPSYTFSGDVQLAQDDIDGIQAIYGRSQNPVQPIGPQTPKACDSKLTFDAITTIRGEVMFFKDRFYMRTNPFYPEVELNFISVFWPQLPNGLEAAYEFADRDEVRFFKGNKYWAVQGQNVLHGYPKDIYSSFGFPRTVKHIDAALSEENTGKTYFFVANKYWRYDEYKRSMDPGYPKMIAHDFPGIGHKVDAVFMKDGFFYFFHGTRQYKFDPKTKRILTLQKANSWFNCRKN

SEQ ID NO: 1732 - protein, 450 aa, Artificial Sequence
  MMP-1 variant E135R
FPATLETQEQDVDLVQKYLEKYYNLKNDGRQVEKRRNSGPVVEKLKQMQEFFGLKVTGKPDAETLKVMKQPRCGVPDVAQFVLTEGNPRWEQTHLTYRIENYTPDLPRADVDHAIEKAFQLWSNVTPLTFTKVSRGQADIMISFVRGDHRDNSPFDGPGGNLAHAFQPGPGIGGDAHFDEDERWTNNFREYNLHRVAAHELGHSLGLSHSTDIGALMYPSYTFSGDVQLAQDDIDGIQAIYGRSQNPVQPIGPQTPKACDSKLTFDAITTIRGEVMFFKDRFYMRTNPFYPEVELNFISVFWPQLPNGLEAAYEFADRDEVRFFKGNKYWAVQGQNVLHGYPKDIYSSFGFPRTVKHIDAALSEENTGKTYFFVANKYWRYDEYKRSMDPGYPKMIAHDFPGIGHKVDAVFMKDGFFYFFHGTRQYKFDPKTKRILTLQKANSWFNCRKN

SEQ ID NO: 1733 - protein, 450 aa, Artificial Sequence
  MMP-1 variant E135C
FPATLETQEQDVDLVQKYLEKYYNLKNDGRQVEKRRNSGPVVEKLKQMQEFFGLKVTGKPDAETLKVMKQPRCGVPDVAQFVLTEGNPRWEQTHLTYRIENYTPDLPRADVDHAIEKAFQLWSNVTPLTFTKVSCGQADIMISFVRGDHRDNSPFDGPGGNLAHAFQPGPGIGGDAHFDEDERWTNNFREYNLHRVAAHELGHSLGLSHSTDIGALMYPSYTFSGDVQLAQDDIDGIQAIYGRSQNPVQPIGPQTPKACDSKLTFDAITTIRGEVMFFKDRFYMRTNPFYPEVELNFISVFWPQLPNGLEAAYEFADRDEVRFFKGNKYWAVQGQNVLHGYPKDIYSSFGFPRTVKHIDAALSEENTGKTYFFVANKYWRYDEYKRSMDPGYPKMIAHDFPGIGHKVDAVFMKDGFFYFFHGTRQYKFDPKTKRILTLQKANSWFNCRKN

SEQ ID NO: 1734 - protein, 450 aa, Artificial Sequence
  MMP-1 variant E135N
FPATLETQEQDVDLVQKYLEKYYNLKNDGRQVEKRRNSGPVVEKLKQMQEFFGLKVTGKPDAETLKVMKQPRCGVPDVAQFVLTEGNPRWEQTHLTYRIENYTPDLPRADVDHAIEKAFQLWSNVTPLTFTKVSNGQADIMISFVRGDHRDNSPFDGPGGNLAHAFQPGPGIGGDAHFDEDERWTNNFREYNLHRVAAHELGHSLGLSHSTDIGALMYPSYTFSGDVQLAQDDIDGIQAIYGRSQNPVQPIGPQTPKACDSKLTFDAITTIRGEVMFFKDRFYMRTNPFYPEVELNFISVFWPQLPNGLEAAYEFADRDEVRFFKGNKYWAVQGQNVLHGYPKDIYSSFGFPRTVKHIDAALSEENTGKTYFFVANKYWRYDEYKRSMDPGYPKMIAHDFPGIGHKVDAVFMKDGFFYFFHGTRQYKFDPKTKRILTLQKANSWFNCRKN

SEQ ID NO: 1735 - protein, 450 aa, Artificial Sequence
  MMP-1 variant E135Q
FPATLETQEQDVDLVQKYLEKYYNLKNDGRQVEKRRNSGPVVEKLKQMQEFFGLKVTGKPDAETLKVMKQPRCGVPDVAQFVLTEGNPRWEQTHLTYRIENYTPDLPRADVDHAIEKAFQLWSNVTPLTFTKVSQGQADIMISFVRGDHRDNSPFDGPGGNLAHAFQPGPGIGGDAHFDEDERWTNNFREYNLHRVAAHELGHSLGLSHSTDIGALMYPSYTFSGDVQLAQDDIDGIQAIYGRSQNPVQPIGPQTPKACDSKLTFDAITTIRGEVMFFKDRFYMRTNPFYPEVELNFISVFWPQLPNGLEAAYEFADRDEVRFFKGNKYWAVQGQNVLHGYPKDIYSSFGFPRTVKHIDAALSEENTGKTYFFVANKYWRYDEYKRSMDPGYPKMIAHDFPGIGHKVDAVFMKDGFFYFFHGTRQYKFDPKTKRILTLQKANSWFNCRKN

SEQ ID NO: 1736 - protein, 450 aa, Artificial Sequence
  MMP-1 variant E135T
FPATLETQEQDVDLVQKYLEKYYNLKNDGRQVEKRRNSGPVVEKLKQMQEFFGLKVTGKPDAETLKVMKQPRCGVPDVAQFVLTEGNPRWEQTHLTYRIENYTPDLPRADVDHAIEKAFQLWSNVTPLTFTKVSTGQADIMISFVRGDHRDNSPFDGPGGNLAHAFQPGPGIGGDAHFDEDERWTNNFREYNLHRVAAHELGHSLGLSHSTDIGALMYPSYTFSGDVQLAQDDIDGIQAIYGRSQNPVQPIGPQTPKACDSKLTFDAITTIRGEVMFFKDRFYMRTNPFYPEVELNFISVFWPQLPNGLEAAYEFADRDEVRFFKGNKYWAVQGQNVLHGYPKDIYSSFGFPRTVKHIDAALSEENTGKTYFFVANKYWRYDEYKRSMDPGYPKMIAHDFPGIGHKVDAVFMKDGFFYFFHGTRQYKFDPKTKRILTLQKANSWFNCRKN

SEQ ID NO: 1737 - protein, 450 aa, Artificial Sequence
  MMP-1 variant E135Y
FPATLETQEQDVDLVQKYLEKYYNLKNDGRQVEKRRNSGPVVEKLKQMQEFFGLKVTGKPDAETLKVMKQPRCGVPDVAQFVLTEGNPRWEQTHLTYRIENYTPDLPRADVDHAIEKAFQLWSNVTPLTFTKVSYGQADIMISFVRGDHRDNSPFDGPGGNLAHAFQPGPGIGGDAHFDEDERWTNNFREYNLHRVAAHELGHSLGLSHSTDIGALMYPSYTFSGDVQLAQDDIDGIQAIYGRSQNPVQPIGPQTPKACDSKLTFDAITTIRGEVMFFKDRFYMRTNPFYPEVELNFISVFWPQLPNGLEAAYEFADRDEVRFFKGNKYWAVQGQNVLHGYPKDIYSSFGFPRTVKHIDAALSEENTGKTYFFVANKYWRYDEYKRSMDPGYPKMIAHDFPGIGHKVDAVFMKDGFFYFFHGTRQYKFDPKTKRILTLQKANSWFNCRKN

SEQ ID NO: 1738 - protein, 450 aa, Artificial Sequence
  MMP-1 variant E135S
FPATLETQEQDVDLVQKYLEKYYNLKNDGRQVEKRRNSGPVVEKLKQMQEFFGLKVTGKPDAETLKVMKQPRCGVPDVAQFVLTEGNPRWEQTHLTYRIENYTPDLPRADVDHAIEKAFQLWSNVTPLTFTKVSSGQADIMISFVRGDHRDNSPFDGPGGNLAHAFQPGPGIGGDAHFDEDERWTNNFREYNLHRVAAHELGHSLGLSHSTDIGALMYPSYTFSGDVQLAQDDIDGIQAIYGRSQNPVQPIGPQTPKACDSKLTFDAITTIRGEVMFFKDRFYMRTNPFYPEVELNFISVFWPQLPNGLEAAYEFADRDEVRFFKGNKYWAVQGQNVLHGYPKDIYSSFGFPRTVKHIDAALSEENTGKTYFFVANKYWRYDEYKRSMDPGYPKMIAHDFPGIGHKVDAVFMKDGFFYFFHGTRQYKFDPKTKRILTLQKANSWFNCRKN

SEQ ID NO: 1739 - protein, 450 aa, Artificial Sequence
  MMP-1 variant E135G
FPATLETQEQDVDLVQKYLEKYYNLKNDGRQVEKRRNSGPVVEKLKQMQEFFGLKVTGKPDAETLKVMKQPRCGVPDVAQFVLTEGNPRWEQTHLTYRIENYTPDLPRADVDHAIEKAFQLWSNVTPLTFTKVSGGQADIMISFVRGDHRDNSPFDGPGGNLAHAFQPGPGIGGDAHFDEDERWTNNFREYNLHRVAAHELGHSLGLSHSTDIGALMYPSYTFSGDVQLAQDDIDGIQAIYGRSQNPVQPIGPQTPKACDSKLTFDAITTIRGEVMFFKDRFYMRTNPFYPEVELNFISVFWPQLPNGLEAAYEFADRDEVRFFKGNKYWAVQGQNVLHGYPKDIYSSFGFPRTVKHIDAALSEENTGKTYFFVANKYWRYDEYKRSMDPGYPKMIAHDFPGIGHKVDAVFMKDGFFYFFHGTRQYKFDPKTKRILTLQKANSWFNCRKN

SEQ ID NO: 1740 - protein, 450 aa, Artificial Sequence
  MMP-1 variant E135F
FPATLETQEQDVDLVQKYLEKYYNLKNDGRQVEKRRNSGPVVEKLKQMQEFFGLKVTGKPDAETLKVMKQPRCGVPDVAQFVLTEGNPRWEQTHLTYRIENYTPDLPRADVDHAIEKAFQLWSNVTPLTFTKVSFGQADIMISFVRGDHRDNSPFDGPGGNLAHAFQPGPGIGGDAHFDEDERWTNNFREYNLHRVAAHELGHSLGLSHSTDIGALMYPSYTFSGDVQLAQDDIDGIQAIYGRSQNPVQPIGPQTPKACDSKLTFDAITTIRGEVMFFKDRFYMRTNPFYPEVELNFISVFWPQLPNGLEAAYEFADRDEVRFFKGNKYWAVQGQNVLHGYPKDIYSSFGFPRTVKHIDAALSEENTGKTYFFVANKYWRYDEYKRSMDPGYPKMIAHDFPGIGHKVDAVFMKDGFFYFFHGTRQYKFDPKTKRILTLQKANSWFNCRKN

SEQ ID NO: 1741 - protein, 450 aa, Artificial Sequence
  MMP-1 variant E135M
FPATLETQEQDVDLVQKYLEKYYNLKNDGRQVEKRRNSGPVVEKLKQMQEFFGLKVTGKPDAETLKVMKQPRCGVPDVAQFVLTEGNPRWEQTHLTYRIENYTPDLPRADVDHAIEKAFQLWSNVTPLTFTKVSMGQADIMISFVRGDHRDNSPFDGPGGNLAHAFQPGPGIGGDAHFDEDERWTNNFREYNLHRVAAHELGHSLGLSHSTDIGALMYPSYTFSGDVQLAQDDIDGIQAIYGRSQNPVQPIGPQTPKACDSKLTFDAITTIRGEVMFFKDRFYMRTNPFYPEVELNFISVFWPQLPNGLEAAYEFADRDEVRFFKGNKYWAVQGQNVLHGYPKDIYSSFGFPRTVKHIDAALSEENTGKTYFFVANKYWRYDEYKRSMDPGYPKMIAHDFPGIGHKVDAVFMKDGFFYFFHGTRQYKFDPKTKRILTLQKANSWFNCRKN

SEQ ID NO: 1742 - protein, 450 aa, Artificial Sequence
  MMP-1 variant E135W
FPATLETQEQDVDLVQKYLEKYYNLKNDGRQVEKRRNSGPVVEKLKQMQEFFGLKVTGKPDAETLKVMKQPRCGVPDVAQFVLTEGNPRWEQTHLTYRIENYTPDLPRADVDHAIEKAFQLWSNVTPLTFTKVSWGQADIMISFVRGDHRDNSPFDGPGGNLAHAFQPGPGIGGDAHFDEDERWTNNFREYNLHRVAAHELGHSLGLSHSTDIGALMYPSYTFSGDVQLAQDDIDGIQAIYGRSQNPVQPIGPQTPKACDSKLTFDAITTIRGEVMFFKDRFYMRTNPFYPEVELNFISVFWPQLPNGLEAAYEFADRDEVRFFKGNKYWAVQGQNVLHGYPKDIYSSFGFPRTVKHIDAALSEENTGKTYFFVANKYWRYDEYKRSMDPGYPKMIAHDFPGIGHKVDAVFMKDGFFYFFHGTRQYKFDPKTKRILTLQKANSWFNCRKN

SEQ ID NO: 1743 - protein, 450 aa, Artificial Sequence
  MMP-1 variant E135I
FPATLETQEQDVDLVQKYLEKYYNLKNDGRQVEKRRNSGPVVEKLKQMQEFFGLKVTGKPDAETLKVMKQPRCGVPDVAQFVLTEGNPRWEQTHLTYRIENYTPDLPRADVDHAIEKAFQLWSNVTPLTFTKVSIGQADIMISFVRGDHRDNSPFDGPGGNLAHAFQPGPGIGGDAHFDEDERWTNNFREYNLHRVAAHELGHSLGLSHSTDIGALMYPSYTFSGDVQLAQDDIDGIQAIYGRSQNPVQPIGPQTPKACDSKLTFDAITTIRGEVMFFKDRFYMRTNPFYPEVELNFISVFWPQLPNGLEAAYEFADRDEVRFFKGNKYWAVQGQNVLHGYPKDIYSSFGFPRTVKHIDAALSEENTGKTYFFVANKYWRYDEYKRSMDPGYPKMIAHDFPGIGHKVDAVFMKDGFFYFFHGTRQYKFDPKTKRILTLQKANSWFNCRKN

SEQ ID NO: 1744 - protein, 450 aa, Artificial Sequence
  MMP-1 variant E135V
FPATLETQEQDVDLVQKYLEKYYNLKNDGRQVEKRRNSGPVVEKLKQMQEFFGLKVTGKPDAETLKVMKQPRCGVPDVAQFVLTEGNPRWEQTHLTYRIENYTPDLPRADVDHAIEKAFQLWSNVTPLTFTKVSVGQADIMISFVRGDHRDNSPFDGPGGNLAHAFQPGPGIGGDAHFDEDERWTNNFREYNLHRVAAHELGHSLGLSHSTDIGALMYPSYTFSGDVQLAQDDIDGIQAIYGRSQNPVQPIGPQTPKACDSKLTFDAITTIRGEVMFFKDRFYMRTNPFYPEVELNFISVFWPQLPNGLEAAYEFADRDEVRFFKGNKYWAVQGQNVLHGYPKDIYSSFGFPRTVKHIDAALSEENTGKTYFFVANKYWRYDEYKRSMDPGYPKMIAHDFPGIGHKVDAVFMKDGFFYFFHGTRQYKFDPKTKRILTLQKANSWFNCRKN

SEQ ID NO: 1745 - protein, 450 aa, Artificial Sequence
  MMP-1 variant E135L
FPATLETQEQDVDLVQKYLEKYYNLKNDGRQVEKRRNSGPVVEKLKQMQEFFGLKVTGKPDAETLKVMKQPRCGVPDVAQFVLTEGNPRWEQTHLTYRIENYTPDLPRADVDHAIEKAFQLWSNVTPLTFTKVSLGQADIMISFVRGDHRDNSPFDGPGGNLAHAFQPGPGIGGDAHFDEDERWTNNFREYNLHRVAAHELGHSLGLSHSTDIGALMYPSYTFSGDVQLAQDDIDGIQAIYGRSQNPVQPIGPQTPKACDSKLTFDAITTIRGEVMFFKDRFYMRTNPFYPEVELNFISVFWPQLPNGLEAAYEFADRDEVRFFKGNKYWAVQGQNVLHGYPKDIYSSFGFPRTVKHIDAALSEENTGKTYFFVANKYWRYDEYKRSMDPGYPKMIAHDFPGIGHKVDAVFMKDGFFYFFHGTRQYKFDPKTKRILTLQKANSWFNCRKN

SEQ ID NO: 1746 - protein, 450 aa, Artificial Sequence
  MMP-1 variant E135A
FPATLETQEQDVDLVQKYLEKYYNLKNDGRQVEKRRNSGPVVEKLKQMQEFFGLKVTGKPDAETLKVMKQPRCGVPDVAQFVLTEGNPRWEQTHLTYRIENYTPDLPRADVDHAIEKAFQLWSNVTPLTFTKVSAGQADIMISFVRGDHRDNSPFDGPGGNLAHAFQPGPGIGGDAHFDEDERWTNNFREYNLHRVAAHELGHSLGLSHSTDIGALMYPSYTFSGDVQLAQDDIDGIQAIYGRSQNPVQPIGPQTPKACDSKLTFDAITTIRGEVMFFKDRFYMRTNPFYPEVELNFISVFWPQLPNGLEAAYEFADRDEVRFFKGNKYWAVQGQNVLHGYPKDIYSSFGFPRTVKHIDAALSEENTGKTYFFVANKYWRYDEYKRSMDPGYPKMIAHDFPGIGHKVDAVFMKDGFFYFFHGTRQYKFDPKTKRILTLQKANSWFNCRKN

SEQ ID NO: 1747 - protein, 450 aa, Artificial Sequence
  MMP-1 variant E135P
FPATLETQEQDVDLVQKYLEKYYNLKNDGRQVEKRRNSGPVVEKLKQMQEFFGLKVTGKPDAETLKVMKQPRCGVPDVAQFVLTEGNPRWEQTHLTYRIENYTPDLPRADVDHAIEKAFQLWSNVTPLTFTKVSPGQADIMISFVRGDHRDNSPFDGPGGNLAHAFQPGPGIGGDAHFDEDERWTNNFREYNLHRVAAHELGHSLGLSHSTDIGALMYPSYTFSGDVQLAQDDIDGIQAIYGRSQNPVQPIGPQTPKACDSKLTFDAITTIRGEVMFFKDRFYMRTNPFYPEVELNFISVFWPQLPNGLEAAYEFADRDEVRFFKGNKYWAVQGQNVLHGYPKDIYSSFGFPRTVKHIDAALSEENTGKTYFFVANKYWRYDEYKRSMDPGYPKMIAHDFPGIGHKVDAVFMKDGFFYFFHGTRQYKFDPKTKRILTLQKANSWFNCRKN

SEQ ID NO: 1748 - protein, 450 aa, Artificial Sequence
  MMP-1 variant G136D
FPATLETQEQDVDLVQKYLEKYYNLKNDGRQVEKRRNSGPVVEKLKQMQEFFGLKVTGKPDAETLKVMKQPRCGVPDVAQFVLTEGNPRWEQTHLTYRIENYTPDLPRADVDHAIEKAFQLWSNVTPLTFTKVSEDQADIMISFVRGDHRDNSPFDGPGGNLAHAFQPGPGIGGDAHFDEDERWTNNFREYNLHRVAAHELGHSLGLSHSTDIGALMYPSYTFSGDVQLAQDDIDGIQAIYGRSQNPVQPIGPQTPKACDSKLTFDAITTIRGEVMFFKDRFYMRTNPFYPEVELNFISVFWPQLPNGLEAAYEFADRDEVRFFKGNKYWAVQGQNVLHGYPKDIYSSFGFPRTVKHIDAALSEENTGKTYFFVANKYWRYDEYKRSMDPGYPKMIAHDFPGIGHKVDAVFMKDGFFYFFHGTRQYKFDPKTKRILTLQKANSWFNCRKN

SEQ ID NO: 1749 - protein, 450 aa, Artificial Sequence
  MMP-1 variant G136E
FPATLETQEQDVDLVQKYLEKYYNLKNDGRQVEKRRNSGPVVEKLKQMQEFFGLKVTGKPDAETLKVMKQPRCGVPDVAQFVLTEGNPRWEQTHLTYRIENYTPDLPRADVDHAIEKAFQLWSNVTPLTFTKVSEEQADIMISFVRGDHRDNSPFDGPGGNLAHAFQPGPGIGGDAHFDEDERWTNNFREYNLHRVAAHELGHSLGLSHSTDIGALMYPSYTFSGDVQLAQDDIDGIQAIYGRSQNPVQPIGPQTPKACDSKLTFDAITTIRGEVMFFKDRFYMRTNPFYPEVELNFISVFWPQLPNGLEAAYEFADRDEVRFFKGNKYWAVQGQNVLHGYPKDIYSSFGFPRTVKHIDAALSEENTGKTYFFVANKYWRYDEYKRSMDPGYPKMIAHDFPGIGHKVDAVFMKDGFFYFFHGTRQYKFDPKTKRILTLQKANSWFNCRKN

SEQ ID NO: 1750 - protein, 450 aa, Artificial Sequence
  MMP-1 variant G136H
FPATLETQEQDVDLVQKYLEKYYNLKNDGRQVEKRRNSGPVVEKLKQMQEFFGLKVTGKPDAETLKVMKQPRCGVPDVAQFVLTEGNPRWEQTHLTYRIENYTPDLPRADVDHAIEKAFQLWSNVTPLTFTKVSEHQADIMISFVRGDHRDNSPFDGPGGNLAHAFQPGPGIGGDAHFDEDERWTNNFREYNLHRVAAHELGHSLGLSHSTDIGALMYPSYTFSGDVQLAQDDIDGIQAIYGRSQNPVQPIGPQTPKACDSKLTFDAITTIRGEVMFFKDRFYMRTNPFYPEVELNFISVFWPQLPNGLEAAYEFADRDEVRFFKGNKYWAVQGQNVLHGYPKDIYSSFGFPRTVKHIDAALSEENTGKTYFFVANKYWRYDEYKRSMDPGYPKMIAHDFPGIGHKVDAVFMKDGFFYFFHGTRQYKFDPKTKRILTLQKANSWFNCRKN

SEQ ID NO: 1751 - protein, 450 aa, Artificial Sequence
  MMP-1 variant G136K
FPATLETQEQDVDLVQKYLEKYYNLKNDGRQVEKRRNSGPVVEKLKQMQEFFGLKVTGKPDAETLKVMKQPRCGVPDVAQFVLTEGNPRWEQTHLTYRIENYTPDLPRADVDHAIEKAFQLWSNVTPLTFTKVSEKQADIMISFVRGDHRDNSPFDGPGGNLAHAFQPGPGIGGDAHFDEDERWTNNFREYNLHRVAAHELGHSLGLSHSTDIGALMYPSYTFSGDVQLAQDDIDGIQAIYGRSQNPVQPIGPQTPKACDSKLTFDAITTIRGEVMFFKDRFYMRTNPFYPEVELNFISVFWPQLPNGLEAAYEFADRDEVRFFKGNKYWAVQGQNVLHGYPKDIYSSFGFPRTVKHIDAALSEENTGKTYFFVANKYWRYDEYKRSMDPGYPKMIAHDFPGIGHKVDAVFMKDGFFYFFHGTRQYKFDPKTKRILTLQKANSWFNCRKN

SEQ ID NO: 1752 - protein, 450 aa, Artificial Sequence
  MMP-1 variant G136R
FPATLETQEQDVDLVQKYLEKYYNLKNDGRQVEKRRNSGPVVEKLKQMQEFFGLKVTGKPDAETLKVMKQPRCGVPDVAQFVLTEGNPRWEQTHLTYRIENYTPDLPRADVDHAIEKAFQLWSNVTPLTFTKVSERQADIMISFVRGDHRDNSPFDGPGGNLAHAFQPGPGIGGDAHFDEDERWTNNFREYNLHRVAAHELGHSLGLSHSTDIGALMYPSYTFSGDVQLAQDDIDGIQAIYGRSQNPVQPIGPQTPKACDSKLTFDAITTIRGEVMFFKDRFYMRTNPFYPEVELNFISVFWPQLPNGLEAAYEFADRDEVRFFKGNKYWAVQGQNVLHGYPKDIYSSFGFPRTVKHIDAALSEENTGKTYFFVANKYWRYDEYKRSMDPGYPKMIAHDFPGIGHKVDAVFMKDGFFYFFHGTRQYKFDPKTKRILTLQKANSWFNCRKN

SEQ ID NO: 1753 - protein, 450 aa, Artificial Sequence
  MMP-1 variant G136C
FPATLETQEQDVDLVQKYLEKYYNLKNDGRQVEKRRNSGPVVEKLKQMQEFFGLKVTGKPDAETLKVMKQPRCGVPDVAQFVLTEGNPRWEQTHLTYRIENYTPDLPRADVDHAIEKAFQLWSNVTPLTFTKVSECQADIMISFVRGDHRDNSPFDGPGGNLAHAFQPGPGIGGDAHFDEDERWTNNFREYNLHRVAAHELGHSLGLSHSTDIGALMYPSYTFSGDVQLAQDDIDGIQAIYGRSQNPVQPIGPQTPKACDSKLTFDAITTIRGEVMFFKDRFYMRTNPFYPEVELNFISVFWPQLPNGLEAAYEFADRDEVRFFKGNKYWAVQGQNVLHGYPKDIYSSFGFPRTVKHIDAALSEENTGKTYFFVANKYWRYDEYKRSMDPGYPKMIAHDFPGIGHKVDAVFMKDGFFYFFHGTRQYKFDPKTKRILTLQKANSWFNCRKN

SEQ ID NO: 1754 - protein, 450 aa, Artificial Sequence
  MMP-1 variant G136N
FPATLETQEQDVDLVQKYLEKYYNLKNDGRQVEKRRNSGPVVEKLKQMQEFFGLKVTGKPDAETLKVMKQPRCGVPDVAQFVLTEGNPRWEQTHLTYRIENYTPDLPRADVDHAIEKAFQLWSNVTPLTFTKVSENQADIMISFVRGDHRDNSPFDGPGGNLAHAFQPGPGIGGDAHFDEDERWTNNFREYNLHRVAAHELGHSLGLSHSTDIGALMYPSYTFSGDVQLAQDDIDGIQAIYGRSQNPVQPIGPQTPKACDSKLTFDAITTIRGEVMFFKDRFYMRTNPFYPEVELNFISVFWPQLPNGLEAAYEFADRDEVRFFKGNKYWAVQGQNVLHGYPKDIYSSFGFPRTVKHIDAALSEENTGKTYFFVANKYWRYDEYKRSMDPGYPKMIAHDFPGIGHKVDAVFMKDGFFYFFHGTRQYKFDPKTKRILTLQKANSWFNCRKN

SEQ ID NO: 1755 - protein, 450 aa, Artificial Sequence
  MMP-1 variant G136Q
FPATLETQEQDVDLVQKYLEKYYNLKNDGRQVEKRRNSGPVVEKLKQMQEFFGLKVTGKPDAETLKVMKQPRCGVPDVAQFVLTEGNPRWEQTHLTYRIENYTPDLPRADVDHAIEKAFQLWSNVTPLTFTKVSEQQADIMISFVRGDHRDNSPFDGPGGNLAHAFQPGPGIGGDAHFDEDERWTNNFREYNLHRVAAHELGHSLGLSHSTDIGALMYPSYTFSGDVQLAQDDIDGIQAIYGRSQNPVQPIGPQTPKACDSKLTFDAITTIRGEVMFFKDRFYMRTNPFYPEVELNFISVFWPQLPNGLEAAYEFADRDEVRFFKGNKYWAVQGQNVLHGYPKDIYSSFGFPRTVKHIDAALSEENTGKTYFFVANKYWRYDEYKRSMDPGYPKMIAHDFPGIGHKVDAVFMKDGFFYFFHGTRQYKFDPKTKRILTLQKANSWFNCRKN

SEQ ID NO: 1756 - protein, 450 aa, Artificial Sequence
  MMP-1 variant G136T
FPATLETQEQDVDLVQKYLEKYYNLKNDGRQVEKRRNSGPVVEKLKQMQEFFGLKVTGKPDAETLKVMKQPRCGVPDVAQFVLTEGNPRWEQTHLTYRIENYTPDLPRADVDHAIEKAFQLWSNVTPLTFTKVSETQADIMISFVRGDHRDNSPFDGPGGNLAHAFQPGPGIGGDAHFDEDERWTNNFREYNLHRVAAHELGHSLGLSHSTDIGALMYPSYTFSGDVQLAQDDIDGIQAIYGRSQNPVQPIGPQTPKACDSKLTFDAITTIRGEVMFFKDRFYMRTNPFYPEVELNFISVFWPQLPNGLEAAYEFADRDEVRFFKGNKYWAVQGQNVLHGYPKDIYSSFGFPRTVKHIDAALSEENTGKTYFFVANKYWRYDEYKRSMDPGYPKMIAHDFPGIGHKVDAVFMKDGFFYFFHGTRQYKFDPKTKRILTLQKANSWFNCRKN

SEQ ID NO: 1757 - protein, 450 aa, Artificial Sequence
  MMP-1 variant G136Y
FPATLETQEQDVDLVQKYLEKYYNLKNDGRQVEKRRNSGPVVEKLKQMQEFFGLKVTGKPDAETLKVMKQPRCGVPDVAQFVLTEGNPRWEQTHLTYRIENYTPDLPRADVDHAIEKAFQLWSNVTPLTFTKVSEYQADIMISFVRGDHRDNSPFDGPGGNLAHAFQPGPGIGGDAHFDEDERWTNNFREYNLHRVAAHELGHSLGLSHSTDIGALMYPSYTFSGDVQLAQDDIDGIQAIYGRSQNPVQPIGPQTPKACDSKLTFDAITTIRGEVMFFKDRFYMRTNPFYPEVELNFISVFWPQLPNGLEAAYEFADRDEVRFFKGNKYWAVQGQNVLHGYPKDIYSSFGFPRTVKHIDAALSEENTGKTYFFVANKYWRYDEYKRSMDPGYPKMIAHDFPGIGHKVDAVFMKDGFFYFFHGTRQYKFDPKTKRILTLQKANSWFNCRKN

SEQ ID NO: 1758 - protein, 450 aa, Artificial Sequence
  MMP-1 variant G136S
FPATLETQEQDVDLVQKYLEKYYNLKNDGRQVEKRRNSGPVVEKLKQMQEFFGLKVTGKPDAETLKVMKQPRCGVPDVAQFVLTEGNPRWEQTHLTYRIENYTPDLPRADVDHAIEKAFQLWSNVTPLTFTKVSESQADIMISFVRGDHRDNSPFDGPGGNLAHAFQPGPGIGGDAHFDEDERWTNNFREYNLHRVAAHELGHSLGLSHSTDIGALMYPSYTFSGDVQLAQDDIDGIQAIYGRSQNPVQPIGPQTPKACDSKLTFDAITTIRGEVMFFKDRFYMRTNPFYPEVELNFISVFWPQLPNGLEAAYEFADRDEVRFFKGNKYWAVQGQNVLHGYPKDIYSSFGFPRTVKHIDAALSEENTGKTYFFVANKYWRYDEYKRSMDPGYPKMIAHDFPGIGHKVDAVFMKDGFFYFFHGTRQYKFDPKTKRILTLQKANSWFNCRKN

SEQ ID NO: 1759 - protein, 450 aa, Artificial Sequence
  MMP-1 variant G136F
FPATLETQEQDVDLVQKYLEKYYNLKNDGRQVEKRRNSGPVVEKLKQMQEFFGLKVTGKPDAETLKVMKQPRCGVPDVAQFVLTEGNPRWEQTHLTYRIENYTPDLPRADVDHAIEKAFQLWSNVTPLTFTKVSEFQADIMISFVRGDHRDNSPFDGPGGNLAHAFQPGPGIGGDAHFDEDERWTNNFREYNLHRVAAHELGHSLGLSHSTDIGALMYPSYTFSGDVQLAQDDIDGIQAIYGRSQNPVQPIGPQTPKACDSKLTFDAITTIRGEVMFFKDRFYMRTNPFYPEVELNFISVFWPQLPNGLEAAYEFADRDEVRFFKGNKYWAVQGQNVLHGYPKDIYSSFGFPRTVKHIDAALSEENTGKTYFFVANKYWRYDEYKRSMDPGYPKMIAHDFPGIGHKVDAVFMKDGFFYFFHGTRQYKFDPKTKRILTLQKANSWFNCRKN

SEQ ID NO: 1760 - protein, 450 aa, Artificial Sequence
  MMP-1 variant G136M
FPATLETQEQDVDLVQKYLEKYYNLKNDGRQVEKRRNSGPVVEKLKQMQEFFGLKVTGKPDAETLKVMKQPRCGVPDVAQFVLTEGNPRWEQTHLTYRIENYTPDLPRADVDHAIEKAFQLWSNVTPLTFTKVSEMQADIMISFVRGDHRDNSPFDGPGGNLAHAFQPGPGIGGDAHFDEDERWTNNFREYNLHRVAAHELGHSLGLSHSTDIGALMYPSYTFSGDVQLAQDDIDGIQAIYGRSQNPVQPIGPQTPKACDSKLTFDAITTIRGEVMFFKDRFYMRTNPFYPEVELNFISVFWPQLPNGLEAAYEFADRDEVRFFKGNKYWAVQGQNVLHGYPKDIYSSFGFPRTVKHIDAALSEENTGKTYFFVANKYWRYDEYKRSMDPGYPKMIAHDFPGIGHKVDAVFMKDGFFYFFHGTRQYKFDPKTKRILTLQKANSWFNCRKN

SEQ ID NO: 1761 - protein, 450 aa, Artificial Sequence
  MMP-1 variant G136W
FPATLETQEQDVDLVQKYLEKYYNLKNDGRQVEKRRNSGPVVEKLKQMQEFFGLKVTGKPDAETLKVMKQPRCGVPDVAQFVLTEGNPRWEQTHLTYRIENYTPDLPRADVDHAIEKAFQLWSNVTPLTFTKVSEWQADIMISFVRGDHRDNSPFDGPGGNLAHAFQPGPGIGGDAHFDEDERWTNNFREYNLHRVAAHELGHSLGLSHSTDIGALMYPSYTFSGDVQLAQDDIDGIQAIYGRSQNPVQPIGPQTPKACDSKLTFDAITTIRGEVMFFKDRFYMRTNPFYPEVELNFISVFWPQLPNGLEAAYEFADRDEVRFFKGNKYWAVQGQNVLHGYPKDIYSSFGFPRTVKHIDAALSEENTGKTYFFVANKYWRYDEYKRSMDPGYPKMIAHDFPGIGHKVDAVFMKDGFFYFFHGTRQYKFDPKTKRILTLQKANSWFNCRKN

SEQ ID NO: 1762 - protein, 450 aa, Artificial Sequence
  MMP-1 variant G136I
FPATLETQEQDVDLVQKYLEKYYNLKNDGRQVEKRRNSGPVVEKLKQMQEFFGLKVTGKPDAETLKVMKQPRCGVPDVAQFVLTEGNPRWEQTHLTYRIENYTPDLPRADVDHAIEKAFQLWSNVTPLTFTKVSEIQADIMISFVRGDHRDNSPFDGPGGNLAHAFQPGPGIGGDAHFDEDERWTNNFREYNLHRVAAHELGHSLGLSHSTDIGALMYPSYTFSGDVQLAQDDIDGIQAIYGRSQNPVQPIGPQTPKACDSKLTFDAITTIRGEVMFFKDRFYMRTNPFYPEVELNFISVFWPQLPNGLEAAYEFADRDEVRFFKGNKYWAVQGQNVLHGYPKDIYSSFGFPRTVKHIDAALSEENTGKTYFFVANKYWRYDEYKRSMDPGYPKMIAHDFPGIGHKVDAVFMKDGFFYFFHGTRQYKFDPKTKRILTLQKANSWFNCRKN

SEQ ID NO: 1763 - protein, 450 aa, Artificial Sequence
  MMP-1 variant G136V
FPATLETQEQDVDLVQKYLEKYYNLKNDGRQVEKRRNSGPVVEKLKQMQEFFGLKVTGKPDAETLKVMKQPRCGVPDVAQFVLTEGNPRWEQTHLTYRIENYTPDLPRADVDHAIEKAFQLWSNVTPLTFTKVSEVQADIMISFVRGDHRDNSPFDGPGGNLAHAFQPGPGIGGDAHFDEDERWTNNFREYNLHRVAAHELGHSLGLSHSTDIGALMYPSYTFSGDVQLAQDDIDGIQAIYGRSQNPVQPIGPQTPKACDSKLTFDAITTIRGEVMFFKDRFYMRTNPFYPEVELNFISVFWPQLPNGLEAAYEFADRDEVRFFKGNKYWAVQGQNVLHGYPKDIYSSFGFPRTVKHIDAALSEENTGKTYFFVANKYWRYDEYKRSMDPGYPKMIAHDFPGIGHKVDAVFMKDGFFYFFHGTRQYKFDPKTKRILTLQKANSWFNCRKN

SEQ ID NO: 1764 - protein, 450 aa, Artificial Sequence
  MMP-1 variant G136L
FPATLETQEQDVDLVQKYLEKYYNLKNDGRQVEKRRNSGPVVEKLKQMQEFFGLKVTGKPDAETLKVMKQPRCGVPDVAQFVLTEGNPRWEQTHLTYRIENYTPDLPRADVDHAIEKAFQLWSNVTPLTFTKVSELQADIMISFVRGDHRDNSPFDGPGGNLAHAFQPGPGIGGDAHFDEDERWTNNFREYNLHRVAAHELGHSLGLSHSTDIGALMYPSYTFSGDVQLAQDDIDGIQAIYGRSQNPVQPIGPQTPKACDSKLTFDAITTIRGEVMFFKDRFYMRTNPFYPEVELNFISVFWPQLPNGLEAAYEFADRDEVRFFKGNKYWAVQGQNVLHGYPKDIYSSFGFPRTVKHIDAALSEENTGKTYFFVANKYWRYDEYKRSMDPGYPKMIAHDFPGIGHKVDAVFMKDGFFYFFHGTRQYKFDPKTKRILTLQKANSWFNCRKN

SEQ ID NO: 1765 - protein, 450 aa, Artificial Sequence
  MMP-1 variant G136A
FPATLETQEQDVDLVQKYLEKYYNLKNDGRQVEKRRNSGPVVEKLKQMQEFFGLKVTGKPDAETLKVMKQPRCGVPDVAQFVLTEGNPRWEQTHLTYRIENYTPDLPRADVDHAIEKAFQLWSNVTPLTFTKVSEAQADIMISFVRGDHRDNSPFDGPGGNLAHAFQPGPGIGGDAHFDEDERWTNNFREYNLHRVAAHELGHSLGLSHSTDIGALMYPSYTFSGDVQLAQDDIDGIQAIYGRSQNPVQPIGPQTPKACDSKLTFDAITTIRGEVMFFKDRFYMRTNPFYPEVELNFISVFWPQLPNGLEAAYEFADRDEVRFFKGNKYWAVQGQNVLHGYPKDIYSSFGFPRTVKHIDAALSEENTGKTYFFVANKYWRYDEYKRSMDPGYPKMIAHDFPGIGHKVDAVFMKDGFFYFFHGTRQYKFDPKTKRILTLQKANSWFNCRKN

SEQ ID NO: 1766 - protein, 450 aa, Artificial Sequence
  MMP-1 variant G136P
FPATLETQEQDVDLVQKYLEKYYNLKNDGRQVEKRRNSGPVVEKLKQMQEFFGLKVTGKPDAETLKVMKQPRCGVPDVAQFVLTEGNPRWEQTHLTYRIENYTPDLPRADVDHAIEKAFQLWSNVTPLTFTKVSEPQADIMISFVRGDHRDNSPFDGPGGNLAHAFQPGPGIGGDAHFDEDERWTNNFREYNLHRVAAHELGHSLGLSHSTDIGALMYPSYTFSGDVQLAQDDIDGIQAIYGRSQNPVQPIGPQTPKACDSKLTFDAITTIRGEVMFFKDRFYMRTNPFYPEVELNFISVFWPQLPNGLEAAYEFADRDEVRFFKGNKYWAVQGQNVLHGYPKDIYSSFGFPRTVKHIDAALSEENTGKTYFFVANKYWRYDEYKRSMDPGYPKMIAHDFPGIGHKVDAVFMKDGFFYFFHGTRQYKFDPKTKRILTLQKANSWFNCRKN

SEQ ID NO: 1767 - protein, 450 aa, Artificial Sequence
  MMP-1 variant Q137D
FPATLETQEQDVDLVQKYLEKYYNLKNDGRQVEKRRNSGPVVEKLKQMQEFFGLKVTGKPDAETLKVMKQPRCGVPDVAQFVLTEGNPRWEQTHLTYRIENYTPDLPRADVDHAIEKAFQLWSNVTPLTFTKVSEGDADIMISFVRGDHRDNSPFDGPGGNLAHAFQPGPGIGGDAHFDEDERWTNNFREYNLHRVAAHELGHSLGLSHSTDIGALMYPSYTFSGDVQLAQDDIDGIQAIYGRSQNPVQPIGPQTPKACDSKLTFDAITTIRGEVMFFKDRFYMRTNPFYPEVELNFISVFWPQLPNGLEAAYEFADRDEVRFFKGNKYWAVQGQNVLHGYPKDIYSSFGFPRTVKHIDAALSEENTGKTYFFVANKYWRYDEYKRSMDPGYPKMIAHDFPGIGHKVDAVFMKDGFFYFFHGTRQYKFDPKTKRILTLQKANSWFNCRKN

SEQ ID NO: 1768 - protein, 450 aa, Artificial Sequence
  MMP-1 variant Q137E
FPATLETQEQDVDLVQKYLEKYYNLKNDGRQVEKRRNSGPVVEKLKQMQEFFGLKVTGKPDAETLKVMKQPRCGVPDVAQFVLTEGNPRWEQTHLTYRIENYTPDLPRADVDHAIEKAFQLWSNVTPLTFTKVSEGEADIMISFVRGDHRDNSPFDGPGGNLAHAFQPGPGIGGDAHFDEDERWTNNFREYNLHRVAAHELGHSLGLSHSTDIGALMYPSYTFSGDVQLAQDDIDGIQAIYGRSQNPVQPIGPQTPKACDSKLTFDAITTIRGEVMFFKDRFYMRTNPFYPEVELNFISVFWPQLPNGLEAAYEFADRDEVRFFKGNKYWAVQGQNVLHGYPKDIYSSFGFPRTVKHIDAALSEENTGKTYFFVANKYWRYDEYKRSMDPGYPKMIAHDFPGIGHKVDAVFMKDGFFYFFHGTRQYKFDPKTKRILTLQKANSWFNCRKN

SEQ ID NO: 1769 - protein, 450 aa, Artificial Sequence
  MMP-1 variant Q137H
FPATLETQEQDVDLVQKYLEKYYNLKNDGRQVEKRRNSGPVVEKLKQMQEFFGLKVTGKPDAETLKVMKQPRCGVPDVAQFVLTEGNPRWEQTHLTYRIENYTPDLPRADVDHAIEKAFQLWSNVTPLTFTKVSEGHADIMISFVRGDHRDNSPFDGPGGNLAHAFQPGPGIGGDAHFDEDERWTNNFREYNLHRVAAHELGHSLGLSHSTDIGALMYPSYTFSGDVQLAQDDIDGIQAIYGRSQNPVQPIGPQTPKACDSKLTFDAITTIRGEVMFFKDRFYMRTNPFYPEVELNFISVFWPQLPNGLEAAYEFADRDEVRFFKGNKYWAVQGQNVLHGYPKDIYSSFGFPRTVKHIDAALSEENTGKTYFFVANKYWRYDEYKRSMDPGYPKMIAHDFPGIGHKVDAVFMKDGFFYFFHGTRQYKFDPKTKRILTLQKANSWFNCRKN

SEQ ID NO: 1770 - protein, 450 aa, Artificial Sequence
  MMP-1 variant Q137K
FPATLETQEQDVDLVQKYLEKYYNLKNDGRQVEKRRNSGPVVEKLKQMQEFFGLKVTGKPDAETLKVMKQPRCGVPDVAQFVLTEGNPRWEQTHLTYRIENYTPDLPRADVDHAIEKAFQLWSNVTPLTFTKVSEGKADIMISFVRGDHRDNSPFDGPGGNLAHAFQPGPGIGGDAHFDEDERWTNNFREYNLHRVAAHELGHSLGLSHSTDIGALMYPSYTFSGDVQLAQDDIDGIQAIYGRSQNPVQPIGPQTPKACDSKLTFDAITTIRGEVMFFKDRFYMRTNPFYPEVELNFISVFWPQLPNGLEAAYEFADRDEVRFFKGNKYWAVQGQNVLHGYPKDIYSSFGFPRTVKHIDAALSEENTGKTYFFVANKYWRYDEYKRSMDPGYPKMIAHDFPGIGHKVDAVFMKDGFFYFFHGTRQYKFDPKTKRILTLQKANSWFNCRKN

SEQ ID NO: 1771 - protein, 450 aa, Artificial Sequence
  MMP-1 variant Q137R
FPATLETQEQDVDLVQKYLEKYYNLKNDGRQVEKRRNSGPVVEKLKQMQEFFGLKVTGKPDAETLKVMKQPRCGVPDVAQFVLTEGNPRWEQTHLTYRIENYTPDLPRADVDHAIEKAFQLWSNVTPLTFTKVSEGRADIMISFVRGDHRDNSPFDGPGGNLAHAFQPGPGIGGDAHFDEDERWTNNFREYNLHRVAAHELGHSLGLSHSTDIGALMYPSYTFSGDVQLAQDDIDGIQAIYGRSQNPVQPIGPQTPKACDSKLTFDAITTIRGEVMFFKDRFYMRTNPFYPEVELNFISVFWPQLPNGLEAAYEFADRDEVRFFKGNKYWAVQGQNVLHGYPKDIYSSFGFPRTVKHIDAALSEENTGKTYFFVANKYWRYDEYKRSMDPGYPKMIAHDFPGIGHKVDAVFMKDGFFYFFHGTRQYKFDPKTKRILTLQKANSWFNCRKN

SEQ ID NO: 1772 - protein, 450 aa, Artificial Sequence
  MMP-1 variant Q137C
FPATLETQEQDVDLVQKYLEKYYNLKNDGRQVEKRRNSGPVVEKLKQMQEFFGLKVTGKPDAETLKVMKQPRCGVPDVAQFVLTEGNPRWEQTHLTYRIENYTPDLPRADVDHAIEKAFQLWSNVTPLTFTKVSEGCADIMISFVRGDHRDNSPFDGPGGNLAHAFQPGPGIGGDAHFDEDERWTNNFREYNLHRVAAHELGHSLGLSHSTDIGALMYPSYTFSGDVQLAQDDIDGIQAIYGRSQNPVQPIGPQTPKACDSKLTFDAITTIRGEVMFFKDRFYMRTNPFYPEVELNFISVFWPQLPNGLEAAYEFADRDEVRFFKGNKYWAVQGQNVLHGYPKDIYSSFGFPRTVKHIDAALSEENTGKTYFFVANKYWRYDEYKRSMDPGYPKMIAHDFPGIGHKVDAVFMKDGFFYFFHGTRQYKFDPKTKRILTLQKANSWFNCRKN

SEQ ID NO: 1773 - protein, 450 aa, Artificial Sequence
  MMP-1 variant Q137N
FPATLETQEQDVDLVQKYLEKYYNLKNDGRQVEKRRNSGPVVEKLKQMQEFFGLKVTGKPDAETLKVMKQPRCGVPDVAQFVLTEGNPRWEQTHLTYRIENYTPDLPRADVDHAIEKAFQLWSNVTPLTFTKVSEGNADIMISFVRGDHRDNSPFDGPGGNLAHAFQPGPGIGGDAHFDEDERWTNNFREYNLHRVAAHELGHSLGLSHSTDIGALMYPSYTFSGDVQLAQDDIDGIQAIYGRSQNPVQPIGPQTPKACDSKLTFDAITTIRGEVMFFKDRFYMRTNPFYPEVELNFISVFWPQLPNGLEAAYEFADRDEVRFFKGNKYWAVQGQNVLHGYPKDIYSSFGFPRTVKHIDAALSEENTGKTYFFVANKYWRYDEYKRSMDPGYPKMIAHDFPGIGHKVDAVFMKDGFFYFFHGTRQYKFDPKTKRILTLQKANSWFNCRKN

SEQ ID NO: 1774 - protein, 450 aa, Artificial Sequence
  MMP-1 variant Q137T
FPATLETQEQDVDLVQKYLEKYYNLKNDGRQVEKRRNSGPVVEKLKQMQEFFGLKVTGKPDAETLKVMKQPRCGVPDVAQFVLTEGNPRWEQTHLTYRIENYTPDLPRADVDHAIEKAFQLWSNVTPLTFTKVSEGTADIMISFVRGDHRDNSPFDGPGGNLAHAFQPGPGIGGDAHFDEDERWTNNFREYNLHRVAAHELGHSLGLSHSTDIGALMYPSYTFSGDVQLAQDDIDGIQAIYGRSQNPVQPIGPQTPKACDSKLTFDAITTIRGEVMFFKDRFYMRTNPFYPEVELNFISVFWPQLPNGLEAAYEFADRDEVRFFKGNKYWAVQGQNVLHGYPKDIYSSFGFPRTVKHIDAALSEENTGKTYFFVANKYWRYDEYKRSMDPGYPKMIAHDFPGIGHKVDAVFMKDGFFYFFHGTRQYKFDPKTKRILTLQKANSWFNCRKN

SEQ ID NO: 1775 - protein, 450 aa, Artificial Sequence
  MMP-1 variant Q137Y
FPATLETQEQDVDLVQKYLEKYYNLKNDGRQVEKRRNSGPVVEKLKQMQEFFGLKVTGKPDAETLKVMKQPRCGVPDVAQFVLTEGNPRWEQTHLTYRIENYTPDLPRADVDHAIEKAFQLWSNVTPLTFTKVSEGYADIMISFVRGDHRDNSPFDGPGGNLAHAFQPGPGIGGDAHFDEDERWTNNFREYNLHRVAAHELGHSLGLSHSTDIGALMYPSYTFSGDVQLAQDDIDGIQAIYGRSQNPVQPIGPQTPKACDSKLTFDAITTIRGEVMFFKDRFYMRTNPFYPEVELNFISVFWPQLPNGLEAAYEFADRDEVRFFKGNKYWAVQGQNVLHGYPKDIYSSFGFPRTVKHIDAALSEENTGKTYFFVANKYWRYDEYKRSMDPGYPKMIAHDFPGIGHKVDAVFMKDGFFYFFHGTRQYKFDPKTKRILTLQKANSWFNCRKN

SEQ ID NO: 1776 - protein, 450 aa, Artificial Sequence
  MMP-1 variant Q137S
FPATLETQEQDVDLVQKYLEKYYNLKNDGRQVEKRRNSGPVVEKLKQMQEFFGLKVTGKPDAETLKVMKQPRCGVPDVAQFVLTEGNPRWEQTHLTYRIENYTPDLPRADVDHAIEKAFQLWSNVTPLTFTKVSEGSADIMISFVRGDHRDNSPFDGPGGNLAHAFQPGPGIGGDAHFDEDERWTNNFREYNLHRVAAHELGHSLGLSHSTDIGALMYPSYTFSGDVQLAQDDIDGIQAIYGRSQNPVQPIGPQTPKACDSKLTFDAITTIRGEVMFFKDRFYMRTNPFYPEVELNFISVFWPQLPNGLEAAYEFADRDEVRFFKGNKYWAVQGQNVLHGYPKDIYSSFGFPRTVKHIDAALSEENTGKTYFFVANKYWRYDEYKRSMDPGYPKMIAHDFPGIGHKVDAVFMKDGFFYFFHGTRQYKFDPKTKRILTLQKANSWFNCRKN

SEQ ID NO: 1777 - protein, 450 aa, Artificial Sequence
  MMP-1 variant Q137G
FPATLETQEQDVDLVQKYLEKYYNLKNDGRQVEKRRNSGPVVEKLKQMQEFFGLKVTGKPDAETLKVMKQPRCGVPDVAQFVLTEGNPRWEQTHLTYRIENYTPDLPRADVDHAIEKAFQLWSNVTPLTFTKVSEGGADIMISFVRGDHRDNSPFDGPGGNLAHAFQPGPGIGGDAHFDEDERWTNNFREYNLHRVAAHELGHSLGLSHSTDIGALMYPSYTFSGDVQLAQDDIDGIQAIYGRSQNPVQPIGPQTPKACDSKLTFDAITTIRGEVMFFKDRFYMRTNPFYPEVELNFISVFWPQLPNGLEAAYEFADRDEVRFFKGNKYWAVQGQNVLHGYPKDIYSSFGFPRTVKHIDAALSEENTGKTYFFVANKYWRYDEYKRSMDPGYPKMIAHDFPGIGHKVDAVFMKDGFFYFFHGTRQYKFDPKTKRILTLQKANSWFNCRKN

SEQ ID NO: 1778 - protein, 450 aa, Artificial Sequence
  MMP-1 variant Q137F
FPATLETQEQDVDLVQKYLEKYYNLKNDGRQVEKRRNSGPVVEKLKQMQEFFGLKVTGKPDAETLKVMKQPRCGVPDVAQFVLTEGNPRWEQTHLTYRIENYTPDLPRADVDHAIEKAFQLWSNVTPLTFTKVSEGFADIMISFVRGDHRDNSPFDGPGGNLAHAFQPGPGIGGDAHFDEDERWTNNFREYNLHRVAAHELGHSLGLSHSTDIGALMYPSYTFSGDVQLAQDDIDGIQAIYGRSQNPVQPIGPQTPKACDSKLTFDAITTIRGEVMFFKDRFYMRTNPFYPEVELNFISVFWPQLPNGLEAAYEFADRDEVRFFKGNKYWAVQGQNVLHGYPKDIYSSFGFPRTVKHIDAALSEENTGKTYFFVANKYWRYDEYKRSMDPGYPKMIAHDFPGIGHKVDAVFMKDGFFYFFHGTRQYKFDPKTKRILTLQKANSWFNCRKN

SEQ ID NO: 1779 - protein, 450 aa, Artificial Sequence
  MMP-1 variant Q137M
FPATLETQEQDVDLVQKYLEKYYNLKNDGRQVEKRRNSGPVVEKLKQMQEFFGLKVTGKPDAETLKVMKQPRCGVPDVAQFVLTEGNPRWEQTHLTYRIENYTPDLPRADVDHAIEKAFQLWSNVTPLTFTKVSEGMADIMISFVRGDHRDNSPFDGPGGNLAHAFQPGPGIGGDAHFDEDERWTNNFREYNLHRVAAHELGHSLGLSHSTDIGALMYPSYTFSGDVQLAQDDIDGIQAIYGRSQNPVQPIGPQTPKACDSKLTFDAITTIRGEVMFFKDRFYMRTNPFYPEVELNFISVFWPQLPNGLEAAYEFADRDEVRFFKGNKYWAVQGQNVLHGYPKDIYSSFGFPRTVKHIDAALSEENTGKTYFFVANKYWRYDEYKRSMDPGYPKMIAHDFPGIGHKVDAVFMKDGFFYFFHGTRQYKFDPKTKRILTLQKANSWFNCRKN

SEQ ID NO: 1780 - protein, 450 aa, Artificial Sequence
  MMP-1 variant Q137W
FPATLETQEQDVDLVQKYLEKYYNLKNDGRQVEKRRNSGPVVEKLKQMQEFFGLKVTGKPDAETLKVMKQPRCGVPDVAQFVLTEGNPRWEQTHLTYRIENYTPDLPRADVDHAIEKAFQLWSNVTPLTFTKVSEGWADIMISFVRGDHRDNSPFDGPGGNLAHAFQPGPGIGGDAHFDEDERWTNNFREYNLHRVAAHELGHSLGLSHSTDIGALMYPSYTFSGDVQLAQDDIDGIQAIYGRSQNPVQPIGPQTPKACDSKLTFDAITTIRGEVMFFKDRFYMRTNPFYPEVELNFISVFWPQLPNGLEAAYEFADRDEVRFFKGNKYWAVQGQNVLHGYPKDIYSSFGFPRTVKHIDAALSEENTGKTYFFVANKYWRYDEYKRSMDPGYPKMIAHDFPGIGHKVDAVFMKDGFFYFFHGTRQYKFDPKTKRILTLQKANSWFNCRKN

SEQ ID NO: 1781 - protein, 450 aa, Artificial Sequence
  MMP-1 variant Q137I
FPATLETQEQDVDLVQKYLEKYYNLKNDGRQVEKRRNSGPVVEKLKQMQEFFGLKVTGKPDAETLKVMKQPRCGVPDVAQFVLTEGNPRWEQTHLTYRIENYTPDLPRADVDHAIEKAFQLWSNVTPLTFTKVSEGIADIMISFVRGDHRDNSPFDGPGGNLAHAFQPGPGIGGDAHFDEDERWTNNFREYNLHRVAAHELGHSLGLSHSTDIGALMYPSYTFSGDVQLAQDDIDGIQAIYGRSQNPVQPIGPQTPKACDSKLTFDAITTIRGEVMFFKDRFYMRTNPFYPEVELNFISVFWPQLPNGLEAAYEFADRDEVRFFKGNKYWAVQGQNVLHGYPKDIYSSFGFPRTVKHIDAALSEENTGKTYFFVANKYWRYDEYKRSMDPGYPKMIAHDFPGIGHKVDAVFMKDGFFYFFHGTRQYKFDPKTKRILTLQKANSWFNCRKN

SEQ ID NO: 1782 - protein, 450 aa, Artificial Sequence
  MMP-1 variant Q137V
FPATLETQEQDVDLVQKYLEKYYNLKNDGRQVEKRRNSGPVVEKLKQMQEFFGLKVTGKPDAETLKVMKQPRCGVPDVAQFVLTEGNPRWEQTHLTYRIENYTPDLPRADVDHAIEKAFQLWSNVTPLTFTKVSEGVADIMISFVRGDHRDNSPFDGPGGNLAHAFQPGPGIGGDAHFDEDERWTNNFREYNLHRVAAHELGHSLGLSHSTDIGALMYPSYTFSGDVQLAQDDIDGIQAIYGRSQNPVQPIGPQTPKACDSKLTFDAITTIRGEVMFFKDRFYMRTNPFYPEVELNFISVFWPQLPNGLEAAYEFADRDEVRFFKGNKYWAVQGQNVLHGYPKDIYSSFGFPRTVKHIDAALSEENTGKTYFFVANKYWRYDEYKRSMDPGYPKMIAHDFPGIGHKVDAVFMKDGFFYFFHGTRQYKFDPKTKRILTLQKANSWFNCRKN

SEQ ID NO: 1783 - protein, 450 aa, Artificial Sequence
  MMP-1 variant Q137L
FPATLETQEQDVDLVQKYLEKYYNLKNDGRQVEKRRNSGPVVEKLKQMQEFFGLKVTGKPDAETLKVMKQPRCGVPDVAQFVLTEGNPRWEQTHLTYRIENYTPDLPRADVDHAIEKAFQLWSNVTPLTFTKVSEGLADIMISFVRGDHRDNSPFDGPGGNLAHAFQPGPGIGGDAHFDEDERWTNNFREYNLHRVAAHELGHSLGLSHSTDIGALMYPSYTFSGDVQLAQDDIDGIQAIYGRSQNPVQPIGPQTPKACDSKLTFDAITTIRGEVMFFKDRFYMRTNPFYPEVELNFISVFWPQLPNGLEAAYEFADRDEVRFFKGNKYWAVQGQNVLHGYPKDIYSSFGFPRTVKHIDAALSEENTGKTYFFVANKYWRYDEYKRSMDPGYPKMIAHDFPGIGHKVDAVFMKDGFFYFFHGTRQYKFDPKTKRILTLQKANSWFNCRKN

SEQ ID NO: 1784 - protein, 450 aa, Artificial Sequence
  MMP-1 variant Q137A
FPATLETQEQDVDLVQKYLEKYYNLKNDGRQVEKRRNSGPVVEKLKQMQEFFGLKVTGKPDAETLKVMKQPRCGVPDVAQFVLTEGNPRWEQTHLTYRIENYTPDLPRADVDHAIEKAFQLWSNVTPLTFTKVSEGAADIMISFVRGDHRDNSPFDGPGGNLAHAFQPGPGIGGDAHFDEDERWTNNFREYNLHRVAAHELGHSLGLSHSTDIGALMYPSYTFSGDVQLAQDDIDGIQAIYGRSQNPVQPIGPQTPKACDSKLTFDAITTIRGEVMFFKDRFYMRTNPFYPEVELNFISVFWPQLPNGLEAAYEFADRDEVRFFKGNKYWAVQGQNVLHGYPKDIYSSFGFPRTVKHIDAALSEENTGKTYFFVANKYWRYDEYKRSMDPGYPKMIAHDFPGIGHKVDAVFMKDGFFYFFHGTRQYKFDPKTKRILTLQKANSWFNCRKN

SEQ ID NO: 1785 - protein, 450 aa, Artificial Sequence
  MMP-1 variant Q137P
FPATLETQEQDVDLVQKYLEKYYNLKNDGRQVEKRRNSGPVVEKLKQMQEFFGLKVTGKPDAETLKVMKQPRCGVPDVAQFVLTEGNPRWEQTHLTYRIENYTPDLPRADVDHAIEKAFQLWSNVTPLTFTKVSEGPADIMISFVRGDHRDNSPFDGPGGNLAHAFQPGPGIGGDAHFDEDERWTNNFREYNLHRVAAHELGHSLGLSHSTDIGALMYPSYTFSGDVQLAQDDIDGIQAIYGRSQNPVQPIGPQTPKACDSKLTFDAITTIRGEVMFFKDRFYMRTNPFYPEVELNFISVFWPQLPNGLEAAYEFADRDEVRFFKGNKYWAVQGQNVLHGYPKDIYSSFGFPRTVKHIDAALSEENTGKTYFFVANKYWRYDEYKRSMDPGYPKMIAHDFPGIGHKVDAVFMKDGFFYFFHGTRQYKFDPKTKRILTLQKANSWFNCRKN

SEQ ID NO: 1786 - protein, 450 aa, Artificial Sequence
  MMP-1 variant A138D
FPATLETQEQDVDLVQKYLEKYYNLKNDGRQVEKRRNSGPVVEKLKQMQEFFGLKVTGKPDAETLKVMKQPRCGVPDVAQFVLTEGNPRWEQTHLTYRIENYTPDLPRADVDHAIEKAFQLWSNVTPLTFTKVSEGQDDIMISFVRGDHRDNSPFDGPGGNLAHAFQPGPGIGGDAHFDEDERWTNNFREYNLHRVAAHELGHSLGLSHSTDIGALMYPSYTFSGDVQLAQDDIDGIQAIYGRSQNPVQPIGPQTPKACDSKLTFDAITTIRGEVMFFKDRFYMRTNPFYPEVELNFISVFWPQLPNGLEAAYEFADRDEVRFFKGNKYWAVQGQNVLHGYPKDIYSSFGFPRTVKHIDAALSEENTGKTYFFVANKYWRYDEYKRSMDPGYPKMIAHDFPGIGHKVDAVFMKDGFFYFFHGTRQYKFDPKTKRILTLQKANSWFNCRKN

SEQ ID NO: 1787 - protein, 450 aa, Artificial Sequence
  MMP-1 variant A138E
FPATLETQEQDVDLVQKYLEKYYNLKNDGRQVEKRRNSGPVVEKLKQMQEFFGLKVTGKPDAETLKVMKQPRCGVPDVAQFVLTEGNPRWEQTHLTYRIENYTPDLPRADVDHAIEKAFQLWSNVTPLTFTKVSEGQEDIMISFVRGDHRDNSPFDGPGGNLAHAFQPGPGIGGDAHFDEDERWTNNFREYNLHRVAAHELGHSLGLSHSTDIGALMYPSYTFSGDVQLAQDDIDGIQAIYGRSQNPVQPIGPQTPKACDSKLTFDAITTIRGEVMFFKDRFYMRTNPFYPEVELNFISVFWPQLPNGLEAAYEFADRDEVRFFKGNKYWAVQGQNVLHGYPKDIYSSFGFPRTVKHIDAALSEENTGKTYFFVANKYWRYDEYKRSMDPGYPKMIAHDFPGIGHKVDAVFMKDGFFYFFHGTRQYKFDPKTKRILTLQKANSWFNCRKN

SEQ ID NO: 1788 - protein, 450 aa, Artificial Sequence
  MMP-1 variant A138H
FPATLETQEQDVDLVQKYLEKYYNLKNDGRQVEKRRNSGPVVEKLKQMQEFFGLKVTGKPDAETLKVMKQPRCGVPDVAQFVLTEGNPRWEQTHLTYRIENYTPDLPRADVDHAIEKAFQLWSNVTPLTFTKVSEGQHDIMISFVRGDHRDNSPFDGPGGNLAHAFQPGPGIGGDAHFDEDERWTNNFREYNLHRVAAHELGHSLGLSHSTDIGALMYPSYTFSGDVQLAQDDIDGIQAIYGRSQNPVQPIGPQTPKACDSKLTFDAITTIRGEVMFFKDRFYMRTNPFYPEVELNFISVFWPQLPNGLEAAYEFADRDEVRFFKGNKYWAVQGQNVLHGYPKDIYSSFGFPRTVKHIDAALSEENTGKTYFFVANKYWRYDEYKRSMDPGYPKMIAHDFPGIGHKVDAVFMKDGFFYFFHGTRQYKFDPKTKRILTLQKANSWFNCRKN

SEQ ID NO: 1789 - protein, 450 aa, Artificial Sequence
  MMP-1 variant A138K
FPATLETQEQDVDLVQKYLEKYYNLKNDGRQVEKRRNSGPVVEKLKQMQEFFGLKVTGKPDAETLKVMKQPRCGVPDVAQFVLTEGNPRWEQTHLTYRIENYTPDLPRADVDHAIEKAFQLWSNVTPLTFTKVSEGQKDIMISFVRGDHRDNSPFDGPGGNLAHAFQPGPGIGGDAHFDEDERWTNNFREYNLHRVAAHELGHSLGLSHSTDIGALMYPSYTFSGDVQLAQDDIDGIQAIYGRSQNPVQPIGPQTPKACDSKLTFDAITTIRGEVMFFKDRFYMRTNPFYPEVELNFISVFWPQLPNGLEAAYEFADRDEVRFFKGNKYWAVQGQNVLHGYPKDIYSSFGFPRTVKHIDAALSEENTGKTYFFVANKYWRYDEYKRSMDPGYPKMIAHDFPGIGHKVDAVFMKDGFFYFFHGTRQYKFDPKTKRILTLQKANSWFNCRKN

SEQ ID NO: 1790 - protein, 450 aa, Artificial Sequence
  MMP-1 variant A138R
FPATLETQEQDVDLVQKYLEKYYNLKNDGRQVEKRRNSGPVVEKLKQMQEFFGLKVTGKPDAETLKVMKQPRCGVPDVAQFVLTEGNPRWEQTHLTYRIENYTPDLPRADVDHAIEKAFQLWSNVTPLTFTKVSEGQRDIMISFVRGDHRDNSPFDGPGGNLAHAFQPGPGIGGDAHFDEDERWTNNFREYNLHRVAAHELGHSLGLSHSTDIGALMYPSYTFSGDVQLAQDDIDGIQAIYGRSQNPVQPIGPQTPKACDSKLTFDAITTIRGEVMFFKDRFYMRTNPFYPEVELNFISVFWPQLPNGLEAAYEFADRDEVRFFKGNKYWAVQGQNVLHGYPKDIYSSFGFPRTVKHIDAALSEENTGKTYFFVANKYWRYDEYKRSMDPGYPKMIAHDFPGIGHKVDAVFMKDGFFYFFHGTRQYKFDPKTKRILTLQKANSWFNCRKN

SEQ ID NO: 1791 - protein, 450 aa, Artificial Sequence
  MMP-1 variant A138C
FPATLETQEQDVDLVQKYLEKYYNLKNDGRQVEKRRNSGPVVEKLKQMQEFFGLKVTGKPDAETLKVMKQPRCGVPDVAQFVLTEGNPRWEQTHLTYRIENYTPDLPRADVDHAIEKAFQLWSNVTPLTFTKVSEGQCDIMISFVRGDHRDNSPFDGPGGNLAHAFQPGPGIGGDAHFDEDERWTNNFREYNLHRVAAHELGHSLGLSHSTDIGALMYPSYTFSGDVQLAQDDIDGIQAIYGRSQNPVQPIGPQTPKACDSKLTFDAITTIRGEVMFFKDRFYMRTNPFYPEVELNFISVFWPQLPNGLEAAYEFADRDEVRFFKGNKYWAVQGQNVLHGYPKDIYSSFGFPRTVKHIDAALSEENTGKTYFFVANKYWRYDEYKRSMDPGYPKMIAHDFPGIGHKVDAVFMKDGFFYFFHGTRQYKFDPKTKRILTLQKANSWFNCRKN

SEQ ID NO: 1792 - protein, 450 aa, Artificial Sequence
  MMP-1 variant A138N
FPATLETQEQDVDLVQKYLEKYYNLKNDGRQVEKRRNSGPVVEKLKQMQEFFGLKVTGKPDAETLKVMKQPRCGVPDVAQFVLTEGNPRWEQTHLTYRIENYTPDLPRADVDHAIEKAFQLWSNVTPLTFTKVSEGQNDIMISFVRGDHRDNSPFDGPGGNLAHAFQPGPGIGGDAHFDEDERWTNNFREYNLHRVAAHELGHSLGLSHSTDIGALMYPSYTFSGDVQLAQDDIDGIQAIYGRSQNPVQPIGPQTPKACDSKLTFDAITTIRGEVMFFKDRFYMRTNPFYPEVELNFISVFWPQLPNGLEAAYEFADRDEVRFFKGNKYWAVQGQNVLHGYPKDIYSSFGFPRTVKHIDAALSEENTGKTYFFVANKYWRYDEYKRSMDPGYPKMIAHDFPGIGHKVDAVFMKDGFFYFFHGTRQYKFDPKTKRILTLQKANSWFNCRKN

SEQ ID NO: 1793 - protein, 450 aa, Artificial Sequence
  MMP-1 variant A138Q
FPATLETQEQDVDLVQKYLEKYYNLKNDGRQVEKRRNSGPVVEKLKQMQEFFGLKVTGKPDAETLKVMKQPRCGVPDVAQFVLTEGNPRWEQTHLTYRIENYTPDLPRADVDHAIEKAFQLWSNVTPLTFTKVSEGQQDIMISFVRGDHRDNSPFDGPGGNLAHAFQPGPGIGGDAHFDEDERWTNNFREYNLHRVAAHELGHSLGLSHSTDIGALMYPSYTFSGDVQLAQDDIDGIQAIYGRSQNPVQPIGPQTPKACDSKLTFDAITTIRGEVMFFKDRFYMRTNPFYPEVELNFISVFWPQLPNGLEAAYEFADRDEVRFFKGNKYWAVQGQNVLHGYPKDIYSSFGFPRTVKHIDAALSEENTGKTYFFVANKYWRYDEYKRSMDPGYPKMIAHDFPGIGHKVDAVFMKDGFFYFFHGTRQYKFDPKTKRILTLQKANSWFNCRKN

SEQ ID NO: 1794 - protein, 450 aa, Artificial Sequence
  MMP-1 variant A138T
FPATLETQEQDVDLVQKYLEKYYNLKNDGRQVEKRRNSGPVVEKLKQMQEFFGLKVTGKPDAETLKVMKQPRCGVPDVAQFVLTEGNPRWEQTHLTYRIENYTPDLPRADVDHAIEKAFQLWSNVTPLTFTKVSEGQTDIMISFVRGDHRDNSPFDGPGGNLAHAFQPGPGIGGDAHFDEDERWTNNFREYNLHRVAAHELGHSLGLSHSTDIGALMYPSYTFSGDVQLAQDDIDGIQAIYGRSQNPVQPIGPQTPKACDSKLTFDAITTIRGEVMFFKDRFYMRTNPFYPEVELNFISVFWPQLPNGLEAAYEFADRDEVRFFKGNKYWAVQGQNVLHGYPKDIYSSFGFPRTVKHIDAALSEENTGKTYFFVANKYWRYDEYKRSMDPGYPKMIAHDFPGIGHKVDAVFMKDGFFYFFHGTRQYKFDPKTKRILTLQKANSWFNCRKN

SEQ ID NO: 1795 - protein, 450 aa, Artificial Sequence
  MMP-1 variant A138Y
FPATLETQEQDVDLVQKYLEKYYNLKNDGRQVEKRRNSGPVVEKLKQMQEFFGLKVTGKPDAETLKVMKQPRCGVPDVAQFVLTEGNPRWEQTHLTYRIENYTPDLPRADVDHAIEKAFQLWSNVTPLTFTKVSEGQYDIMISFVRGDHRDNSPFDGPGGNLAHAFQPGPGIGGDAHFDEDERWTNNFREYNLHRVAAHELGHSLGLSHSTDIGALMYPSYTFSGDVQLAQDDIDGIQAIYGRSQNPVQPIGPQTPKACDSKLTFDAITTIRGEVMFFKDRFYMRTNPFYPEVELNFISVFWPQLPNGLEAAYEFADRDEVRFFKGNKYWAVQGQNVLHGYPKDIYSSFGFPRTVKHIDAALSEENTGKTYFFVANKYWRYDEYKRSMDPGYPKMIAHDFPGIGHKVDAVFMKDGFFYFFHGTRQYKFDPKTKRILTLQKANSWFNCRKN

SEQ ID NO: 1796 - protein, 450 aa, Artificial Sequence
  MMP-1 variant A138S
FPATLETQEQDVDLVQKYLEKYYNLKNDGRQVEKRRNSGPVVEKLKQMQEFFGLKVTGKPDAETLKVMKQPRCGVPDVAQFVLTEGNPRWEQTHLTYRIENYTPDLPRADVDHAIEKAFQLWSNVTPLTFTKVSEGQSDIMISFVRGDHRDNSPFDGPGGNLAHAFQPGPGIGGDAHFDEDERWTNNFREYNLHRVAAHELGHSLGLSHSTDIGALMYPSYTFSGDVQLAQDDIDGIQAIYGRSQNPVQPIGPQTPKACDSKLTFDAITTIRGEVMFFKDRFYMRTNPFYPEVELNFISVFWPQLPNGLEAAYEFADRDEVRFFKGNKYWAVQGQNVLHGYPKDIYSSFGFPRTVKHIDAALSEENTGKTYFFVANKYWRYDEYKRSMDPGYPKMIAHDFPGIGHKVDAVFMKDGFFYFFHGTRQYKFDPKTKRILTLQKANSWFNCRKN

SEQ ID NO: 1797 - protein, 450 aa, Artificial Sequence
  MMP-1 variant A138G
FPATLETQEQDVDLVQKYLEKYYNLKNDGRQVEKRRNSGPVVEKLKQMQEFFGLKVTGKPDAETLKVMKQPRCGVPDVAQFVLTEGNPRWEQTHLTYRIENYTPDLPRADVDHAIEKAFQLWSNVTPLTFTKVSEGQGDIMISFVRGDHRDNSPFDGPGGNLAHAFQPGPGIGGDAHFDEDERWTNNFREYNLHRVAAHELGHSLGLSHSTDIGALMYPSYTFSGDVQLAQDDIDGIQAIYGRSQNPVQPIGPQTPKACDSKLTFDAITTIRGEVMFFKDRFYMRTNPFYPEVELNFISVFWPQLPNGLEAAYEFADRDEVRFFKGNKYWAVQGQNVLHGYPKDIYSSFGFPRTVKHIDAALSEENTGKTYFFVANKYWRYDEYKRSMDPGYPKMIAHDFPGIGHKVDAVFMKDGFFYFFHGTRQYKFDPKTKRILTLQKANSWFNCRKN

SEQ ID NO: 1798 - protein, 450 aa, Artificial Sequence
  MMP-1 variant A138F
FPATLETQEQDVDLVQKYLEKYYNLKNDGRQVEKRRNSGPVVEKLKQMQEFFGLKVTGKPDAETLKVMKQPRCGVPDVAQFVLTEGNPRWEQTHLTYRIENYTPDLPRADVDHAIEKAFQLWSNVTPLTFTKVSEGQFDIMISFVRGDHRDNSPFDGPGGNLAHAFQPGPGIGGDAHFDEDERWTNNFREYNLHRVAAHELGHSLGLSHSTDIGALMYPSYTFSGDVQLAQDDIDGIQAIYGRSQNPVQPIGPQTPKACDSKLTFDAITTIRGEVMFFKDRFYMRTNPFYPEVELNFISVFWPQLPNGLEAAYEFADRDEVRFFKGNKYWAVQGQNVLHGYPKDIYSSFGFPRTVKHIDAALSEENTGKTYFFVANKYWRYDEYKRSMDPGYPKMIAHDFPGIGHKVDAVFMKDGFFYFFHGTRQYKFDPKTKRILTLQKANSWFNCRKN

SEQ ID NO: 1799 - protein, 450 aa, Artificial Sequence
  MMP-1 variant A138M
FPATLETQEQDVDLVQKYLEKYYNLKNDGRQVEKRRNSGPVVEKLKQMQEFFGLKVTGKPDAETLKVMKQPRCGVPDVAQFVLTEGNPRWEQTHLTYRIENYTPDLPRADVDHAIEKAFQLWSNVTPLTFTKVSEGQMDIMISFVRGDHRDNSPFDGPGGNLAHAFQPGPGIGGDAHFDEDERWTNNFREYNLHRVAAHELGHSLGLSHSTDIGALMYPSYTFSGDVQLAQDDIDGIQAIYGRSQNPVQPIGPQTPKACDSKLTFDAITTIRGEVMFFKDRFYMRTNPFYPEVELNFISVFWPQLPNGLEAAYEFADRDEVRFFKGNKYWAVQGQNVLHGYPKDIYSSFGFPRTVKHIDAALSEENTGKTYFFVANKYWRYDEYKRSMDPGYPKMIAHDFPGIGHKVDAVFMKDGFFYFFHGTRQYKFDPKTKRILTLQKANSWFNCRKN

SEQ ID NO: 1800 - protein, 450 aa, Artificial Sequence
  MMP-1 variant A138W
FPATLETQEQDVDLVQKYLEKYYNLKNDGRQVEKRRNSGPVVEKLKQMQEFFGLKVTGKPDAETLKVMKQPRCGVPDVAQFVLTEGNPRWEQTHLTYRIENYTPDLPRADVDHAIEKAFQLWSNVTPLTFTKVSEGQWDIMISFVRGDHRDNSPFDGPGGNLAHAFQPGPGIGGDAHFDEDERWTNNFREYNLHRVAAHELGHSLGLSHSTDIGALMYPSYTFSGDVQLAQDDIDGIQAIYGRSQNPVQPIGPQTPKACDSKLTFDAITTIRGEVMFFKDRFYMRTNPFYPEVELNFISVFWPQLPNGLEAAYEFADRDEVRFFKGNKYWAVQGQNVLHGYPKDIYSSFGFPRTVKHIDAALSEENTGKTYFFVANKYWRYDEYKRSMDPGYPKMIAHDFPGIGHKVDAVFMKDGFFYFFHGTRQYKFDPKTKRILTLQKANSWFNCRKN

SEQ ID NO: 1801 - protein, 450 aa, Artificial Sequence
  MMP-1 variant A138I
FPATLETQEQDVDLVQKYLEKYYNLKNDGRQVEKRRNSGPVVEKLKQMQEFFGLKVTGKPDAETLKVMKQPRCGVPDVAQFVLTEGNPRWEQTHLTYRIENYTPDLPRADVDHAIEKAFQLWSNVTPLTFTKVSEGQIDIMISFVRGDHRDNSPFDGPGGNLAHAFQPGPGIGGDAHFDEDERWTNNFREYNLHRVAAHELGHSLGLSHSTDIGALMYPSYTFSGDVQLAQDDIDGIQAIYGRSQNPVQPIGPQTPKACDSKLTFDAITTIRGEVMFFKDRFYMRTNPFYPEVELNFISVFWPQLPNGLEAAYEFADRDEVRFFKGNKYWAVQGQNVLHGYPKDIYSSFGFPRTVKHIDAALSEENTGKTYFFVANKYWRYDEYKRSMDPGYPKMIAHDFPGIGHKVDAVFMKDGFFYFFHGTRQYKFDPKTKRILTLQKANSWFNCRKN

SEQ ID NO: 1802 - protein, 450 aa, Artificial Sequence
  MMP-1 variant A138V
FPATLETQEQDVDLVQKYLEKYYNLKNDGRQVEKRRNSGPVVEKLKQMQEFFGLKVTGKPDAETLKVMKQPRCGVPDVAQFVLTEGNPRWEQTHLTYRIENYTPDLPRADVDHAIEKAFQLWSNVTPLTFTKVSEGQVDIMISFVRGDHRDNSPFDGPGGNLAHAFQPGPGIGGDAHFDEDERWTNNFREYNLHRVAAHELGHSLGLSHSTDIGALMYPSYTFSGDVQLAQDDIDGIQAIYGRSQNPVQPIGPQTPKACDSKLTFDAITTIRGEVMFFKDRFYMRTNPFYPEVELNFISVFWPQLPNGLEAAYEFADRDEVRFFKGNKYWAVQGQNVLHGYPKDIYSSFGFPRTVKHIDAALSEENTGKTYFFVANKYWRYDEYKRSMDPGYPKMIAHDFPGIGHKVDAVFMKDGFFYFFHGTRQYKFDPKTKRILTLQKANSWFNCRKN

SEQ ID NO: 1803 - protein, 450 aa, Artificial Sequence
  MMP-1 variant A138L
FPATLETQEQDVDLVQKYLEKYYNLKNDGRQVEKRRNSGPVVEKLKQMQEFFGLKVTGKPDAETLKVMKQPRCGVPDVAQFVLTEGNPRWEQTHLTYRIENYTPDLPRADVDHAIEKAFQLWSNVTPLTFTKVSEGQLDIMISFVRGDHRDNSPFDGPGGNLAHAFQPGPGIGGDAHFDEDERWTNNFREYNLHRVAAHELGHSLGLSHSTDIGALMYPSYTFSGDVQLAQDDIDGIQAIYGRSQNPVQPIGPQTPKACDSKLTFDAITTIRGEVMFFKDRFYMRTNPFYPEVELNFISVFWPQLPNGLEAAYEFADRDEVRFFKGNKYWAVQGQNVLHGYPKDIYSSFGFPRTVKHIDAALSEENTGKTYFFVANKYWRYDEYKRSMDPGYPKMIAHDFPGIGHKVDAVFMKDGFFYFFHGTRQYKFDPKTKRILTLQKANSWFNCRKN

SEQ ID NO: 1804 - protein, 450 aa, Artificial Sequence
  MMP-1 variant A138P
FPATLETQEQDVDLVQKYLEKYYNLKNDGRQVEKRRNSGPVVEKLKQMQEFFGLKVTGKPDAETLKVMKQPRCGVPDVAQFVLTEGNPRWEQTHLTYRIENYTPDLPRADVDHAIEKAFQLWSNVTPLTFTKVSEGQPDIMISFVRGDHRDNSPFDGPGGNLAHAFQPGPGIGGDAHFDEDERWTNNFREYNLHRVAAHELGHSLGLSHSTDIGALMYPSYTFSGDVQLAQDDIDGIQAIYGRSQNPVQPIGPQTPKACDSKLTFDAITTIRGEVMFFKDRFYMRTNPFYPEVELNFISVFWPQLPNGLEAAYEFADRDEVRFFKGNKYWAVQGQNVLHGYPKDIYSSFGFPRTVKHIDAALSEENTGKTYFFVANKYWRYDEYKRSMDPGYPKMIAHDFPGIGHKVDAVFMKDGFFYFFHGTRQYKFDPKTKRILTLQKANSWFNCRKN

SEQ ID NO: 1805 - protein, 450 aa, Artificial Sequence
  MMP-1 variant D139E
FPATLETQEQDVDLVQKYLEKYYNLKNDGRQVEKRRNSGPVVEKLKQMQEFFGLKVTGKPDAETLKVMKQPRCGVPDVAQFVLTEGNPRWEQTHLTYRIENYTPDLPRADVDHAIEKAFQLWSNVTPLTFTKVSEGQAEIMISFVRGDHRDNSPFDGPGGNLAHAFQPGPGIGGDAHFDEDERWTNNFREYNLHRVAAHELGHSLGLSHSTDIGALMYPSYTFSGDVQLAQDDIDGIQAIYGRSQNPVQPIGPQTPKACDSKLTFDAITTIRGEVMFFKDRFYMRTNPFYPEVELNFISVFWPQLPNGLEAAYEFADRDEVRFFKGNKYWAVQGQNVLHGYPKDIYSSFGFPRTVKHIDAALSEENTGKTYFFVANKYWRYDEYKRSMDPGYPKMIAHDFPGIGHKVDAVFMKDGFFYFFHGTRQYKFDPKTKRILTLQKANSWFNCRKN

SEQ ID NO: 1806 - protein, 450 aa, Artificial Sequence
  MMP-1 variant D139H
FPATLETQEQDVDLVQKYLEKYYNLKNDGRQVEKRRNSGPVVEKLKQMQEFFGLKVTGKPDAETLKVMKQPRCGVPDVAQFVLTEGNPRWEQTHLTYRIENYTPDLPRADVDHAIEKAFQLWSNVTPLTFTKVSEGQAHIMISFVRGDHRDNSPFDGPGGNLAHAFQPGPGIGGDAHFDEDERWTNNFREYNLHRVAAHELGHSLGLSHSTDIGALMYPSYTFSGDVQLAQDDIDGIQAIYGRSQNPVQPIGPQTPKACDSKLTFDAITTIRGEVMFFKDRFYMRTNPFYPEVELNFISVFWPQLPNGLEAAYEFADRDEVRFFKGNKYWAVQGQNVLHGYPKDIYSSFGFPRTVKHIDAALSEENTGKTYFFVANKYWRYDEYKRSMDPGYPKMIAHDFPGIGHKVDAVFMKDGFFYFFHGTRQYKFDPKTKRILTLQKANSWFNCRKN

SEQ ID NO: 1807 - protein, 450 aa, Artificial Sequence
  MMP-1 variant D139K
FPATLETQEQDVDLVQKYLEKYYNLKNDGRQVEKRRNSGPVVEKLKQMQEFFGLKVTGKPDAETLKVMKQPRCGVPDVAQFVLTEGNPRWEQTHLTYRIENYTPDLPRADVDHAIEKAFQLWSNVTPLTFTKVSEGQAKIMISFVRGDHRDNSPFDGPGGNLAHAFQPGPGIGGDAHFDEDERWTNNFREYNLHRVAAHELGHSLGLSHSTDIGALMYPSYTFSGDVQLAQDDIDGIQAIYGRSQNPVQPIGPQTPKACDSKLTFDAITTIRGEVMFFKDRFYMRTNPFYPEVELNFISVFWPQLPNGLEAAYEFADRDEVRFFKGNKYWAVQGQNVLHGYPKDIYSSFGFPRTVKHIDAALSEENTGKTYFFVANKYWRYDEYKRSMDPGYPKMIAHDFPGIGHKVDAVFMKDGFFYFFHGTRQYKFDPKTKRILTLQKANSWFNCRKN

SEQ ID NO: 1808 - protein, 450 aa, Artificial Sequence
  MMP-1 variant D139R
FPATLETQEQDVDLVQKYLEKYYNLKNDGRQVEKRRNSGPVVEKLKQMQEFFGLKVTGKPDAETLKVMKQPRCGVPDVAQFVLTEGNPRWEQTHLTYRIENYTPDLPRADVDHAIEKAFQLWSNVTPLTFTKVSEGQARIMISFVRGDHRDNSPFDGPGGNLAHAFQPGPGIGGDAHFDEDERWTNNFREYNLHRVAAHELGHSLGLSHSTDIGALMYPSYTFSGDVQLAQDDIDGIQAIYGRSQNPVQPIGPQTPKACDSKLTFDAITTIRGEVMFFKDRFYMRTNPFYPEVELNFISVFWPQLPNGLEAAYEFADRDEVRFFKGNKYWAVQGQNVLHGYPKDIYSSFGFPRTVKHIDAALSEENTGKTYFFVANKYWRYDEYKRSMDPGYPKMIAHDFPGIGHKVDAVFMKDGFFYFFHGTRQYKFDPKTKRILTLQKANSWFNCRKN

SEQ ID NO: 1809 - protein, 450 aa, Artificial Sequence
  MMP-1 variant D139C
FPATLETQEQDVDLVQKYLEKYYNLKNDGRQVEKRRNSGPVVEKLKQMQEFFGLKVTGKPDAETLKVMKQPRCGVPDVAQFVLTEGNPRWEQTHLTYRIENYTPDLPRADVDHAIEKAFQLWSNVTPLTFTKVSEGQACIMISFVRGDHRDNSPFDGPGGNLAHAFQPGPGIGGDAHFDEDERWTNNFREYNLHRVAAHELGHSLGLSHSTDIGALMYPSYTFSGDVQLAQDDIDGIQAIYGRSQNPVQPIGPQTPKACDSKLTFDAITTIRGEVMFFKDRFYMRTNPFYPEVELNFISVFWPQLPNGLEAAYEFADRDEVRFFKGNKYWAVQGQNVLHGYPKDIYSSFGFPRTVKHIDAALSEENTGKTYFFVANKYWRYDEYKRSMDPGYPKMIAHDFPGIGHKVDAVFMKDGFFYFFHGTRQYKFDPKTKRILTLQKANSWFNCRKN

SEQ ID NO: 1810 - protein, 450 aa, Artificial Sequence
  MMP-1 variant D139N
FPATLETQEQDVDLVQKYLEKYYNLKNDGRQVEKRRNSGPVVEKLKQMQEFFGLKVTGKPDAETLKVMKQPRCGVPDVAQFVLTEGNPRWEQTHLTYRIENYTPDLPRADVDHAIEKAFQLWSNVTPLTFTKVSEGQANIMISFVRGDHRDNSPFDGPGGNLAHAFQPGPGIGGDAHFDEDERWTNNFREYNLHRVAAHELGHSLGLSHSTDIGALMYPSYTFSGDVQLAQDDIDGIQAIYGRSQNPVQPIGPQTPKACDSKLTFDAITTIRGEVMFFKDRFYMRTNPFYPEVELNFISVFWPQLPNGLEAAYEFADRDEVRFFKGNKYWAVQGQNVLHGYPKDIYSSFGFPRTVKHIDAALSEENTGKTYFFVANKYWRYDEYKRSMDPGYPKMIAHDFPGIGHKVDAVFMKDGFFYFFHGTRQYKFDPKTKRILTLQKANSWFNCRKN

SEQ ID NO: 1811 - protein, 450 aa, Artificial Sequence
  MMP-1 variant D139Q
FPATLETQEQDVDLVQKYLEKYYNLKNDGRQVEKRRNSGPVVEKLKQMQEFFGLKVTGKPDAETLKVMKQPRCGVPDVAQFVLTEGNPRWEQTHLTYRIENYTPDLPRADVDHAIEKAFQLWSNVTPLTFTKVSEGQAQIMISFVRGDHRDNSPFDGPGGNLAHAFQPGPGIGGDAHFDEDERWTNNFREYNLHRVAAHELGHSLGLSHSTDIGALMYPSYTFSGDVQLAQDDIDGIQAIYGRSQNPVQPIGPQTPKACDSKLTFDAITTIRGEVMFFKDRFYMRTNPFYPEVELNFISVFWPQLPNGLEAAYEFADRDEVRFFKGNKYWAVQGQNVLHGYPKDIYSSFGFPRTVKHIDAALSEENTGKTYFFVANKYWRYDEYKRSMDPGYPKMIAHDFPGIGHKVDAVFMKDGFFYFFHGTRQYKFDPKTKRILTLQKANSWFNCRKN

SEQ ID NO: 1812 - protein, 450 aa, Artificial Sequence
  MMP-1 variant D139T
FPATLETQEQDVDLVQKYLEKYYNLKNDGRQVEKRRNSGPVVEKLKQMQEFFGLKVTGKPDAETLKVMKQPRCGVPDVAQFVLTEGNPRWEQTHLTYRIENYTPDLPRADVDHAIEKAFQLWSNVTPLTFTKVSEGQATIMISFVRGDHRDNSPFDGPGGNLAHAFQPGPGIGGDAHFDEDERWTNNFREYNLHRVAAHELGHSLGLSHSTDIGALMYPSYTFSGDVQLAQDDIDGIQAIYGRSQNPVQPIGPQTPKACDSKLTFDAITTIRGEVMFFKDRFYMRTNPFYPEVELNFISVFWPQLPNGLEAAYEFADRDEVRFFKGNKYWAVQGQNVLHGYPKDIYSSFGFPRTVKHIDAALSEENTGKTYFFVANKYWRYDEYKRSMDPGYPKMIAHDFPGIGHKVDAVFMKDGFFYFFHGTRQYKFDPKTKRILTLQKANSWFNCRKN

SEQ ID NO: 1813 - protein, 450 aa, Artificial Sequence
  MMP-1 variant D139Y
FPATLETQEQDVDLVQKYLEKYYNLKNDGRQVEKRRNSGPVVEKLKQMQEFFGLKVTGKPDAETLKVMKQPRCGVPDVAQFVLTEGNPRWEQTHLTYRIENYTPDLPRADVDHAIEKAFQLWSNVTPLTFTKVSEGQAYIMISFVRGDHRDNSPFDGPGGNLAHAFQPGPGIGGDAHFDEDERWTNNFREYNLHRVAAHELGHSLGLSHSTDIGALMYPSYTFSGDVQLAQDDIDGIQAIYGRSQNPVQPIGPQTPKACDSKLTFDAITTIRGEVMFFKDRFYMRTNPFYPEVELNFISVFWPQLPNGLEAAYEFADRDEVRFFKGNKYWAVQGQNVLHGYPKDIYSSFGFPRTVKHIDAALSEENTGKTYFFVANKYWRYDEYKRSMDPGYPKMIAHDFPGIGHKVDAVFMKDGFFYFFHGTRQYKFDPKTKRILTLQKANSWFNCRKN

SEQ ID NO: 1814 - protein, 450 aa, Artificial Sequence
  MMP-1 variant D139S
FPATLETQEQDVDLVQKYLEKYYNLKNDGRQVEKRRNSGPVVEKLKQMQEFFGLKVTGKPDAETLKVMKQPRCGVPDVAQFVLTEGNPRWEQTHLTYRIENYTPDLPRADVDHAIEKAFQLWSNVTPLTFTKVSEGQASIMISFVRGDHRDNSPFDGPGGNLAHAFQPGPGIGGDAHFDEDERWTNNFREYNLHRVAAHELGHSLGLSHSTDIGALMYPSYTFSGDVQLAQDDIDGIQAIYGRSQNPVQPIGPQTPKACDSKLTFDAITTIRGEVMFFKDRFYMRTNPFYPEVELNFISVFWPQLPNGLEAAYEFADRDEVRFFKGNKYWAVQGQNVLHGYPKDIYSSFGFPRTVKHIDAALSEENTGKTYFFVANKYWRYDEYKRSMDPGYPKMIAHDFPGIGHKVDAVFMKDGFFYFFHGTRQYKFDPKTKRILTLQKANSWFNCRKN

SEQ ID NO: 1815 - protein, 450 aa, Artificial Sequence
  MMP-1 variant D139G
FPATLETQEQDVDLVQKYLEKYYNLKNDGRQVEKRRNSGPVVEKLKQMQEFFGLKVTGKPDAETLKVMKQPRCGVPDVAQFVLTEGNPRWEQTHLTYRIENYTPDLPRADVDHAIEKAFQLWSNVTPLTFTKVSEGQAGIMISFVRGDHRDNSPFDGPGGNLAHAFQPGPGIGGDAHFDEDERWTNNFREYNLHRVAAHELGHSLGLSHSTDIGALMYPSYTFSGDVQLAQDDIDGIQAIYGRSQNPVQPIGPQTPKACDSKLTFDAITTIRGEVMFFKDRFYMRTNPFYPEVELNFISVFWPQLPNGLEAAYEFADRDEVRFFKGNKYWAVQGQNVLHGYPKDIYSSFGFPRTVKHIDAALSEENTGKTYFFVANKYWRYDEYKRSMDPGYPKMIAHDFPGIGHKVDAVFMKDGFFYFFHGTRQYKFDPKTKRILTLQKANSWFNCRKN

SEQ ID NO: 1816 - protein, 450 aa, Artificial Sequence
  MMP-1 variant D139F
FPATLETQEQDVDLVQKYLEKYYNLKNDGRQVEKRRNSGPVVEKLKQMQEFFGLKVTGKPDAETLKVMKQPRCGVPDVAQFVLTEGNPRWEQTHLTYRIENYTPDLPRADVDHAIEKAFQLWSNVTPLTFTKVSEGQAFIMISFVRGDHRDNSPFDGPGGNLAHAFQPGPGIGGDAHFDEDERWTNNFREYNLHRVAAHELGHSLGLSHSTDIGALMYPSYTFSGDVQLAQDDIDGIQAIYGRSQNPVQPIGPQTPKACDSKLTFDAITTIRGEVMFFKDRFYMRTNPFYPEVELNFISVFWPQLPNGLEAAYEFADRDEVRFFKGNKYWAVQGQNVLHGYPKDIYSSFGFPRTVKHIDAALSEENTGKTYFFVANKYWRYDEYKRSMDPGYPKMIAHDFPGIGHKVDAVFMKDGFFYFFHGTRQYKFDPKTKRILTLQKANSWFNCRKN

SEQ ID NO: 1817 - protein, 450 aa, Artificial Sequence
  MMP-1 variant D139M
FPATLETQEQDVDLVQKYLEKYYNLKNDGRQVEKRRNSGPVVEKLKQMQEFFGLKVTGKPDAETLKVMKQPRCGVPDVAQFVLTEGNPRWEQTHLTYRIENYTPDLPRADVDHAIEKAFQLWSNVTPLTFTKVSEGQAMIMISFVRGDHRDNSPFDGPGGNLAHAFQPGPGIGGDAHFDEDERWTNNFREYNLHRVAAHELGHSLGLSHSTDIGALMYPSYTFSGDVQLAQDDIDGIQAIYGRSQNPVQPIGPQTPKACDSKLTFDAITTIRGEVMFFKDRFYMRTNPFYPEVELNFISVFWPQLPNGLEAAYEFADRDEVRFFKGNKYWAVQGQNVLHGYPKDIYSSFGFPRTVKHIDAALSEENTGKTYFFVANKYWRYDEYKRSMDPGYPKMIAHDFPGIGHKVDAVFMKDGFFYFFHGTRQYKFDPKTKRILTLQKANSWFNCRKN

SEQ ID NO: 1818 - protein, 450 aa, Artificial Sequence
  MMP-1 variant D139W
FPATLETQEQDVDLVQKYLEKYYNLKNDGRQVEKRRNSGPVVEKLKQMQEFFGLKVTGKPDAETLKVMKQPRCGVPDVAQFVLTEGNPRWEQTHLTYRIENYTPDLPRADVDHAIEKAFQLWSNVTPLTFTKVSEGQAWIMISFVRGDHRDNSPFDGPGGNLAHAFQPGPGIGGDAHFDEDERWTNNFREYNLHRVAAHELGHSLGLSHSTDIGALMYPSYTFSGDVQLAQDDIDGIQAIYGRSQNPVQPIGPQTPKACDSKLTFDAITTIRGEVMFFKDRFYMRTNPFYPEVELNFISVFWPQLPNGLEAAYEFADRDEVRFFKGNKYWAVQGQNVLHGYPKDIYSSFGFPRTVKHIDAALSEENTGKTYFFVANKYWRYDEYKRSMDPGYPKMIAHDFPGIGHKVDAVFMKDGFFYFFHGTRQYKFDPKTKRILTLQKANSWFNCRKN

SEQ ID NO: 1819 - protein, 450 aa, Artificial Sequence
  MMP-1 variant D139I
FPATLETQEQDVDLVQKYLEKYYNLKNDGRQVEKRRNSGPVVEKLKQMQEFFGLKVTGKPDAETLKVMKQPRCGVPDVAQFVLTEGNPRWEQTHLTYRIENYTPDLPRADVDHAIEKAFQLWSNVTPLTFTKVSEGQAIIMISFVRGDHRDNSPFDGPGGNLAHAFQPGPGIGGDAHFDEDERWTNNFREYNLHRVAAHELGHSLGLSHSTDIGALMYPSYTFSGDVQLAQDDIDGIQAIYGRSQNPVQPIGPQTPKACDSKLTFDAITTIRGEVMFFKDRFYMRTNPFYPEVELNFISVFWPQLPNGLEAAYEFADRDEVRFFKGNKYWAVQGQNVLHGYPKDIYSSFGFPRTVKHIDAALSEENTGKTYFFVANKYWRYDEYKRSMDPGYPKMIAHDFPGIGHKVDAVFMKDGFFYFFHGTRQYKFDPKTKRILTLQKANSWFNCRKN

SEQ ID NO: 1820 - protein, 450 aa, Artificial Sequence
  MMP-1 variant D139V
FPATLETQEQDVDLVQKYLEKYYNLKNDGRQVEKRRNSGPVVEKLKQMQEFFGLKVTGKPDAETLKVMKQPRCGVPDVAQFVLTEGNPRWEQTHLTYRIENYTPDLPRADVDHAIEKAFQLWSNVTPLTFTKVSEGQAVIMISFVRGDHRDNSPFDGPGGNLAHAFQPGPGIGGDAHFDEDERWTNNFREYNLHRVAAHELGHSLGLSHSTDIGALMYPSYTFSGDVQLAQDDIDGIQAIYGRSQNPVQPIGPQTPKACDSKLTFDAITTIRGEVMFFKDRFYMRTNPFYPEVELNFISVFWPQLPNGLEAAYEFADRDEVRFFKGNKYWAVQGQNVLHGYPKDIYSSFGFPRTVKHIDAALSEENTGKTYFFVANKYWRYDEYKRSMDPGYPKMIAHDFPGIGHKVDAVFMKDGFFYFFHGTRQYKFDPKTKRILTLQKANSWFNCRKN

SEQ ID NO: 1821 - protein, 450 aa, Artificial Sequence
  MMP-1 variant D139L
FPATLETQEQDVDLVQKYLEKYYNLKNDGRQVEKRRNSGPVVEKLKQMQEFFGLKVTGKPDAETLKVMKQPRCGVPDVAQFVLTEGNPRWEQTHLTYRIENYTPDLPRADVDHAIEKAFQLWSNVTPLTFTKVSEGQALIMISFVRGDHRDNSPFDGPGGNLAHAFQPGPGIGGDAHFDEDERWTNNFREYNLHRVAAHELGHSLGLSHSTDIGALMYPSYTFSGDVQLAQDDIDGIQAIYGRSQNPVQPIGPQTPKACDSKLTFDAITTIRGEVMFFKDRFYMRTNPFYPEVELNFISVFWPQLPNGLEAAYEFADRDEVRFFKGNKYWAVQGQNVLHGYPKDIYSSFGFPRTVKHIDAALSEENTGKTYFFVANKYWRYDEYKRSMDPGYPKMIAHDFPGIGHKVDAVFMKDGFFYFFHGTRQYKFDPKTKRILTLQKANSWFNCRKN

SEQ ID NO: 1822 - protein, 450 aa, Artificial Sequence
  MMP-1 variant D139A
FPATLETQEQDVDLVQKYLEKYYNLKNDGRQVEKRRNSGPVVEKLKQMQEFFGLKVTGKPDAETLKVMKQPRCGVPDVAQFVLTEGNPRWEQTHLTYRIENYTPDLPRADVDHAIEKAFQLWSNVTPLTFTKVSEGQAAIMISFVRGDHRDNSPFDGPGGNLAHAFQPGPGIGGDAHFDEDERWTNNFREYNLHRVAAHELGHSLGLSHSTDIGALMYPSYTFSGDVQLAQDDIDGIQAIYGRSQNPVQPIGPQTPKACDSKLTFDAITTIRGEVMFFKDRFYMRTNPFYPEVELNFISVFWPQLPNGLEAAYEFADRDEVRFFKGNKYWAVQGQNVLHGYPKDIYSSFGFPRTVKHIDAALSEENTGKTYFFVANKYWRYDEYKRSMDPGYPKMIAHDFPGIGHKVDAVFMKDGFFYFFHGTRQYKFDPKTKRILTLQKANSWFNCRKN

SEQ ID NO: 1823 - protein, 450 aa, Artificial Sequence
  MMP-1 variant D139P
FPATLETQEQDVDLVQKYLEKYYNLKNDGRQVEKRRNSGPVVEKLKQMQEFFGLKVTGKPDAETLKVMKQPRCGVPDVAQFVLTEGNPRWEQTHLTYRIENYTPDLPRADVDHAIEKAFQLWSNVTPLTFTKVSEGQAPIMISFVRGDHRDNSPFDGPGGNLAHAFQPGPGIGGDAHFDEDERWTNNFREYNLHRVAAHELGHSLGLSHSTDIGALMYPSYTFSGDVQLAQDDIDGIQAIYGRSQNPVQPIGPQTPKACDSKLTFDAITTIRGEVMFFKDRFYMRTNPFYPEVELNFISVFWPQLPNGLEAAYEFADRDEVRFFKGNKYWAVQGQNVLHGYPKDIYSSFGFPRTVKHIDAALSEENTGKTYFFVANKYWRYDEYKRSMDPGYPKMIAHDFPGIGHKVDAVFMKDGFFYFFHGTRQYKFDPKTKRILTLQKANSWFNCRKN

SEQ ID NO: 1824 - protein, 450 aa, Artificial Sequence
  MMP-1 variant I140D
FPATLETQEQDVDLVQKYLEKYYNLKNDGRQVEKRRNSGPVVEKLKQMQEFFGLKVTGKPDAETLKVMKQPRCGVPDVAQFVLTEGNPRWEQTHLTYRIENYTPDLPRADVDHAIEKAFQLWSNVTPLTFTKVSEGQADDMISFVRGDHRDNSPFDGPGGNLAHAFQPGPGIGGDAHFDEDERWTNNFREYNLHRVAAHELGHSLGLSHSTDIGALMYPSYTFSGDVQLAQDDIDGIQAIYGRSQNPVQPIGPQTPKACDSKLTFDAITTIRGEVMFFKDRFYMRTNPFYPEVELNFISVFWPQLPNGLEAAYEFADRDEVRFFKGNKYWAVQGQNVLHGYPKDIYSSFGFPRTVKHIDAALSEENTGKTYFFVANKYWRYDEYKRSMDPGYPKMIAHDFPGIGHKVDAVFMKDGFFYFFHGTRQYKFDPKTKRILTLQKANSWFNCRKN

SEQ ID NO: 1825 - protein, 450 aa, Artificial Sequence
  MMP-1 variant I140E
FPATLETQEQDVDLVQKYLEKYYNLKNDGRQVEKRRNSGPVVEKLKQMQEFFGLKVTGKPDAETLKVMKQPRCGVPDVAQFVLTEGNPRWEQTHLTYRIENYTPDLPRADVDHAIEKAFQLWSNVTPLTFTKVSEGQADEMISFVRGDHRDNSPFDGPGGNLAHAFQPGPGIGGDAHFDEDERWTNNFREYNLHRVAAHELGHSLGLSHSTDIGALMYPSYTFSGDVQLAQDDIDGIQAIYGRSQNPVQPIGPQTPKACDSKLTFDAITTIRGEVMFFKDRFYMRTNPFYPEVELNFISVFWPQLPNGLEAAYEFADRDEVRFFKGNKYWAVQGQNVLHGYPKDIYSSFGFPRTVKHIDAALSEENTGKTYFFVANKYWRYDEYKRSMDPGYPKMIAHDFPGIGHKVDAVFMKDGFFYFFHGTRQYKFDPKTKRILTLQKANSWFNCRKN

SEQ ID NO: 1826 - protein, 450 aa, Artificial Sequence
  MMP-1 variant I140H
FPATLETQEQDVDLVQKYLEKYYNLKNDGRQVEKRRNSGPVVEKLKQMQEFFGLKVTGKPDAETLKVMKQPRCGVPDVAQFVLTEGNPRWEQTHLTYRIENYTPDLPRADVDHAIEKAFQLWSNVTPLTFTKVSEGQADHMISFVRGDHRDNSPFDGPGGNLAHAFQPGPGIGGDAHFDEDERWTNNFREYNLHRVAAHELGHSLGLSHSTDIGALMYPSYTFSGDVQLAQDDIDGIQAIYGRSQNPVQPIGPQTPKACDSKLTFDAITTIRGEVMFFKDRFYMRTNPFYPEVELNFISVFWPQLPNGLEAAYEFADRDEVRFFKGNKYWAVQGQNVLHGYPKDIYSSFGFPRTVKHIDAALSEENTGKTYFFVANKYWRYDEYKRSMDPGYPKMIAHDFPGIGHKVDAVFMKDGFFYFFHGTRQYKFDPKTKRILTLQKANSWFNCRKN

SEQ ID NO: 1827 - protein, 450 aa, Artificial Sequence
  MMP-1 variant I140K
FPATLETQEQDVDLVQKYLEKYYNLKNDGRQVEKRRNSGPVVEKLKQMQEFFGLKVTGKPDAETLKVMKQPRCGVPDVAQFVLTEGNPRWEQTHLTYRIENYTPDLPRADVDHAIEKAFQLWSNVTPLTFTKVSEGQADKMISFVRGDHRDNSPFDGPGGNLAHAFQPGPGIGGDAHFDEDERWTNNFREYNLHRVAAHELGHSLGLSHSTDIGALMYPSYTFSGDVQLAQDDIDGIQAIYGRSQNPVQPIGPQTPKACDSKLTFDAITTIRGEVMFFKDRFYMRTNPFYPEVELNFISVFWPQLPNGLEAAYEFADRDEVRFFKGNKYWAVQGQNVLHGYPKDIYSSFGFPRTVKHIDAALSEENTGKTYFFVANKYWRYDEYKRSMDPGYPKMIAHDFPGIGHKVDAVFMKDGFFYFFHGTRQYKFDPKTKRILTLQKANSWFNCRKN

SEQ ID NO: 1828 - protein, 450 aa, Artificial Sequence
  MMP-1 variant I140R
FPATLETQEQDVDLVQKYLEKYYNLKNDGRQVEKRRNSGPVVEKLKQMQEFFGLKVTGKPDAETLKVMKQPRCGVPDVAQFVLTEGNPRWEQTHLTYRIENYTPDLPRADVDHAIEKAFQLWSNVTPLTFTKVSEGQADRMISFVRGDHRDNSPFDGPGGNLAHAFQPGPGIGGDAHFDEDERWTNNFREYNLHRVAAHELGHSLGLSHSTDIGALMYPSYTFSGDVQLAQDDIDGIQAIYGRSQNPVQPIGPQTPKACDSKLTFDAITTIRGEVMFFKDRFYMRTNPFYPEVELNFISVFWPQLPNGLEAAYEFADRDEVRFFKGNKYWAVQGQNVLHGYPKDIYSSFGFPRTVKHIDAALSEENTGKTYFFVANKYWRYDEYKRSMDPGYPKMIAHDFPGIGHKVDAVFMKDGFFYFFHGTRQYKFDPKTKRILTLQKANSWFNCRKN

SEQ ID NO: 1829 - protein, 450 aa, Artificial Sequence
  MMP-1 variant I140C
FPATLETQEQDVDLVQKYLEKYYNLKNDGRQVEKRRNSGPVVEKLKQMQEFFGLKVTGKPDAETLKVMKQPRCGVPDVAQFVLTEGNPRWEQTHLTYRIENYTPDLPRADVDHAIEKAFQLWSNVTPLTFTKVSEGQADCMISFVRGDHRDNSPFDGPGGNLAHAFQPGPGIGGDAHFDEDERWTNNFREYNLHRVAAHELGHSLGLSHSTDIGALMYPSYTFSGDVQLAQDDIDGIQAIYGRSQNPVQPIGPQTPKACDSKLTFDAITTIRGEVMFFKDRFYMRTNPFYPEVELNFISVFWPQLPNGLEAAYEFADRDEVRFFKGNKYWAVQGQNVLHGYPKDIYSSFGFPRTVKHIDAALSEENTGKTYFFVANKYWRYDEYKRSMDPGYPKMIAHDFPGIGHKVDAVFMKDGFFYFFHGTRQYKFDPKTKRILTLQKANSWFNCRKN

SEQ ID NO: 1830 - protein, 450 aa, Artificial Sequence
  MMP-1 variant I140N
FPATLETQEQDVDLVQKYLEKYYNLKNDGRQVEKRRNSGPVVEKLKQMQEFFGLKVTGKPDAETLKVMKQPRCGVPDVAQFVLTEGNPRWEQTHLTYRIENYTPDLPRADVDHAIEKAFQLWSNVTPLTFTKVSEGQADNMISFVRGDHRDNSPFDGPGGNLAHAFQPGPGIGGDAHFDEDERWTNNFREYNLHRVAAHELGHSLGLSHSTDIGALMYPSYTFSGDVQLAQDDIDGIQAIYGRSQNPVQPIGPQTPKACDSKLTFDAITTIRGEVMFFKDRFYMRTNPFYPEVELNFISVFWPQLPNGLEAAYEFADRDEVRFFKGNKYWAVQGQNVLHGYPKDIYSSFGFPRTVKHIDAALSEENTGKTYFFVANKYWRYDEYKRSMDPGYPKMIAHDFPGIGHKVDAVFMKDGFFYFFHGTRQYKFDPKTKRILTLQKANSWFNCRKN

SEQ ID NO: 1831 - protein, 450 aa, Artificial Sequence
  MMP-1 variant I140Q
FPATLETQEQDVDLVQKYLEKYYNLKNDGRQVEKRRNSGPVVEKLKQMQEFFGLKVTGKPDAETLKVMKQPRCGVPDVAQFVLTEGNPRWEQTHLTYRIENYTPDLPRADVDHAIEKAFQLWSNVTPLTFTKVSEGQADQMISFVRGDHRDNSPFDGPGGNLAHAFQPGPGIGGDAHFDEDERWTNNFREYNLHRVAAHELGHSLGLSHSTDIGALMYPSYTFSGDVQLAQDDIDGIQAIYGRSQNPVQPIGPQTPKACDSKLTFDAITTIRGEVMFFKDRFYMRTNPFYPEVELNFISVFWPQLPNGLEAAYEFADRDEVRFFKGNKYWAVQGQNVLHGYPKDIYSSFGFPRTVKHIDAALSEENTGKTYFFVANKYWRYDEYKRSMDPGYPKMIAHDFPGIGHKVDAVFMKDGFFYFFHGTRQYKFDPKTKRILTLQKANSWFNCRKN

SEQ ID NO: 1832 - protein, 450 aa, Artificial Sequence
  MMP-1 variant I140T
FPATLETQEQDVDLVQKYLEKYYNLKNDGRQVEKRRNSGPVVEKLKQMQEFFGLKVTGKPDAETLKVMKQPRCGVPDVAQFVLTEGNPRWEQTHLTYRIENYTPDLPRADVDHAIEKAFQLWSNVTPLTFTKVSEGQADTMISFVRGDHRDNSPFDGPGGNLAHAFQPGPGIGGDAHFDEDERWTNNFREYNLHRVAAHELGHSLGLSHSTDIGALMYPSYTFSGDVQLAQDDIDGIQAIYGRSQNPVQPIGPQTPKACDSKLTFDAITTIRGEVMFFKDRFYMRTNPFYPEVELNFISVFWPQLPNGLEAAYEFADRDEVRFFKGNKYWAVQGQNVLHGYPKDIYSSFGFPRTVKHIDAALSEENTGKTYFFVANKYWRYDEYKRSMDPGYPKMIAHDFPGIGHKVDAVFMKDGFFYFFHGTRQYKFDPKTKRILTLQKANSWFNCRKN

SEQ ID NO: 1833 - protein, 450 aa, Artificial Sequence
  MMP-1 variant I140Y
FPATLETQEQDVDLVQKYLEKYYNLKNDGRQVEKRRNSGPVVEKLKQMQEFFGLKVTGKPDAETLKVMKQPRCGVPDVAQFVLTEGNPRWEQTHLTYRIENYTPDLPRADVDHAIEKAFQLWSNVTPLTFTKVSEGQADYMISFVRGDHRDNSPFDGPGGNLAHAFQPGPGIGGDAHFDEDERWTNNFREYNLHRVAAHELGHSLGLSHSTDIGALMYPSYTFSGDVQLAQDDIDGIQAIYGRSQNPVQPIGPQTPKACDSKLTFDAITTIRGEVMFFKDRFYMRTNPFYPEVELNFISVFWPQLPNGLEAAYEFADRDEVRFFKGNKYWAVQGQNVLHGYPKDIYSSFGFPRTVKHIDAALSEENTGKTYFFVANKYWRYDEYKRSMDPGYPKMIAHDFPGIGHKVDAVFMKDGFFYFFHGTRQYKFDPKTKRILTLQKANSWFNCRKN

SEQ ID NO: 1834 - protein, 450 aa, Artificial Sequence
  MMP-1 variant I140S
FPATLETQEQDVDLVQKYLEKYYNLKNDGRQVEKRRNSGPVVEKLKQMQEFFGLKVTGKPDAETLKVMKQPRCGVPDVAQFVLTEGNPRWEQTHLTYRIENYTPDLPRADVDHAIEKAFQLWSNVTPLTFTKVSEGQADSMISFVRGDHRDNSPFDGPGGNLAHAFQPGPGIGGDAHFDEDERWTNNFREYNLHRVAAHELGHSLGLSHSTDIGALMYPSYTFSGDVQLAQDDIDGIQAIYGRSQNPVQPIGPQTPKACDSKLTFDAITTIRGEVMFFKDRFYMRTNPFYPEVELNFISVFWPQLPNGLEAAYEFADRDEVRFFKGNKYWAVQGQNVLHGYPKDIYSSFGFPRTVKHIDAALSEENTGKTYFFVANKYWRYDEYKRSMDPGYPKMIAHDFPGIGHKVDAVFMKDGFFYFFHGTRQYKFDPKTKRILTLQKANSWFNCRKN

SEQ ID NO: 1835 - protein, 450 aa, Artificial Sequence
  MMP-1 variant I140G
FPATLETQEQDVDLVQKYLEKYYNLKNDGRQVEKRRNSGPVVEKLKQMQEFFGLKVTGKPDAETLKVMKQPRCGVPDVAQFVLTEGNPRWEQTHLTYRIENYTPDLPRADVDHAIEKAFQLWSNVTPLTFTKVSEGQADGMISFVRGDHRDNSPFDGPGGNLAHAFQPGPGIGGDAHFDEDERWTNNFREYNLHRVAAHELGHSLGLSHSTDIGALMYPSYTFSGDVQLAQDDIDGIQAIYGRSQNPVQPIGPQTPKACDSKLTFDAITTIRGEVMFFKDRFYMRTNPFYPEVELNFISVFWPQLPNGLEAAYEFADRDEVRFFKGNKYWAVQGQNVLHGYPKDIYSSFGFPRTVKHIDAALSEENTGKTYFFVANKYWRYDEYKRSMDPGYPKMIAHDFPGIGHKVDAVFMKDGFFYFFHGTRQYKFDPKTKRILTLQKANSWFNCRKN

SEQ ID NO: 1836 - protein, 450 aa, Artificial Sequence
  MMP-1 variant I140F
FPATLETQEQDVDLVQKYLEKYYNLKNDGRQVEKRRNSGPVVEKLKQMQEFFGLKVTGKPDAETLKVMKQPRCGVPDVAQFVLTEGNPRWEQTHLTYRIENYTPDLPRADVDHAIEKAFQLWSNVTPLTFTKVSEGQADFMISFVRGDHRDNSPFDGPGGNLAHAFQPGPGIGGDAHFDEDERWTNNFREYNLHRVAAHELGHSLGLSHSTDIGALMYPSYTFSGDVQLAQDDIDGIQAIYGRSQNPVQPIGPQTPKACDSKLTFDAITTIRGEVMFFKDRFYMRTNPFYPEVELNFISVFWPQLPNGLEAAYEFADRDEVRFFKGNKYWAVQGQNVLHGYPKDIYSSFGFPRTVKHIDAALSEENTGKTYFFVANKYWRYDEYKRSMDPGYPKMIAHDFPGIGHKVDAVFMKDGFFYFFHGTRQYKFDPKTKRILTLQKANSWFNCRKN

SEQ ID NO: 1837 - protein, 450 aa, Artificial Sequence
  MMP-1 variant I140M
FPATLETQEQDVDLVQKYLEKYYNLKNDGRQVEKRRNSGPVVEKLKQMQEFFGLKVTGKPDAETLKVMKQPRCGVPDVAQFVLTEGNPRWEQTHLTYRIENYTPDLPRADVDHAIEKAFQLWSNVTPLTFTKVSEGQADMMISFVRGDHRDNSPFDGPGGNLAHAFQPGPGIGGDAHFDEDERWTNNFREYNLHRVAAHELGHSLGLSHSTDIGALMYPSYTFSGDVQLAQDDIDGIQAIYGRSQNPVQPIGPQTPKACDSKLTFDAITTIRGEVMFFKDRFYMRTNPFYPEVELNFISVFWPQLPNGLEAAYEFADRDEVRFFKGNKYWAVQGQNVLHGYPKDIYSSFGFPRTVKHIDAALSEENTGKTYFFVANKYWRYDEYKRSMDPGYPKMIAHDFPGIGHKVDAVFMKDGFFYFFHGTRQYKFDPKTKRILTLQKANSWFNCRKN

SEQ ID NO: 1838 - protein, 450 aa, Artificial Sequence
  MMP-1 variant I140W
FPATLETQEQDVDLVQKYLEKYYNLKNDGRQVEKRRNSGPVVEKLKQMQEFFGLKVTGKPDAETLKVMKQPRCGVPDVAQFVLTEGNPRWEQTHLTYRIENYTPDLPRADVDHAIEKAFQLWSNVTPLTFTKVSEGQADWMISFVRGDHRDNSPFDGPGGNLAHAFQPGPGIGGDAHFDEDERWTNNFREYNLHRVAAHELGHSLGLSHSTDIGALMYPSYTFSGDVQLAQDDIDGIQAIYGRSQNPVQPIGPQTPKACDSKLTFDAITTIRGEVMFFKDRFYMRTNPFYPEVELNFISVFWPQLPNGLEAAYEFADRDEVRFFKGNKYWAVQGQNVLHGYPKDIYSSFGFPRTVKHIDAALSEENTGKTYFFVANKYWRYDEYKRSMDPGYPKMIAHDFPGIGHKVDAVFMKDGFFYFFHGTRQYKFDPKTKRILTLQKANSWFNCRKN

SEQ ID NO: 1839 - protein, 450 aa, Artificial Sequence
  MMP-1 variant I140V
FPATLETQEQDVDLVQKYLEKYYNLKNDGRQVEKRRNSGPVVEKLKQMQEFFGLKVTGKPDAETLKVMKQPRCGVPDVAQFVLTEGNPRWEQTHLTYRIENYTPDLPRADVDHAIEKAFQLWSNVTPLTFTKVSEGQADVMISFVRGDHRDNSPFDGPGGNLAHAFQPGPGIGGDAHFDEDERWTNNFREYNLHRVAAHELGHSLGLSHSTDIGALMYPSYTFSGDVQLAQDDIDGIQAIYGRSQNPVQPIGPQTPKACDSKLTFDAITTIRGEVMFFKDRFYMRTNPFYPEVELNFISVFWPQLPNGLEAAYEFADRDEVRFFKGNKYWAVQGQNVLHGYPKDIYSSFGFPRTVKHIDAALSEENTGKTYFFVANKYWRYDEYKRSMDPGYPKMIAHDFPGIGHKVDAVFMKDGFFYFFHGTRQYKFDPKTKRILTLQKANSWFNCRKN

SEQ ID NO: 1840 - protein, 499 aa, Artificial Sequence
  MMP-1 variant I140L
FPATLETQEQDVDLVQKYLEKYYNLKNDGRQVEKRRNSGPVVEKLKQMQEFFGLKVTGKPDAETLKVMKQPRCGVPDVAQFVLTEGNPRWEQTHLTYRIENYTPDLPRADVDHAIEKAFQLWSNVTPLTFTKVSEGQADLMISFVRGDHRDNSPFDGPGGNLAHAFQPGPGIGGDAHFDEDERWTNNFREYNLHRVAAHELGHSLGLSHSTDIGALMYPSYTFSGDVQLAQDDIDGIQAIYGRSQNPVQPIGPQTPKACDSKLTFDAITTIRGEVMFFKDRFYMRTNPFYPEVELNFISVFWPQLPNGLEAAYEFADRDEVRFFKGNKYWAVQGQNVLHGYPKDIYSSFGFPRTVKHIDAALSEENTGKTYFFVANKYWRYDEYKRSMDPGYPKMIAHDFPGIGHKVDAVFMKDGFFYFFHGTRQYKFDPKTKRILTLQKANSWFNCRKNGIGHKVDAVFMKDGFFYFFHGTRQYKFDPKTKRILTLQKANSWFNCRKN

SEQ ID NO: 1841 - protein, 450 aa, Artificial Sequence
  MMP-1 variant I140A
FPATLETQEQDVDLVQKYLEKYYNLKNDGRQVEKRRNSGPVVEKLKQMQEFFGLKVTGKPDAETLKVMKQPRCGVPDVAQFVLTEGNPRWEQTHLTYRIENYTPDLPRADVDHAIEKAFQLWSNVTPLTFTKVSEGQADAMISFVRGDHRDNSPFDGPGGNLAHAFQPGPGIGGDAHFDEDERWTNNFREYNLHRVAAHELGHSLGLSHSTDIGALMYPSYTFSGDVQLAQDDIDGIQAIYGRSQNPVQPIGPQTPKACDSKLTFDAITTIRGEVMFFKDRFYMRTNPFYPEVELNFISVFWPQLPNGLEAAYEFADRDEVRFFKGNKYWAVQGQNVLHGYPKDIYSSFGFPRTVKHIDAALSEENTGKTYFFVANKYWRYDEYKRSMDPGYPKMIAHDFPGIGHKVDAVFMKDGFFYFFHGTRQYKFDPKTKRILTLQKANSWFNCRKN

SEQ ID NO: 1842 - protein, 450 aa, Artificial Sequence
  MMP-1 variant I140P
FPATLETQEQDVDLVQKYLEKYYNLKNDGRQVEKRRNSGPVVEKLKQMQEFFGLKVTGKPDAETLKVMKQPRCGVPDVAQFVLTEGNPRWEQTHLTYRIENYTPDLPRADVDHAIEKAFQLWSNVTPLTFTKVSEGQADPMISFVRGDHRDNSPFDGPGGNLAHAFQPGPGIGGDAHFDEDERWTNNFREYNLHRVAAHELGHSLGLSHSTDIGALMYPSYTFSGDVQLAQDDIDGIQAIYGRSQNPVQPIGPQTPKACDSKLTFDAITTIRGEVMFFKDRFYMRTNPFYPEVELNFISVFWPQLPNGLEAAYEFADRDEVRFFKGNKYWAVQGQNVLHGYPKDIYSSFGFPRTVKHIDAALSEENTGKTYFFVANKYWRYDEYKRSMDPGYPKMIAHDFPGIGHKVDAVFMKDGFFYFFHGTRQYKFDPKTKRILTLQKANSWFNCRKN

SEQ ID NO: 1843 - protein, 450 aa, Artificial Sequence
  MMP-1 variant M141D
FPATLETQEQDVDLVQKYLEKYYNLKNDGRQVEKRRNSGPVVEKLKQMQEFFGLKVTGKPDAETLKVMKQPRCGVPDVAQFVLTEGNPRWEQTHLTYRIENYTPDLPRADVDHAIEKAFQLWSNVTPLTFTKVSEGQADIDISFVRGDHRDNSPFDGPGGNLAHAFQPGPGIGGDAHFDEDERWTNNFREYNLHRVAAHELGHSLGLSHSTDIGALMYPSYTFSGDVQLAQDDIDGIQAIYGRSQNPVQPIGPQTPKACDSKLTFDAITTIRGEVMFFKDRFYMRTNPFYPEVELNFISVFWPQLPNGLEAAYEFADRDEVRFFKGNKYWAVQGQNVLHGYPKDIYSSFGFPRTVKHIDAALSEENTGKTYFFVANKYWRYDEYKRSMDPGYPKMIAHDFPGIGHKVDAVFMKDGFFYFFHGTRQYKFDPKTKRILTLQKANSWFNCRKN

SEQ ID NO: 1844 - protein, 450 aa, Artificial Sequence
  MMP-1 variant M141E
FPATLETQEQDVDLVQKYLEKYYNLKNDGRQVEKRRNSGPVVEKLKQMQEFFGLKVTGKPDAETLKVMKQPRCGVPDVAQFVLTEGNPRWEQTHLTYRIENYTPDLPRADVDHAIEKAFQLWSNVTPLTFTKVSEGQADIEISFVRGDHRDNSPFDGPGGNLAHAFQPGPGIGGDAHFDEDERWTNNFREYNLHRVAAHELGHSLGLSHSTDIGALMYPSYTFSGDVQLAQDDIDGIQAIYGRSQNPVQPIGPQTPKACDSKLTFDAITTIRGEVMFFKDRFYMRTNPFYPEVELNFISVFWPQLPNGLEAAYEFADRDEVRFFKGNKYWAVQGQNVLHGYPKDIYSSFGFPRTVKHIDAALSEENTGKTYFFVANKYWRYDEYKRSMDPGYPKMIAHDFPGIGHKVDAVFMKDGFFYFFHGTRQYKFDPKTKRILTLQKANSWFNCRKN

SEQ ID NO: 1845 - protein, 450 aa, Artificial Sequence
  MMP-1 variant M141H
FPATLETQEQDVDLVQKYLEKYYNLKNDGRQVEKRRNSGPVVEKLKQMQEFFGLKVTGKPDAETLKVMKQPRCGVPDVAQFVLTEGNPRWEQTHLTYRIENYTPDLPRADVDHAIEKAFQLWSNVTPLTFTKVSEGQADIHISFVRGDHRDNSPFDGPGGNLAHAFQPGPGIGGDAHFDEDERWTNNFREYNLHRVAAHELGHSLGLSHSTDIGALMYPSYTFSGDVQLAQDDIDGIQAIYGRSQNPVQPIGPQTPKACDSKLTFDAITTIRGEVMFFKDRFYMRTNPFYPEVELNFISVFWPQLPNGLEAAYEFADRDEVRFFKGNKYWAVQGQNVLHGYPKDIYSSFGFPRTVKHIDAALSEENTGKTYFFVANKYWRYDEYKRSMDPGYPKMIAHDFPGIGHKVDAVFMKDGFFYFFHGTRQYKFDPKTKRILTLQKANSWFNCRKN

SEQ ID NO: 1846 - protein, 450 aa, Artificial Sequence
  MMP-1 variant M141K
FPATLETQEQDVDLVQKYLEKYYNLKNDGRQVEKRRNSGPVVEKLKQMQEFFGLKVTGKPDAETLKVMKQPRCGVPDVAQFVLTEGNPRWEQTHLTYRIENYTPDLPRADVDHAIEKAFQLWSNVTPLTFTKVSEGQADIKISFVRGDHRDNSPFDGPGGNLAHAFQPGPGIGGDAHFDEDERWTNNFREYNLHRVAAHELGHSLGLSHSTDIGALMYPSYTFSGDVQLAQDDIDGIQAIYGRSQNPVQPIGPQTPKACDSKLTFDAITTIRGEVMFFKDRFYMRTNPFYPEVELNFISVFWPQLPNGLEAAYEFADRDEVRFFKGNKYWAVQGQNVLHGYPKDIYSSFGFPRTVKHIDAALSEENTGKTYFFVANKYWRYDEYKRSMDPGYPKMIAHDFPGIGHKVDAVFMKDGFFYFFHGTRQYKFDPKTKRILTLQKANSWFNCRKN

SEQ ID NO: 1847 - protein, 450 aa, Artificial Sequence
  MMP-1 variant M141R
FPATLETQEQDVDLVQKYLEKYYNLKNDGRQVEKRRNSGPVVEKLKQMQEFFGLKVTGKPDAETLKVMKQPRCGVPDVAQFVLTEGNPRWEQTHLTYRIENYTPDLPRADVDHAIEKAFQLWSNVTPLTFTKVSEGQADIRISFVRGDHRDNSPFDGPGGNLAHAFQPGPGIGGDAHFDEDERWTNNFREYNLHRVAAHELGHSLGLSHSTDIGALMYPSYTFSGDVQLAQDDIDGIQAIYGRSQNPVQPIGPQTPKACDSKLTFDAITTIRGEVMFFKDRFYMRTNPFYPEVELNFISVFWPQLPNGLEAAYEFADRDEVRFFKGNKYWAVQGQNVLHGYPKDIYSSFGFPRTVKHIDAALSEENTGKTYFFVANKYWRYDEYKRSMDPGYPKMIAHDFPGIGHKVDAVFMKDGFFYFFHGTRQYKFDPKTKRILTLQKANSWFNCRKN

SEQ ID NO: 1848 - protein, 450 aa, Artificial Sequence
  MMP-1 variant M141C
FPATLETQEQDVDLVQKYLEKYYNLKNDGRQVEKRRNSGPVVEKLKQMQEFFGLKVTGKPDAETLKVMKQPRCGVPDVAQFVLTEGNPRWEQTHLTYRIENYTPDLPRADVDHAIEKAFQLWSNVTPLTFTKVSEGQADICISFVRGDHRDNSPFDGPGGNLAHAFQPGPGIGGDAHFDEDERWTNNFREYNLHRVAAHELGHSLGLSHSTDIGALMYPSYTFSGDVQLAQDDIDGIQAIYGRSQNPVQPIGPQTPKACDSKLTFDAITTIRGEVMFFKDRFYMRTNPFYPEVELNFISVFWPQLPNGLEAAYEFADRDEVRFFKGNKYWAVQGQNVLHGYPKDIYSSFGFPRTVKHIDAALSEENTGKTYFFVANKYWRYDEYKRSMDPGYPKMIAHDFPGIGHKVDAVFMKDGFFYFFHGTRQYKFDPKTKRILTLQKANSWFNCRKN

SEQ ID NO: 1849 - protein, 450 aa, Artificial Sequence
  MMP-1 variant M141N
FPATLETQEQDVDLVQKYLEKYYNLKNDGRQVEKRRNSGPVVEKLKQMQEFFGLKVTGKPDAETLKVMKQPRCGVPDVAQFVLTEGNPRWEQTHLTYRIENYTPDLPRADVDHAIEKAFQLWSNVTPLTFTKVSEGQADINISFVRGDHRDNSPFDGPGGNLAHAFQPGPGIGGDAHFDEDERWTNNFREYNLHRVAAHELGHSLGLSHSTDIGALMYPSYTFSGDVQLAQDDIDGIQAIYGRSQNPVQPIGPQTPKACDSKLTFDAITTIRGEVMFFKDRFYMRTNPFYPEVELNFISVFWPQLPNGLEAAYEFADRDEVRFFKGNKYWAVQGQNVLHGYPKDIYSSFGFPRTVKHIDAALSEENTGKTYFFVANKYWRYDEYKRSMDPGYPKMIAHDFPGIGHKVDAVFMKDGFFYFFHGTRQYKFDPKTKRILTLQKANSWFNCRKN

SEQ ID NO: 1850 - protein, 450 aa, Artificial Sequence
  MMP-1 variant M141Q
FPATLETQEQDVDLVQKYLEKYYNLKNDGRQVEKRRNSGPVVEKLKQMQEFFGLKVTGKPDAETLKVMKQPRCGVPDVAQFVLTEGNPRWEQTHLTYRIENYTPDLPRADVDHAIEKAFQLWSNVTPLTFTKVSEGQADIQISFVRGDHRDNSPFDGPGGNLAHAFQPGPGIGGDAHFDEDERWTNNFREYNLHRVAAHELGHSLGLSHSTDIGALMYPSYTFSGDVQLAQDDIDGIQAIYGRSQNPVQPIGPQTPKACDSKLTFDAITTIRGEVMFFKDRFYMRTNPFYPEVELNFISVFWPQLPNGLEAAYEFADRDEVRFFKGNKYWAVQGQNVLHGYPKDIYSSFGFPRTVKHIDAALSEENTGKTYFFVANKYWRYDEYKRSMDPGYPKMIAHDFPGIGHKVDAVFMKDGFFYFFHGTRQYKFDPKTKRILTLQKANSWFNCRKN

SEQ ID NO: 1851 - protein, 451 aa, Artificial Sequence
  MMP-1 variant M141T
FPATLETQEQDVDLVQKYLEKYYNLKNDGRQVEKRRNSGPVVEKLKQMQEFFGLKVTGKPDAETLKVMKQPRCGVPDVAQFVLTEGNPRWEQTHLTYRIENYTPDLPRADVDHAIEKAFQLWSNVTPLTFTKVSEGQADIMTISFVRGDHRDNSPFDGPGGNLAHAFQPGPGIGGDAHFDEDERWTNNFREYNLHRVAAHELGHSLGLSHSTDIGALMYPSYTFSGDVQLAQDDIDGIQAIYGRSQNPVQPIGPQTPKACDSKLTFDAITTIRGEVMFFKDRFYMRTNPFYPEVELNFISVFWPQLPNGLEAAYEFADRDEVRFFKGNKYWAVQGQNVLHGYPKDIYSSFGFPRTVKHIDAALSEENTGKTYFFVANKYWRYDEYKRSMDPGYPKMIAHDFPGIGHKVDAVFMKDGFFYFFHGTRQYKFDPKTKRILTLQKANSWFNCRKN

SEQ ID NO: 1852 - protein, 450 aa, Artificial Sequence
  MMP-1 variant M141Y
FPATLETQEQDVDLVQKYLEKYYNLKNDGRQVEKRRNSGPVVEKLKQMQEFFGLKVTGKPDAETLKVMKQPRCGVPDVAQFVLTEGNPRWEQTHLTYRIENYTPDLPRADVDHAIEKAFQLWSNVTPLTFTKVSEGQADIYISFVRGDHRDNSPFDGPGGNLAHAFQPGPGIGGDAHFDEDERWTNNFREYNLHRVAAHELGHSLGLSHSTDIGALMYPSYTFSGDVQLAQDDIDGIQAIYGRSQNPVQPIGPQTPKACDSKLTFDAITTIRGEVMFFKDRFYMRTNPFYPEVELNFISVFWPQLPNGLEAAYEFADRDEVRFFKGNKYWAVQGQNVLHGYPKDIYSSFGFPRTVKHIDAALSEENTGKTYFFVANKYWRYDEYKRSMDPGYPKMIAHDFPGIGHKVDAVFMKDGFFYFFHGTRQYKFDPKTKRILTLQKANSWFNCRKN

SEQ ID NO: 1853 - protein, 450 aa, Artificial Sequence
  MMP-1 variant M141S
FPATLETQEQDVDLVQKYLEKYYNLKNDGRQVEKRRNSGPVVEKLKQMQEFFGLKVTGKPDAETLKVMKQPRCGVPDVAQFVLTEGNPRWEQTHLTYRIENYTPDLPRADVDHAIEKAFQLWSNVTPLTFTKVSEGQADISISFVRGDHRDNSPFDGPGGNLAHAFQPGPGIGGDAHFDEDERWTNNFREYNLHRVAAHELGHSLGLSHSTDIGALMYPSYTFSGDVQLAQDDIDGIQAIYGRSQNPVQPIGPQTPKACDSKLTFDAITTIRGEVMFFKDRFYMRTNPFYPEVELNFISVFWPQLPNGLEAAYEFADRDEVRFFKGNKYWAVQGQNVLHGYPKDIYSSFGFPRTVKHIDAALSEENTGKTYFFVANKYWRYDEYKRSMDPGYPKMIAHDFPGIGHKVDAVFMKDGFFYFFHGTRQYKFDPKTKRILTLQKANSWFNCRKN

SEQ ID NO: 1854 - protein, 450 aa, Artificial Sequence
  MMP-1 variant M141G
FPATLETQEQDVDLVQKYLEKYYNLKNDGRQVEKRRNSGPVVEKLKQMQEFFGLKVTGKPDAETLKVMKQPRCGVPDVAQFVLTEGNPRWEQTHLTYRIENYTPDLPRADVDHAIEKAFQLWSNVTPLTFTKVSEGQADIGISFVRGDHRDNSPFDGPGGNLAHAFQPGPGIGGDAHFDEDERWTNNFREYNLHRVAAHELGHSLGLSHSTDIGALMYPSYTFSGDVQLAQDDIDGIQAIYGRSQNPVQPIGPQTPKACDSKLTFDAITTIRGEVMFFKDRFYMRTNPFYPEVELNFISVFWPQLPNGLEAAYEFADRDEVRFFKGNKYWAVQGQNVLHGYPKDIYSSFGFPRTVKHIDAALSEENTGKTYFFVANKYWRYDEYKRSMDPGYPKMIAHDFPGIGHKVDAVFMKDGFFYFFHGTRQYKFDPKTKRILTLQKANSWFNCRKN

SEQ ID NO: 1855 - protein, 450 aa, Artificial Sequence
  MMP-1 variant M141F
FPATLETQEQDVDLVQKYLEKYYNLKNDGRQVEKRRNSGPVVEKLKQMQEFFGLKVTGKPDAETLKVMKQPRCGVPDVAQFVLTEGNPRWEQTHLTYRIENYTPDLPRADVDHAIEKAFQLWSNVTPLTFTKVSEGQADIFISFVRGDHRDNSPFDGPGGNLAHAFQPGPGIGGDAHFDEDERWTNNFREYNLHRVAAHELGHSLGLSHSTDIGALMYPSYTFSGDVQLAQDDIDGIQAIYGRSQNPVQPIGPQTPKACDSKLTFDAITTIRGEVMFFKDRFYMRTNPFYPEVELNFISVFWPQLPNGLEAAYEFADRDEVRFFKGNKYWAVQGQNVLHGYPKDIYSSFGFPRTVKHIDAALSEENTGKTYFFVANKYWRYDEYKRSMDPGYPKMIAHDFPGIGHKVDAVFMKDGFFYFFHGTRQYKFDPKTKRILTLQKANSWFNCRKN

SEQ ID NO: 1856 - protein, 450 aa, Artificial Sequence
  MMP-1 variant M141W
FPATLETQEQDVDLVQKYLEKYYNLKNDGRQVEKRRNSGPVVEKLKQMQEFFGLKVTGKPDAETLKVMKQPRCGVPDVAQFVLTEGNPRWEQTHLTYRIENYTPDLPRADVDHAIEKAFQLWSNVTPLTFTKVSEGQADIWISFVRGDHRDNSPFDGPGGNLAHAFQPGPGIGGDAHFDEDERWTNNFREYNLHRVAAHELGHSLGLSHSTDIGALMYPSYTFSGDVQLAQDDIDGIQAIYGRSQNPVQPIGPQTPKACDSKLTFDAITTIRGEVMFFKDRFYMRTNPFYPEVELNFISVFWPQLPNGLEAAYEFADRDEVRFFKGNKYWAVQGQNVLHGYPKDIYSSFGFPRTVKHIDAALSEENTGKTYFFVANKYWRYDEYKRSMDPGYPKMIAHDFPGIGHKVDAVFMKDGFFYFFHGTRQYKFDPKTKRILTLQKANSWFNCRKN

SEQ ID NO: 1857 - protein, 450 aa, Artificial Sequence
  MMP-1 variant M141I
FPATLETQEQDVDLVQKYLEKYYNLKNDGRQVEKRRNSGPVVEKLKQMQEFFGLKVTGKPDAETLKVMKQPRCGVPDVAQFVLTEGNPRWEQTHLTYRIENYTPDLPRADVDHAIEKAFQLWSNVTPLTFTKVSEGQADIIISFVRGDHRDNSPFDGPGGNLAHAFQPGPGIGGDAHFDEDERWTNNFREYNLHRVAAHELGHSLGLSHSTDIGALMYPSYTFSGDVQLAQDDIDGIQAIYGRSQNPVQPIGPQTPKACDSKLTFDAITTIRGEVMFFKDRFYMRTNPFYPEVELNFISVFWPQLPNGLEAAYEFADRDEVRFFKGNKYWAVQGQNVLHGYPKDIYSSFGFPRTVKHIDAALSEENTGKTYFFVANKYWRYDEYKRSMDPGYPKMIAHDFPGIGHKVDAVFMKDGFFYFFHGTRQYKFDPKTKRILTLQKANSWFNCRKN

SEQ ID NO: 1858 - protein, 450 aa, Artificial Sequence
  MMP-1 variant M141V
FPATLETQEQDVDLVQKYLEKYYNLKNDGRQVEKRRNSGPVVEKLKQMQEFFGLKVTGKPDAETLKVMKQPRCGVPDVAQFVLTEGNPRWEQTHLTYRIENYTPDLPRADVDHAIEKAFQLWSNVTPLTFTKVSEGQADIVISFVRGDHRDNSPFDGPGGNLAHAFQPGPGIGGDAHFDEDERWTNNFREYNLHRVAAHELGHSLGLSHSTDIGALMYPSYTFSGDVQLAQDDIDGIQAIYGRSQNPVQPIGPQTPKACDSKLTFDAITTIRGEVMFFKDRFYMRTNPFYPEVELNFISVFWPQLPNGLEAAYEFADRDEVRFFKGNKYWAVQGQNVLHGYPKDIYSSFGFPRTVKHIDAALSEENTGKTYFFVANKYWRYDEYKRSMDPGYPKMIAHDFPGIGHKVDAVFMKDGFFYFFHGTRQYKFDPKTKRILTLQKANSWFNCRKN

SEQ ID NO: 1859 - protein, 450 aa, Artificial Sequence
  MMP-1 variant M141L
FPATLETQEQDVDLVQKYLEKYYNLKNDGRQVEKRRNSGPVVEKLKQMQEFFGLKVTGKPDAETLKVMKQPRCGVPDVAQFVLTEGNPRWEQTHLTYRIENYTPDLPRADVDHAIEKAFQLWSNVTPLTFTKVSEGQADILISFVRGDHRDNSPFDGPGGNLAHAFQPGPGIGGDAHFDEDERWTNNFREYNLHRVAAHELGHSLGLSHSTDIGALMYPSYTFSGDVQLAQDDIDGIQAIYGRSQNPVQPIGPQTPKACDSKLTFDAITTIRGEVMFFKDRFYMRTNPFYPEVELNFISVFWPQLPNGLEAAYEFADRDEVRFFKGNKYWAVQGQNVLHGYPKDIYSSFGFPRTVKHIDAALSEENTGKTYFFVANKYWRYDEYKRSMDPGYPKMIAHDFPGIGHKVDAVFMKDGFFYFFHGTRQYKFDPKTKRILTLQKANSWFNCRKN

SEQ ID NO: 1860 - protein, 450 aa, Artificial Sequence
  MMP-1 variant M141A
FPATLETQEQDVDLVQKYLEKYYNLKNDGRQVEKRRNSGPVVEKLKQMQEFFGLKVTGKPDAETLKVMKQPRCGVPDVAQFVLTEGNPRWEQTHLTYRIENYTPDLPRADVDHAIEKAFQLWSNVTPLTFTKVSEGQADIAISFVRGDHRDNSPFDGPGGNLAHAFQPGPGIGGDAHFDEDERWTNNFREYNLHRVAAHELGHSLGLSHSTDIGALMYPSYTFSGDVQLAQDDIDGIQAIYGRSQNPVQPIGPQTPKACDSKLTFDAITTIRGEVMFFKDRFYMRTNPFYPEVELNFISVFWPQLPNGLEAAYEFADRDEVRFFKGNKYWAVQGQNVLHGYPKDIYSSFGFPRTVKHIDAALSEENTGKTYFFVANKYWRYDEYKRSMDPGYPKMIAHDFPGIGHKVDAVFMKDGFFYFFHGTRQYKFDPKTKRILTLQKANSWFNCRKN

SEQ ID NO: 1861 - protein, 450 aa, Artificial Sequence
  MMP-1 variant M141P
FPATLETQEQDVDLVQKYLEKYYNLKNDGRQVEKRRNSGPVVEKLKQMQEFFGLKVTGKPDAETLKVMKQPRCGVPDVAQFVLTEGNPRWEQTHLTYRIENYTPDLPRADVDHAIEKAFQLWSNVTPLTFTKVSEGQADIPISFVRGDHRDNSPFDGPGGNLAHAFQPGPGIGGDAHFDEDERWTNNFREYNLHRVAAHELGHSLGLSHSTDIGALMYPSYTFSGDVQLAQDDIDGIQAIYGRSQNPVQPIGPQTPKACDSKLTFDAITTIRGEVMFFKDRFYMRTNPFYPEVELNFISVFWPQLPNGLEAAYEFADRDEVRFFKGNKYWAVQGQNVLHGYPKDIYSSFGFPRTVKHIDAALSEENTGKTYFFVANKYWRYDEYKRSMDPGYPKMIAHDFPGIGHKVDAVFMKDGFFYFFHGTRQYKFDPKTKRILTLQKANSWFNCRKN

SEQ ID NO: 1862 - protein, 450 aa, Artificial Sequence
  MMP-1 variant I142D
FPATLETQEQDVDLVQKYLEKYYNLKNDGRQVEKRRNSGPVVEKLKQMQEFFGLKVTGKPDAETLKVMKQPRCGVPDVAQFVLTEGNPRWEQTHLTYRIENYTPDLPRADVDHAIEKAFQLWSNVTPLTFTKVSEGQADIMDSFVRGDHRDNSPFDGPGGNLAHAFQPGPGIGGDAHFDEDERWTNNFREYNLHRVAAHELGHSLGLSHSTDIGALMYPSYTFSGDVQLAQDDIDGIQAIYGRSQNPVQPIGPQTPKACDSKLTFDAITTIRGEVMFFKDRFYMRTNPFYPEVELNFISVFWPQLPNGLEAAYEFADRDEVRFFKGNKYWAVQGQNVLHGYPKDIYSSFGFPRTVKHIDAALSEENTGKTYFFVANKYWRYDEYKRSMDPGYPKMIAHDFPGIGHKVDAVFMKDGFFYFFHGTRQYKFDPKTKRILTLQKANSWFNCRKN

SEQ ID NO: 1863 - protein, 450 aa, Artificial Sequence
  MMP-1 variant I142E
FPATLETQEQDVDLVQKYLEKYYNLKNDGRQVEKRRNSGPVVEKLKQMQEFFGLKVTGKPDAETLKVMKQPRCGVPDVAQFVLTEGNPRWEQTHLTYRIENYTPDLPRADVDHAIEKAFQLWSNVTPLTFTKVSEGQADIMESFVRGDHRDNSPFDGPGGNLAHAFQPGPGIGGDAHFDEDERWTNNFREYNLHRVAAHELGHSLGLSHSTDIGALMYPSYTFSGDVQLAQDDIDGIQAIYGRSQNPVQPIGPQTPKACDSKLTFDAITTIRGEVMFFKDRFYMRTNPFYPEVELNFISVFWPQLPNGLEAAYEFADRDEVRFFKGNKYWAVQGQNVLHGYPKDIYSSFGFPRTVKHIDAALSEENTGKTYFFVANKYWRYDEYKRSMDPGYPKMIAHDFPGIGHKVDAVFMKDGFFYFFHGTRQYKFDPKTKRILTLQKANSWFNCRKN

SEQ ID NO: 1864 - protein, 450 aa, Artificial Sequence
  MMP-1 variant I142H
FPATLETQEQDVDLVQKYLEKYYNLKNDGRQVEKRRNSGPVVEKLKQMQEFFGLKVTGKPDAETLKVMKQPRCGVPDVAQFVLTEGNPRWEQTHLTYRIENYTPDLPRADVDHAIEKAFQLWSNVTPLTFTKVSEGQADIMHSFVRGDHRDNSPFDGPGGNLAHAFQPGPGIGGDAHFDEDERWTNNFREYNLHRVAAHELGHSLGLSHSTDIGALMYPSYTFSGDVQLAQDDIDGIQAIYGRSQNPVQPIGPQTPKACDSKLTFDAITTIRGEVMFFKDRFYMRTNPFYPEVELNFISVFWPQLPNGLEAAYEFADRDEVRFFKGNKYWAVQGQNVLHGYPKDIYSSFGFPRTVKHIDAALSEENTGKTYFFVANKYWRYDEYKRSMDPGYPKMIAHDFPGIGHKVDAVFMKDGFFYFFHGTRQYKFDPKTKRILTLQKANSWFNCRKN

SEQ ID NO: 1865 - protein, 450 aa, Artificial Sequence
  MMP-1 variant I142K
FPATLETQEQDVDLVQKYLEKYYNLKNDGRQVEKRRNSGPVVEKLKQMQEFFGLKVTGKPDAETLKVMKQPRCGVPDVAQFVLTEGNPRWEQTHLTYRIENYTPDLPRADVDHAIEKAFQLWSNVTPLTFTKVSEGQADIMKSFVRGDHRDNSPFDGPGGNLAHAFQPGPGIGGDAHFDEDERWTNNFREYNLHRVAAHELGHSLGLSHSTDIGALMYPSYTFSGDVQLAQDDIDGIQAIYGRSQNPVQPIGPQTPKACDSKLTFDAITTIRGEVMFFKDRFYMRTNPFYPEVELNFISVFWPQLPNGLEAAYEFADRDEVRFFKGNKYWAVQGQNVLHGYPKDIYSSFGFPRTVKHIDAALSEENTGKTYFFVANKYWRYDEYKRSMDPGYPKMIAHDFPGIGHKVDAVFMKDGFFYFFHGTRQYKFDPKTKRILTLQKANSWFNCRKN

SEQ ID NO: 1866 - protein, 450 aa, Artificial Sequence
  MMP-1 variant I142R
FPATLETQEQDVDLVQKYLEKYYNLKNDGRQVEKRRNSGPVVEKLKQMQEFFGLKVTGKPDAETLKVMKQPRCGVPDVAQFVLTEGNPRWEQTHLTYRIENYTPDLPRADVDHAIEKAFQLWSNVTPLTFTKVSEGQADIMRSFVRGDHRDNSPFDGPGGNLAHAFQPGPGIGGDAHFDEDERWTNNFREYNLHRVAAHELGHSLGLSHSTDIGALMYPSYTFSGDVQLAQDDIDGIQAIYGRSQNPVQPIGPQTPKACDSKLTFDAITTIRGEVMFFKDRFYMRTNPFYPEVELNFISVFWPQLPNGLEAAYEFADRDEVRFFKGNKYWAVQGQNVLHGYPKDIYSSFGFPRTVKHIDAALSEENTGKTYFFVANKYWRYDEYKRSMDPGYPKMIAHDFPGIGHKVDAVFMKDGFFYFFHGTRQYKFDPKTKRILTLQKANSWFNCRKN

SEQ ID NO: 1867 - protein, 450 aa, Artificial Sequence
  MMP-1 variant I142C
FPATLETQEQDVDLVQKYLEKYYNLKNDGRQVEKRRNSGPVVEKLKQMQEFFGLKVTGKPDAETLKVMKQPRCGVPDVAQFVLTEGNPRWEQTHLTYRIENYTPDLPRADVDHAIEKAFQLWSNVTPLTFTKVSEGQADIMCSFVRGDHRDNSPFDGPGGNLAHAFQPGPGIGGDAHFDEDERWTNNFREYNLHRVAAHELGHSLGLSHSTDIGALMYPSYTFSGDVQLAQDDIDGIQAIYGRSQNPVQPIGPQTPKACDSKLTFDAITTIRGEVMFFKDRFYMRTNPFYPEVELNFISVFWPQLPNGLEAAYEFADRDEVRFFKGNKYWAVQGQNVLHGYPKDIYSSFGFPRTVKHIDAALSEENTGKTYFFVANKYWRYDEYKRSMDPGYPKMIAHDFPGIGHKVDAVFMKDGFFYFFHGTRQYKFDPKTKRILTLQKANSWFNCRKN

SEQ ID NO: 1868 - protein, 450 aa, Artificial Sequence
  MMP-1 variant I142N
FPATLETQEQDVDLVQKYLEKYYNLKNDGRQVEKRRNSGPVVEKLKQMQEFFGLKVTGKPDAETLKVMKQPRCGVPDVAQFVLTEGNPRWEQTHLTYRIENYTPDLPRADVDHAIEKAFQLWSNVTPLTFTKVSEGQADIMNSFVRGDHRDNSPFDGPGGNLAHAFQPGPGIGGDAHFDEDERWTNNFREYNLHRVAAHELGHSLGLSHSTDIGALMYPSYTFSGDVQLAQDDIDGIQAIYGRSQNPVQPIGPQTPKACDSKLTFDAITTIRGEVMFFKDRFYMRTNPFYPEVELNFISVFWPQLPNGLEAAYEFADRDEVRFFKGNKYWAVQGQNVLHGYPKDIYSSFGFPRTVKHIDAALSEENTGKTYFFVANKYWRYDEYKRSMDPGYPKMIAHDFPGIGHKVDAVFMKDGFFYFFHGTRQYKFDPKTKRILTLQKANSWFNCRKN

SEQ ID NO: 1869 - protein, 450 aa, Artificial Sequence
  MMP-1 variant I142Q
FPATLETQEQDVDLVQKYLEKYYNLKNDGRQVEKRRNSGPVVEKLKQMQEFFGLKVTGKPDAETLKVMKQPRCGVPDVAQFVLTEGNPRWEQTHLTYRIENYTPDLPRADVDHAIEKAFQLWSNVTPLTFTKVSEGQADIMQSFVRGDHRDNSPFDGPGGNLAHAFQPGPGIGGDAHFDEDERWTNNFREYNLHRVAAHELGHSLGLSHSTDIGALMYPSYTFSGDVQLAQDDIDGIQAIYGRSQNPVQPIGPQTPKACDSKLTFDAITTIRGEVMFFKDRFYMRTNPFYPEVELNFISVFWPQLPNGLEAAYEFADRDEVRFFKGNKYWAVQGQNVLHGYPKDIYSSFGFPRTVKHIDAALSEENTGKTYFFVANKYWRYDEYKRSMDPGYPKMIAHDFPGIGHKVDAVFMKDGFFYFFHGTRQYKFDPKTKRILTLQKANSWFNCRKN

SEQ ID NO: 1870 - protein, 450 aa, Artificial Sequence
  MMP-1 variant I142T
FPATLETQEQDVDLVQKYLEKYYNLKNDGRQVEKRRNSGPVVEKLKQMQEFFGLKVTGKPDAETLKVMKQPRCGVPDVAQFVLTEGNPRWEQTHLTYRIENYTPDLPRADVDHAIEKAFQLWSNVTPLTFTKVSEGQADIMTSFVRGDHRDNSPFDGPGGNLAHAFQPGPGIGGDAHFDEDERWTNNFREYNLHRVAAHELGHSLGLSHSTDIGALMYPSYTFSGDVQLAQDDIDGIQAIYGRSQNPVQPIGPQTPKACDSKLTFDAITTIRGEVMFFKDRFYMRTNPFYPEVELNFISVFWPQLPNGLEAAYEFADRDEVRFFKGNKYWAVQGQNVLHGYPKDIYSSFGFPRTVKHIDAALSEENTGKTYFFVANKYWRYDEYKRSMDPGYPKMIAHDFPGIGHKVDAVFMKDGFFYFFHGTRQYKFDPKTKRILTLQKANSWFNCRKN

SEQ ID NO: 1871 - protein, 450 aa, Artificial Sequence
  MMP-1 variant I142Y
FPATLETQEQDVDLVQKYLEKYYNLKNDGRQVEKRRNSGPVVEKLKQMQEFFGLKVTGKPDAETLKVMKQPRCGVPDVAQFVLTEGNPRWEQTHLTYRIENYTPDLPRADVDHAIEKAFQLWSNVTPLTFTKVSEGQADIMYSFVRGDHRDNSPFDGPGGNLAHAFQPGPGIGGDAHFDEDERWTNNFREYNLHRVAAHELGHSLGLSHSTDIGALMYPSYTFSGDVQLAQDDIDGIQAIYGRSQNPVQPIGPQTPKACDSKLTFDAITTIRGEVMFFKDRFYMRTNPFYPEVELNFISVFWPQLPNGLEAAYEFADRDEVRFFKGNKYWAVQGQNVLHGYPKDIYSSFGFPRTVKHIDAALSEENTGKTYFFVANKYWRYDEYKRSMDPGYPKMIAHDFPGIGHKVDAVFMKDGFFYFFHGTRQYKFDPKTKRILTLQKANSWFNCRKN

SEQ ID NO: 1872 - protein, 450 aa, Artificial Sequence
  MMP-1 variant I142S
FPATLETQEQDVDLVQKYLEKYYNLKNDGRQVEKRRNSGPVVEKLKQMQEFFGLKVTGKPDAETLKVMKQPRCGVPDVAQFVLTEGNPRWEQTHLTYRIENYTPDLPRADVDHAIEKAFQLWSNVTPLTFTKVSEGQADIMSSFVRGDHRDNSPFDGPGGNLAHAFQPGPGIGGDAHFDEDERWTNNFREYNLHRVAAHELGHSLGLSHSTDIGALMYPSYTFSGDVQLAQDDIDGIQAIYGRSQNPVQPIGPQTPKACDSKLTFDAITTIRGEVMFFKDRFYMRTNPFYPEVELNFISVFWPQLPNGLEAAYEFADRDEVRFFKGNKYWAVQGQNVLHGYPKDIYSSFGFPRTVKHIDAALSEENTGKTYFFVANKYWRYDEYKRSMDPGYPKMIAHDFPGIGHKVDAVFMKDGFFYFFHGTRQYKFDPKTKRILTLQKANSWFNCRKN

SEQ ID NO: 1873 - protein, 450 aa, Artificial Sequence
  MMP-1 variant I142G
FPATLETQEQDVDLVQKYLEKYYNLKNDGRQVEKRRNSGPVVEKLKQMQEFFGLKVTGKPDAETLKVMKQPRCGVPDVAQFVLTEGNPRWEQTHLTYRIENYTPDLPRADVDHAIEKAFQLWSNVTPLTFTKVSEGQADIMGSFVRGDHRDNSPFDGPGGNLAHAFQPGPGIGGDAHFDEDERWTNNFREYNLHRVAAHELGHSLGLSHSTDIGALMYPSYTFSGDVQLAQDDIDGIQAIYGRSQNPVQPIGPQTPKACDSKLTFDAITTIRGEVMFFKDRFYMRTNPFYPEVELNFISVFWPQLPNGLEAAYEFADRDEVRFFKGNKYWAVQGQNVLHGYPKDIYSSFGFPRTVKHIDAALSEENTGKTYFFVANKYWRYDEYKRSMDPGYPKMIAHDFPGIGHKVDAVFMKDGFFYFFHGTRQYKFDPKTKRILTLQKANSWFNCRKN

SEQ ID NO: 1874 - protein, 450 aa, Artificial Sequence
  MMP-1 variant I142F
FPATLETQEQDVDLVQKYLEKYYNLKNDGRQVEKRRNSGPVVEKLKQMQEFFGLKVTGKPDAETLKVMKQPRCGVPDVAQFVLTEGNPRWEQTHLTYRIENYTPDLPRADVDHAIEKAFQLWSNVTPLTFTKVSEGQADIMFSFVRGDHRDNSPFDGPGGNLAHAFQPGPGIGGDAHFDEDERWTNNFREYNLHRVAAHELGHSLGLSHSTDIGALMYPSYTFSGDVQLAQDDIDGIQAIYGRSQNPVQPIGPQTPKACDSKLTFDAITTIRGEVMFFKDRFYMRTNPFYPEVELNFISVFWPQLPNGLEAAYEFADRDEVRFFKGNKYWAVQGQNVLHGYPKDIYSSFGFPRTVKHIDAALSEENTGKTYFFVANKYWRYDEYKRSMDPGYPKMIAHDFPGIGHKVDAVFMKDGFFYFFHGTRQYKFDPKTKRILTLQKANSWFNCRKN

SEQ ID NO: 1875 - protein, 450 aa, Artificial Sequence
  MMP-1 variant I142M
FPATLETQEQDVDLVQKYLEKYYNLKNDGRQVEKRRNSGPVVEKLKQMQEFFGLKVTGKPDAETLKVMKQPRCGVPDVAQFVLTEGNPRWEQTHLTYRIENYTPDLPRADVDHAIEKAFQLWSNVTPLTFTKVSEGQADIMMSFVRGDHRDNSPFDGPGGNLAHAFQPGPGIGGDAHFDEDERWTNNFREYNLHRVAAHELGHSLGLSHSTDIGALMYPSYTFSGDVQLAQDDIDGIQAIYGRSQNPVQPIGPQTPKACDSKLTFDAITTIRGEVMFFKDRFYMRTNPFYPEVELNFISVFWPQLPNGLEAAYEFADRDEVRFFKGNKYWAVQGQNVLHGYPKDIYSSFGFPRTVKHIDAALSEENTGKTYFFVANKYWRYDEYKRSMDPGYPKMIAHDFPGIGHKVDAVFMKDGFFYFFHGTRQYKFDPKTKRILTLQKANSWFNCRKN

SEQ ID NO: 1876 - protein, 450 aa, Artificial Sequence
  MMP-1 variant I142W
FPATLETQEQDVDLVQKYLEKYYNLKNDGRQVEKRRNSGPVVEKLKQMQEFFGLKVTGKPDAETLKVMKQPRCGVPDVAQFVLTEGNPRWEQTHLTYRIENYTPDLPRADVDHAIEKAFQLWSNVTPLTFTKVSEGQADIMWSFVRGDHRDNSPFDGPGGNLAHAFQPGPGIGGDAHFDEDERWTNNFREYNLHRVAAHELGHSLGLSHSTDIGALMYPSYTFSGDVQLAQDDIDGIQAIYGRSQNPVQPIGPQTPKACDSKLTFDAITTIRGEVMFFKDRFYMRTNPFYPEVELNFISVFWPQLPNGLEAAYEFADRDEVRFFKGNKYWAVQGQNVLHGYPKDIYSSFGFPRTVKHIDAALSEENTGKTYFFVANKYWRYDEYKRSMDPGYPKMIAHDFPGIGHKVDAVFMKDGFFYFFHGTRQYKFDPKTKRILTLQKANSWFNCRKN

SEQ ID NO: 1877 - protein, 450 aa, Artificial Sequence
  MMP-1 variant I142V
FPATLETQEQDVDLVQKYLEKYYNLKNDGRQVEKRRNSGPVVEKLKQMQEFFGLKVTGKPDAETLKVMKQPRCGVPDVAQFVLTEGNPRWEQTHLTYRIENYTPDLPRADVDHAIEKAFQLWSNVTPLTFTKVSEGQADIMVSFVRGDHRDNSPFDGPGGNLAHAFQPGPGIGGDAHFDEDERWTNNFREYNLHRVAAHELGHSLGLSHSTDIGALMYPSYTFSGDVQLAQDDIDGIQAIYGRSQNPVQPIGPQTPKACDSKLTFDAITTIRGEVMFFKDRFYMRTNPFYPEVELNFISVFWPQLPNGLEAAYEFADRDEVRFFKGNKYWAVQGQNVLHGYPKDIYSSFGFPRTVKHIDAALSEENTGKTYFFVANKYWRYDEYKRSMDPGYPKMIAHDFPGIGHKVDAVFMKDGFFYFFHGTRQYKFDPKTKRILTLQKANSWFNCRKN

SEQ ID NO: 1878 - protein, 450 aa, Artificial Sequence
  MMP-1 variant I142L
FPATLETQEQDVDLVQKYLEKYYNLKNDGRQVEKRRNSGPVVEKLKQMQEFFGLKVTGKPDAETLKVMKQPRCGVPDVAQFVLTEGNPRWEQTHLTYRIENYTPDLPRADVDHAIEKAFQLWSNVTPLTFTKVSEGQADIMLSFVRGDHRDNSPFDGPGGNLAHAFQPGPGIGGDAHFDEDERWTNNFREYNLHRVAAHELGHSLGLSHSTDIGALMYPSYTFSGDVQLAQDDIDGIQAIYGRSQNPVQPIGPQTPKACDSKLTFDAITTIRGEVMFFKDRFYMRTNPFYPEVELNFISVFWPQLPNGLEAAYEFADRDEVRFFKGNKYWAVQGQNVLHGYPKDIYSSFGFPRTVKHIDAALSEENTGKTYFFVANKYWRYDEYKRSMDPGYPKMIAHDFPGIGHKVDAVFMKDGFFYFFHGTRQYKFDPKTKRILTLQKANSWFNCRKN

SEQ ID NO: 1879 - protein, 450 aa, Artificial Sequence
  MMP-1 variant I142A
FPATLETQEQDVDLVQKYLEKYYNLKNDGRQVEKRRNSGPVVEKLKQMQEFFGLKVTGKPDAETLKVMKQPRCGVPDVAQFVLTEGNPRWEQTHLTYRIENYTPDLPRADVDHAIEKAFQLWSNVTPLTFTKVSEGQADIMASFVRGDHRDNSPFDGPGGNLAHAFQPGPGIGGDAHFDEDERWTNNFREYNLHRVAAHELGHSLGLSHSTDIGALMYPSYTFSGDVQLAQDDIDGIQAIYGRSQNPVQPIGPQTPKACDSKLTFDAITTIRGEVMFFKDRFYMRTNPFYPEVELNFISVFWPQLPNGLEAAYEFADRDEVRFFKGNKYWAVQGQNVLHGYPKDIYSSFGFPRTVKHIDAALSEENTGKTYFFVANKYWRYDEYKRSMDPGYPKMIAHDFPGIGHKVDAVFMKDGFFYFFHGTRQYKFDPKTKRILTLQKANSWFNCRKN

SEQ ID NO: 1880 - protein, 450 aa, Artificial Sequence
  MMP-1 variant I142P
FPATLETQEQDVDLVQKYLEKYYNLKNDGRQVEKRRNSGPVVEKLKQMQEFFGLKVTGKPDAETLKVMKQPRCGVPDVAQFVLTEGNPRWEQTHLTYRIENYTPDLPRADVDHAIEKAFQLWSNVTPLTFTKVSEGQADIMPSFVRGDHRDNSPFDGPGGNLAHAFQPGPGIGGDAHFDEDERWTNNFREYNLHRVAAHELGHSLGLSHSTDIGALMYPSYTFSGDVQLAQDDIDGIQAIYGRSQNPVQPIGPQTPKACDSKLTFDAITTIRGEVMFFKDRFYMRTNPFYPEVELNFISVFWPQLPNGLEAAYEFADRDEVRFFKGNKYWAVQGQNVLHGYPKDIYSSFGFPRTVKHIDAALSEENTGKTYFFVANKYWRYDEYKRSMDPGYPKMIAHDFPGIGHKVDAVFMKDGFFYFFHGTRQYKFDPKTKRILTLQKANSWFNCRKN

SEQ ID NO: 1881 - protein, 450 aa, Artificial Sequence
  MMP-1 variant S143D
FPATLETQEQDVDLVQKYLEKYYNLKNDGRQVEKRRNSGPVVEKLKQMQEFFGLKVTGKPDAETLKVMKQPRCGVPDVAQFVLTEGNPRWEQTHLTYRIENYTPDLPRADVDHAIEKAFQLWSNVTPLTFTKVSEGQADIMIDFVRGDHRDNSPFDGPGGNLAHAFQPGPGIGGDAHFDEDERWTNNFREYNLHRVAAHELGHSLGLSHSTDIGALMYPSYTFSGDVQLAQDDIDGIQAIYGRSQNPVQPIGPQTPKACDSKLTFDAITTIRGEVMFFKDRFYMRTNPFYPEVELNFISVFWPQLPNGLEAAYEFADRDEVRFFKGNKYWAVQGQNVLHGYPKDIYSSFGFPRTVKHIDAALSEENTGKTYFFVANKYWRYDEYKRSMDPGYPKMIAHDFPGIGHKVDAVFMKDGFFYFFHGTRQYKFDPKTKRILTLQKANSWFNCRKN

SEQ ID NO: 1882 - protein, 450 aa, Artificial Sequence
  MMP-1 variant S143E
FPATLETQEQDVDLVQKYLEKYYNLKNDGRQVEKRRNSGPVVEKLKQMQEFFGLKVTGKPDAETLKVMKQPRCGVPDVAQFVLTEGNPRWEQTHLTYRIENYTPDLPRADVDHAIEKAFQLWSNVTPLTFTKVSEGQADIMIEFVRGDHRDNSPFDGPGGNLAHAFQPGPGIGGDAHFDEDERWTNNFREYNLHRVAAHELGHSLGLSHSTDIGALMYPSYTFSGDVQLAQDDIDGIQAIYGRSQNPVQPIGPQTPKACDSKLTFDAITTIRGEVMFFKDRFYMRTNPFYPEVELNFISVFWPQLPNGLEAAYEFADRDEVRFFKGNKYWAVQGQNVLHGYPKDIYSSFGFPRTVKHIDAALSEENTGKTYFFVANKYWRYDEYKRSMDPGYPKMIAHDFPGIGHKVDAVFMKDGFFYFFHGTRQYKFDPKTKRILTLQKANSWFNCRKN

SEQ ID NO: 1883 - protein, 450 aa, Artificial Sequence
  MMP-1 variant S143H
FPATLETQEQDVDLVQKYLEKYYNLKNDGRQVEKRRNSGPVVEKLKQMQEFFGLKVTGKPDAETLKVMKQPRCGVPDVAQFVLTEGNPRWEQTHLTYRIENYTPDLPRADVDHAIEKAFQLWSNVTPLTFTKVSEGQADIMIHFVRGDHRDNSPFDGPGGNLAHAFQPGPGIGGDAHFDEDERWTNNFREYNLHRVAAHELGHSLGLSHSTDIGALMYPSYTFSGDVQLAQDDIDGIQAIYGRSQNPVQPIGPQTPKACDSKLTFDAITTIRGEVMFFKDRFYMRTNPFYPEVELNFISVFWPQLPNGLEAAYEFADRDEVRFFKGNKYWAVQGQNVLHGYPKDIYSSFGFPRTVKHIDAALSEENTGKTYFFVANKYWRYDEYKRSMDPGYPKMIAHDFPGIGHKVDAVFMKDGFFYFFHGTRQYKFDPKTKRILTLQKANSWFNCRKN

SEQ ID NO: 1884 - protein, 450 aa, Artificial Sequence
  MMP-1 variant S143K
FPATLETQEQDVDLVQKYLEKYYNLKNDGRQVEKRRNSGPVVEKLKQMQEFFGLKVTGKPDAETLKVMKQPRCGVPDVAQFVLTEGNPRWEQTHLTYRIENYTPDLPRADVDHAIEKAFQLWSNVTPLTFTKVSEGQADIMIKFVRGDHRDNSPFDGPGGNLAHAFQPGPGIGGDAHFDEDERWTNNFREYNLHRVAAHELGHSLGLSHSTDIGALMYPSYTFSGDVQLAQDDIDGIQAIYGRSQNPVQPIGPQTPKACDSKLTFDAITTIRGEVMFFKDRFYMRTNPFYPEVELNFISVFWPQLPNGLEAAYEFADRDEVRFFKGNKYWAVQGQNVLHGYPKDIYSSFGFPRTVKHIDAALSEENTGKTYFFVANKYWRYDEYKRSMDPGYPKMIAHDFPGIGHKVDAVFMKDGFFYFFHGTRQYKFDPKTKRILTLQKANSWFNCRKN

SEQ ID NO: 1885 - protein, 450 aa, Artificial Sequence
  MMP-1 variant S143R
FPATLETQEQDVDLVQKYLEKYYNLKNDGRQVEKRRNSGPVVEKLKQMQEFFGLKVTGKPDAETLKVMKQPRCGVPDVAQFVLTEGNPRWEQTHLTYRIENYTPDLPRADVDHAIEKAFQLWSNVTPLTFTKVSEGQADIMIRFVRGDHRDNSPFDGPGGNLAHAFQPGPGIGGDAHFDEDERWTNNFREYNLHRVAAHELGHSLGLSHSTDIGALMYPSYTFSGDVQLAQDDIDGIQAIYGRSQNPVQPIGPQTPKACDSKLTFDAITTIRGEVMFFKDRFYMRTNPFYPEVELNFISVFWPQLPNGLEAAYEFADRDEVRFFKGNKYWAVQGQNVLHGYPKDIYSSFGFPRTVKHIDAALSEENTGKTYFFVANKYWRYDEYKRSMDPGYPKMIAHDFPGIGHKVDAVFMKDGFFYFFHGTRQYKFDPKTKRILTLQKANSWFNCRKN

SEQ ID NO: 1886 - protein, 450 aa, Artificial Sequence
  MMP-1 variant S143C
FPATLETQEQDVDLVQKYLEKYYNLKNDGRQVEKRRNSGPVVEKLKQMQEFFGLKVTGKPDAETLKVMKQPRCGVPDVAQFVLTEGNPRWEQTHLTYRIENYTPDLPRADVDHAIEKAFQLWSNVTPLTFTKVSEGQADIMICFVRGDHRDNSPFDGPGGNLAHAFQPGPGIGGDAHFDEDERWTNNFREYNLHRVAAHELGHSLGLSHSTDIGALMYPSYTFSGDVQLAQDDIDGIQAIYGRSQNPVQPIGPQTPKACDSKLTFDAITTIRGEVMFFKDRFYMRTNPFYPEVELNFISVFWPQLPNGLEAAYEFADRDEVRFFKGNKYWAVQGQNVLHGYPKDIYSSFGFPRTVKHIDAALSEENTGKTYFFVANKYWRYDEYKRSMDPGYPKMIAHDFPGIGHKVDAVFMKDGFFYFFHGTRQYKFDPKTKRILTLQKANSWFNCRKN

SEQ ID NO: 1887 - protein, 450 aa, Artificial Sequence
  MMP-1 variant S143N
FPATLETQEQDVDLVQKYLEKYYNLKNDGRQVEKRRNSGPVVEKLKQMQEFFGLKVTGKPDAETLKVMKQPRCGVPDVAQFVLTEGNPRWEQTHLTYRIENYTPDLPRADVDHAIEKAFQLWSNVTPLTFTKVSEGQADIMINFVRGDHRDNSPFDGPGGNLAHAFQPGPGIGGDAHFDEDERWTNNFREYNLHRVAAHELGHSLGLSHSTDIGALMYPSYTFSGDVQLAQDDIDGIQAIYGRSQNPVQPIGPQTPKACDSKLTFDAITTIRGEVMFFKDRFYMRTNPFYPEVELNFISVFWPQLPNGLEAAYEFADRDEVRFFKGNKYWAVQGQNVLHGYPKDIYSSFGFPRTVKHIDAALSEENTGKTYFFVANKYWRYDEYKRSMDPGYPKMIAHDFPGIGHKVDAVFMKDGFFYFFHGTRQYKFDPKTKRILTLQKANSWFNCRKN

SEQ ID NO: 1888 - protein, 450 aa, Artificial Sequence
  MMP-1 variant S143Q
FPATLETQEQDVDLVQKYLEKYYNLKNDGRQVEKRRNSGPVVEKLKQMQEFFGLKVTGKPDAETLKVMKQPRCGVPDVAQFVLTEGNPRWEQTHLTYRIENYTPDLPRADVDHAIEKAFQLWSNVTPLTFTKVSEGQADIMIQFVRGDHRDNSPFDGPGGNLAHAFQPGPGIGGDAHFDEDERWTNNFREYNLHRVAAHELGHSLGLSHSTDIGALMYPSYTFSGDVQLAQDDIDGIQAIYGRSQNPVQPIGPQTPKACDSKLTFDAITTIRGEVMFFKDRFYMRTNPFYPEVELNFISVFWPQLPNGLEAAYEFADRDEVRFFKGNKYWAVQGQNVLHGYPKDIYSSFGFPRTVKHIDAALSEENTGKTYFFVANKYWRYDEYKRSMDPGYPKMIAHDFPGIGHKVDAVFMKDGFFYFFHGTRQYKFDPKTKRILTLQKANSWFNCRKN

SEQ ID NO: 1889 - protein, 450 aa, Artificial Sequence
  MMP-1 variant S143T
FPATLETQEQDVDLVQKYLEKYYNLKNDGRQVEKRRNSGPVVEKLKQMQEFFGLKVTGKPDAETLKVMKQPRCGVPDVAQFVLTEGNPRWEQTHLTYRIENYTPDLPRADVDHAIEKAFQLWSNVTPLTFTKVSEGQADIMITFVRGDHRDNSPFDGPGGNLAHAFQPGPGIGGDAHFDEDERWTNNFREYNLHRVAAHELGHSLGLSHSTDIGALMYPSYTFSGDVQLAQDDIDGIQAIYGRSQNPVQPIGPQTPKACDSKLTFDAITTIRGEVMFFKDRFYMRTNPFYPEVELNFISVFWPQLPNGLEAAYEFADRDEVRFFKGNKYWAVQGQNVLHGYPKDIYSSFGFPRTVKHIDAALSEENTGKTYFFVANKYWRYDEYKRSMDPGYPKMIAHDFPGIGHKVDAVFMKDGFFYFFHGTRQYKFDPKTKRILTLQKANSWFNCRKN

SEQ ID NO: 1890 - protein, 450 aa, Artificial Sequence
  MMP-1 variant S143Y
FPATLETQEQDVDLVQKYLEKYYNLKNDGRQVEKRRNSGPVVEKLKQMQEFFGLKVTGKPDAETLKVMKQPRCGVPDVAQFVLTEGNPRWEQTHLTYRIENYTPDLPRADVDHAIEKAFQLWSNVTPLTFTKVSEGQADIMIYFVRGDHRDNSPFDGPGGNLAHAFQPGPGIGGDAHFDEDERWTNNFREYNLHRVAAHELGHSLGLSHSTDIGALMYPSYTFSGDVQLAQDDIDGIQAIYGRSQNPVQPIGPQTPKACDSKLTFDAITTIRGEVMFFKDRFYMRTNPFYPEVELNFISVFWPQLPNGLEAAYEFADRDEVRFFKGNKYWAVQGQNVLHGYPKDIYSSFGFPRTVKHIDAALSEENTGKTYFFVANKYWRYDEYKRSMDPGYPKMIAHDFPGIGHKVDAVFMKDGFFYFFHGTRQYKFDPKTKRILTLQKANSWFNCRKN

SEQ ID NO: 1891 - protein, 450 aa, Artificial Sequence
  MMP-1 variant S143G
FPATLETQEQDVDLVQKYLEKYYNLKNDGRQVEKRRNSGPVVEKLKQMQEFFGLKVTGKPDAETLKVMKQPRCGVPDVAQFVLTEGNPRWEQTHLTYRIENYTPDLPRADVDHAIEKAFQLWSNVTPLTFTKVSEGQADIMIGFVRGDHRDNSPFDGPGGNLAHAFQPGPGIGGDAHFDEDERWTNNFREYNLHRVAAHELGHSLGLSHSTDIGALMYPSYTFSGDVQLAQDDIDGIQAIYGRSQNPVQPIGPQTPKACDSKLTFDAITTIRGEVMFFKDRFYMRTNPFYPEVELNFISVFWPQLPNGLEAAYEFADRDEVRFFKGNKYWAVQGQNVLHGYPKDIYSSFGFPRTVKHIDAALSEENTGKTYFFVANKYWRYDEYKRSMDPGYPKMIAHDFPGIGHKVDAVFMKDGFFYFFHGTRQYKFDPKTKRILTLQKANSWFNCRKN

SEQ ID NO: 1892 - protein, 450 aa, Artificial Sequence
  MMP-1 variant S143F
FPATLETQEQDVDLVQKYLEKYYNLKNDGRQVEKRRNSGPVVEKLKQMQEFFGLKVTGKPDAETLKVMKQPRCGVPDVAQFVLTEGNPRWEQTHLTYRIENYTPDLPRADVDHAIEKAFQLWSNVTPLTFTKVSEGQADIMIFFVRGDHRDNSPFDGPGGNLAHAFQPGPGIGGDAHFDEDERWTNNFREYNLHRVAAHELGHSLGLSHSTDIGALMYPSYTFSGDVQLAQDDIDGIQAIYGRSQNPVQPIGPQTPKACDSKLTFDAITTIRGEVMFFKDRFYMRTNPFYPEVELNFISVFWPQLPNGLEAAYEFADRDEVRFFKGNKYWAVQGQNVLHGYPKDIYSSFGFPRTVKHIDAALSEENTGKTYFFVANKYWRYDEYKRSMDPGYPKMIAHDFPGIGHKVDAVFMKDGFFYFFHGTRQYKFDPKTKRILTLQKANSWFNCRKN

SEQ ID NO: 1893 - protein, 450 aa, Artificial Sequence
  MMP-1 variant S143M
FPATLETQEQDVDLVQKYLEKYYNLKNDGRQVEKRRNSGPVVEKLKQMQEFFGLKVTGKPDAETLKVMKQPRCGVPDVAQFVLTEGNPRWEQTHLTYRIENYTPDLPRADVDHAIEKAFQLWSNVTPLTFTKVSEGQADIMIMFVRGDHRDNSPFDGPGGNLAHAFQPGPGIGGDAHFDEDERWTNNFREYNLHRVAAHELGHSLGLSHSTDIGALMYPSYTFSGDVQLAQDDIDGIQAIYGRSQNPVQPIGPQTPKACDSKLTFDAITTIRGEVMFFKDRFYMRTNPFYPEVELNFISVFWPQLPNGLEAAYEFADRDEVRFFKGNKYWAVQGQNVLHGYPKDIYSSFGFPRTVKHIDAALSEENTGKTYFFVANKYWRYDEYKRSMDPGYPKMIAHDFPGIGHKVDAVFMKDGFFYFFHGTRQYKFDPKTKRILTLQKANSWFNCRKN

SEQ ID NO: 1894 - protein, 450 aa, Artificial Sequence
  MMP-1 variant S143W
FPATLETQEQDVDLVQKYLEKYYNLKNDGRQVEKRRNSGPVVEKLKQMQEFFGLKVTGKPDAETLKVMKQPRCGVPDVAQFVLTEGNPRWEQTHLTYRIENYTPDLPRADVDHAIEKAFQLWSNVTPLTFTKVSEGQADIMIWFVRGDHRDNSPFDGPGGNLAHAFQPGPGIGGDAHFDEDERWTNNFREYNLHRVAAHELGHSLGLSHSTDIGALMYPSYTFSGDVQLAQDDIDGIQAIYGRSQNPVQPIGPQTPKACDSKLTFDAITTIRGEVMFFKDRFYMRTNPFYPEVELNFISVFWPQLPNGLEAAYEFADRDEVRFFKGNKYWAVQGQNVLHGYPKDIYSSFGFPRTVKHIDAALSEENTGKTYFFVANKYWRYDEYKRSMDPGYPKMIAHDFPGIGHKVDAVFMKDGFFYFFHGTRQYKFDPKTKRILTLQKANSWFNCRKN

SEQ ID NO: 1895 - protein, 450 aa, Artificial Sequence
  MMP-1 variant S143I
FPATLETQEQDVDLVQKYLEKYYNLKNDGRQVEKRRNSGPVVEKLKQMQEFFGLKVTGKPDAETLKVMKQPRCGVPDVAQFVLTEGNPRWEQTHLTYRIENYTPDLPRADVDHAIEKAFQLWSNVTPLTFTKVSEGQADIMIIFVRGDHRDNSPFDGPGGNLAHAFQPGPGIGGDAHFDEDERWTNNFREYNLHRVAAHELGHSLGLSHSTDIGALMYPSYTFSGDVQLAQDDIDGIQAIYGRSQNPVQPIGPQTPKACDSKLTFDAITTIRGEVMFFKDRFYMRTNPFYPEVELNFISVFWPQLPNGLEAAYEFADRDEVRFFKGNKYWAVQGQNVLHGYPKDIYSSFGFPRTVKHIDAALSEENTGKTYFFVANKYWRYDEYKRSMDPGYPKMIAHDFPGIGHKVDAVFMKDGFFYFFHGTRQYKFDPKTKRILTLQKANSWFNCRKN

SEQ ID NO: 1896 - protein, 450 aa, Artificial Sequence
  MMP-1 variant S143V
FPATLETQEQDVDLVQKYLEKYYNLKNDGRQVEKRRNSGPVVEKLKQMQEFFGLKVTGKPDAETLKVMKQPRCGVPDVAQFVLTEGNPRWEQTHLTYRIENYTPDLPRADVDHAIEKAFQLWSNVTPLTFTKVSEGQADIMIVFVRGDHRDNSPFDGPGGNLAHAFQPGPGIGGDAHFDEDERWTNNFREYNLHRVAAHELGHSLGLSHSTDIGALMYPSYTFSGDVQLAQDDIDGIQAIYGRSQNPVQPIGPQTPKACDSKLTFDAITTIRGEVMFFKDRFYMRTNPFYPEVELNFISVFWPQLPNGLEAAYEFADRDEVRFFKGNKYWAVQGQNVLHGYPKDIYSSFGFPRTVKHIDAALSEENTGKTYFFVANKYWRYDEYKRSMDPGYPKMIAHDFPGIGHKVDAVFMKDGFFYFFHGTRQYKFDPKTKRILTLQKANSWFNCRKN

SEQ ID NO: 1897 - protein, 450 aa, Artificial Sequence
  MMP-1 variant S143L
FPATLETQEQDVDLVQKYLEKYYNLKNDGRQVEKRRNSGPVVEKLKQMQEFFGLKVTGKPDAETLKVMKQPRCGVPDVAQFVLTEGNPRWEQTHLTYRIENYTPDLPRADVDHAIEKAFQLWSNVTPLTFTKVSEGQADIMILFVRGDHRDNSPFDGPGGNLAHAFQPGPGIGGDAHFDEDERWTNNFREYNLHRVAAHELGHSLGLSHSTDIGALMYPSYTFSGDVQLAQDDIDGIQAIYGRSQNPVQPIGPQTPKACDSKLTFDAITTIRGEVMFFKDRFYMRTNPFYPEVELNFISVFWPQLPNGLEAAYEFADRDEVRFFKGNKYWAVQGQNVLHGYPKDIYSSFGFPRTVKHIDAALSEENTGKTYFFVANKYWRYDEYKRSMDPGYPKMIAHDFPGIGHKVDAVFMKDGFFYFFHGTRQYKFDPKTKRILTLQKANSWFNCRKN

SEQ ID NO: 1898 - protein, 450 aa, Artificial Sequence
  MMP-1 variant S143A
FPATLETQEQDVDLVQKYLEKYYNLKNDGRQVEKRRNSGPVVEKLKQMQEFFGLKVTGKPDAETLKVMKQPRCGVPDVAQFVLTEGNPRWEQTHLTYRIENYTPDLPRADVDHAIEKAFQLWSNVTPLTFTKVSEGQADIMIAFVRGDHRDNSPFDGPGGNLAHAFQPGPGIGGDAHFDEDERWTNNFREYNLHRVAAHELGHSLGLSHSTDIGALMYPSYTFSGDVQLAQDDIDGIQAIYGRSQNPVQPIGPQTPKACDSKLTFDAITTIRGEVMFFKDRFYMRTNPFYPEVELNFISVFWPQLPNGLEAAYEFADRDEVRFFKGNKYWAVQGQNVLHGYPKDIYSSFGFPRTVKHIDAALSEENTGKTYFFVANKYWRYDEYKRSMDPGYPKMIAHDFPGIGHKVDAVFMKDGFFYFFHGTRQYKFDPKTKRILTLQKANSWFNCRKN

SEQ ID NO: 1899 - protein, 450 aa, Artificial Sequence
  MMP-1 variant S143P
FPATLETQEQDVDLVQKYLEKYYNLKNDGRQVEKRRNSGPVVEKLKQMQEFFGLKVTGKPDAETLKVMKQPRCGVPDVAQFVLTEGNPRWEQTHLTYRIENYTPDLPRADVDHAIEKAFQLWSNVTPLTFTKVSEGQADIMIPFVRGDHRDNSPFDGPGGNLAHAFQPGPGIGGDAHFDEDERWTNNFREYNLHRVAAHELGHSLGLSHSTDIGALMYPSYTFSGDVQLAQDDIDGIQAIYGRSQNPVQPIGPQTPKACDSKLTFDAITTIRGEVMFFKDRFYMRTNPFYPEVELNFISVFWPQLPNGLEAAYEFADRDEVRFFKGNKYWAVQGQNVLHGYPKDIYSSFGFPRTVKHIDAALSEENTGKTYFFVANKYWRYDEYKRSMDPGYPKMIAHDFPGIGHKVDAVFMKDGFFYFFHGTRQYKFDPKTKRILTLQKANSWFNCRKN

SEQ ID NO: 1900 - protein, 450 aa, Artificial Sequence
  MMP-1 variant F144D
FPATLETQEQDVDLVQKYLEKYYNLKNDGRQVEKRRNSGPVVEKLKQMQEFFGLKVTGKPDAETLKVMKQPRCGVPDVAQFVLTEGNPRWEQTHLTYRIENYTPDLPRADVDHAIEKAFQLWSNVTPLTFTKVSEGQADIMISDVRGDHRDNSPFDGPGGNLAHAFQPGPGIGGDAHFDEDERWTNNFREYNLHRVAAHELGHSLGLSHSTDIGALMYPSYTFSGDVQLAQDDIDGIQAIYGRSQNPVQPIGPQTPKACDSKLTFDAITTIRGEVMFFKDRFYMRTNPFYPEVELNFISVFWPQLPNGLEAAYEFADRDEVRFFKGNKYWAVQGQNVLHGYPKDIYSSFGFPRTVKHIDAALSEENTGKTYFFVANKYWRYDEYKRSMDPGYPKMIAHDFPGIGHKVDAVFMKDGFFYFFHGTRQYKFDPKTKRILTLQKANSWFNCRKN

SEQ ID NO: 1901 - protein, 450 aa, Artificial Sequence
  MMP-1 variant F144E
FPATLETQEQDVDLVQKYLEKYYNLKNDGRQVEKRRNSGPVVEKLKQMQEFFGLKVTGKPDAETLKVMKQPRCGVPDVAQFVLTEGNPRWEQTHLTYRIENYTPDLPRADVDHAIEKAFQLWSNVTPLTFTKVSEGQADIMISEVRGDHRDNSPFDGPGGNLAHAFQPGPGIGGDAHFDEDERWTNNFREYNLHRVAAHELGHSLGLSHSTDIGALMYPSYTFSGDVQLAQDDIDGIQAIYGRSQNPVQPIGPQTPKACDSKLTFDAITTIRGEVMFFKDRFYMRTNPFYPEVELNFISVFWPQLPNGLEAAYEFADRDEVRFFKGNKYWAVQGQNVLHGYPKDIYSSFGFPRTVKHIDAALSEENTGKTYFFVANKYWRYDEYKRSMDPGYPKMIAHDFPGIGHKVDAVFMKDGFFYFFHGTRQYKFDPKTKRILTLQKANSWFNCRKN

SEQ ID NO: 1902 - protein, 450 aa, Artificial Sequence
  MMP-1 variant F144H
FPATLETQEQDVDLVQKYLEKYYNLKNDGRQVEKRRNSGPVVEKLKQMQEFFGLKVTGKPDAETLKVMKQPRCGVPDVAQFVLTEGNPRWEQTHLTYRIENYTPDLPRADVDHAIEKAFQLWSNVTPLTFTKVSEGQADIMISHVRGDHRDNSPFDGPGGNLAHAFQPGPGIGGDAHFDEDERWTNNFREYNLHRVAAHELGHSLGLSHSTDIGALMYPSYTFSGDVQLAQDDIDGIQAIYGRSQNPVQPIGPQTPKACDSKLTFDAITTIRGEVMFFKDRFYMRTNPFYPEVELNFISVFWPQLPNGLEAAYEFADRDEVRFFKGNKYWAVQGQNVLHGYPKDIYSSFGFPRTVKHIDAALSEENTGKTYFFVANKYWRYDEYKRSMDPGYPKMIAHDFPGIGHKVDAVFMKDGFFYFFHGTRQYKFDPKTKRILTLQKANSWFNCRKN

SEQ ID NO: 1903 - protein, 450 aa, Artificial Sequence
  MMP-1 variant F144K
FPATLETQEQDVDLVQKYLEKYYNLKNDGRQVEKRRNSGPVVEKLKQMQEFFGLKVTGKPDAETLKVMKQPRCGVPDVAQFVLTEGNPRWEQTHLTYRIENYTPDLPRADVDHAIEKAFQLWSNVTPLTFTKVSEGQADIMISKVRGDHRDNSPFDGPGGNLAHAFQPGPGIGGDAHFDEDERWTNNFREYNLHRVAAHELGHSLGLSHSTDIGALMYPSYTFSGDVQLAQDDIDGIQAIYGRSQNPVQPIGPQTPKACDSKLTFDAITTIRGEVMFFKDRFYMRTNPFYPEVELNFISVFWPQLPNGLEAAYEFADRDEVRFFKGNKYWAVQGQNVLHGYPKDIYSSFGFPRTVKHIDAALSEENTGKTYFFVANKYWRYDEYKRSMDPGYPKMIAHDFPGIGHKVDAVFMKDGFFYFFHGTRQYKFDPKTKRILTLQKANSWFNCRKN

SEQ ID NO: 1904 - protein, 450 aa, Artificial Sequence
  MMP-1 variant F144R
FPATLETQEQDVDLVQKYLEKYYNLKNDGRQVEKRRNSGPVVEKLKQMQEFFGLKVTGKPDAETLKVMKQPRCGVPDVAQFVLTEGNPRWEQTHLTYRIENYTPDLPRADVDHAIEKAFQLWSNVTPLTFTKVSEGQADIMISRVRGDHRDNSPFDGPGGNLAHAFQPGPGIGGDAHFDEDERWTNNFREYNLHRVAAHELGHSLGLSHSTDIGALMYPSYTFSGDVQLAQDDIDGIQAIYGRSQNPVQPIGPQTPKACDSKLTFDAITTIRGEVMFFKDRFYMRTNPFYPEVELNFISVFWPQLPNGLEAAYEFADRDEVRFFKGNKYWAVQGQNVLHGYPKDIYSSFGFPRTVKHIDAALSEENTGKTYFFVANKYWRYDEYKRSMDPGYPKMIAHDFPGIGHKVDAVFMKDGFFYFFHGTRQYKFDPKTKRILTLQKANSWFNCRKN

SEQ ID NO: 1905 - protein, 450 aa, Artificial Sequence
  MMP-1 variant F144C
FPATLETQEQDVDLVQKYLEKYYNLKNDGRQVEKRRNSGPVVEKLKQMQEFFGLKVTGKPDAETLKVMKQPRCGVPDVAQFVLTEGNPRWEQTHLTYRIENYTPDLPRADVDHAIEKAFQLWSNVTPLTFTKVSEGQADIMISCVRGDHRDNSPFDGPGGNLAHAFQPGPGIGGDAHFDEDERWTNNFREYNLHRVAAHELGHSLGLSHSTDIGALMYPSYTFSGDVQLAQDDIDGIQAIYGRSQNPVQPIGPQTPKACDSKLTFDAITTIRGEVMFFKDRFYMRTNPFYPEVELNFISVFWPQLPNGLEAAYEFADRDEVRFFKGNKYWAVQGQNVLHGYPKDIYSSFGFPRTVKHIDAALSEENTGKTYFFVANKYWRYDEYKRSMDPGYPKMIAHDFPGIGHKVDAVFMKDGFFYFFHGTRQYKFDPKTKRILTLQKANSWFNCRKN

SEQ ID NO: 1906 - protein, 450 aa, Artificial Sequence
  MMP-1 variant F144N
FPATLETQEQDVDLVQKYLEKYYNLKNDGRQVEKRRNSGPVVEKLKQMQEFFGLKVTGKPDAETLKVMKQPRCGVPDVAQFVLTEGNPRWEQTHLTYRIENYTPDLPRADVDHAIEKAFQLWSNVTPLTFTKVSEGQADIMISNVRGDHRDNSPFDGPGGNLAHAFQPGPGIGGDAHFDEDERWTNNFREYNLHRVAAHELGHSLGLSHSTDIGALMYPSYTFSGDVQLAQDDIDGIQAIYGRSQNPVQPIGPQTPKACDSKLTFDAITTIRGEVMFFKDRFYMRTNPFYPEVELNFISVFWPQLPNGLEAAYEFADRDEVRFFKGNKYWAVQGQNVLHGYPKDIYSSFGFPRTVKHIDAALSEENTGKTYFFVANKYWRYDEYKRSMDPGYPKMIAHDFPGIGHKVDAVFMKDGFFYFFHGTRQYKFDPKTKRILTLQKANSWFNCRKN

SEQ ID NO: 1907 - protein, 450 aa, Artificial Sequence
  MMP-1 variant F144Q
FPATLETQEQDVDLVQKYLEKYYNLKNDGRQVEKRRNSGPVVEKLKQMQEFFGLKVTGKPDAETLKVMKQPRCGVPDVAQFVLTEGNPRWEQTHLTYRIENYTPDLPRADVDHAIEKAFQLWSNVTPLTFTKVSEGQADIMISQVRGDHRDNSPFDGPGGNLAHAFQPGPGIGGDAHFDEDERWTNNFREYNLHRVAAHELGHSLGLSHSTDIGALMYPSYTFSGDVQLAQDDIDGIQAIYGRSQNPVQPIGPQTPKACDSKLTFDAITTIRGEVMFFKDRFYMRTNPFYPEVELNFISVFWPQLPNGLEAAYEFADRDEVRFFKGNKYWAVQGQNVLHGYPKDIYSSFGFPRTVKHIDAALSEENTGKTYFFVANKYWRYDEYKRSMDPGYPKMIAHDFPGIGHKVDAVFMKDGFFYFFHGTRQYKFDPKTKRILTLQKANSWFNCRKN

SEQ ID NO: 1908 - protein, 450 aa, Artificial Sequence
  MMP-1 variant F144T
FPATLETQEQDVDLVQKYLEKYYNLKNDGRQVEKRRNSGPVVEKLKQMQEFFGLKVTGKPDAETLKVMKQPRCGVPDVAQFVLTEGNPRWEQTHLTYRIENYTPDLPRADVDHAIEKAFQLWSNVTPLTFTKVSEGQADIMISTVRGDHRDNSPFDGPGGNLAHAFQPGPGIGGDAHFDEDERWTNNFREYNLHRVAAHELGHSLGLSHSTDIGALMYPSYTFSGDVQLAQDDIDGIQAIYGRSQNPVQPIGPQTPKACDSKLTFDAITTIRGEVMFFKDRFYMRTNPFYPEVELNFISVFWPQLPNGLEAAYEFADRDEVRFFKGNKYWAVQGQNVLHGYPKDIYSSFGFPRTVKHIDAALSEENTGKTYFFVANKYWRYDEYKRSMDPGYPKMIAHDFPGIGHKVDAVFMKDGFFYFFHGTRQYKFDPKTKRILTLQKANSWFNCRKN

SEQ ID NO: 1909 - protein, 450 aa, Artificial Sequence
  MMP-1 variant F144Y
FPATLETQEQDVDLVQKYLEKYYNLKNDGRQVEKRRNSGPVVEKLKQMQEFFGLKVTGKPDAETLKVMKQPRCGVPDVAQFVLTEGNPRWEQTHLTYRIENYTPDLPRADVDHAIEKAFQLWSNVTPLTFTKVSEGQADIMISYVRGDHRDNSPFDGPGGNLAHAFQPGPGIGGDAHFDEDERWTNNFREYNLHRVAAHELGHSLGLSHSTDIGALMYPSYTFSGDVQLAQDDIDGIQAIYGRSQNPVQPIGPQTPKACDSKLTFDAITTIRGEVMFFKDRFYMRTNPFYPEVELNFISVFWPQLPNGLEAAYEFADRDEVRFFKGNKYWAVQGQNVLHGYPKDIYSSFGFPRTVKHIDAALSEENTGKTYFFVANKYWRYDEYKRSMDPGYPKMIAHDFPGIGHKVDAVFMKDGFFYFFHGTRQYKFDPKTKRILTLQKANSWFNCRKN

SEQ ID NO: 1910 - protein, 450 aa, Artificial Sequence
  MMP-1 variant F144S
FPATLETQEQDVDLVQKYLEKYYNLKNDGRQVEKRRNSGPVVEKLKQMQEFFGLKVTGKPDAETLKVMKQPRCGVPDVAQFVLTEGNPRWEQTHLTYRIENYTPDLPRADVDHAIEKAFQLWSNVTPLTFTKVSEGQADIMISSVRGDHRDNSPFDGPGGNLAHAFQPGPGIGGDAHFDEDERWTNNFREYNLHRVAAHELGHSLGLSHSTDIGALMYPSYTFSGDVQLAQDDIDGIQAIYGRSQNPVQPIGPQTPKACDSKLTFDAITTIRGEVMFFKDRFYMRTNPFYPEVELNFISVFWPQLPNGLEAAYEFADRDEVRFFKGNKYWAVQGQNVLHGYPKDIYSSFGFPRTVKHIDAALSEENTGKTYFFVANKYWRYDEYKRSMDPGYPKMIAHDFPGIGHKVDAVFMKDGFFYFFHGTRQYKFDPKTKRILTLQKANSWFNCRKN

SEQ ID NO: 1911 - protein, 450 aa, Artificial Sequence
  MMP-1 variant F144G
FPATLETQEQDVDLVQKYLEKYYNLKNDGRQVEKRRNSGPVVEKLKQMQEFFGLKVTGKPDAETLKVMKQPRCGVPDVAQFVLTEGNPRWEQTHLTYRIENYTPDLPRADVDHAIEKAFQLWSNVTPLTFTKVSEGQADIMISGVRGDHRDNSPFDGPGGNLAHAFQPGPGIGGDAHFDEDERWTNNFREYNLHRVAAHELGHSLGLSHSTDIGALMYPSYTFSGDVQLAQDDIDGIQAIYGRSQNPVQPIGPQTPKACDSKLTFDAITTIRGEVMFFKDRFYMRTNPFYPEVELNFISVFWPQLPNGLEAAYEFADRDEVRFFKGNKYWAVQGQNVLHGYPKDIYSSFGFPRTVKHIDAALSEENTGKTYFFVANKYWRYDEYKRSMDPGYPKMIAHDFPGIGHKVDAVFMKDGFFYFFHGTRQYKFDPKTKRILTLQKANSWFNCRKN

SEQ ID NO: 1912 - protein, 450 aa, Artificial Sequence
  MMP-1 variant F144M
FPATLETQEQDVDLVQKYLEKYYNLKNDGRQVEKRRNSGPVVEKLKQMQEFFGLKVTGKPDAETLKVMKQPRCGVPDVAQFVLTEGNPRWEQTHLTYRIENYTPDLPRADVDHAIEKAFQLWSNVTPLTFTKVSEGQADIMISMVRGDHRDNSPFDGPGGNLAHAFQPGPGIGGDAHFDEDERWTNNFREYNLHRVAAHELGHSLGLSHSTDIGALMYPSYTFSGDVQLAQDDIDGIQAIYGRSQNPVQPIGPQTPKACDSKLTFDAITTIRGEVMFFKDRFYMRTNPFYPEVELNFISVFWPQLPNGLEAAYEFADRDEVRFFKGNKYWAVQGQNVLHGYPKDIYSSFGFPRTVKHIDAALSEENTGKTYFFVANKYWRYDEYKRSMDPGYPKMIAHDFPGIGHKVDAVFMKDGFFYFFHGTRQYKFDPKTKRILTLQKANSWFNCRKN

SEQ ID NO: 1913 - protein, 450 aa, Artificial Sequence
  MMP-1 variant F144W
FPATLETQEQDVDLVQKYLEKYYNLKNDGRQVEKRRNSGPVVEKLKQMQEFFGLKVTGKPDAETLKVMKQPRCGVPDVAQFVLTEGNPRWEQTHLTYRIENYTPDLPRADVDHAIEKAFQLWSNVTPLTFTKVSEGQADIMISWVRGDHRDNSPFDGPGGNLAHAFQPGPGIGGDAHFDEDERWTNNFREYNLHRVAAHELGHSLGLSHSTDIGALMYPSYTFSGDVQLAQDDIDGIQAIYGRSQNPVQPIGPQTPKACDSKLTFDAITTIRGEVMFFKDRFYMRTNPFYPEVELNFISVFWPQLPNGLEAAYEFADRDEVRFFKGNKYWAVQGQNVLHGYPKDIYSSFGFPRTVKHIDAALSEENTGKTYFFVANKYWRYDEYKRSMDPGYPKMIAHDFPGIGHKVDAVFMKDGFFYFFHGTRQYKFDPKTKRILTLQKANSWFNCRKN

SEQ ID NO: 1914 - protein, 450 aa, Artificial Sequence
  MMP-1 variant F144I
FPATLETQEQDVDLVQKYLEKYYNLKNDGRQVEKRRNSGPVVEKLKQMQEFFGLKVTGKPDAETLKVMKQPRCGVPDVAQFVLTEGNPRWEQTHLTYRIENYTPDLPRADVDHAIEKAFQLWSNVTPLTFTKVSEGQADIMISIVRGDHRDNSPFDGPGGNLAHAFQPGPGIGGDAHFDEDERWTNNFREYNLHRVAAHELGHSLGLSHSTDIGALMYPSYTFSGDVQLAQDDIDGIQAIYGRSQNPVQPIGPQTPKACDSKLTFDAITTIRGEVMFFKDRFYMRTNPFYPEVELNFISVFWPQLPNGLEAAYEFADRDEVRFFKGNKYWAVQGQNVLHGYPKDIYSSFGFPRTVKHIDAALSEENTGKTYFFVANKYWRYDEYKRSMDPGYPKMIAHDFPGIGHKVDAVFMKDGFFYFFHGTRQYKFDPKTKRILTLQKANSWFNCRKN

SEQ ID NO: 1915 - protein, 450 aa, Artificial Sequence
  MMP-1 variant F144V
FPATLETQEQDVDLVQKYLEKYYNLKNDGRQVEKRRNSGPVVEKLKQMQEFFGLKVTGKPDAETLKVMKQPRCGVPDVAQFVLTEGNPRWEQTHLTYRIENYTPDLPRADVDHAIEKAFQLWSNVTPLTFTKVSEGQADIMISVVRGDHRDNSPFDGPGGNLAHAFQPGPGIGGDAHFDEDERWTNNFREYNLHRVAAHELGHSLGLSHSTDIGALMYPSYTFSGDVQLAQDDIDGIQAIYGRSQNPVQPIGPQTPKACDSKLTFDAITTIRGEVMFFKDRFYMRTNPFYPEVELNFISVFWPQLPNGLEAAYEFADRDEVRFFKGNKYWAVQGQNVLHGYPKDIYSSFGFPRTVKHIDAALSEENTGKTYFFVANKYWRYDEYKRSMDPGYPKMIAHDFPGIGHKVDAVFMKDGFFYFFHGTRQYKFDPKTKRILTLQKANSWFNCRKN

SEQ ID NO: 1916 - protein, 450 aa, Artificial Sequence
  MMP-1 variant F144L
FPATLETQEQDVDLVQKYLEKYYNLKNDGRQVEKRRNSGPVVEKLKQMQEFFGLKVTGKPDAETLKVMKQPRCGVPDVAQFVLTEGNPRWEQTHLTYRIENYTPDLPRADVDHAIEKAFQLWSNVTPLTFTKVSEGQADIMISLVRGDHRDNSPFDGPGGNLAHAFQPGPGIGGDAHFDEDERWTNNFREYNLHRVAAHELGHSLGLSHSTDIGALMYPSYTFSGDVQLAQDDIDGIQAIYGRSQNPVQPIGPQTPKACDSKLTFDAITTIRGEVMFFKDRFYMRTNPFYPEVELNFISVFWPQLPNGLEAAYEFADRDEVRFFKGNKYWAVQGQNVLHGYPKDIYSSFGFPRTVKHIDAALSEENTGKTYFFVANKYWRYDEYKRSMDPGYPKMIAHDFPGIGHKVDAVFMKDGFFYFFHGTRQYKFDPKTKRILTLQKANSWFNCRKN

SEQ ID NO: 1917 - protein, 450 aa, Artificial Sequence
  MMP-1 variant F144A
FPATLETQEQDVDLVQKYLEKYYNLKNDGRQVEKRRNSGPVVEKLKQMQEFFGLKVTGKPDAETLKVMKQPRCGVPDVAQFVLTEGNPRWEQTHLTYRIENYTPDLPRADVDHAIEKAFQLWSNVTPLTFTKVSEGQADIMISAVRGDHRDNSPFDGPGGNLAHAFQPGPGIGGDAHFDEDERWTNNFREYNLHRVAAHELGHSLGLSHSTDIGALMYPSYTFSGDVQLAQDDIDGIQAIYGRSQNPVQPIGPQTPKACDSKLTFDAITTIRGEVMFFKDRFYMRTNPFYPEVELNFISVFWPQLPNGLEAAYEFADRDEVRFFKGNKYWAVQGQNVLHGYPKDIYSSFGFPRTVKHIDAALSEENTGKTYFFVANKYWRYDEYKRSMDPGYPKMIAHDFPGIGHKVDAVFMKDGFFYFFHGTRQYKFDPKTKRILTLQKANSWFNCRKN

SEQ ID NO: 1918 - protein, 450 aa, Artificial Sequence
  MMP-1 variant F144P
FPATLETQEQDVDLVQKYLEKYYNLKNDGRQVEKRRNSGPVVEKLKQMQEFFGLKVTGKPDAETLKVMKQPRCGVPDVAQFVLTEGNPRWEQTHLTYRIENYTPDLPRADVDHAIEKAFQLWSNVTPLTFTKVSEGQADIMISPVRGDHRDNSPFDGPGGNLAHAFQPGPGIGGDAHFDEDERWTNNFREYNLHRVAAHELGHSLGLSHSTDIGALMYPSYTFSGDVQLAQDDIDGIQAIYGRSQNPVQPIGPQTPKACDSKLTFDAITTIRGEVMFFKDRFYMRTNPFYPEVELNFISVFWPQLPNGLEAAYEFADRDEVRFFKGNKYWAVQGQNVLHGYPKDIYSSFGFPRTVKHIDAALSEENTGKTYFFVANKYWRYDEYKRSMDPGYPKMIAHDFPGIGHKVDAVFMKDGFFYFFHGTRQYKFDPKTKRILTLQKANSWFNCRKN

SEQ ID NO: 1919 - protein, 450 aa, Artificial Sequence
  MMP-1 variant V145D
FPATLETQEQDVDLVQKYLEKYYNLKNDGRQVEKRRNSGPVVEKLKQMQEFFGLKVTGKPDAETLKVMKQPRCGVPDVAQFVLTEGNPRWEQTHLTYRIENYTPDLPRADVDHAIEKAFQLWSNVTPLTFTKVSEGQADIMISFDRGDHRDNSPFDGPGGNLAHAFQPGPGIGGDAHFDEDERWTNNFREYNLHRVAAHELGHSLGLSHSTDIGALMYPSYTFSGDVQLAQDDIDGIQAIYGRSQNPVQPIGPQTPKACDSKLTFDAITTIRGEVMFFKDRFYMRTNPFYPEVELNFISVFWPQLPNGLEAAYEFADRDEVRFFKGNKYWAVQGQNVLHGYPKDIYSSFGFPRTVKHIDAALSEENTGKTYFFVANKYWRYDEYKRSMDPGYPKMIAHDFPGIGHKVDAVFMKDGFFYFFHGTRQYKFDPKTKRILTLQKANSWFNCRKN

SEQ ID NO: 1920 - protein, 450 aa, Artificial Sequence
  MMP-1 variant V145E
FPATLETQEQDVDLVQKYLEKYYNLKNDGRQVEKRRNSGPVVEKLKQMQEFFGLKVTGKPDAETLKVMKQPRCGVPDVAQFVLTEGNPRWEQTHLTYRIENYTPDLPRADVDHAIEKAFQLWSNVTPLTFTKVSEGQADIMISFERGDHRDNSPFDGPGGNLAHAFQPGPGIGGDAHFDEDERWTNNFREYNLHRVAAHELGHSLGLSHSTDIGALMYPSYTFSGDVQLAQDDIDGIQAIYGRSQNPVQPIGPQTPKACDSKLTFDAITTIRGEVMFFKDRFYMRTNPFYPEVELNFISVFWPQLPNGLEAAYEFADRDEVRFFKGNKYWAVQGQNVLHGYPKDIYSSFGFPRTVKHIDAALSEENTGKTYFFVANKYWRYDEYKRSMDPGYPKMIAHDFPGIGHKVDAVFMKDGFFYFFHGTRQYKFDPKTKRILTLQKANSWFNCRKN

SEQ ID NO: 1921 - protein, 450 aa, Artificial Sequence
  MMP-1 variant V145H
FPATLETQEQDVDLVQKYLEKYYNLKNDGRQVEKRRNSGPVVEKLKQMQEFFGLKVTGKPDAETLKVMKQPRCGVPDVAQFVLTEGNPRWEQTHLTYRIENYTPDLPRADVDHAIEKAFQLWSNVTPLTFTKVSEGQADIMISFHRGDHRDNSPFDGPGGNLAHAFQPGPGIGGDAHFDEDERWTNNFREYNLHRVAAHELGHSLGLSHSTDIGALMYPSYTFSGDVQLAQDDIDGIQAIYGRSQNPVQPIGPQTPKACDSKLTFDAITTIRGEVMFFKDRFYMRTNPFYPEVELNFISVFWPQLPNGLEAAYEFADRDEVRFFKGNKYWAVQGQNVLHGYPKDIYSSFGFPRTVKHIDAALSEENTGKTYFFVANKYWRYDEYKRSMDPGYPKMIAHDFPGIGHKVDAVFMKDGFFYFFHGTRQYKFDPKTKRILTLQKANSWFNCRKN

SEQ ID NO: 1922 - protein, 450 aa, Artificial Sequence
  MMP-1 variant V145K
FPATLETQEQDVDLVQKYLEKYYNLKNDGRQVEKRRNSGPVVEKLKQMQEFFGLKVTGKPDAETLKVMKQPRCGVPDVAQFVLTEGNPRWEQTHLTYRIENYTPDLPRADVDHAIEKAFQLWSNVTPLTFTKVSEGQADIMISFKRGDHRDNSPFDGPGGNLAHAFQPGPGIGGDAHFDEDERWTNNFREYNLHRVAAHELGHSLGLSHSTDIGALMYPSYTFSGDVQLAQDDIDGIQAIYGRSQNPVQPIGPQTPKACDSKLTFDAITTIRGEVMFFKDRFYMRTNPFYPEVELNFISVFWPQLPNGLEAAYEFADRDEVRFFKGNKYWAVQGQNVLHGYPKDIYSSFGFPRTVKHIDAALSEENTGKTYFFVANKYWRYDEYKRSMDPGYPKMIAHDFPGIGHKVDAVFMKDGFFYFFHGTRQYKFDPKTKRILTLQKANSWFNCRKN

SEQ ID NO: 1923 - protein, 450 aa, Artificial Sequence
  MMP-1 variant V145R
FPATLETQEQDVDLVQKYLEKYYNLKNDGRQVEKRRNSGPVVEKLKQMQEFFGLKVTGKPDAETLKVMKQPRCGVPDVAQFVLTEGNPRWEQTHLTYRIENYTPDLPRADVDHAIEKAFQLWSNVTPLTFTKVSEGQADIMISFRRGDHRDNSPFDGPGGNLAHAFQPGPGIGGDAHFDEDERWTNNFREYNLHRVAAHELGHSLGLSHSTDIGALMYPSYTFSGDVQLAQDDIDGIQAIYGRSQNPVQPIGPQTPKACDSKLTFDAITTIRGEVMFFKDRFYMRTNPFYPEVELNFISVFWPQLPNGLEAAYEFADRDEVRFFKGNKYWAVQGQNVLHGYPKDIYSSFGFPRTVKHIDAALSEENTGKTYFFVANKYWRYDEYKRSMDPGYPKMIAHDFPGIGHKVDAVFMKDGFFYFFHGTRQYKFDPKTKRILTLQKANSWFNCRKN

SEQ ID NO: 1924 - protein, 450 aa, Artificial Sequence
  MMP-1 variant V145C
FPATLETQEQDVDLVQKYLEKYYNLKNDGRQVEKRRNSGPVVEKLKQMQEFFGLKVTGKPDAETLKVMKQPRCGVPDVAQFVLTEGNPRWEQTHLTYRIENYTPDLPRADVDHAIEKAFQLWSNVTPLTFTKVSEGQADIMISFCRGDHRDNSPFDGPGGNLAHAFQPGPGIGGDAHFDEDERWTNNFREYNLHRVAAHELGHSLGLSHSTDIGALMYPSYTFSGDVQLAQDDIDGIQAIYGRSQNPVQPIGPQTPKACDSKLTFDAITTIRGEVMFFKDRFYMRTNPFYPEVELNFISVFWPQLPNGLEAAYEFADRDEVRFFKGNKYWAVQGQNVLHGYPKDIYSSFGFPRTVKHIDAALSEENTGKTYFFVANKYWRYDEYKRSMDPGYPKMIAHDFPGIGHKVDAVFMKDGFFYFFHGTRQYKFDPKTKRILTLQKANSWFNCRKN

SEQ ID NO: 1925 - protein, 450 aa, Artificial Sequence
  MMP-1 variant V145N
FPATLETQEQDVDLVQKYLEKYYNLKNDGRQVEKRRNSGPVVEKLKQMQEFFGLKVTGKPDAETLKVMKQPRCGVPDVAQFVLTEGNPRWEQTHLTYRIENYTPDLPRADVDHAIEKAFQLWSNVTPLTFTKVSEGQADIMISFNRGDHRDNSPFDGPGGNLAHAFQPGPGIGGDAHFDEDERWTNNFREYNLHRVAAHELGHSLGLSHSTDIGALMYPSYTFSGDVQLAQDDIDGIQAIYGRSQNPVQPIGPQTPKACDSKLTFDAITTIRGEVMFFKDRFYMRTNPFYPEVELNFISVFWPQLPNGLEAAYEFADRDEVRFFKGNKYWAVQGQNVLHGYPKDIYSSFGFPRTVKHIDAALSEENTGKTYFFVANKYWRYDEYKRSMDPGYPKMIAHDFPGIGHKVDAVFMKDGFFYFFHGTRQYKFDPKTKRILTLQKANSWFNCRKN

SEQ ID NO: 1926 - protein, 450 aa, Artificial Sequence
  MMP-1 variant V145Q
FPATLETQEQDVDLVQKYLEKYYNLKNDGRQVEKRRNSGPVVEKLKQMQEFFGLKVTGKPDAETLKVMKQPRCGVPDVAQFVLTEGNPRWEQTHLTYRIENYTPDLPRADVDHAIEKAFQLWSNVTPLTFTKVSEGQADIMISFQRGDHRDNSPFDGPGGNLAHAFQPGPGIGGDAHFDEDERWTNNFREYNLHRVAAHELGHSLGLSHSTDIGALMYPSYTFSGDVQLAQDDIDGIQAIYGRSQNPVQPIGPQTPKACDSKLTFDAITTIRGEVMFFKDRFYMRTNPFYPEVELNFISVFWPQLPNGLEAAYEFADRDEVRFFKGNKYWAVQGQNVLHGYPKDIYSSFGFPRTVKHIDAALSEENTGKTYFFVANKYWRYDEYKRSMDPGYPKMIAHDFPGIGHKVDAVFMKDGFFYFFHGTRQYKFDPKTKRILTLQKANSWFNCRKN

SEQ ID NO: 1927 - protein, 450 aa, Artificial Sequence
  MMP-1 variant V145T
FPATLETQEQDVDLVQKYLEKYYNLKNDGRQVEKRRNSGPVVEKLKQMQEFFGLKVTGKPDAETLKVMKQPRCGVPDVAQFVLTEGNPRWEQTHLTYRIENYTPDLPRADVDHAIEKAFQLWSNVTPLTFTKVSEGQADIMISFTRGDHRDNSPFDGPGGNLAHAFQPGPGIGGDAHFDEDERWTNNFREYNLHRVAAHELGHSLGLSHSTDIGALMYPSYTFSGDVQLAQDDIDGIQAIYGRSQNPVQPIGPQTPKACDSKLTFDAITTIRGEVMFFKDRFYMRTNPFYPEVELNFISVFWPQLPNGLEAAYEFADRDEVRFFKGNKYWAVQGQNVLHGYPKDIYSSFGFPRTVKHIDAALSEENTGKTYFFVANKYWRYDEYKRSMDPGYPKMIAHDFPGIGHKVDAVFMKDGFFYFFHGTRQYKFDPKTKRILTLQKANSWFNCRKN

SEQ ID NO: 1928 - protein, 450 aa, Artificial Sequence
  MMP-1 variant V145Y
FPATLETQEQDVDLVQKYLEKYYNLKNDGRQVEKRRNSGPVVEKLKQMQEFFGLKVTGKPDAETLKVMKQPRCGVPDVAQFVLTEGNPRWEQTHLTYRIENYTPDLPRADVDHAIEKAFQLWSNVTPLTFTKVSEGQADIMISFYRGDHRDNSPFDGPGGNLAHAFQPGPGIGGDAHFDEDERWTNNFREYNLHRVAAHELGHSLGLSHSTDIGALMYPSYTFSGDVQLAQDDIDGIQAIYGRSQNPVQPIGPQTPKACDSKLTFDAITTIRGEVMFFKDRFYMRTNPFYPEVELNFISVFWPQLPNGLEAAYEFADRDEVRFFKGNKYWAVQGQNVLHGYPKDIYSSFGFPRTVKHIDAALSEENTGKTYFFVANKYWRYDEYKRSMDPGYPKMIAHDFPGIGHKVDAVFMKDGFFYFFHGTRQYKFDPKTKRILTLQKANSWFNCRKN

SEQ ID NO: 1929 - protein, 450 aa, Artificial Sequence
  MMP-1 variant V145S
FPATLETQEQDVDLVQKYLEKYYNLKNDGRQVEKRRNSGPVVEKLKQMQEFFGLKVTGKPDAETLKVMKQPRCGVPDVAQFVLTEGNPRWEQTHLTYRIENYTPDLPRADVDHAIEKAFQLWSNVTPLTFTKVSEGQADIMISFSRGDHRDNSPFDGPGGNLAHAFQPGPGIGGDAHFDEDERWTNNFREYNLHRVAAHELGHSLGLSHSTDIGALMYPSYTFSGDVQLAQDDIDGIQAIYGRSQNPVQPIGPQTPKACDSKLTFDAITTIRGEVMFFKDRFYMRTNPFYPEVELNFISVFWPQLPNGLEAAYEFADRDEVRFFKGNKYWAVQGQNVLHGYPKDIYSSFGFPRTVKHIDAALSEENTGKTYFFVANKYWRYDEYKRSMDPGYPKMIAHDFPGIGHKVDAVFMKDGFFYFFHGTRQYKFDPKTKRILTLQKANSWFNCRKN

SEQ ID NO: 1930 - protein, 450 aa, Artificial Sequence
  MMP-1 variant V145G
FPATLETQEQDVDLVQKYLEKYYNLKNDGRQVEKRRNSGPVVEKLKQMQEFFGLKVTGKPDAETLKVMKQPRCGVPDVAQFVLTEGNPRWEQTHLTYRIENYTPDLPRADVDHAIEKAFQLWSNVTPLTFTKVSEGQADIMISFGRGDHRDNSPFDGPGGNLAHAFQPGPGIGGDAHFDEDERWTNNFREYNLHRVAAHELGHSLGLSHSTDIGALMYPSYTFSGDVQLAQDDIDGIQAIYGRSQNPVQPIGPQTPKACDSKLTFDAITTIRGEVMFFKDRFYMRTNPFYPEVELNFISVFWPQLPNGLEAAYEFADRDEVRFFKGNKYWAVQGQNVLHGYPKDIYSSFGFPRTVKHIDAALSEENTGKTYFFVANKYWRYDEYKRSMDPGYPKMIAHDFPGIGHKVDAVFMKDGFFYFFHGTRQYKFDPKTKRILTLQKANSWFNCRKN

SEQ ID NO: 1931 - protein, 450 aa, Artificial Sequence
  MMP-1 variant V145F
FPATLETQEQDVDLVQKYLEKYYNLKNDGRQVEKRRNSGPVVEKLKQMQEFFGLKVTGKPDAETLKVMKQPRCGVPDVAQFVLTEGNPRWEQTHLTYRIENYTPDLPRADVDHAIEKAFQLWSNVTPLTFTKVSEGQADIMISFFRGDHRDNSPFDGPGGNLAHAFQPGPGIGGDAHFDEDERWTNNFREYNLHRVAAHELGHSLGLSHSTDIGALMYPSYTFSGDVQLAQDDIDGIQAIYGRSQNPVQPIGPQTPKACDSKLTFDAITTIRGEVMFFKDRFYMRTNPFYPEVELNFISVFWPQLPNGLEAAYEFADRDEVRFFKGNKYWAVQGQNVLHGYPKDIYSSFGFPRTVKHIDAALSEENTGKTYFFVANKYWRYDEYKRSMDPGYPKMIAHDFPGIGHKVDAVFMKDGFFYFFHGTRQYKFDPKTKRILTLQKANSWFNCRKN

SEQ ID NO: 1932 - protein, 450 aa, Artificial Sequence
  MMP-1 variant V145M
FPATLETQEQDVDLVQKYLEKYYNLKNDGRQVEKRRNSGPVVEKLKQMQEFFGLKVTGKPDAETLKVMKQPRCGVPDVAQFVLTEGNPRWEQTHLTYRIENYTPDLPRADVDHAIEKAFQLWSNVTPLTFTKVSEGQADIMISFMRGDHRDNSPFDGPGGNLAHAFQPGPGIGGDAHFDEDERWTNNFREYNLHRVAAHELGHSLGLSHSTDIGALMYPSYTFSGDVQLAQDDIDGIQAIYGRSQNPVQPIGPQTPKACDSKLTFDAITTIRGEVMFFKDRFYMRTNPFYPEVELNFISVFWPQLPNGLEAAYEFADRDEVRFFKGNKYWAVQGQNVLHGYPKDIYSSFGFPRTVKHIDAALSEENTGKTYFFVANKYWRYDEYKRSMDPGYPKMIAHDFPGIGHKVDAVFMKDGFFYFFHGTRQYKFDPKTKRILTLQKANSWFNCRKN

SEQ ID NO: 1933 - protein, 450 aa, Artificial Sequence
  MMP-1 variant V145W
FPATLETQEQDVDLVQKYLEKYYNLKNDGRQVEKRRNSGPVVEKLKQMQEFFGLKVTGKPDAETLKVMKQPRCGVPDVAQFVLTEGNPRWEQTHLTYRIENYTPDLPRADVDHAIEKAFQLWSNVTPLTFTKVSEGQADIMISFWRGDHRDNSPFDGPGGNLAHAFQPGPGIGGDAHFDEDERWTNNFREYNLHRVAAHELGHSLGLSHSTDIGALMYPSYTFSGDVQLAQDDIDGIQAIYGRSQNPVQPIGPQTPKACDSKLTFDAITTIRGEVMFFKDRFYMRTNPFYPEVELNFISVFWPQLPNGLEAAYEFADRDEVRFFKGNKYWAVQGQNVLHGYPKDIYSSFGFPRTVKHIDAALSEENTGKTYFFVANKYWRYDEYKRSMDPGYPKMIAHDFPGIGHKVDAVFMKDGFFYFFHGTRQYKFDPKTKRILTLQKANSWFNCRKN

SEQ ID NO: 1934 - protein, 450 aa, Artificial Sequence
  MMP-1 variant V145I
FPATLETQEQDVDLVQKYLEKYYNLKNDGRQVEKRRNSGPVVEKLKQMQEFFGLKVTGKPDAETLKVMKQPRCGVPDVAQFVLTEGNPRWEQTHLTYRIENYTPDLPRADVDHAIEKAFQLWSNVTPLTFTKVSEGQADIMISFIRGDHRDNSPFDGPGGNLAHAFQPGPGIGGDAHFDEDERWTNNFREYNLHRVAAHELGHSLGLSHSTDIGALMYPSYTFSGDVQLAQDDIDGIQAIYGRSQNPVQPIGPQTPKACDSKLTFDAITTIRGEVMFFKDRFYMRTNPFYPEVELNFISVFWPQLPNGLEAAYEFADRDEVRFFKGNKYWAVQGQNVLHGYPKDIYSSFGFPRTVKHIDAALSEENTGKTYFFVANKYWRYDEYKRSMDPGYPKMIAHDFPGIGHKVDAVFMKDGFFYFFHGTRQYKFDPKTKRILTLQKANSWFNCRKN

SEQ ID NO: 1935 - protein, 450 aa, Artificial Sequence
  MMP-1 variant V145L
FPATLETQEQDVDLVQKYLEKYYNLKNDGRQVEKRRNSGPVVEKLKQMQEFFGLKVTGKPDAETLKVMKQPRCGVPDVAQFVLTEGNPRWEQTHLTYRIENYTPDLPRADVDHAIEKAFQLWSNVTPLTFTKVSEGQADIMISFLRGDHRDNSPFDGPGGNLAHAFQPGPGIGGDAHFDEDERWTNNFREYNLHRVAAHELGHSLGLSHSTDIGALMYPSYTFSGDVQLAQDDIDGIQAIYGRSQNPVQPIGPQTPKACDSKLTFDAITTIRGEVMFFKDRFYMRTNPFYPEVELNFISVFWPQLPNGLEAAYEFADRDEVRFFKGNKYWAVQGQNVLHGYPKDIYSSFGFPRTVKHIDAALSEENTGKTYFFVANKYWRYDEYKRSMDPGYPKMIAHDFPGIGHKVDAVFMKDGFFYFFHGTRQYKFDPKTKRILTLQKANSWFNCRKN

SEQ ID NO: 1936 - protein, 450 aa, Artificial Sequence
  MMP-1 variant V145A
FPATLETQEQDVDLVQKYLEKYYNLKNDGRQVEKRRNSGPVVEKLKQMQEFFGLKVTGKPDAETLKVMKQPRCGVPDVAQFVLTEGNPRWEQTHLTYRIENYTPDLPRADVDHAIEKAFQLWSNVTPLTFTKVSEGQADIMISFARGDHRDNSPFDGPGGNLAHAFQPGPGIGGDAHFDEDERWTNNFREYNLHRVAAHELGHSLGLSHSTDIGALMYPSYTFSGDVQLAQDDIDGIQAIYGRSQNPVQPIGPQTPKACDSKLTFDAITTIRGEVMFFKDRFYMRTNPFYPEVELNFISVFWPQLPNGLEAAYEFADRDEVRFFKGNKYWAVQGQNVLHGYPKDIYSSFGFPRTVKHIDAALSEENTGKTYFFVANKYWRYDEYKRSMDPGYPKMIAHDFPGIGHKVDAVFMKDGFFYFFHGTRQYKFDPKTKRILTLQKANSWFNCRKN

SEQ ID NO: 1937 - protein, 450 aa, Artificial Sequence
  MMP-1 variant V145P
FPATLETQEQDVDLVQKYLEKYYNLKNDGRQVEKRRNSGPVVEKLKQMQEFFGLKVTGKPDAETLKVMKQPRCGVPDVAQFVLTEGNPRWEQTHLTYRIENYTPDLPRADVDHAIEKAFQLWSNVTPLTFTKVSEGQADIMISFPRGDHRDNSPFDGPGGNLAHAFQPGPGIGGDAHFDEDERWTNNFREYNLHRVAAHELGHSLGLSHSTDIGALMYPSYTFSGDVQLAQDDIDGIQAIYGRSQNPVQPIGPQTPKACDSKLTFDAITTIRGEVMFFKDRFYMRTNPFYPEVELNFISVFWPQLPNGLEAAYEFADRDEVRFFKGNKYWAVQGQNVLHGYPKDIYSSFGFPRTVKHIDAALSEENTGKTYFFVANKYWRYDEYKRSMDPGYPKMIAHDFPGIGHKVDAVFMKDGFFYFFHGTRQYKFDPKTKRILTLQKANSWFNCRKN

SEQ ID NO: 1938 - protein, 450 aa, Artificial Sequence
  MMP-1 variant R146D
FPATLETQEQDVDLVQKYLEKYYNLKNDGRQVEKRRNSGPVVEKLKQMQEFFGLKVTGKPDAETLKVMKQPRCGVPDVAQFVLTEGNPRWEQTHLTYRIENYTPDLPRADVDHAIEKAFQLWSNVTPLTFTKVSEGQADIMISFVDGDHRDNSPFDGPGGNLAHAFQPGPGIGGDAHFDEDERWTNNFREYNLHRVAAHELGHSLGLSHSTDIGALMYPSYTFSGDVQLAQDDIDGIQAIYGRSQNPVQPIGPQTPKACDSKLTFDAITTIRGEVMFFKDRFYMRTNPFYPEVELNFISVFWPQLPNGLEAAYEFADRDEVRFFKGNKYWAVQGQNVLHGYPKDIYSSFGFPRTVKHIDAALSEENTGKTYFFVANKYWRYDEYKRSMDPGYPKMIAHDFPGIGHKVDAVFMKDGFFYFFHGTRQYKFDPKTKRILTLQKANSWFNCRKN

SEQ ID NO: 1939 - protein, 450 aa, Artificial Sequence
  MMP-1 variant R146E
FPATLETQEQDVDLVQKYLEKYYNLKNDGRQVEKRRNSGPVVEKLKQMQEFFGLKVTGKPDAETLKVMKQPRCGVPDVAQFVLTEGNPRWEQTHLTYRIENYTPDLPRADVDHAIEKAFQLWSNVTPLTFTKVSEGQADIMISFVEGDHRDNSPFDGPGGNLAHAFQPGPGIGGDAHFDEDERWTNNFREYNLHRVAAHELGHSLGLSHSTDIGALMYPSYTFSGDVQLAQDDIDGIQAIYGRSQNPVQPIGPQTPKACDSKLTFDAITTIRGEVMFFKDRFYMRTNPFYPEVELNFISVFWPQLPNGLEAAYEFADRDEVRFFKGNKYWAVQGQNVLHGYPKDIYSSFGFPRTVKHIDAALSEENTGKTYFFVANKYWRYDEYKRSMDPGYPKMIAHDFPGIGHKVDAVFMKDGFFYFFHGTRQYKFDPKTKRILTLQKANSWFNCRKN

SEQ ID NO: 1940 - protein, 450 aa, Artificial Sequence
  MMP-1 variant R146H
FPATLETQEQDVDLVQKYLEKYYNLKNDGRQVEKRRNSGPVVEKLKQMQEFFGLKVTGKPDAETLKVMKQPRCGVPDVAQFVLTEGNPRWEQTHLTYRIENYTPDLPRADVDHAIEKAFQLWSNVTPLTFTKVSEGQADIMISFVHGDHRDNSPFDGPGGNLAHAFQPGPGIGGDAHFDEDERWTNNFREYNLHRVAAHELGHSLGLSHSTDIGALMYPSYTFSGDVQLAQDDIDGIQAIYGRSQNPVQPIGPQTPKACDSKLTFDAITTIRGEVMFFKDRFYMRTNPFYPEVELNFISVFWPQLPNGLEAAYEFADRDEVRFFKGNKYWAVQGQNVLHGYPKDIYSSFGFPRTVKHIDAALSEENTGKTYFFVANKYWRYDEYKRSMDPGYPKMIAHDFPGIGHKVDAVFMKDGFFYFFHGTRQYKFDPKTKRILTLQKANSWFNCRKN

SEQ ID NO: 1941 - protein, 450 aa, Artificial Sequence
  MMP-1 variant R146K
FPATLETQEQDVDLVQKYLEKYYNLKNDGRQVEKRRNSGPVVEKLKQMQEFFGLKVTGKPDAETLKVMKQPRCGVPDVAQFVLTEGNPRWEQTHLTYRIENYTPDLPRADVDHAIEKAFQLWSNVTPLTFTKVSEGQADIMISFVKGDHRDNSPFDGPGGNLAHAFQPGPGIGGDAHFDEDERWTNNFREYNLHRVAAHELGHSLGLSHSTDIGALMYPSYTFSGDVQLAQDDIDGIQAIYGRSQNPVQPIGPQTPKACDSKLTFDAITTIRGEVMFFKDRFYMRTNPFYPEVELNFISVFWPQLPNGLEAAYEFADRDEVRFFKGNKYWAVQGQNVLHGYPKDIYSSFGFPRTVKHIDAALSEENTGKTYFFVANKYWRYDEYKRSMDPGYPKMIAHDFPGIGHKVDAVFMKDGFFYFFHGTRQYKFDPKTKRILTLQKANSWFNCRKN

SEQ ID NO: 1942 - protein, 450 aa, Artificial Sequence
  MMP-1 variant R146C
FPATLETQEQDVDLVQKYLEKYYNLKNDGRQVEKRRNSGPVVEKLKQMQEFFGLKVTGKPDAETLKVMKQPRCGVPDVAQFVLTEGNPRWEQTHLTYRIENYTPDLPRADVDHAIEKAFQLWSNVTPLTFTKVSEGQADIMISFVCGDHRDNSPFDGPGGNLAHAFQPGPGIGGDAHFDEDERWTNNFREYNLHRVAAHELGHSLGLSHSTDIGALMYPSYTFSGDVQLAQDDIDGIQAIYGRSQNPVQPIGPQTPKACDSKLTFDAITTIRGEVMFFKDRFYMRTNPFYPEVELNFISVFWPQLPNGLEAAYEFADRDEVRFFKGNKYWAVQGQNVLHGYPKDIYSSFGFPRTVKHIDAALSEENTGKTYFFVANKYWRYDEYKRSMDPGYPKMIAHDFPGIGHKVDAVFMKDGFFYFFHGTRQYKFDPKTKRILTLQKANSWFNCRKN

SEQ ID NO: 1943 - protein, 450 aa, Artificial Sequence
  MMP-1 variant R146N
FPATLETQEQDVDLVQKYLEKYYNLKNDGRQVEKRRNSGPVVEKLKQMQEFFGLKVTGKPDAETLKVMKQPRCGVPDVAQFVLTEGNPRWEQTHLTYRIENYTPDLPRADVDHAIEKAFQLWSNVTPLTFTKVSEGQADIMISFVNGDHRDNSPFDGPGGNLAHAFQPGPGIGGDAHFDEDERWTNNFREYNLHRVAAHELGHSLGLSHSTDIGALMYPSYTFSGDVQLAQDDIDGIQAIYGRSQNPVQPIGPQTPKACDSKLTFDAITTIRGEVMFFKDRFYMRTNPFYPEVELNFISVFWPQLPNGLEAAYEFADRDEVRFFKGNKYWAVQGQNVLHGYPKDIYSSFGFPRTVKHIDAALSEENTGKTYFFVANKYWRYDEYKRSMDPGYPKMIAHDFPGIGHKVDAVFMKDGFFYFFHGTRQYKFDPKTKRILTLQKANSWFNCRKN

SEQ ID NO: 1944 - protein, 450 aa, Artificial Sequence
  MMP-1 variant R146Q
FPATLETQEQDVDLVQKYLEKYYNLKNDGRQVEKRRNSGPVVEKLKQMQEFFGLKVTGKPDAETLKVMKQPRCGVPDVAQFVLTEGNPRWEQTHLTYRIENYTPDLPRADVDHAIEKAFQLWSNVTPLTFTKVSEGQADIMISFVQGDHRDNSPFDGPGGNLAHAFQPGPGIGGDAHFDEDERWTNNFREYNLHRVAAHELGHSLGLSHSTDIGALMYPSYTFSGDVQLAQDDIDGIQAIYGRSQNPVQPIGPQTPKACDSKLTFDAITTIRGEVMFFKDRFYMRTNPFYPEVELNFISVFWPQLPNGLEAAYEFADRDEVRFFKGNKYWAVQGQNVLHGYPKDIYSSFGFPRTVKHIDAALSEENTGKTYFFVANKYWRYDEYKRSMDPGYPKMIAHDFPGIGHKVDAVFMKDGFFYFFHGTRQYKFDPKTKRILTLQKANSWFNCRKN

SEQ ID NO: 1945 - protein, 450 aa, Artificial Sequence
  MMP-1 variant R146T
FPATLETQEQDVDLVQKYLEKYYNLKNDGRQVEKRRNSGPVVEKLKQMQEFFGLKVTGKPDAETLKVMKQPRCGVPDVAQFVLTEGNPRWEQTHLTYRIENYTPDLPRADVDHAIEKAFQLWSNVTPLTFTKVSEGQADIMISFVTGDHRDNSPFDGPGGNLAHAFQPGPGIGGDAHFDEDERWTNNFREYNLHRVAAHELGHSLGLSHSTDIGALMYPSYTFSGDVQLAQDDIDGIQAIYGRSQNPVQPIGPQTPKACDSKLTFDAITTIRGEVMFFKDRFYMRTNPFYPEVELNFISVFWPQLPNGLEAAYEFADRDEVRFFKGNKYWAVQGQNVLHGYPKDIYSSFGFPRTVKHIDAALSEENTGKTYFFVANKYWRYDEYKRSMDPGYPKMIAHDFPGIGHKVDAVFMKDGFFYFFHGTRQYKFDPKTKRILTLQKANSWFNCRKN

SEQ ID NO: 1946 - protein, 450 aa, Artificial Sequence
  MMP-1 variant R146Y
FPATLETQEQDVDLVQKYLEKYYNLKNDGRQVEKRRNSGPVVEKLKQMQEFFGLKVTGKPDAETLKVMKQPRCGVPDVAQFVLTEGNPRWEQTHLTYRIENYTPDLPRADVDHAIEKAFQLWSNVTPLTFTKVSEGQADIMISFVYGDHRDNSPFDGPGGNLAHAFQPGPGIGGDAHFDEDERWTNNFREYNLHRVAAHELGHSLGLSHSTDIGALMYPSYTFSGDVQLAQDDIDGIQAIYGRSQNPVQPIGPQTPKACDSKLTFDAITTIRGEVMFFKDRFYMRTNPFYPEVELNFISVFWPQLPNGLEAAYEFADRDEVRFFKGNKYWAVQGQNVLHGYPKDIYSSFGFPRTVKHIDAALSEENTGKTYFFVANKYWRYDEYKRSMDPGYPKMIAHDFPGIGHKVDAVFMKDGFFYFFHGTRQYKFDPKTKRILTLQKANSWFNCRKN

SEQ ID NO: 1947 - protein, 450 aa, Artificial Sequence
  MMP-1 variant R146S
FPATLETQEQDVDLVQKYLEKYYNLKNDGRQVEKRRNSGPVVEKLKQMQEFFGLKVTGKPDAETLKVMKQPRCGVPDVAQFVLTEGNPRWEQTHLTYRIENYTPDLPRADVDHAIEKAFQLWSNVTPLTFTKVSEGQADIMISFVSGDHRDNSPFDGPGGNLAHAFQPGPGIGGDAHFDEDERWTNNFREYNLHRVAAHELGHSLGLSHSTDIGALMYPSYTFSGDVQLAQDDIDGIQAIYGRSQNPVQPIGPQTPKACDSKLTFDAITTIRGEVMFFKDRFYMRTNPFYPEVELNFISVFWPQLPNGLEAAYEFADRDEVRFFKGNKYWAVQGQNVLHGYPKDIYSSFGFPRTVKHIDAALSEENTGKTYFFVANKYWRYDEYKRSMDPGYPKMIAHDFPGIGHKVDAVFMKDGFFYFFHGTRQYKFDPKTKRILTLQKANSWFNCRKN

SEQ ID NO: 1948 - protein, 450 aa, Artificial Sequence
  MMP-1 variant R146G
FPATLETQEQDVDLVQKYLEKYYNLKNDGRQVEKRRNSGPVVEKLKQMQEFFGLKVTGKPDAETLKVMKQPRCGVPDVAQFVLTEGNPRWEQTHLTYRIENYTPDLPRADVDHAIEKAFQLWSNVTPLTFTKVSEGQADIMISFVGGDHRDNSPFDGPGGNLAHAFQPGPGIGGDAHFDEDERWTNNFREYNLHRVAAHELGHSLGLSHSTDIGALMYPSYTFSGDVQLAQDDIDGIQAIYGRSQNPVQPIGPQTPKACDSKLTFDAITTIRGEVMFFKDRFYMRTNPFYPEVELNFISVFWPQLPNGLEAAYEFADRDEVRFFKGNKYWAVQGQNVLHGYPKDIYSSFGFPRTVKHIDAALSEENTGKTYFFVANKYWRYDEYKRSMDPGYPKMIAHDFPGIGHKVDAVFMKDGFFYFFHGTRQYKFDPKTKRILTLQKANSWFNCRKN

SEQ ID NO: 1949 - protein, 450 aa, Artificial Sequence
  MMP-1 variant R146F
FPATLETQEQDVDLVQKYLEKYYNLKNDGRQVEKRRNSGPVVEKLKQMQEFFGLKVTGKPDAETLKVMKQPRCGVPDVAQFVLTEGNPRWEQTHLTYRIENYTPDLPRADVDHAIEKAFQLWSNVTPLTFTKVSEGQADIMISFVFGDHRDNSPFDGPGGNLAHAFQPGPGIGGDAHFDEDERWTNNFREYNLHRVAAHELGHSLGLSHSTDIGALMYPSYTFSGDVQLAQDDIDGIQAIYGRSQNPVQPIGPQTPKACDSKLTFDAITTIRGEVMFFKDRFYMRTNPFYPEVELNFISVFWPQLPNGLEAAYEFADRDEVRFFKGNKYWAVQGQNVLHGYPKDIYSSFGFPRTVKHIDAALSEENTGKTYFFVANKYWRYDEYKRSMDPGYPKMIAHDFPGIGHKVDAVFMKDGFFYFFHGTRQYKFDPKTKRILTLQKANSWFNCRKN

SEQ ID NO: 1950 - protein, 450 aa, Artificial Sequence
  MMP-1 variant R146M
FPATLETQEQDVDLVQKYLEKYYNLKNDGRQVEKRRNSGPVVEKLKQMQEFFGLKVTGKPDAETLKVMKQPRCGVPDVAQFVLTEGNPRWEQTHLTYRIENYTPDLPRADVDHAIEKAFQLWSNVTPLTFTKVSEGQADIMISFVMGDHRDNSPFDGPGGNLAHAFQPGPGIGGDAHFDEDERWTNNFREYNLHRVAAHELGHSLGLSHSTDIGALMYPSYTFSGDVQLAQDDIDGIQAIYGRSQNPVQPIGPQTPKACDSKLTFDAITTIRGEVMFFKDRFYMRTNPFYPEVELNFISVFWPQLPNGLEAAYEFADRDEVRFFKGNKYWAVQGQNVLHGYPKDIYSSFGFPRTVKHIDAALSEENTGKTYFFVANKYWRYDEYKRSMDPGYPKMIAHDFPGIGHKVDAVFMKDGFFYFFHGTRQYKFDPKTKRILTLQKANSWFNCRKN

SEQ ID NO: 1951 - protein, 450 aa, Artificial Sequence
  MMP-1 variant R146W
FPATLETQEQDVDLVQKYLEKYYNLKNDGRQVEKRRNSGPVVEKLKQMQEFFGLKVTGKPDAETLKVMKQPRCGVPDVAQFVLTEGNPRWEQTHLTYRIENYTPDLPRADVDHAIEKAFQLWSNVTPLTFTKVSEGQADIMISFVWGDHRDNSPFDGPGGNLAHAFQPGPGIGGDAHFDEDERWTNNFREYNLHRVAAHELGHSLGLSHSTDIGALMYPSYTFSGDVQLAQDDIDGIQAIYGRSQNPVQPIGPQTPKACDSKLTFDAITTIRGEVMFFKDRFYMRTNPFYPEVELNFISVFWPQLPNGLEAAYEFADRDEVRFFKGNKYWAVQGQNVLHGYPKDIYSSFGFPRTVKHIDAALSEENTGKTYFFVANKYWRYDEYKRSMDPGYPKMIAHDFPGIGHKVDAVFMKDGFFYFFHGTRQYKFDPKTKRILTLQKANSWFNCRKN

SEQ ID NO: 1952 - protein, 450 aa, Artificial Sequence
  MMP-1 variant R146I
FPATLETQEQDVDLVQKYLEKYYNLKNDGRQVEKRRNSGPVVEKLKQMQEFFGLKVTGKPDAETLKVMKQPRCGVPDVAQFVLTEGNPRWEQTHLTYRIENYTPDLPRADVDHAIEKAFQLWSNVTPLTFTKVSEGQADIMISFVIGDHRDNSPFDGPGGNLAHAFQPGPGIGGDAHFDEDERWTNNFREYNLHRVAAHELGHSLGLSHSTDIGALMYPSYTFSGDVQLAQDDIDGIQAIYGRSQNPVQPIGPQTPKACDSKLTFDAITTIRGEVMFFKDRFYMRTNPFYPEVELNFISVFWPQLPNGLEAAYEFADRDEVRFFKGNKYWAVQGQNVLHGYPKDIYSSFGFPRTVKHIDAALSEENTGKTYFFVANKYWRYDEYKRSMDPGYPKMIAHDFPGIGHKVDAVFMKDGFFYFFHGTRQYKFDPKTKRILTLQKANSWFNCRKN

SEQ ID NO: 1953 - protein, 450 aa, Artificial Sequence
  MMP-1 variant R146V
FPATLETQEQDVDLVQKYLEKYYNLKNDGRQVEKRRNSGPVVEKLKQMQEFFGLKVTGKPDAETLKVMKQPRCGVPDVAQFVLTEGNPRWEQTHLTYRIENYTPDLPRADVDHAIEKAFQLWSNVTPLTFTKVSEGQADIMISFVVGDHRDNSPFDGPGGNLAHAFQPGPGIGGDAHFDEDERWTNNFREYNLHRVAAHELGHSLGLSHSTDIGALMYPSYTFSGDVQLAQDDIDGIQAIYGRSQNPVQPIGPQTPKACDSKLTFDAITTIRGEVMFFKDRFYMRTNPFYPEVELNFISVFWPQLPNGLEAAYEFADRDEVRFFKGNKYWAVQGQNVLHGYPKDIYSSFGFPRTVKHIDAALSEENTGKTYFFVANKYWRYDEYKRSMDPGYPKMIAHDFPGIGHKVDAVFMKDGFFYFFHGTRQYKFDPKTKRILTLQKANSWFNCRKN

SEQ ID NO: 1954 - protein, 450 aa, Artificial Sequence
  MMP-1 variant R146L
FPATLETQEQDVDLVQKYLEKYYNLKNDGRQVEKRRNSGPVVEKLKQMQEFFGLKVTGKPDAETLKVMKQPRCGVPDVAQFVLTEGNPRWEQTHLTYRIENYTPDLPRADVDHAIEKAFQLWSNVTPLTFTKVSEGQADIMISFVLGDHRDNSPFDGPGGNLAHAFQPGPGIGGDAHFDEDERWTNNFREYNLHRVAAHELGHSLGLSHSTDIGALMYPSYTFSGDVQLAQDDIDGIQAIYGRSQNPVQPIGPQTPKACDSKLTFDAITTIRGEVMFFKDRFYMRTNPFYPEVELNFISVFWPQLPNGLEAAYEFADRDEVRFFKGNKYWAVQGQNVLHGYPKDIYSSFGFPRTVKHIDAALSEENTGKTYFFVANKYWRYDEYKRSMDPGYPKMIAHDFPGIGHKVDAVFMKDGFFYFFHGTRQYKFDPKTKRILTLQKANSWFNCRKN

SEQ ID NO: 1955 - protein, 450 aa, Artificial Sequence
  MMP-1 variant R146A
FPATLETQEQDVDLVQKYLEKYYNLKNDGRQVEKRRNSGPVVEKLKQMQEFFGLKVTGKPDAETLKVMKQPRCGVPDVAQFVLTEGNPRWEQTHLTYRIENYTPDLPRADVDHAIEKAFQLWSNVTPLTFTKVSEGQADIMISFVAGDHRDNSPFDGPGGNLAHAFQPGPGIGGDAHFDEDERWTNNFREYNLHRVAAHELGHSLGLSHSTDIGALMYPSYTFSGDVQLAQDDIDGIQAIYGRSQNPVQPIGPQTPKACDSKLTFDAITTIRGEVMFFKDRFYMRTNPFYPEVELNFISVFWPQLPNGLEAAYEFADRDEVRFFKGNKYWAVQGQNVLHGYPKDIYSSFGFPRTVKHIDAALSEENTGKTYFFVANKYWRYDEYKRSMDPGYPKMIAHDFPGIGHKVDAVFMKDGFFYFFHGTRQYKFDPKTKRILTLQKANSWFNCRKN

SEQ ID NO: 1956 - protein, 450 aa, Artificial Sequence
  MMP-1 variant R146P
FPATLETQEQDVDLVQKYLEKYYNLKNDGRQVEKRRNSGPVVEKLKQMQEFFGLKVTGKPDAETLKVMKQPRCGVPDVAQFVLTEGNPRWEQTHLTYRIENYTPDLPRADVDHAIEKAFQLWSNVTPLTFTKVSEGQADIMISFVPGDHRDNSPFDGPGGNLAHAFQPGPGIGGDAHFDEDERWTNNFREYNLHRVAAHELGHSLGLSHSTDIGALMYPSYTFSGDVQLAQDDIDGIQAIYGRSQNPVQPIGPQTPKACDSKLTFDAITTIRGEVMFFKDRFYMRTNPFYPEVELNFISVFWPQLPNGLEAAYEFADRDEVRFFKGNKYWAVQGQNVLHGYPKDIYSSFGFPRTVKHIDAALSEENTGKTYFFVANKYWRYDEYKRSMDPGYPKMIAHDFPGIGHKVDAVFMKDGFFYFFHGTRQYKFDPKTKRILTLQKANSWFNCRKN

SEQ ID NO: 1957 - protein, 450 aa, Artificial Sequence
  MMP-1 variant G147D
FPATLETQEQDVDLVQKYLEKYYNLKNDGRQVEKRRNSGPVVEKLKQMQEFFGLKVTGKPDAETLKVMKQPRCGVPDVAQFVLTEGNPRWEQTHLTYRIENYTPDLPRADVDHAIEKAFQLWSNVTPLTFTKVSEGQADIMISFVRDDHRDNSPFDGPGGNLAHAFQPGPGIGGDAHFDEDERWTNNFREYNLHRVAAHELGHSLGLSHSTDIGALMYPSYTFSGDVQLAQDDIDGIQAIYGRSQNPVQPIGPQTPKACDSKLTFDAITTIRGEVMFFKDRFYMRTNPFYPEVELNFISVFWPQLPNGLEAAYEFADRDEVRFFKGNKYWAVQGQNVLHGYPKDIYSSFGFPRTVKHIDAALSEENTGKTYFFVANKYWRYDEYKRSMDPGYPKMIAHDFPGIGHKVDAVFMKDGFFYFFHGTRQYKFDPKTKRILTLQKANSWFNCRKN

SEQ ID NO: 1958 - protein, 450 aa, Artificial Sequence
  MMP-1 variant G147E
FPATLETQEQDVDLVQKYLEKYYNLKNDGRQVEKRRNSGPVVEKLKQMQEFFGLKVTGKPDAETLKVMKQPRCGVPDVAQFVLTEGNPRWEQTHLTYRIENYTPDLPRADVDHAIEKAFQLWSNVTPLTFTKVSEGQADIMISFVREDHRDNSPFDGPGGNLAHAFQPGPGIGGDAHFDEDERWTNNFREYNLHRVAAHELGHSLGLSHSTDIGALMYPSYTFSGDVQLAQDDIDGIQAIYGRSQNPVQPIGPQTPKACDSKLTFDAITTIRGEVMFFKDRFYMRTNPFYPEVELNFISVFWPQLPNGLEAAYEFADRDEVRFFKGNKYWAVQGQNVLHGYPKDIYSSFGFPRTVKHIDAALSEENTGKTYFFVANKYWRYDEYKRSMDPGYPKMIAHDFPGIGHKVDAVFMKDGFFYFFHGTRQYKFDPKTKRILTLQKANSWFNCRKN

SEQ ID NO: 1959 - protein, 450 aa, Artificial Sequence
  MMP-1 variant G147H
FPATLETQEQDVDLVQKYLEKYYNLKNDGRQVEKRRNSGPVVEKLKQMQEFFGLKVTGKPDAETLKVMKQPRCGVPDVAQFVLTEGNPRWEQTHLTYRIENYTPDLPRADVDHAIEKAFQLWSNVTPLTFTKVSEGQADIMISFVRHDHRDNSPFDGPGGNLAHAFQPGPGIGGDAHFDEDERWTNNFREYNLHRVAAHELGHSLGLSHSTDIGALMYPSYTFSGDVQLAQDDIDGIQAIYGRSQNPVQPIGPQTPKACDSKLTFDAITTIRGEVMFFKDRFYMRTNPFYPEVELNFISVFWPQLPNGLEAAYEFADRDEVRFFKGNKYWAVQGQNVLHGYPKDIYSSFGFPRTVKHIDAALSEENTGKTYFFVANKYWRYDEYKRSMDPGYPKMIAHDFPGIGHKVDAVFMKDGFFYFFHGTRQYKFDPKTKRILTLQKANSWFNCRKN

SEQ ID NO: 1960 - protein, 450 aa, Artificial Sequence
  MMP-1 variant G147K
FPATLETQEQDVDLVQKYLEKYYNLKNDGRQVEKRRNSGPVVEKLKQMQEFFGLKVTGKPDAETLKVMKQPRCGVPDVAQFVLTEGNPRWEQTHLTYRIENYTPDLPRADVDHAIEKAFQLWSNVTPLTFTKVSEGQADIMISFVRKDHRDNSPFDGPGGNLAHAFQPGPGIGGDAHFDEDERWTNNFREYNLHRVAAHELGHSLGLSHSTDIGALMYPSYTFSGDVQLAQDDIDGIQAIYGRSQNPVQPIGPQTPKACDSKLTFDAITTIRGEVMFFKDRFYMRTNPFYPEVELNFISVFWPQLPNGLEAAYEFADRDEVRFFKGNKYWAVQGQNVLHGYPKDIYSSFGFPRTVKHIDAALSEENTGKTYFFVANKYWRYDEYKRSMDPGYPKMIAHDFPGIGHKVDAVFMKDGFFYFFHGTRQYKFDPKTKRILTLQKANSWFNCRKN

SEQ ID NO: 1961 - protein, 450 aa, Artificial Sequence
  MMP-1 variant G147R
FPATLETQEQDVDLVQKYLEKYYNLKNDGRQVEKRRNSGPVVEKLKQMQEFFGLKVTGKPDAETLKVMKQPRCGVPDVAQFVLTEGNPRWEQTHLTYRIENYTPDLPRADVDHAIEKAFQLWSNVTPLTFTKVSEGQADIMISFVRRDHRDNSPFDGPGGNLAHAFQPGPGIGGDAHFDEDERWTNNFREYNLHRVAAHELGHSLGLSHSTDIGALMYPSYTFSGDVQLAQDDIDGIQAIYGRSQNPVQPIGPQTPKACDSKLTFDAITTIRGEVMFFKDRFYMRTNPFYPEVELNFISVFWPQLPNGLEAAYEFADRDEVRFFKGNKYWAVQGQNVLHGYPKDIYSSFGFPRTVKHIDAALSEENTGKTYFFVANKYWRYDEYKRSMDPGYPKMIAHDFPGIGHKVDAVFMKDGFFYFFHGTRQYKFDPKTKRILTLQKANSWFNCRKN

SEQ ID NO: 1962 - protein, 450 aa, Artificial Sequence
  MMP-1 variant G147C
FPATLETQEQDVDLVQKYLEKYYNLKNDGRQVEKRRNSGPVVEKLKQMQEFFGLKVTGKPDAETLKVMKQPRCGVPDVAQFVLTEGNPRWEQTHLTYRIENYTPDLPRADVDHAIEKAFQLWSNVTPLTFTKVSEGQADIMISFVRCDHRDNSPFDGPGGNLAHAFQPGPGIGGDAHFDEDERWTNNFREYNLHRVAAHELGHSLGLSHSTDIGALMYPSYTFSGDVQLAQDDIDGIQAIYGRSQNPVQPIGPQTPKACDSKLTFDAITTIRGEVMFFKDRFYMRTNPFYPEVELNFISVFWPQLPNGLEAAYEFADRDEVRFFKGNKYWAVQGQNVLHGYPKDIYSSFGFPRTVKHIDAALSEENTGKTYFFVANKYWRYDEYKRSMDPGYPKMIAHDFPGIGHKVDAVFMKDGFFYFFHGTRQYKFDPKTKRILTLQKANSWFNCRKN

SEQ ID NO: 1963 - protein, 450 aa, Artificial Sequence
  MMP-1 variant G147N
FPATLETQEQDVDLVQKYLEKYYNLKNDGRQVEKRRNSGPVVEKLKQMQEFFGLKVTGKPDAETLKVMKQPRCGVPDVAQFVLTEGNPRWEQTHLTYRIENYTPDLPRADVDHAIEKAFQLWSNVTPLTFTKVSEGQADIMISFVRNDHRDNSPFDGPGGNLAHAFQPGPGIGGDAHFDEDERWTNNFREYNLHRVAAHELGHSLGLSHSTDIGALMYPSYTFSGDVQLAQDDIDGIQAIYGRSQNPVQPIGPQTPKACDSKLTFDAITTIRGEVMFFKDRFYMRTNPFYPEVELNFISVFWPQLPNGLEAAYEFADRDEVRFFKGNKYWAVQGQNVLHGYPKDIYSSFGFPRTVKHIDAALSEENTGKTYFFVANKYWRYDEYKRSMDPGYPKMIAHDFPGIGHKVDAVFMKDGFFYFFHGTRQYKFDPKTKRILTLQKANSWFNCRKN

SEQ ID NO: 1964 - protein, 450 aa, Artificial Sequence
  MMP-1 variant G147Q
FPATLETQEQDVDLVQKYLEKYYNLKNDGRQVEKRRNSGPVVEKLKQMQEFFGLKVTGKPDAETLKVMKQPRCGVPDVAQFVLTEGNPRWEQTHLTYRIENYTPDLPRADVDHAIEKAFQLWSNVTPLTFTKVSEGQADIMISFVRQDHRDNSPFDGPGGNLAHAFQPGPGIGGDAHFDEDERWTNNFREYNLHRVAAHELGHSLGLSHSTDIGALMYPSYTFSGDVQLAQDDIDGIQAIYGRSQNPVQPIGPQTPKACDSKLTFDAITTIRGEVMFFKDRFYMRTNPFYPEVELNFISVFWPQLPNGLEAAYEFADRDEVRFFKGNKYWAVQGQNVLHGYPKDIYSSFGFPRTVKHIDAALSEENTGKTYFFVANKYWRYDEYKRSMDPGYPKMIAHDFPGIGHKVDAVFMKDGFFYFFHGTRQYKFDPKTKRILTLQKANSWFNCRKN

SEQ ID NO: 1965 - protein, 450 aa, Artificial Sequence
  MMP-1 variant G147T
FPATLETQEQDVDLVQKYLEKYYNLKNDGRQVEKRRNSGPVVEKLKQMQEFFGLKVTGKPDAETLKVMKQPRCGVPDVAQFVLTEGNPRWEQTHLTYRIENYTPDLPRADVDHAIEKAFQLWSNVTPLTFTKVSEGQADIMISFVRTDHRDNSPFDGPGGNLAHAFQPGPGIGGDAHFDEDERWTNNFREYNLHRVAAHELGHSLGLSHSTDIGALMYPSYTFSGDVQLAQDDIDGIQAIYGRSQNPVQPIGPQTPKACDSKLTFDAITTIRGEVMFFKDRFYMRTNPFYPEVELNFISVFWPQLPNGLEAAYEFADRDEVRFFKGNKYWAVQGQNVLHGYPKDIYSSFGFPRTVKHIDAALSEENTGKTYFFVANKYWRYDEYKRSMDPGYPKMIAHDFPGIGHKVDAVFMKDGFFYFFHGTRQYKFDPKTKRILTLQKANSWFNCRKN

SEQ ID NO: 1966 - protein, 450 aa, Artificial Sequence
  MMP-1 variant G147Y
FPATLETQEQDVDLVQKYLEKYYNLKNDGRQVEKRRNSGPVVEKLKQMQEFFGLKVTGKPDAETLKVMKQPRCGVPDVAQFVLTEGNPRWEQTHLTYRIENYTPDLPRADVDHAIEKAFQLWSNVTPLTFTKVSEGQADIMISFVRYDHRDNSPFDGPGGNLAHAFQPGPGIGGDAHFDEDERWTNNFREYNLHRVAAHELGHSLGLSHSTDIGALMYPSYTFSGDVQLAQDDIDGIQAIYGRSQNPVQPIGPQTPKACDSKLTFDAITTIRGEVMFFKDRFYMRTNPFYPEVELNFISVFWPQLPNGLEAAYEFADRDEVRFFKGNKYWAVQGQNVLHGYPKDIYSSFGFPRTVKHIDAALSEENTGKTYFFVANKYWRYDEYKRSMDPGYPKMIAHDFPGIGHKVDAVFMKDGFFYFFHGTRQYKFDPKTKRILTLQKANSWFNCRKN

SEQ ID NO: 1967 - protein, 450 aa, Artificial Sequence
  MMP-1 variant G147S
FPATLETQEQDVDLVQKYLEKYYNLKNDGRQVEKRRNSGPVVEKLKQMQEFFGLKVTGKPDAETLKVMKQPRCGVPDVAQFVLTEGNPRWEQTHLTYRIENYTPDLPRADVDHAIEKAFQLWSNVTPLTFTKVSEGQADIMISFVRSDHRDNSPFDGPGGNLAHAFQPGPGIGGDAHFDEDERWTNNFREYNLHRVAAHELGHSLGLSHSTDIGALMYPSYTFSGDVQLAQDDIDGIQAIYGRSQNPVQPIGPQTPKACDSKLTFDAITTIRGEVMFFKDRFYMRTNPFYPEVELNFISVFWPQLPNGLEAAYEFADRDEVRFFKGNKYWAVQGQNVLHGYPKDIYSSFGFPRTVKHIDAALSEENTGKTYFFVANKYWRYDEYKRSMDPGYPKMIAHDFPGIGHKVDAVFMKDGFFYFFHGTRQYKFDPKTKRILTLQKANSWFNCRKN

SEQ ID NO: 1968 - protein, 450 aa, Artificial Sequence
  MMP-1 variant G147F
FPATLETQEQDVDLVQKYLEKYYNLKNDGRQVEKRRNSGPVVEKLKQMQEFFGLKVTGKPDAETLKVMKQPRCGVPDVAQFVLTEGNPRWEQTHLTYRIENYTPDLPRADVDHAIEKAFQLWSNVTPLTFTKVSEGQADIMISFVRFDHRDNSPFDGPGGNLAHAFQPGPGIGGDAHFDEDERWTNNFREYNLHRVAAHELGHSLGLSHSTDIGALMYPSYTFSGDVQLAQDDIDGIQAIYGRSQNPVQPIGPQTPKACDSKLTFDAITTIRGEVMFFKDRFYMRTNPFYPEVELNFISVFWPQLPNGLEAAYEFADRDEVRFFKGNKYWAVQGQNVLHGYPKDIYSSFGFPRTVKHIDAALSEENTGKTYFFVANKYWRYDEYKRSMDPGYPKMIAHDFPGIGHKVDAVFMKDGFFYFFHGTRQYKFDPKTKRILTLQKANSWFNCRKN

SEQ ID NO: 1969 - protein, 450 aa, Artificial Sequence
  MMP-1 variant G147M
FPATLETQEQDVDLVQKYLEKYYNLKNDGRQVEKRRNSGPVVEKLKQMQEFFGLKVTGKPDAETLKVMKQPRCGVPDVAQFVLTEGNPRWEQTHLTYRIENYTPDLPRADVDHAIEKAFQLWSNVTPLTFTKVSEGQADIMISFVRMDHRDNSPFDGPGGNLAHAFQPGPGIGGDAHFDEDERWTNNFREYNLHRVAAHELGHSLGLSHSTDIGALMYPSYTFSGDVQLAQDDIDGIQAIYGRSQNPVQPIGPQTPKACDSKLTFDAITTIRGEVMFFKDRFYMRTNPFYPEVELNFISVFWPQLPNGLEAAYEFADRDEVRFFKGNKYWAVQGQNVLHGYPKDIYSSFGFPRTVKHIDAALSEENTGKTYFFVANKYWRYDEYKRSMDPGYPKMIAHDFPGIGHKVDAVFMKDGFFYFFHGTRQYKFDPKTKRILTLQKANSWFNCRKN

SEQ ID NO: 1970 - protein, 450 aa, Artificial Sequence
  MMP-1 variant G147W
FPATLETQEQDVDLVQKYLEKYYNLKNDGRQVEKRRNSGPVVEKLKQMQEFFGLKVTGKPDAETLKVMKQPRCGVPDVAQFVLTEGNPRWEQTHLTYRIENYTPDLPRADVDHAIEKAFQLWSNVTPLTFTKVSEGQADIMISFVRWDHRDNSPFDGPGGNLAHAFQPGPGIGGDAHFDEDERWTNNFREYNLHRVAAHELGHSLGLSHSTDIGALMYPSYTFSGDVQLAQDDIDGIQAIYGRSQNPVQPIGPQTPKACDSKLTFDAITTIRGEVMFFKDRFYMRTNPFYPEVELNFISVFWPQLPNGLEAAYEFADRDEVRFFKGNKYWAVQGQNVLHGYPKDIYSSFGFPRTVKHIDAALSEENTGKTYFFVANKYWRYDEYKRSMDPGYPKMIAHDFPGIGHKVDAVFMKDGFFYFFHGTRQYKFDPKTKRILTLQKANSWFNCRKN

SEQ ID NO: 1971 - protein, 450 aa, Artificial Sequence
  MMP-1 variant G147I
FPATLETQEQDVDLVQKYLEKYYNLKNDGRQVEKRRNSGPVVEKLKQMQEFFGLKVTGKPDAETLKVMKQPRCGVPDVAQFVLTEGNPRWEQTHLTYRIENYTPDLPRADVDHAIEKAFQLWSNVTPLTFTKVSEGQADIMISFVRIDHRDNSPFDGPGGNLAHAFQPGPGIGGDAHFDEDERWTNNFREYNLHRVAAHELGHSLGLSHSTDIGALMYPSYTFSGDVQLAQDDIDGIQAIYGRSQNPVQPIGPQTPKACDSKLTFDAITTIRGEVMFFKDRFYMRTNPFYPEVELNFISVFWPQLPNGLEAAYEFADRDEVRFFKGNKYWAVQGQNVLHGYPKDIYSSFGFPRTVKHIDAALSEENTGKTYFFVANKYWRYDEYKRSMDPGYPKMIAHDFPGIGHKVDAVFMKDGFFYFFHGTRQYKFDPKTKRILTLQKANSWFNCRKN

SEQ ID NO: 1972 - protein, 450 aa, Artificial Sequence
  MMP-1 variant G147V
FPATLETQEQDVDLVQKYLEKYYNLKNDGRQVEKRRNSGPVVEKLKQMQEFFGLKVTGKPDAETLKVMKQPRCGVPDVAQFVLTEGNPRWEQTHLTYRIENYTPDLPRADVDHAIEKAFQLWSNVTPLTFTKVSEGQADIMISFVRVDHRDNSPFDGPGGNLAHAFQPGPGIGGDAHFDEDERWTNNFREYNLHRVAAHELGHSLGLSHSTDIGALMYPSYTFSGDVQLAQDDIDGIQAIYGRSQNPVQPIGPQTPKACDSKLTFDAITTIRGEVMFFKDRFYMRTNPFYPEVELNFISVFWPQLPNGLEAAYEFADRDEVRFFKGNKYWAVQGQNVLHGYPKDIYSSFGFPRTVKHIDAALSEENTGKTYFFVANKYWRYDEYKRSMDPGYPKMIAHDFPGIGHKVDAVFMKDGFFYFFHGTRQYKFDPKTKRILTLQKANSWFNCRKN

SEQ ID NO: 1973 - protein, 450 aa, Artificial Sequence
  MMP-1 variant G147L
FPATLETQEQDVDLVQKYLEKYYNLKNDGRQVEKRRNSGPVVEKLKQMQEFFGLKVTGKPDAETLKVMKQPRCGVPDVAQFVLTEGNPRWEQTHLTYRIENYTPDLPRADVDHAIEKAFQLWSNVTPLTFTKVSEGQADIMISFVRLDHRDNSPFDGPGGNLAHAFQPGPGIGGDAHFDEDERWTNNFREYNLHRVAAHELGHSLGLSHSTDIGALMYPSYTFSGDVQLAQDDIDGIQAIYGRSQNPVQPIGPQTPKACDSKLTFDAITTIRGEVMFFKDRFYMRTNPFYPEVELNFISVFWPQLPNGLEAAYEFADRDEVRFFKGNKYWAVQGQNVLHGYPKDIYSSFGFPRTVKHIDAALSEENTGKTYFFVANKYWRYDEYKRSMDPGYPKMIAHDFPGIGHKVDAVFMKDGFFYFFHGTRQYKFDPKTKRILTLQKANSWFNCRKN

SEQ ID NO: 1974 - protein, 450 aa, Artificial Sequence
  MMP-1 variant G147A
FPATLETQEQDVDLVQKYLEKYYNLKNDGRQVEKRRNSGPVVEKLKQMQEFFGLKVTGKPDAETLKVMKQPRCGVPDVAQFVLTEGNPRWEQTHLTYRIENYTPDLPRADVDHAIEKAFQLWSNVTPLTFTKVSEGQADIMISFVRADHRDNSPFDGPGGNLAHAFQPGPGIGGDAHFDEDERWTNNFREYNLHRVAAHELGHSLGLSHSTDIGALMYPSYTFSGDVQLAQDDIDGIQAIYGRSQNPVQPIGPQTPKACDSKLTFDAITTIRGEVMFFKDRFYMRTNPFYPEVELNFISVFWPQLPNGLEAAYEFADRDEVRFFKGNKYWAVQGQNVLHGYPKDIYSSFGFPRTVKHIDAALSEENTGKTYFFVANKYWRYDEYKRSMDPGYPKMIAHDFPGIGHKVDAVFMKDGFFYFFHGTRQYKFDPKTKRILTLQKANSWFNCRKN

SEQ ID NO: 1975 - protein, 450 aa, Artificial Sequence
  MMP-1 variant G147P
FPATLETQEQDVDLVQKYLEKYYNLKNDGRQVEKRRNSGPVVEKLKQMQEFFGLKVTGKPDAETLKVMKQPRCGVPDVAQFVLTEGNPRWEQTHLTYRIENYTPDLPRADVDHAIEKAFQLWSNVTPLTFTKVSEGQADIMISFVRPDHRDNSPFDGPGGNLAHAFQPGPGIGGDAHFDEDERWTNNFREYNLHRVAAHELGHSLGLSHSTDIGALMYPSYTFSGDVQLAQDDIDGIQAIYGRSQNPVQPIGPQTPKACDSKLTFDAITTIRGEVMFFKDRFYMRTNPFYPEVELNFISVFWPQLPNGLEAAYEFADRDEVRFFKGNKYWAVQGQNVLHGYPKDIYSSFGFPRTVKHIDAALSEENTGKTYFFVANKYWRYDEYKRSMDPGYPKMIAHDFPGIGHKVDAVFMKDGFFYFFHGTRQYKFDPKTKRILTLQKANSWFNCRKN

SEQ ID NO: 1976 - protein, 450 aa, Artificial Sequence
  MMP-1 variant D148E
FPATLETQEQDVDLVQKYLEKYYNLKNDGRQVEKRRNSGPVVEKLKQMQEFFGLKVTGKPDAETLKVMKQPRCGVPDVAQFVLTEGNPRWEQTHLTYRIENYTPDLPRADVDHAIEKAFQLWSNVTPLTFTKVSEGQADIMISFVRGEHRDNSPFDGPGGNLAHAFQPGPGIGGDAHFDEDERWTNNFREYNLHRVAAHELGHSLGLSHSTDIGALMYPSYTFSGDVQLAQDDIDGIQAIYGRSQNPVQPIGPQTPKACDSKLTFDAITTIRGEVMFFKDRFYMRTNPFYPEVELNFISVFWPQLPNGLEAAYEFADRDEVRFFKGNKYWAVQGQNVLHGYPKDIYSSFGFPRTVKHIDAALSEENTGKTYFFVANKYWRYDEYKRSMDPGYPKMIAHDFPGIGHKVDAVFMKDGFFYFFHGTRQYKFDPKTKRILTLQKANSWFNCRKN

SEQ ID NO: 1977 - protein, 450 aa, Artificial Sequence
  MMP-1 variant D148H
FPATLETQEQDVDLVQKYLEKYYNLKNDGRQVEKRRNSGPVVEKLKQMQEFFGLKVTGKPDAETLKVMKQPRCGVPDVAQFVLTEGNPRWEQTHLTYRIENYTPDLPRADVDHAIEKAFQLWSNVTPLTFTKVSEGQADIMISFVRGHHRDNSPFDGPGGNLAHAFQPGPGIGGDAHFDEDERWTNNFREYNLHRVAAHELGHSLGLSHSTDIGALMYPSYTFSGDVQLAQDDIDGIQAIYGRSQNPVQPIGPQTPKACDSKLTFDAITTIRGEVMFFKDRFYMRTNPFYPEVELNFISVFWPQLPNGLEAAYEFADRDEVRFFKGNKYWAVQGQNVLHGYPKDIYSSFGFPRTVKHIDAALSEENTGKTYFFVANKYWRYDEYKRSMDPGYPKMIAHDFPGIGHKVDAVFMKDGFFYFFHGTRQYKFDPKTKRILTLQKANSWFNCRKN

SEQ ID NO: 1978 - protein, 450 aa, Artificial Sequence
  MMP-1 variant D148K
FPATLETQEQDVDLVQKYLEKYYNLKNDGRQVEKRRNSGPVVEKLKQMQEFFGLKVTGKPDAETLKVMKQPRCGVPDVAQFVLTEGNPRWEQTHLTYRIENYTPDLPRADVDHAIEKAFQLWSNVTPLTFTKVSEGQADIMISFVRGKHRDNSPFDGPGGNLAHAFQPGPGIGGDAHFDEDERWTNNFREYNLHRVAAHELGHSLGLSHSTDIGALMYPSYTFSGDVQLAQDDIDGIQAIYGRSQNPVQPIGPQTPKACDSKLTFDAITTIRGEVMFFKDRFYMRTNPFYPEVELNFISVFWPQLPNGLEAAYEFADRDEVRFFKGNKYWAVQGQNVLHGYPKDIYSSFGFPRTVKHIDAALSEENTGKTYFFVANKYWRYDEYKRSMDPGYPKMIAHDFPGIGHKVDAVFMKDGFFYFFHGTRQYKFDPKTKRILTLQKANSWFNCRKN

SEQ ID NO: 1979 - protein, 450 aa, Artificial Sequence
  MMP-1 variant D148R
FPATLETQEQDVDLVQKYLEKYYNLKNDGRQVEKRRNSGPVVEKLKQMQEFFGLKVTGKPDAETLKVMKQPRCGVPDVAQFVLTEGNPRWEQTHLTYRIENYTPDLPRADVDHAIEKAFQLWSNVTPLTFTKVSEGQADIMISFVRGRHRDNSPFDGPGGNLAHAFQPGPGIGGDAHFDEDERWTNNFREYNLHRVAAHELGHSLGLSHSTDIGALMYPSYTFSGDVQLAQDDIDGIQAIYGRSQNPVQPIGPQTPKACDSKLTFDAITTIRGEVMFFKDRFYMRTNPFYPEVELNFISVFWPQLPNGLEAAYEFADRDEVRFFKGNKYWAVQGQNVLHGYPKDIYSSFGFPRTVKHIDAALSEENTGKTYFFVANKYWRYDEYKRSMDPGYPKMIAHDFPGIGHKVDAVFMKDGFFYFFHGTRQYKFDPKTKRILTLQKANSWFNCRKN

SEQ ID NO: 1980 - protein, 450 aa, Artificial Sequence
  MMP-1 variant D148C
FPATLETQEQDVDLVQKYLEKYYNLKNDGRQVEKRRNSGPVVEKLKQMQEFFGLKVTGKPDAETLKVMKQPRCGVPDVAQFVLTEGNPRWEQTHLTYRIENYTPDLPRADVDHAIEKAFQLWSNVTPLTFTKVSEGQADIMISFVRGCHRDNSPFDGPGGNLAHAFQPGPGIGGDAHFDEDERWTNNFREYNLHRVAAHELGHSLGLSHSTDIGALMYPSYTFSGDVQLAQDDIDGIQAIYGRSQNPVQPIGPQTPKACDSKLTFDAITTIRGEVMFFKDRFYMRTNPFYPEVELNFISVFWPQLPNGLEAAYEFADRDEVRFFKGNKYWAVQGQNVLHGYPKDIYSSFGFPRTVKHIDAALSEENTGKTYFFVANKYWRYDEYKRSMDPGYPKMIAHDFPGIGHKVDAVFMKDGFFYFFHGTRQYKFDPKTKRILTLQKANSWFNCRKN

SEQ ID NO: 1981 - protein, 450 aa, Artificial Sequence
  MMP-1 variant D148N
FPATLETQEQDVDLVQKYLEKYYNLKNDGRQVEKRRNSGPVVEKLKQMQEFFGLKVTGKPDAETLKVMKQPRCGVPDVAQFVLTEGNPRWEQTHLTYRIENYTPDLPRADVDHAIEKAFQLWSNVTPLTFTKVSEGQADIMISFVRGNHRDNSPFDGPGGNLAHAFQPGPGIGGDAHFDEDERWTNNFREYNLHRVAAHELGHSLGLSHSTDIGALMYPSYTFSGDVQLAQDDIDGIQAIYGRSQNPVQPIGPQTPKACDSKLTFDAITTIRGEVMFFKDRFYMRTNPFYPEVELNFISVFWPQLPNGLEAAYEFADRDEVRFFKGNKYWAVQGQNVLHGYPKDIYSSFGFPRTVKHIDAALSEENTGKTYFFVANKYWRYDEYKRSMDPGYPKMIAHDFPGIGHKVDAVFMKDGFFYFFHGTRQYKFDPKTKRILTLQKANSWFNCRKN

SEQ ID NO: 1982 - protein, 450 aa, Artificial Sequence
  MMP-1 variant D148Q
FPATLETQEQDVDLVQKYLEKYYNLKNDGRQVEKRRNSGPVVEKLKQMQEFFGLKVTGKPDAETLKVMKQPRCGVPDVAQFVLTEGNPRWEQTHLTYRIENYTPDLPRADVDHAIEKAFQLWSNVTPLTFTKVSEGQADIMISFVRGQHRDNSPFDGPGGNLAHAFQPGPGIGGDAHFDEDERWTNNFREYNLHRVAAHELGHSLGLSHSTDIGALMYPSYTFSGDVQLAQDDIDGIQAIYGRSQNPVQPIGPQTPKACDSKLTFDAITTIRGEVMFFKDRFYMRTNPFYPEVELNFISVFWPQLPNGLEAAYEFADRDEVRFFKGNKYWAVQGQNVLHGYPKDIYSSFGFPRTVKHIDAALSEENTGKTYFFVANKYWRYDEYKRSMDPGYPKMIAHDFPGIGHKVDAVFMKDGFFYFFHGTRQYKFDPKTKRILTLQKANSWFNCRKN

SEQ ID NO: 1983 - protein, 450 aa, Artificial Sequence
  MMP-1 variant D148T
FPATLETQEQDVDLVQKYLEKYYNLKNDGRQVEKRRNSGPVVEKLKQMQEFFGLKVTGKPDAETLKVMKQPRCGVPDVAQFVLTEGNPRWEQTHLTYRIENYTPDLPRADVDHAIEKAFQLWSNVTPLTFTKVSEGQADIMISFVRGTHRDNSPFDGPGGNLAHAFQPGPGIGGDAHFDEDERWTNNFREYNLHRVAAHELGHSLGLSHSTDIGALMYPSYTFSGDVQLAQDDIDGIQAIYGRSQNPVQPIGPQTPKACDSKLTFDAITTIRGEVMFFKDRFYMRTNPFYPEVELNFISVFWPQLPNGLEAAYEFADRDEVRFFKGNKYWAVQGQNVLHGYPKDIYSSFGFPRTVKHIDAALSEENTGKTYFFVANKYWRYDEYKRSMDPGYPKMIAHDFPGIGHKVDAVFMKDGFFYFFHGTRQYKFDPKTKRILTLQKANSWFNCRKN

SEQ ID NO: 1984 - protein, 450 aa, Artificial Sequence
  MMP-1 variant D148Y
FPATLETQEQDVDLVQKYLEKYYNLKNDGRQVEKRRNSGPVVEKLKQMQEFFGLKVTGKPDAETLKVMKQPRCGVPDVAQFVLTEGNPRWEQTHLTYRIENYTPDLPRADVDHAIEKAFQLWSNVTPLTFTKVSEGQADIMISFVRGYHRDNSPFDGPGGNLAHAFQPGPGIGGDAHFDEDERWTNNFREYNLHRVAAHELGHSLGLSHSTDIGALMYPSYTFSGDVQLAQDDIDGIQAIYGRSQNPVQPIGPQTPKACDSKLTFDAITTIRGEVMFFKDRFYMRTNPFYPEVELNFISVFWPQLPNGLEAAYEFADRDEVRFFKGNKYWAVQGQNVLHGYPKDIYSSFGFPRTVKHIDAALSEENTGKTYFFVANKYWRYDEYKRSMDPGYPKMIAHDFPGIGHKVDAVFMKDGFFYFFHGTRQYKFDPKTKRILTLQKANSWFNCRKN

SEQ ID NO: 1985 - protein, 450 aa, Artificial Sequence
  MMP-1 variant D148S
FPATLETQEQDVDLVQKYLEKYYNLKNDGRQVEKRRNSGPVVEKLKQMQEFFGLKVTGKPDAETLKVMKQPRCGVPDVAQFVLTEGNPRWEQTHLTYRIENYTPDLPRADVDHAIEKAFQLWSNVTPLTFTKVSEGQADIMISFVRGSHRDNSPFDGPGGNLAHAFQPGPGIGGDAHFDEDERWTNNFREYNLHRVAAHELGHSLGLSHSTDIGALMYPSYTFSGDVQLAQDDIDGIQAIYGRSQNPVQPIGPQTPKACDSKLTFDAITTIRGEVMFFKDRFYMRTNPFYPEVELNFISVFWPQLPNGLEAAYEFADRDEVRFFKGNKYWAVQGQNVLHGYPKDIYSSFGFPRTVKHIDAALSEENTGKTYFFVANKYWRYDEYKRSMDPGYPKMIAHDFPGIGHKVDAVFMKDGFFYFFHGTRQYKFDPKTKRILTLQKANSWFNCRKN

SEQ ID NO: 1986 - protein, 450 aa, Artificial Sequence
  MMP-1 variant D148G
FPATLETQEQDVDLVQKYLEKYYNLKNDGRQVEKRRNSGPVVEKLKQMQEFFGLKVTGKPDAETLKVMKQPRCGVPDVAQFVLTEGNPRWEQTHLTYRIENYTPDLPRADVDHAIEKAFQLWSNVTPLTFTKVSEGQADIMISFVRGGHRDNSPFDGPGGNLAHAFQPGPGIGGDAHFDEDERWTNNFREYNLHRVAAHELGHSLGLSHSTDIGALMYPSYTFSGDVQLAQDDIDGIQAIYGRSQNPVQPIGPQTPKACDSKLTFDAITTIRGEVMFFKDRFYMRTNPFYPEVELNFISVFWPQLPNGLEAAYEFADRDEVRFFKGNKYWAVQGQNVLHGYPKDIYSSFGFPRTVKHIDAALSEENTGKTYFFVANKYWRYDEYKRSMDPGYPKMIAHDFPGIGHKVDAVFMKDGFFYFFHGTRQYKFDPKTKRILTLQKANSWFNCRKN

SEQ ID NO: 1987 - protein, 450 aa, Artificial Sequence
  MMP-1 variant D148F
FPATLETQEQDVDLVQKYLEKYYNLKNDGRQVEKRRNSGPVVEKLKQMQEFFGLKVTGKPDAETLKVMKQPRCGVPDVAQFVLTEGNPRWEQTHLTYRIENYTPDLPRADVDHAIEKAFQLWSNVTPLTFTKVSEGQADIMISFVRGFHRDNSPFDGPGGNLAHAFQPGPGIGGDAHFDEDERWTNNFREYNLHRVAAHELGHSLGLSHSTDIGALMYPSYTFSGDVQLAQDDIDGIQAIYGRSQNPVQPIGPQTPKACDSKLTFDAITTIRGEVMFFKDRFYMRTNPFYPEVELNFISVFWPQLPNGLEAAYEFADRDEVRFFKGNKYWAVQGQNVLHGYPKDIYSSFGFPRTVKHIDAALSEENTGKTYFFVANKYWRYDEYKRSMDPGYPKMIAHDFPGIGHKVDAVFMKDGFFYFFHGTRQYKFDPKTKRILTLQKANSWFNCRKN

SEQ ID NO: 1988 - protein, 450 aa, Artificial Sequence
  MMP-1 variant D148M
FPATLETQEQDVDLVQKYLEKYYNLKNDGRQVEKRRNSGPVVEKLKQMQEFFGLKVTGKPDAETLKVMKQPRCGVPDVAQFVLTEGNPRWEQTHLTYRIENYTPDLPRADVDHAIEKAFQLWSNVTPLTFTKVSEGQADIMISFVRGMHRDNSPFDGPGGNLAHAFQPGPGIGGDAHFDEDERWTNNFREYNLHRVAAHELGHSLGLSHSTDIGALMYPSYTFSGDVQLAQDDIDGIQAIYGRSQNPVQPIGPQTPKACDSKLTFDAITTIRGEVMFFKDRFYMRTNPFYPEVELNFISVFWPQLPNGLEAAYEFADRDEVRFFKGNKYWAVQGQNVLHGYPKDIYSSFGFPRTVKHIDAALSEENTGKTYFFVANKYWRYDEYKRSMDPGYPKMIAHDFPGIGHKVDAVFMKDGFFYFFHGTRQYKFDPKTKRILTLQKANSWFNCRKN

SEQ ID NO: 1989 - protein, 450 aa, Artificial Sequence
  MMP-1 variant D148W
FPATLETQEQDVDLVQKYLEKYYNLKNDGRQVEKRRNSGPVVEKLKQMQEFFGLKVTGKPDAETLKVMKQPRCGVPDVAQFVLTEGNPRWEQTHLTYRIENYTPDLPRADVDHAIEKAFQLWSNVTPLTFTKVSEGQADIMISFVRGWHRDNSPFDGPGGNLAHAFQPGPGIGGDAHFDEDERWTNNFREYNLHRVAAHELGHSLGLSHSTDIGALMYPSYTFSGDVQLAQDDIDGIQAIYGRSQNPVQPIGPQTPKACDSKLTFDAITTIRGEVMFFKDRFYMRTNPFYPEVELNFISVFWPQLPNGLEAAYEFADRDEVRFFKGNKYWAVQGQNVLHGYPKDIYSSFGFPRTVKHIDAALSEENTGKTYFFVANKYWRYDEYKRSMDPGYPKMIAHDFPGIGHKVDAVFMKDGFFYFFHGTRQYKFDPKTKRILTLQKANSWFNCRKN

SEQ ID NO: 1990 - protein, 450 aa, Artificial Sequence
  MMP-1 variant D148I
FPATLETQEQDVDLVQKYLEKYYNLKNDGRQVEKRRNSGPVVEKLKQMQEFFGLKVTGKPDAETLKVMKQPRCGVPDVAQFVLTEGNPRWEQTHLTYRIENYTPDLPRADVDHAIEKAFQLWSNVTPLTFTKVSEGQADIMISFVRGIHRDNSPFDGPGGNLAHAFQPGPGIGGDAHFDEDERWTNNFREYNLHRVAAHELGHSLGLSHSTDIGALMYPSYTFSGDVQLAQDDIDGIQAIYGRSQNPVQPIGPQTPKACDSKLTFDAITTIRGEVMFFKDRFYMRTNPFYPEVELNFISVFWPQLPNGLEAAYEFADRDEVRFFKGNKYWAVQGQNVLHGYPKDIYSSFGFPRTVKHIDAALSEENTGKTYFFVANKYWRYDEYKRSMDPGYPKMIAHDFPGIGHKVDAVFMKDGFFYFFHGTRQYKFDPKTKRILTLQKANSWFNCRKN

SEQ ID NO: 1991 - protein, 450 aa, Artificial Sequence
  MMP-1 variant D148V
FPATLETQEQDVDLVQKYLEKYYNLKNDGRQVEKRRNSGPVVEKLKQMQEFFGLKVTGKPDAETLKVMKQPRCGVPDVAQFVLTEGNPRWEQTHLTYRIENYTPDLPRADVDHAIEKAFQLWSNVTPLTFTKVSEGQADIMISFVRGVHRDNSPFDGPGGNLAHAFQPGPGIGGDAHFDEDERWTNNFREYNLHRVAAHELGHSLGLSHSTDIGALMYPSYTFSGDVQLAQDDIDGIQAIYGRSQNPVQPIGPQTPKACDSKLTFDAITTIRGEVMFFKDRFYMRTNPFYPEVELNFISVFWPQLPNGLEAAYEFADRDEVRFFKGNKYWAVQGQNVLHGYPKDIYSSFGFPRTVKHIDAALSEENTGKTYFFVANKYWRYDEYKRSMDPGYPKMIAHDFPGIGHKVDAVFMKDGFFYFFHGTRQYKFDPKTKRILTLQKANSWFNCRKN

SEQ ID NO: 1992 - protein, 450 aa, Artificial Sequence
  MMP-1 variant D148L
FPATLETQEQDVDLVQKYLEKYYNLKNDGRQVEKRRNSGPVVEKLKQMQEFFGLKVTGKPDAETLKVMKQPRCGVPDVAQFVLTEGNPRWEQTHLTYRIENYTPDLPRADVDHAIEKAFQLWSNVTPLTFTKVSEGQADIMISFVRGLHRDNSPFDGPGGNLAHAFQPGPGIGGDAHFDEDERWTNNFREYNLHRVAAHELGHSLGLSHSTDIGALMYPSYTFSGDVQLAQDDIDGIQAIYGRSQNPVQPIGPQTPKACDSKLTFDAITTIRGEVMFFKDRFYMRTNPFYPEVELNFISVFWPQLPNGLEAAYEFADRDEVRFFKGNKYWAVQGQNVLHGYPKDIYSSFGFPRTVKHIDAALSEENTGKTYFFVANKYWRYDEYKRSMDPGYPKMIAHDFPGIGHKVDAVFMKDGFFYFFHGTRQYKFDPKTKRILTLQKANSWFNCRKN

SEQ ID NO: 1993 - protein, 450 aa, Artificial Sequence
  MMP-1 variant D148A
FPATLETQEQDVDLVQKYLEKYYNLKNDGRQVEKRRNSGPVVEKLKQMQEFFGLKVTGKPDAETLKVMKQPRCGVPDVAQFVLTEGNPRWEQTHLTYRIENYTPDLPRADVDHAIEKAFQLWSNVTPLTFTKVSEGQADIMISFVRGAHRDNSPFDGPGGNLAHAFQPGPGIGGDAHFDEDERWTNNFREYNLHRVAAHELGHSLGLSHSTDIGALMYPSYTFSGDVQLAQDDIDGIQAIYGRSQNPVQPIGPQTPKACDSKLTFDAITTIRGEVMFFKDRFYMRTNPFYPEVELNFISVFWPQLPNGLEAAYEFADRDEVRFFKGNKYWAVQGQNVLHGYPKDIYSSFGFPRTVKHIDAALSEENTGKTYFFVANKYWRYDEYKRSMDPGYPKMIAHDFPGIGHKVDAVFMKDGFFYFFHGTRQYKFDPKTKRILTLQKANSWFNCRKN

SEQ ID NO: 1994 - protein, 450 aa, Artificial Sequence
  MMP-1 variant D148P
FPATLETQEQDVDLVQKYLEKYYNLKNDGRQVEKRRNSGPVVEKLKQMQEFFGLKVTGKPDAETLKVMKQPRCGVPDVAQFVLTEGNPRWEQTHLTYRIENYTPDLPRADVDHAIEKAFQLWSNVTPLTFTKVSEGQADIMISFVRGPHRDNSPFDGPGGNLAHAFQPGPGIGGDAHFDEDERWTNNFREYNLHRVAAHELGHSLGLSHSTDIGALMYPSYTFSGDVQLAQDDIDGIQAIYGRSQNPVQPIGPQTPKACDSKLTFDAITTIRGEVMFFKDRFYMRTNPFYPEVELNFISVFWPQLPNGLEAAYEFADRDEVRFFKGNKYWAVQGQNVLHGYPKDIYSSFGFPRTVKHIDAALSEENTGKTYFFVANKYWRYDEYKRSMDPGYPKMIAHDFPGIGHKVDAVFMKDGFFYFFHGTRQYKFDPKTKRILTLQKANSWFNCRKN

SEQ ID NO: 1995 - protein, 450 aa, Artificial Sequence
  MMP-1 variant H149D
FPATLETQEQDVDLVQKYLEKYYNLKNDGRQVEKRRNSGPVVEKLKQMQEFFGLKVTGKPDAETLKVMKQPRCGVPDVAQFVLTEGNPRWEQTHLTYRIENYTPDLPRADVDHAIEKAFQLWSNVTPLTFTKVSEGQADIMISFVRGDDRDNSPFDGPGGNLAHAFQPGPGIGGDAHFDEDERWTNNFREYNLHRVAAHELGHSLGLSHSTDIGALMYPSYTFSGDVQLAQDDIDGIQAIYGRSQNPVQPIGPQTPKACDSKLTFDAITTIRGEVMFFKDRFYMRTNPFYPEVELNFISVFWPQLPNGLEAAYEFADRDEVRFFKGNKYWAVQGQNVLHGYPKDIYSSFGFPRTVKHIDAALSEENTGKTYFFVANKYWRYDEYKRSMDPGYPKMIAHDFPGIGHKVDAVFMKDGFFYFFHGTRQYKFDPKTKRILTLQKANSWFNCRKN

SEQ ID NO: 1996 - protein, 450 aa, Artificial Sequence
  MMP-1 variant H149E
FPATLETQEQDVDLVQKYLEKYYNLKNDGRQVEKRRNSGPVVEKLKQMQEFFGLKVTGKPDAETLKVMKQPRCGVPDVAQFVLTEGNPRWEQTHLTYRIENYTPDLPRADVDHAIEKAFQLWSNVTPLTFTKVSEGQADIMISFVRGDERDNSPFDGPGGNLAHAFQPGPGIGGDAHFDEDERWTNNFREYNLHRVAAHELGHSLGLSHSTDIGALMYPSYTFSGDVQLAQDDIDGIQAIYGRSQNPVQPIGPQTPKACDSKLTFDAITTIRGEVMFFKDRFYMRTNPFYPEVELNFISVFWPQLPNGLEAAYEFADRDEVRFFKGNKYWAVQGQNVLHGYPKDIYSSFGFPRTVKHIDAALSEENTGKTYFFVANKYWRYDEYKRSMDPGYPKMIAHDFPGIGHKVDAVFMKDGFFYFFHGTRQYKFDPKTKRILTLQKANSWFNCRKN

SEQ ID NO: 1997 - protein, 450 aa, Artificial Sequence
  MMP-1 variant H149K
FPATLETQEQDVDLVQKYLEKYYNLKNDGRQVEKRRNSGPVVEKLKQMQEFFGLKVTGKPDAETLKVMKQPRCGVPDVAQFVLTEGNPRWEQTHLTYRIENYTPDLPRADVDHAIEKAFQLWSNVTPLTFTKVSEGQADIMISFVRGDKRDNSPFDGPGGNLAHAFQPGPGIGGDAHFDEDERWTNNFREYNLHRVAAHELGHSLGLSHSTDIGALMYPSYTFSGDVQLAQDDIDGIQAIYGRSQNPVQPIGPQTPKACDSKLTFDAITTIRGEVMFFKDRFYMRTNPFYPEVELNFISVFWPQLPNGLEAAYEFADRDEVRFFKGNKYWAVQGQNVLHGYPKDIYSSFGFPRTVKHIDAALSEENTGKTYFFVANKYWRYDEYKRSMDPGYPKMIAHDFPGIGHKVDAVFMKDGFFYFFHGTRQYKFDPKTKRILTLQKANSWFNCRKN

SEQ ID NO: 1998 - protein, 450 aa, Artificial Sequence
  MMP-1 variant H149R
FPATLETQEQDVDLVQKYLEKYYNLKNDGRQVEKRRNSGPVVEKLKQMQEFFGLKVTGKPDAETLKVMKQPRCGVPDVAQFVLTEGNPRWEQTHLTYRIENYTPDLPRADVDHAIEKAFQLWSNVTPLTFTKVSEGQADIMISFVRGDRRDNSPFDGPGGNLAHAFQPGPGIGGDAHFDEDERWTNNFREYNLHRVAAHELGHSLGLSHSTDIGALMYPSYTFSGDVQLAQDDIDGIQAIYGRSQNPVQPIGPQTPKACDSKLTFDAITTIRGEVMFFKDRFYMRTNPFYPEVELNFISVFWPQLPNGLEAAYEFADRDEVRFFKGNKYWAVQGQNVLHGYPKDIYSSFGFPRTVKHIDAALSEENTGKTYFFVANKYWRYDEYKRSMDPGYPKMIAHDFPGIGHKVDAVFMKDGFFYFFHGTRQYKFDPKTKRILTLQKANSWFNCRKN

SEQ ID NO: 1999 - protein, 450 aa, Artificial Sequence
  MMP-1 variant H149C
FPATLETQEQDVDLVQKYLEKYYNLKNDGRQVEKRRNSGPVVEKLKQMQEFFGLKVTGKPDAETLKVMKQPRCGVPDVAQFVLTEGNPRWEQTHLTYRIENYTPDLPRADVDHAIEKAFQLWSNVTPLTFTKVSEGQADIMISFVRGDCRDNSPFDGPGGNLAHAFQPGPGIGGDAHFDEDERWTNNFREYNLHRVAAHELGHSLGLSHSTDIGALMYPSYTFSGDVQLAQDDIDGIQAIYGRSQNPVQPIGPQTPKACDSKLTFDAITTIRGEVMFFKDRFYMRTNPFYPEVELNFISVFWPQLPNGLEAAYEFADRDEVRFFKGNKYWAVQGQNVLHGYPKDIYSSFGFPRTVKHIDAALSEENTGKTYFFVANKYWRYDEYKRSMDPGYPKMIAHDFPGIGHKVDAVFMKDGFFYFFHGTRQYKFDPKTKRILTLQKANSWFNCRKN

SEQ ID NO: 2000 - protein, 450 aa, Artificial Sequence
  MMP-1 variant H149N
FPATLETQEQDVDLVQKYLEKYYNLKNDGRQVEKRRNSGPVVEKLKQMQEFFGLKVTGKPDAETLKVMKQPRCGVPDVAQFVLTEGNPRWEQTHLTYRIENYTPDLPRADVDHAIEKAFQLWSNVTPLTFTKVSEGQADIMISFVRGDNRDNSPFDGPGGNLAHAFQPGPGIGGDAHFDEDERWTNNFREYNLHRVAAHELGHSLGLSHSTDIGALMYPSYTFSGDVQLAQDDIDGIQAIYGRSQNPVQPIGPQTPKACDSKLTFDAITTIRGEVMFFKDRFYMRTNPFYPEVELNFISVFWPQLPNGLEAAYEFADRDEVRFFKGNKYWAVQGQNVLHGYPKDIYSSFGFPRTVKHIDAALSEENTGKTYFFVANKYWRYDEYKRSMDPGYPKMIAHDFPGIGHKVDAVFMKDGFFYFFHGTRQYKFDPKTKRILTLQKANSWFNCRKN

SEQ ID NO: 2001 - protein, 450 aa, Artificial Sequence
  MMP-1 variant H149Q
FPATLETQEQDVDLVQKYLEKYYNLKNDGRQVEKRRNSGPVVEKLKQMQEFFGLKVTGKPDAETLKVMKQPRCGVPDVAQFVLTEGNPRWEQTHLTYRIENYTPDLPRADVDHAIEKAFQLWSNVTPLTFTKVSEGQADIMISFVRGDQRDNSPFDGPGGNLAHAFQPGPGIGGDAHFDEDERWTNNFREYNLHRVAAHELGHSLGLSHSTDIGALMYPSYTFSGDVQLAQDDIDGIQAIYGRSQNPVQPIGPQTPKACDSKLTFDAITTIRGEVMFFKDRFYMRTNPFYPEVELNFISVFWPQLPNGLEAAYEFADRDEVRFFKGNKYWAVQGQNVLHGYPKDIYSSFGFPRTVKHIDAALSEENTGKTYFFVANKYWRYDEYKRSMDPGYPKMIAHDFPGIGHKVDAVFMKDGFFYFFHGTRQYKFDPKTKRILTLQKANSWFNCRKN

SEQ ID NO: 2002 - protein, 450 aa, Artificial Sequence
  MMP-1 variant H149T
FPATLETQEQDVDLVQKYLEKYYNLKNDGRQVEKRRNSGPVVEKLKQMQEFFGLKVTGKPDAETLKVMKQPRCGVPDVAQFVLTEGNPRWEQTHLTYRIENYTPDLPRADVDHAIEKAFQLWSNVTPLTFTKVSEGQADIMISFVRGDTRDNSPFDGPGGNLAHAFQPGPGIGGDAHFDEDERWTNNFREYNLHRVAAHELGHSLGLSHSTDIGALMYPSYTFSGDVQLAQDDIDGIQAIYGRSQNPVQPIGPQTPKACDSKLTFDAITTIRGEVMFFKDRFYMRTNPFYPEVELNFISVFWPQLPNGLEAAYEFADRDEVRFFKGNKYWAVQGQNVLHGYPKDIYSSFGFPRTVKHIDAALSEENTGKTYFFVANKYWRYDEYKRSMDPGYPKMIAHDFPGIGHKVDAVFMKDGFFYFFHGTRQYKFDPKTKRILTLQKANSWFNCRKN

SEQ ID NO: 2003 - protein, 450 aa, Artificial Sequence
  MMP-1 variant H149Y
FPATLETQEQDVDLVQKYLEKYYNLKNDGRQVEKRRNSGPVVEKLKQMQEFFGLKVTGKPDAETLKVMKQPRCGVPDVAQFVLTEGNPRWEQTHLTYRIENYTPDLPRADVDHAIEKAFQLWSNVTPLTFTKVSEGQADIMISFVRGDYRDNSPFDGPGGNLAHAFQPGPGIGGDAHFDEDERWTNNFREYNLHRVAAHELGHSLGLSHSTDIGALMYPSYTFSGDVQLAQDDIDGIQAIYGRSQNPVQPIGPQTPKACDSKLTFDAITTIRGEVMFFKDRFYMRTNPFYPEVELNFISVFWPQLPNGLEAAYEFADRDEVRFFKGNKYWAVQGQNVLHGYPKDIYSSFGFPRTVKHIDAALSEENTGKTYFFVANKYWRYDEYKRSMDPGYPKMIAHDFPGIGHKVDAVFMKDGFFYFFHGTRQYKFDPKTKRILTLQKANSWFNCRKN

SEQ ID NO: 2004 - protein, 450 aa, Artificial Sequence
  MMP-1 variant H149S
FPATLETQEQDVDLVQKYLEKYYNLKNDGRQVEKRRNSGPVVEKLKQMQEFFGLKVTGKPDAETLKVMKQPRCGVPDVAQFVLTEGNPRWEQTHLTYRIENYTPDLPRADVDHAIEKAFQLWSNVTPLTFTKVSEGQADIMISFVRGDSRDNSPFDGPGGNLAHAFQPGPGIGGDAHFDEDERWTNNFREYNLHRVAAHELGHSLGLSHSTDIGALMYPSYTFSGDVQLAQDDIDGIQAIYGRSQNPVQPIGPQTPKACDSKLTFDAITTIRGEVMFFKDRFYMRTNPFYPEVELNFISVFWPQLPNGLEAAYEFADRDEVRFFKGNKYWAVQGQNVLHGYPKDIYSSFGFPRTVKHIDAALSEENTGKTYFFVANKYWRYDEYKRSMDPGYPKMIAHDFPGIGHKVDAVFMKDGFFYFFHGTRQYKFDPKTKRILTLQKANSWFNCRKN

SEQ ID NO: 2005 - protein, 450 aa, Artificial Sequence
  MMP-1 variant H149G
FPATLETQEQDVDLVQKYLEKYYNLKNDGRQVEKRRNSGPVVEKLKQMQEFFGLKVTGKPDAETLKVMKQPRCGVPDVAQFVLTEGNPRWEQTHLTYRIENYTPDLPRADVDHAIEKAFQLWSNVTPLTFTKVSEGQADIMISFVRGDGRDNSPFDGPGGNLAHAFQPGPGIGGDAHFDEDERWTNNFREYNLHRVAAHELGHSLGLSHSTDIGALMYPSYTFSGDVQLAQDDIDGIQAIYGRSQNPVQPIGPQTPKACDSKLTFDAITTIRGEVMFFKDRFYMRTNPFYPEVELNFISVFWPQLPNGLEAAYEFADRDEVRFFKGNKYWAVQGQNVLHGYPKDIYSSFGFPRTVKHIDAALSEENTGKTYFFVANKYWRYDEYKRSMDPGYPKMIAHDFPGIGHKVDAVFMKDGFFYFFHGTRQYKFDPKTKRILTLQKANSWFNCRKN

SEQ ID NO: 2006 - protein, 450 aa, Artificial Sequence
  MMP-1 variant H149F
FPATLETQEQDVDLVQKYLEKYYNLKNDGRQVEKRRNSGPVVEKLKQMQEFFGLKVTGKPDAETLKVMKQPRCGVPDVAQFVLTEGNPRWEQTHLTYRIENYTPDLPRADVDHAIEKAFQLWSNVTPLTFTKVSEGQADIMISFVRGDFRDNSPFDGPGGNLAHAFQPGPGIGGDAHFDEDERWTNNFREYNLHRVAAHELGHSLGLSHSTDIGALMYPSYTFSGDVQLAQDDIDGIQAIYGRSQNPVQPIGPQTPKACDSKLTFDAITTIRGEVMFFKDRFYMRTNPFYPEVELNFISVFWPQLPNGLEAAYEFADRDEVRFFKGNKYWAVQGQNVLHGYPKDIYSSFGFPRTVKHIDAALSEENTGKTYFFVANKYWRYDEYKRSMDPGYPKMIAHDFPGIGHKVDAVFMKDGFFYFFHGTRQYKFDPKTKRILTLQKANSWFNCRKN

SEQ ID NO: 2007 - protein, 450 aa, Artificial Sequence
  MMP-1 variant H149M
FPATLETQEQDVDLVQKYLEKYYNLKNDGRQVEKRRNSGPVVEKLKQMQEFFGLKVTGKPDAETLKVMKQPRCGVPDVAQFVLTEGNPRWEQTHLTYRIENYTPDLPRADVDHAIEKAFQLWSNVTPLTFTKVSEGQADIMISFVRGDMRDNSPFDGPGGNLAHAFQPGPGIGGDAHFDEDERWTNNFREYNLHRVAAHELGHSLGLSHSTDIGALMYPSYTFSGDVQLAQDDIDGIQAIYGRSQNPVQPIGPQTPKACDSKLTFDAITTIRGEVMFFKDRFYMRTNPFYPEVELNFISVFWPQLPNGLEAAYEFADRDEVRFFKGNKYWAVQGQNVLHGYPKDIYSSFGFPRTVKHIDAALSEENTGKTYFFVANKYWRYDEYKRSMDPGYPKMIAHDFPGIGHKVDAVFMKDGFFYFFHGTRQYKFDPKTKRILTLQKANSWFNCRKN

SEQ ID NO: 2008 - protein, 450 aa, Artificial Sequence
  MMP-1 variant H149W
FPATLETQEQDVDLVQKYLEKYYNLKNDGRQVEKRRNSGPVVEKLKQMQEFFGLKVTGKPDAETLKVMKQPRCGVPDVAQFVLTEGNPRWEQTHLTYRIENYTPDLPRADVDHAIEKAFQLWSNVTPLTFTKVSEGQADIMISFVRGDWRDNSPFDGPGGNLAHAFQPGPGIGGDAHFDEDERWTNNFREYNLHRVAAHELGHSLGLSHSTDIGALMYPSYTFSGDVQLAQDDIDGIQAIYGRSQNPVQPIGPQTPKACDSKLTFDAITTIRGEVMFFKDRFYMRTNPFYPEVELNFISVFWPQLPNGLEAAYEFADRDEVRFFKGNKYWAVQGQNVLHGYPKDIYSSFGFPRTVKHIDAALSEENTGKTYFFVANKYWRYDEYKRSMDPGYPKMIAHDFPGIGHKVDAVFMKDGFFYFFHGTRQYKFDPKTKRILTLQKANSWFNCRKN

SEQ ID NO: 2009 - protein, 450 aa, Artificial Sequence
  MMP-1 variant H149I
FPATLETQEQDVDLVQKYLEKYYNLKNDGRQVEKRRNSGPVVEKLKQMQEFFGLKVTGKPDAETLKVMKQPRCGVPDVAQFVLTEGNPRWEQTHLTYRIENYTPDLPRADVDHAIEKAFQLWSNVTPLTFTKVSEGQADIMISFVRGDIRDNSPFDGPGGNLAHAFQPGPGIGGDAHFDEDERWTNNFREYNLHRVAAHELGHSLGLSHSTDIGALMYPSYTFSGDVQLAQDDIDGIQAIYGRSQNPVQPIGPQTPKACDSKLTFDAITTIRGEVMFFKDRFYMRTNPFYPEVELNFISVFWPQLPNGLEAAYEFADRDEVRFFKGNKYWAVQGQNVLHGYPKDIYSSFGFPRTVKHIDAALSEENTGKTYFFVANKYWRYDEYKRSMDPGYPKMIAHDFPGIGHKVDAVFMKDGFFYFFHGTRQYKFDPKTKRILTLQKANSWFNCRKN

SEQ ID NO: 2010 - protein, 450 aa, Artificial Sequence
  MMP-1 variant H149V
FPATLETQEQDVDLVQKYLEKYYNLKNDGRQVEKRRNSGPVVEKLKQMQEFFGLKVTGKPDAETLKVMKQPRCGVPDVAQFVLTEGNPRWEQTHLTYRIENYTPDLPRADVDHAIEKAFQLWSNVTPLTFTKVSEGQADIMISFVRGDVRDNSPFDGPGGNLAHAFQPGPGIGGDAHFDEDERWTNNFREYNLHRVAAHELGHSLGLSHSTDIGALMYPSYTFSGDVQLAQDDIDGIQAIYGRSQNPVQPIGPQTPKACDSKLTFDAITTIRGEVMFFKDRFYMRTNPFYPEVELNFISVFWPQLPNGLEAAYEFADRDEVRFFKGNKYWAVQGQNVLHGYPKDIYSSFGFPRTVKHIDAALSEENTGKTYFFVANKYWRYDEYKRSMDPGYPKMIAHDFPGIGHKVDAVFMKDGFFYFFHGTRQYKFDPKTKRILTLQKANSWFNCRKN

SEQ ID NO: 2011 - protein, 450 aa, Artificial Sequence
  MMP-1 variant H149L
FPATLETQEQDVDLVQKYLEKYYNLKNDGRQVEKRRNSGPVVEKLKQMQEFFGLKVTGKPDAETLKVMKQPRCGVPDVAQFVLTEGNPRWEQTHLTYRIENYTPDLPRADVDHAIEKAFQLWSNVTPLTFTKVSEGQADIMISFVRGDLRDNSPFDGPGGNLAHAFQPGPGIGGDAHFDEDERWTNNFREYNLHRVAAHELGHSLGLSHSTDIGALMYPSYTFSGDVQLAQDDIDGIQAIYGRSQNPVQPIGPQTPKACDSKLTFDAITTIRGEVMFFKDRFYMRTNPFYPEVELNFISVFWPQLPNGLEAAYEFADRDEVRFFKGNKYWAVQGQNVLHGYPKDIYSSFGFPRTVKHIDAALSEENTGKTYFFVANKYWRYDEYKRSMDPGYPKMIAHDFPGIGHKVDAVFMKDGFFYFFHGTRQYKFDPKTKRILTLQKANSWFNCRKN

SEQ ID NO: 2012 - protein, 450 aa, Artificial Sequence
  MMP-1 variant H149A
FPATLETQEQDVDLVQKYLEKYYNLKNDGRQVEKRRNSGPVVEKLKQMQEFFGLKVTGKPDAETLKVMKQPRCGVPDVAQFVLTEGNPRWEQTHLTYRIENYTPDLPRADVDHAIEKAFQLWSNVTPLTFTKVSEGQADIMISFVRGDARDNSPFDGPGGNLAHAFQPGPGIGGDAHFDEDERWTNNFREYNLHRVAAHELGHSLGLSHSTDIGALMYPSYTFSGDVQLAQDDIDGIQAIYGRSQNPVQPIGPQTPKACDSKLTFDAITTIRGEVMFFKDRFYMRTNPFYPEVELNFISVFWPQLPNGLEAAYEFADRDEVRFFKGNKYWAVQGQNVLHGYPKDIYSSFGFPRTVKHIDAALSEENTGKTYFFVANKYWRYDEYKRSMDPGYPKMIAHDFPGIGHKVDAVFMKDGFFYFFHGTRQYKFDPKTKRILTLQKANSWFNCRKN

SEQ ID NO: 2013 - protein, 450 aa, Artificial Sequence
  MMP-1 variant H149P
FPATLETQEQDVDLVQKYLEKYYNLKNDGRQVEKRRNSGPVVEKLKQMQEFFGLKVTGKPDAETLKVMKQPRCGVPDVAQFVLTEGNPRWEQTHLTYRIENYTPDLPRADVDHAIEKAFQLWSNVTPLTFTKVSEGQADIMISFVRGDPRDNSPFDGPGGNLAHAFQPGPGIGGDAHFDEDERWTNNFREYNLHRVAAHELGHSLGLSHSTDIGALMYPSYTFSGDVQLAQDDIDGIQAIYGRSQNPVQPIGPQTPKACDSKLTFDAITTIRGEVMFFKDRFYMRTNPFYPEVELNFISVFWPQLPNGLEAAYEFADRDEVRFFKGNKYWAVQGQNVLHGYPKDIYSSFGFPRTVKHIDAALSEENTGKTYFFVANKYWRYDEYKRSMDPGYPKMIAHDFPGIGHKVDAVFMKDGFFYFFHGTRQYKFDPKTKRILTLQKANSWFNCRKN

SEQ ID NO: 2014 - protein, 450 aa, Artificial Sequence
  MMP-1 variant N152D
FPATLETQEQDVDLVQKYLEKYYNLKNDGRQVEKRRNSGPVVEKLKQMQEFFGLKVTGKPDAETLKVMKQPRCGVPDVAQFVLTEGNPRWEQTHLTYRIENYTPDLPRADVDHAIEKAFQLWSNVTPLTFTKVSEGQADIMISFVRGDHRDDSPFDGPGGNLAHAFQPGPGIGGDAHFDEDERWTNNFREYNLHRVAAHELGHSLGLSHSTDIGALMYPSYTFSGDVQLAQDDIDGIQAIYGRSQNPVQPIGPQTPKACDSKLTFDAITTIRGEVMFFKDRFYMRTNPFYPEVELNFISVFWPQLPNGLEAAYEFADRDEVRFFKGNKYWAVQGQNVLHGYPKDIYSSFGFPRTVKHIDAALSEENTGKTYFFVANKYWRYDEYKRSMDPGYPKMIAHDFPGIGHKVDAVFMKDGFFYFFHGTRQYKFDPKTKRILTLQKANSWFNCRKN

SEQ ID NO: 2015 - protein, 450 aa, Artificial Sequence
  MMP-1 variant N152E
FPATLETQEQDVDLVQKYLEKYYNLKNDGRQVEKRRNSGPVVEKLKQMQEFFGLKVTGKPDAETLKVMKQPRCGVPDVAQFVLTEGNPRWEQTHLTYRIENYTPDLPRADVDHAIEKAFQLWSNVTPLTFTKVSEGQADIMISFVRGDHRDESPFDGPGGNLAHAFQPGPGIGGDAHFDEDERWTNNFREYNLHRVAAHELGHSLGLSHSTDIGALMYPSYTFSGDVQLAQDDIDGIQAIYGRSQNPVQPIGPQTPKACDSKLTFDAITTIRGEVMFFKDRFYMRTNPFYPEVELNFISVFWPQLPNGLEAAYEFADRDEVRFFKGNKYWAVQGQNVLHGYPKDIYSSFGFPRTVKHIDAALSEENTGKTYFFVANKYWRYDEYKRSMDPGYPKMIAHDFPGIGHKVDAVFMKDGFFYFFHGTRQYKFDPKTKRILTLQKANSWFNCRKN

SEQ ID NO: 2016 - protein, 450 aa, Artificial Sequence
  MMP-1 variant N152H
FPATLETQEQDVDLVQKYLEKYYNLKNDGRQVEKRRNSGPVVEKLKQMQEFFGLKVTGKPDAETLKVMKQPRCGVPDVAQFVLTEGNPRWEQTHLTYRIENYTPDLPRADVDHAIEKAFQLWSNVTPLTFTKVSEGQADIMISFVRGDHRDHSPFDGPGGNLAHAFQPGPGIGGDAHFDEDERWTNNFREYNLHRVAAHELGHSLGLSHSTDIGALMYPSYTFSGDVQLAQDDIDGIQAIYGRSQNPVQPIGPQTPKACDSKLTFDAITTIRGEVMFFKDRFYMRTNPFYPEVELNFISVFWPQLPNGLEAAYEFADRDEVRFFKGNKYWAVQGQNVLHGYPKDIYSSFGFPRTVKHIDAALSEENTGKTYFFVANKYWRYDEYKRSMDPGYPKMIAHDFPGIGHKVDAVFMKDGFFYFFHGTRQYKFDPKTKRILTLQKANSWFNCRKN

SEQ ID NO: 2017 - protein, 450 aa, Artificial Sequence
  MMP-1 variant N152K
FPATLETQEQDVDLVQKYLEKYYNLKNDGRQVEKRRNSGPVVEKLKQMQEFFGLKVTGKPDAETLKVMKQPRCGVPDVAQFVLTEGNPRWEQTHLTYRIENYTPDLPRADVDHAIEKAFQLWSNVTPLTFTKVSEGQADIMISFVRGDHRDKSPFDGPGGNLAHAFQPGPGIGGDAHFDEDERWTNNFREYNLHRVAAHELGHSLGLSHSTDIGALMYPSYTFSGDVQLAQDDIDGIQAIYGRSQNPVQPIGPQTPKACDSKLTFDAITTIRGEVMFFKDRFYMRTNPFYPEVELNFISVFWPQLPNGLEAAYEFADRDEVRFFKGNKYWAVQGQNVLHGYPKDIYSSFGFPRTVKHIDAALSEENTGKTYFFVANKYWRYDEYKRSMDPGYPKMIAHDFPGIGHKVDAVFMKDGFFYFFHGTRQYKFDPKTKRILTLQKANSWFNCRKN

SEQ ID NO: 2018 - protein, 450 aa, Artificial Sequence
  MMP-1 variant N152R
FPATLETQEQDVDLVQKYLEKYYNLKNDGRQVEKRRNSGPVVEKLKQMQEFFGLKVTGKPDAETLKVMKQPRCGVPDVAQFVLTEGNPRWEQTHLTYRIENYTPDLPRADVDHAIEKAFQLWSNVTPLTFTKVSEGQADIMISFVRGDHRDRSPFDGPGGNLAHAFQPGPGIGGDAHFDEDERWTNNFREYNLHRVAAHELGHSLGLSHSTDIGALMYPSYTFSGDVQLAQDDIDGIQAIYGRSQNPVQPIGPQTPKACDSKLTFDAITTIRGEVMFFKDRFYMRTNPFYPEVELNFISVFWPQLPNGLEAAYEFADRDEVRFFKGNKYWAVQGQNVLHGYPKDIYSSFGFPRTVKHIDAALSEENTGKTYFFVANKYWRYDEYKRSMDPGYPKMIAHDFPGIGHKVDAVFMKDGFFYFFHGTRQYKFDPKTKRILTLQKANSWFNCRKN

SEQ ID NO: 2019 - protein, 450 aa, Artificial Sequence
  MMP-1 variant N152C
FPATLETQEQDVDLVQKYLEKYYNLKNDGRQVEKRRNSGPVVEKLKQMQEFFGLKVTGKPDAETLKVMKQPRCGVPDVAQFVLTEGNPRWEQTHLTYRIENYTPDLPRADVDHAIEKAFQLWSNVTPLTFTKVSEGQADIMISFVRGDHRDCSPFDGPGGNLAHAFQPGPGIGGDAHFDEDERWTNNFREYNLHRVAAHELGHSLGLSHSTDIGALMYPSYTFSGDVQLAQDDIDGIQAIYGRSQNPVQPIGPQTPKACDSKLTFDAITTIRGEVMFFKDRFYMRTNPFYPEVELNFISVFWPQLPNGLEAAYEFADRDEVRFFKGNKYWAVQGQNVLHGYPKDIYSSFGFPRTVKHIDAALSEENTGKTYFFVANKYWRYDEYKRSMDPGYPKMIAHDFPGIGHKVDAVFMKDGFFYFFHGTRQYKFDPKTKRILTLQKANSWFNCRKN

SEQ ID NO: 2020 - protein, 450 aa, Artificial Sequence
  MMP-1 variant N152Q
FPATLETQEQDVDLVQKYLEKYYNLKNDGRQVEKRRNSGPVVEKLKQMQEFFGLKVTGKPDAETLKVMKQPRCGVPDVAQFVLTEGNPRWEQTHLTYRIENYTPDLPRADVDHAIEKAFQLWSNVTPLTFTKVSEGQADIMISFVRGDHRDQSPFDGPGGNLAHAFQPGPGIGGDAHFDEDERWTNNFREYNLHRVAAHELGHSLGLSHSTDIGALMYPSYTFSGDVQLAQDDIDGIQAIYGRSQNPVQPIGPQTPKACDSKLTFDAITTIRGEVMFFKDRFYMRTNPFYPEVELNFISVFWPQLPNGLEAAYEFADRDEVRFFKGNKYWAVQGQNVLHGYPKDIYSSFGFPRTVKHIDAALSEENTGKTYFFVANKYWRYDEYKRSMDPGYPKMIAHDFPGIGHKVDAVFMKDGFFYFFHGTRQYKFDPKTKRILTLQKANSWFNCRKN

SEQ ID NO: 2021 - protein, 450 aa, Artificial Sequence
  MMP-1 variant N152T
FPATLETQEQDVDLVQKYLEKYYNLKNDGRQVEKRRNSGPVVEKLKQMQEFFGLKVTGKPDAETLKVMKQPRCGVPDVAQFVLTEGNPRWEQTHLTYRIENYTPDLPRADVDHAIEKAFQLWSNVTPLTFTKVSEGQADIMISFVRGDHRDTSPFDGPGGNLAHAFQPGPGIGGDAHFDEDERWTNNFREYNLHRVAAHELGHSLGLSHSTDIGALMYPSYTFSGDVQLAQDDIDGIQAIYGRSQNPVQPIGPQTPKACDSKLTFDAITTIRGEVMFFKDRFYMRTNPFYPEVELNFISVFWPQLPNGLEAAYEFADRDEVRFFKGNKYWAVQGQNVLHGYPKDIYSSFGFPRTVKHIDAALSEENTGKTYFFVANKYWRYDEYKRSMDPGYPKMIAHDFPGIGHKVDAVFMKDGFFYFFHGTRQYKFDPKTKRILTLQKANSWFNCRKN

SEQ ID NO: 2022 - protein, 450 aa, Artificial Sequence
  MMP-1 variant N152Y
FPATLETQEQDVDLVQKYLEKYYNLKNDGRQVEKRRNSGPVVEKLKQMQEFFGLKVTGKPDAETLKVMKQPRCGVPDVAQFVLTEGNPRWEQTHLTYRIENYTPDLPRADVDHAIEKAFQLWSNVTPLTFTKVSEGQADIMISFVRGDHRDYSPFDGPGGNLAHAFQPGPGIGGDAHFDEDERWTNNFREYNLHRVAAHELGHSLGLSHSTDIGALMYPSYTFSGDVQLAQDDIDGIQAIYGRSQNPVQPIGPQTPKACDSKLTFDAITTIRGEVMFFKDRFYMRTNPFYPEVELNFISVFWPQLPNGLEAAYEFADRDEVRFFKGNKYWAVQGQNVLHGYPKDIYSSFGFPRTVKHIDAALSEENTGKTYFFVANKYWRYDEYKRSMDPGYPKMIAHDFPGIGHKVDAVFMKDGFFYFFHGTRQYKFDPKTKRILTLQKANSWFNCRKN

SEQ ID NO: 2023 - protein, 450 aa, Artificial Sequence
  MMP-1 variant N152S
FPATLETQEQDVDLVQKYLEKYYNLKNDGRQVEKRRNSGPVVEKLKQMQEFFGLKVTGKPDAETLKVMKQPRCGVPDVAQFVLTEGNPRWEQTHLTYRIENYTPDLPRADVDHAIEKAFQLWSNVTPLTFTKVSEGQADIMISFVRGDHRDSSPFDGPGGNLAHAFQPGPGIGGDAHFDEDERWTNNFREYNLHRVAAHELGHSLGLSHSTDIGALMYPSYTFSGDVQLAQDDIDGIQAIYGRSQNPVQPIGPQTPKACDSKLTFDAITTIRGEVMFFKDRFYMRTNPFYPEVELNFISVFWPQLPNGLEAAYEFADRDEVRFFKGNKYWAVQGQNVLHGYPKDIYSSFGFPRTVKHIDAALSEENTGKTYFFVANKYWRYDEYKRSMDPGYPKMIAHDFPGIGHKVDAVFMKDGFFYFFHGTRQYKFDPKTKRILTLQKANSWFNCRKN

SEQ ID NO: 2024 - protein, 450 aa, Artificial Sequence
  MMP-1 variant N152G
FPATLETQEQDVDLVQKYLEKYYNLKNDGRQVEKRRNSGPVVEKLKQMQEFFGLKVTGKPDAETLKVMKQPRCGVPDVAQFVLTEGNPRWEQTHLTYRIENYTPDLPRADVDHAIEKAFQLWSNVTPLTFTKVSEGQADIMISFVRGDHRDGSPFDGPGGNLAHAFQPGPGIGGDAHFDEDERWTNNFREYNLHRVAAHELGHSLGLSHSTDIGALMYPSYTFSGDVQLAQDDIDGIQAIYGRSQNPVQPIGPQTPKACDSKLTFDAITTIRGEVMFFKDRFYMRTNPFYPEVELNFISVFWPQLPNGLEAAYEFADRDEVRFFKGNKYWAVQGQNVLHGYPKDIYSSFGFPRTVKHIDAALSEENTGKTYFFVANKYWRYDEYKRSMDPGYPKMIAHDFPGIGHKVDAVFMKDGFFYFFHGTRQYKFDPKTKRILTLQKANSWFNCRKN

SEQ ID NO: 2025 - protein, 450 aa, Artificial Sequence
  MMP-1 variant N152F
FPATLETQEQDVDLVQKYLEKYYNLKNDGRQVEKRRNSGPVVEKLKQMQEFFGLKVTGKPDAETLKVMKQPRCGVPDVAQFVLTEGNPRWEQTHLTYRIENYTPDLPRADVDHAIEKAFQLWSNVTPLTFTKVSEGQADIMISFVRGDHRDFSPFDGPGGNLAHAFQPGPGIGGDAHFDEDERWTNNFREYNLHRVAAHELGHSLGLSHSTDIGALMYPSYTFSGDVQLAQDDIDGIQAIYGRSQNPVQPIGPQTPKACDSKLTFDAITTIRGEVMFFKDRFYMRTNPFYPEVELNFISVFWPQLPNGLEAAYEFADRDEVRFFKGNKYWAVQGQNVLHGYPKDIYSSFGFPRTVKHIDAALSEENTGKTYFFVANKYWRYDEYKRSMDPGYPKMIAHDFPGIGHKVDAVFMKDGFFYFFHGTRQYKFDPKTKRILTLQKANSWFNCRKN

SEQ ID NO: 2026 - protein, 450 aa, Artificial Sequence
  MMP-1 variant N152M
FPATLETQEQDVDLVQKYLEKYYNLKNDGRQVEKRRNSGPVVEKLKQMQEFFGLKVTGKPDAETLKVMKQPRCGVPDVAQFVLTEGNPRWEQTHLTYRIENYTPDLPRADVDHAIEKAFQLWSNVTPLTFTKVSEGQADIMISFVRGDHRDMSPFDGPGGNLAHAFQPGPGIGGDAHFDEDERWTNNFREYNLHRVAAHELGHSLGLSHSTDIGALMYPSYTFSGDVQLAQDDIDGIQAIYGRSQNPVQPIGPQTPKACDSKLTFDAITTIRGEVMFFKDRFYMRTNPFYPEVELNFISVFWPQLPNGLEAAYEFADRDEVRFFKGNKYWAVQGQNVLHGYPKDIYSSFGFPRTVKHIDAALSEENTGKTYFFVANKYWRYDEYKRSMDPGYPKMIAHDFPGIGHKVDAVFMKDGFFYFFHGTRQYKFDPKTKRILTLQKANSWFNCRKN

SEQ ID NO: 2027 - protein, 450 aa, Artificial Sequence
  MMP-1 variant N152W
FPATLETQEQDVDLVQKYLEKYYNLKNDGRQVEKRRNSGPVVEKLKQMQEFFGLKVTGKPDAETLKVMKQPRCGVPDVAQFVLTEGNPRWEQTHLTYRIENYTPDLPRADVDHAIEKAFQLWSNVTPLTFTKVSEGQADIMISFVRGDHRDWSPFDGPGGNLAHAFQPGPGIGGDAHFDEDERWTNNFREYNLHRVAAHELGHSLGLSHSTDIGALMYPSYTFSGDVQLAQDDIDGIQAIYGRSQNPVQPIGPQTPKACDSKLTFDAITTIRGEVMFFKDRFYMRTNPFYPEVELNFISVFWPQLPNGLEAAYEFADRDEVRFFKGNKYWAVQGQNVLHGYPKDIYSSFGFPRTVKHIDAALSEENTGKTYFFVANKYWRYDEYKRSMDPGYPKMIAHDFPGIGHKVDAVFMKDGFFYFFHGTRQYKFDPKTKRILTLQKANSWFNCRKN

SEQ ID NO: 2028 - protein, 450 aa, Artificial Sequence
  MMP-1 variant N152I
FPATLETQEQDVDLVQKYLEKYYNLKNDGRQVEKRRNSGPVVEKLKQMQEFFGLKVTGKPDAETLKVMKQPRCGVPDVAQFVLTEGNPRWEQTHLTYRIENYTPDLPRADVDHAIEKAFQLWSNVTPLTFTKVSEGQADIMISFVRGDHRDISPFDGPGGNLAHAFQPGPGIGGDAHFDEDERWTNNFREYNLHRVAAHELGHSLGLSHSTDIGALMYPSYTFSGDVQLAQDDIDGIQAIYGRSQNPVQPIGPQTPKACDSKLTFDAITTIRGEVMFFKDRFYMRTNPFYPEVELNFISVFWPQLPNGLEAAYEFADRDEVRFFKGNKYWAVQGQNVLHGYPKDIYSSFGFPRTVKHIDAALSEENTGKTYFFVANKYWRYDEYKRSMDPGYPKMIAHDFPGIGHKVDAVFMKDGFFYFFHGTRQYKFDPKTKRILTLQKANSWFNCRKN

SEQ ID NO: 2029 - protein, 450 aa, Artificial Sequence
  MMP-1 variant N152V
FPATLETQEQDVDLVQKYLEKYYNLKNDGRQVEKRRNSGPVVEKLKQMQEFFGLKVTGKPDAETLKVMKQPRCGVPDVAQFVLTEGNPRWEQTHLTYRIENYTPDLPRADVDHAIEKAFQLWSNVTPLTFTKVSEGQADIMISFVRGDHRDVSPFDGPGGNLAHAFQPGPGIGGDAHFDEDERWTNNFREYNLHRVAAHELGHSLGLSHSTDIGALMYPSYTFSGDVQLAQDDIDGIQAIYGRSQNPVQPIGPQTPKACDSKLTFDAITTIRGEVMFFKDRFYMRTNPFYPEVELNFISVFWPQLPNGLEAAYEFADRDEVRFFKGNKYWAVQGQNVLHGYPKDIYSSFGFPRTVKHIDAALSEENTGKTYFFVANKYWRYDEYKRSMDPGYPKMIAHDFPGIGHKVDAVFMKDGFFYFFHGTRQYKFDPKTKRILTLQKANSWFNCRKN

SEQ ID NO: 2030 - protein, 450 aa, Artificial Sequence
  MMP-1 variant N152L
FPATLETQEQDVDLVQKYLEKYYNLKNDGRQVEKRRNSGPVVEKLKQMQEFFGLKVTGKPDAETLKVMKQPRCGVPDVAQFVLTEGNPRWEQTHLTYRIENYTPDLPRADVDHAIEKAFQLWSNVTPLTFTKVSEGQADIMISFVRGDHRDLSPFDGPGGNLAHAFQPGPGIGGDAHFDEDERWTNNFREYNLHRVAAHELGHSLGLSHSTDIGALMYPSYTFSGDVQLAQDDIDGIQAIYGRSQNPVQPIGPQTPKACDSKLTFDAITTIRGEVMFFKDRFYMRTNPFYPEVELNFISVFWPQLPNGLEAAYEFADRDEVRFFKGNKYWAVQGQNVLHGYPKDIYSSFGFPRTVKHIDAALSEENTGKTYFFVANKYWRYDEYKRSMDPGYPKMIAHDFPGIGHKVDAVFMKDGFFYFFHGTRQYKFDPKTKRILTLQKANSWFNCRKN

SEQ ID NO: 2031 - protein, 450 aa, Artificial Sequence
  MMP-1 variant N152A
FPATLETQEQDVDLVQKYLEKYYNLKNDGRQVEKRRNSGPVVEKLKQMQEFFGLKVTGKPDAETLKVMKQPRCGVPDVAQFVLTEGNPRWEQTHLTYRIENYTPDLPRADVDHAIEKAFQLWSNVTPLTFTKVSEGQADIMISFVRGDHRDASPFDGPGGNLAHAFQPGPGIGGDAHFDEDERWTNNFREYNLHRVAAHELGHSLGLSHSTDIGALMYPSYTFSGDVQLAQDDIDGIQAIYGRSQNPVQPIGPQTPKACDSKLTFDAITTIRGEVMFFKDRFYMRTNPFYPEVELNFISVFWPQLPNGLEAAYEFADRDEVRFFKGNKYWAVQGQNVLHGYPKDIYSSFGFPRTVKHIDAALSEENTGKTYFFVANKYWRYDEYKRSMDPGYPKMIAHDFPGIGHKVDAVFMKDGFFYFFHGTRQYKFDPKTKRILTLQKANSWFNCRKN

SEQ ID NO: 2032 - protein, 450 aa, Artificial Sequence
  MMP-1 variant N152P
FPATLETQEQDVDLVQKYLEKYYNLKNDGRQVEKRRNSGPVVEKLKQMQEFFGLKVTGKPDAETLKVMKQPRCGVPDVAQFVLTEGNPRWEQTHLTYRIENYTPDLPRADVDHAIEKAFQLWSNVTPLTFTKVSEGQADIMISFVRGDHRDPSPFDGPGGNLAHAFQPGPGIGGDAHFDEDERWTNNFREYNLHRVAAHELGHSLGLSHSTDIGALMYPSYTFSGDVQLAQDDIDGIQAIYGRSQNPVQPIGPQTPKACDSKLTFDAITTIRGEVMFFKDRFYMRTNPFYPEVELNFISVFWPQLPNGLEAAYEFADRDEVRFFKGNKYWAVQGQNVLHGYPKDIYSSFGFPRTVKHIDAALSEENTGKTYFFVANKYWRYDEYKRSMDPGYPKMIAHDFPGIGHKVDAVFMKDGFFYFFHGTRQYKFDPKTKRILTLQKANSWFNCRKN

SEQ ID NO: 2033 - protein, 450 aa, Artificial Sequence
  MMP-1 variant P154D
FPATLETQEQDVDLVQKYLEKYYNLKNDGRQVEKRRNSGPVVEKLKQMQEFFGLKVTGKPDAETLKVMKQPRCGVPDVAQFVLTEGNPRWEQTHLTYRIENYTPDLPRADVDHAIEKAFQLWSNVTPLTFTKVSEGQADIMISFVRGDHRDNSDFDGPGGNLAHAFQPGPGIGGDAHFDEDERWTNNFREYNLHRVAAHELGHSLGLSHSTDIGALMYPSYTFSGDVQLAQDDIDGIQAIYGRSQNPVQPIGPQTPKACDSKLTFDAITTIRGEVMFFKDRFYMRTNPFYPEVELNFISVFWPQLPNGLEAAYEFADRDEVRFFKGNKYWAVQGQNVLHGYPKDIYSSFGFPRTVKHIDAALSEENTGKTYFFVANKYWRYDEYKRSMDPGYPKMIAHDFPGIGHKVDAVFMKDGFFYFFHGTRQYKFDPKTKRILTLQKANSWFNCRKN

SEQ ID NO: 2034 - protein, 450 aa, Artificial Sequence
  MMP-1 variant P154E
FPATLETQEQDVDLVQKYLEKYYNLKNDGRQVEKRRNSGPVVEKLKQMQEFFGLKVTGKPDAETLKVMKQPRCGVPDVAQFVLTEGNPRWEQTHLTYRIENYTPDLPRADVDHAIEKAFQLWSNVTPLTFTKVSEGQADIMISFVRGDHRDNSEFDGPGGNLAHAFQPGPGIGGDAHFDEDERWTNNFREYNLHRVAAHELGHSLGLSHSTDIGALMYPSYTFSGDVQLAQDDIDGIQAIYGRSQNPVQPIGPQTPKACDSKLTFDAITTIRGEVMFFKDRFYMRTNPFYPEVELNFISVFWPQLPNGLEAAYEFADRDEVRFFKGNKYWAVQGQNVLHGYPKDIYSSFGFPRTVKHIDAALSEENTGKTYFFVANKYWRYDEYKRSMDPGYPKMIAHDFPGIGHKVDAVFMKDGFFYFFHGTRQYKFDPKTKRILTLQKANSWFNCRKN

SEQ ID NO: 2035 - protein, 450 aa, Artificial Sequence
  MMP-1 variant P154H
FPATLETQEQDVDLVQKYLEKYYNLKNDGRQVEKRRNSGPVVEKLKQMQEFFGLKVTGKPDAETLKVMKQPRCGVPDVAQFVLTEGNPRWEQTHLTYRIENYTPDLPRADVDHAIEKAFQLWSNVTPLTFTKVSEGQADIMISFVRGDHRDNSHFDGPGGNLAHAFQPGPGIGGDAHFDEDERWTNNFREYNLHRVAAHELGHSLGLSHSTDIGALMYPSYTFSGDVQLAQDDIDGIQAIYGRSQNPVQPIGPQTPKACDSKLTFDAITTIRGEVMFFKDRFYMRTNPFYPEVELNFISVFWPQLPNGLEAAYEFADRDEVRFFKGNKYWAVQGQNVLHGYPKDIYSSFGFPRTVKHIDAALSEENTGKTYFFVANKYWRYDEYKRSMDPGYPKMIAHDFPGIGHKVDAVFMKDGFFYFFHGTRQYKFDPKTKRILTLQKANSWFNCRKN

SEQ ID NO: 2036 - protein, 450 aa, Artificial Sequence
  MMP-1 variant P154K
FPATLETQEQDVDLVQKYLEKYYNLKNDGRQVEKRRNSGPVVEKLKQMQEFFGLKVTGKPDAETLKVMKQPRCGVPDVAQFVLTEGNPRWEQTHLTYRIENYTPDLPRADVDHAIEKAFQLWSNVTPLTFTKVSEGQADIMISFVRGDHRDNSKFDGPGGNLAHAFQPGPGIGGDAHFDEDERWTNNFREYNLHRVAAHELGHSLGLSHSTDIGALMYPSYTFSGDVQLAQDDIDGIQAIYGRSQNPVQPIGPQTPKACDSKLTFDAITTIRGEVMFFKDRFYMRTNPFYPEVELNFISVFWPQLPNGLEAAYEFADRDEVRFFKGNKYWAVQGQNVLHGYPKDIYSSFGFPRTVKHIDAALSEENTGKTYFFVANKYWRYDEYKRSMDPGYPKMIAHDFPGIGHKVDAVFMKDGFFYFFHGTRQYKFDPKTKRILTLQKANSWFNCRKN

SEQ ID NO: 2037 - protein, 450 aa, Artificial Sequence
  MMP-1 variant P154R
FPATLETQEQDVDLVQKYLEKYYNLKNDGRQVEKRRNSGPVVEKLKQMQEFFGLKVTGKPDAETLKVMKQPRCGVPDVAQFVLTEGNPRWEQTHLTYRIENYTPDLPRADVDHAIEKAFQLWSNVTPLTFTKVSEGQADIMISFVRGDHRDNSRFDGPGGNLAHAFQPGPGIGGDAHFDEDERWTNNFREYNLHRVAAHELGHSLGLSHSTDIGALMYPSYTFSGDVQLAQDDIDGIQAIYGRSQNPVQPIGPQTPKACDSKLTFDAITTIRGEVMFFKDRFYMRTNPFYPEVELNFISVFWPQLPNGLEAAYEFADRDEVRFFKGNKYWAVQGQNVLHGYPKDIYSSFGFPRTVKHIDAALSEENTGKTYFFVANKYWRYDEYKRSMDPGYPKMIAHDFPGIGHKVDAVFMKDGFFYFFHGTRQYKFDPKTKRILTLQKANSWFNCRKN

SEQ ID NO: 2038 - protein, 450 aa, Artificial Sequence
  MMP-1 variant P154C
FPATLETQEQDVDLVQKYLEKYYNLKNDGRQVEKRRNSGPVVEKLKQMQEFFGLKVTGKPDAETLKVMKQPRCGVPDVAQFVLTEGNPRWEQTHLTYRIENYTPDLPRADVDHAIEKAFQLWSNVTPLTFTKVSEGQADIMISFVRGDHRDNSCFDGPGGNLAHAFQPGPGIGGDAHFDEDERWTNNFREYNLHRVAAHELGHSLGLSHSTDIGALMYPSYTFSGDVQLAQDDIDGIQAIYGRSQNPVQPIGPQTPKACDSKLTFDAITTIRGEVMFFKDRFYMRTNPFYPEVELNFISVFWPQLPNGLEAAYEFADRDEVRFFKGNKYWAVQGQNVLHGYPKDIYSSFGFPRTVKHIDAALSEENTGKTYFFVANKYWRYDEYKRSMDPGYPKMIAHDFPGIGHKVDAVFMKDGFFYFFHGTRQYKFDPKTKRILTLQKANSWFNCRKN

SEQ ID NO: 2039 - protein, 450 aa, Artificial Sequence
  MMP-1 variant P154N
FPATLETQEQDVDLVQKYLEKYYNLKNDGRQVEKRRNSGPVVEKLKQMQEFFGLKVTGKPDAETLKVMKQPRCGVPDVAQFVLTEGNPRWEQTHLTYRIENYTPDLPRADVDHAIEKAFQLWSNVTPLTFTKVSEGQADIMISFVRGDHRDNSNFDGPGGNLAHAFQPGPGIGGDAHFDEDERWTNNFREYNLHRVAAHELGHSLGLSHSTDIGALMYPSYTFSGDVQLAQDDIDGIQAIYGRSQNPVQPIGPQTPKACDSKLTFDAITTIRGEVMFFKDRFYMRTNPFYPEVELNFISVFWPQLPNGLEAAYEFADRDEVRFFKGNKYWAVQGQNVLHGYPKDIYSSFGFPRTVKHIDAALSEENTGKTYFFVANKYWRYDEYKRSMDPGYPKMIAHDFPGIGHKVDAVFMKDGFFYFFHGTRQYKFDPKTKRILTLQKANSWFNCRKN

SEQ ID NO: 2040 - protein, 450 aa, Artificial Sequence
  MMP-1 variant P154Q
FPATLETQEQDVDLVQKYLEKYYNLKNDGRQVEKRRNSGPVVEKLKQMQEFFGLKVTGKPDAETLKVMKQPRCGVPDVAQFVLTEGNPRWEQTHLTYRIENYTPDLPRADVDHAIEKAFQLWSNVTPLTFTKVSEGQADIMISFVRGDHRDNSQFDGPGGNLAHAFQPGPGIGGDAHFDEDERWTNNFREYNLHRVAAHELGHSLGLSHSTDIGALMYPSYTFSGDVQLAQDDIDGIQAIYGRSQNPVQPIGPQTPKACDSKLTFDAITTIRGEVMFFKDRFYMRTNPFYPEVELNFISVFWPQLPNGLEAAYEFADRDEVRFFKGNKYWAVQGQNVLHGYPKDIYSSFGFPRTVKHIDAALSEENTGKTYFFVANKYWRYDEYKRSMDPGYPKMIAHDFPGIGHKVDAVFMKDGFFYFFHGTRQYKFDPKTKRILTLQKANSWFNCRKN

SEQ ID NO: 2041 - protein, 450 aa, Artificial Sequence
  MMP-1 variant P154T
FPATLETQEQDVDLVQKYLEKYYNLKNDGRQVEKRRNSGPVVEKLKQMQEFFGLKVTGKPDAETLKVMKQPRCGVPDVAQFVLTEGNPRWEQTHLTYRIENYTPDLPRADVDHAIEKAFQLWSNVTPLTFTKVSEGQADIMISFVRGDHRDNSTFDGPGGNLAHAFQPGPGIGGDAHFDEDERWTNNFREYNLHRVAAHELGHSLGLSHSTDIGALMYPSYTFSGDVQLAQDDIDGIQAIYGRSQNPVQPIGPQTPKACDSKLTFDAITTIRGEVMFFKDRFYMRTNPFYPEVELNFISVFWPQLPNGLEAAYEFADRDEVRFFKGNKYWAVQGQNVLHGYPKDIYSSFGFPRTVKHIDAALSEENTGKTYFFVANKYWRYDEYKRSMDPGYPKMIAHDFPGIGHKVDAVFMKDGFFYFFHGTRQYKFDPKTKRILTLQKANSWFNCRKN

SEQ ID NO: 2042 - protein, 450 aa, Artificial Sequence
  MMP-1 variant P154Y
FPATLETQEQDVDLVQKYLEKYYNLKNDGRQVEKRRNSGPVVEKLKQMQEFFGLKVTGKPDAETLKVMKQPRCGVPDVAQFVLTEGNPRWEQTHLTYRIENYTPDLPRADVDHAIEKAFQLWSNVTPLTFTKVSEGQADIMISFVRGDHRDNSYFDGPGGNLAHAFQPGPGIGGDAHFDEDERWTNNFREYNLHRVAAHELGHSLGLSHSTDIGALMYPSYTFSGDVQLAQDDIDGIQAIYGRSQNPVQPIGPQTPKACDSKLTFDAITTIRGEVMFFKDRFYMRTNPFYPEVELNFISVFWPQLPNGLEAAYEFADRDEVRFFKGNKYWAVQGQNVLHGYPKDIYSSFGFPRTVKHIDAALSEENTGKTYFFVANKYWRYDEYKRSMDPGYPKMIAHDFPGIGHKVDAVFMKDGFFYFFHGTRQYKFDPKTKRILTLQKANSWFNCRKN

SEQ ID NO: 2043 - protein, 450 aa, Artificial Sequence
  MMP-1 variant P154S
FPATLETQEQDVDLVQKYLEKYYNLKNDGRQVEKRRNSGPVVEKLKQMQEFFGLKVTGKPDAETLKVMKQPRCGVPDVAQFVLTEGNPRWEQTHLTYRIENYTPDLPRADVDHAIEKAFQLWSNVTPLTFTKVSEGQADIMISFVRGDHRDNSSFDGPGGNLAHAFQPGPGIGGDAHFDEDERWTNNFREYNLHRVAAHELGHSLGLSHSTDIGALMYPSYTFSGDVQLAQDDIDGIQAIYGRSQNPVQPIGPQTPKACDSKLTFDAITTIRGEVMFFKDRFYMRTNPFYPEVELNFISVFWPQLPNGLEAAYEFADRDEVRFFKGNKYWAVQGQNVLHGYPKDIYSSFGFPRTVKHIDAALSEENTGKTYFFVANKYWRYDEYKRSMDPGYPKMIAHDFPGIGHKVDAVFMKDGFFYFFHGTRQYKFDPKTKRILTLQKANSWFNCRKN

SEQ ID NO: 2044 - protein, 450 aa, Artificial Sequence
  MMP-1 variant P154G
FPATLETQEQDVDLVQKYLEKYYNLKNDGRQVEKRRNSGPVVEKLKQMQEFFGLKVTGKPDAETLKVMKQPRCGVPDVAQFVLTEGNPRWEQTHLTYRIENYTPDLPRADVDHAIEKAFQLWSNVTPLTFTKVSEGQADIMISFVRGDHRDNSGFDGPGGNLAHAFQPGPGIGGDAHFDEDERWTNNFREYNLHRVAAHELGHSLGLSHSTDIGALMYPSYTFSGDVQLAQDDIDGIQAIYGRSQNPVQPIGPQTPKACDSKLTFDAITTIRGEVMFFKDRFYMRTNPFYPEVELNFISVFWPQLPNGLEAAYEFADRDEVRFFKGNKYWAVQGQNVLHGYPKDIYSSFGFPRTVKHIDAALSEENTGKTYFFVANKYWRYDEYKRSMDPGYPKMIAHDFPGIGHKVDAVFMKDGFFYFFHGTRQYKFDPKTKRILTLQKANSWFNCRKN

SEQ ID NO: 2045 - protein, 450 aa, Artificial Sequence
  MMP-1 variant P154F
FPATLETQEQDVDLVQKYLEKYYNLKNDGRQVEKRRNSGPVVEKLKQMQEFFGLKVTGKPDAETLKVMKQPRCGVPDVAQFVLTEGNPRWEQTHLTYRIENYTPDLPRADVDHAIEKAFQLWSNVTPLTFTKVSEGQADIMISFVRGDHRDNSFFDGPGGNLAHAFQPGPGIGGDAHFDEDERWTNNFREYNLHRVAAHELGHSLGLSHSTDIGALMYPSYTFSGDVQLAQDDIDGIQAIYGRSQNPVQPIGPQTPKACDSKLTFDAITTIRGEVMFFKDRFYMRTNPFYPEVELNFISVFWPQLPNGLEAAYEFADRDEVRFFKGNKYWAVQGQNVLHGYPKDIYSSFGFPRTVKHIDAALSEENTGKTYFFVANKYWRYDEYKRSMDPGYPKMIAHDFPGIGHKVDAVFMKDGFFYFFHGTRQYKFDPKTKRILTLQKANSWFNCRKN

SEQ ID NO: 2046 - protein, 450 aa, Artificial Sequence
  MMP-1 variant P154M
FPATLETQEQDVDLVQKYLEKYYNLKNDGRQVEKRRNSGPVVEKLKQMQEFFGLKVTGKPDAETLKVMKQPRCGVPDVAQFVLTEGNPRWEQTHLTYRIENYTPDLPRADVDHAIEKAFQLWSNVTPLTFTKVSEGQADIMISFVRGDHRDNSMFDGPGGNLAHAFQPGPGIGGDAHFDEDERWTNNFREYNLHRVAAHELGHSLGLSHSTDIGALMYPSYTFSGDVQLAQDDIDGIQAIYGRSQNPVQPIGPQTPKACDSKLTFDAITTIRGEVMFFKDRFYMRTNPFYPEVELNFISVFWPQLPNGLEAAYEFADRDEVRFFKGNKYWAVQGQNVLHGYPKDIYSSFGFPRTVKHIDAALSEENTGKTYFFVANKYWRYDEYKRSMDPGYPKMIAHDFPGIGHKVDAVFMKDGFFYFFHGTRQYKFDPKTKRILTLQKANSWFNCRKN

SEQ ID NO: 2047 - protein, 450 aa, Artificial Sequence
  MMP-1 variant P154W
FPATLETQEQDVDLVQKYLEKYYNLKNDGRQVEKRRNSGPVVEKLKQMQEFFGLKVTGKPDAETLKVMKQPRCGVPDVAQFVLTEGNPRWEQTHLTYRIENYTPDLPRADVDHAIEKAFQLWSNVTPLTFTKVSEGQADIMISFVRGDHRDNSWFDGPGGNLAHAFQPGPGIGGDAHFDEDERWTNNFREYNLHRVAAHELGHSLGLSHSTDIGALMYPSYTFSGDVQLAQDDIDGIQAIYGRSQNPVQPIGPQTPKACDSKLTFDAITTIRGEVMFFKDRFYMRTNPFYPEVELNFISVFWPQLPNGLEAAYEFADRDEVRFFKGNKYWAVQGQNVLHGYPKDIYSSFGFPRTVKHIDAALSEENTGKTYFFVANKYWRYDEYKRSMDPGYPKMIAHDFPGIGHKVDAVFMKDGFFYFFHGTRQYKFDPKTKRILTLQKANSWFNCRKN

SEQ ID NO: 2048 - protein, 450 aa, Artificial Sequence
  MMP-1 variant P154I
FPATLETQEQDVDLVQKYLEKYYNLKNDGRQVEKRRNSGPVVEKLKQMQEFFGLKVTGKPDAETLKVMKQPRCGVPDVAQFVLTEGNPRWEQTHLTYRIENYTPDLPRADVDHAIEKAFQLWSNVTPLTFTKVSEGQADIMISFVRGDHRDNSIFDGPGGNLAHAFQPGPGIGGDAHFDEDERWTNNFREYNLHRVAAHELGHSLGLSHSTDIGALMYPSYTFSGDVQLAQDDIDGIQAIYGRSQNPVQPIGPQTPKACDSKLTFDAITTIRGEVMFFKDRFYMRTNPFYPEVELNFISVFWPQLPNGLEAAYEFADRDEVRFFKGNKYWAVQGQNVLHGYPKDIYSSFGFPRTVKHIDAALSEENTGKTYFFVANKYWRYDEYKRSMDPGYPKMIAHDFPGIGHKVDAVFMKDGFFYFFHGTRQYKFDPKTKRILTLQKANSWFNCRKN

SEQ ID NO: 2049 - protein, 450 aa, Artificial Sequence
  MMP-1 variant P154V
FPATLETQEQDVDLVQKYLEKYYNLKNDGRQVEKRRNSGPVVEKLKQMQEFFGLKVTGKPDAETLKVMKQPRCGVPDVAQFVLTEGNPRWEQTHLTYRIENYTPDLPRADVDHAIEKAFQLWSNVTPLTFTKVSEGQADIMISFVRGDHRDNSVFDGPGGNLAHAFQPGPGIGGDAHFDEDERWTNNFREYNLHRVAAHELGHSLGLSHSTDIGALMYPSYTFSGDVQLAQDDIDGIQAIYGRSQNPVQPIGPQTPKACDSKLTFDAITTIRGEVMFFKDRFYMRTNPFYPEVELNFISVFWPQLPNGLEAAYEFADRDEVRFFKGNKYWAVQGQNVLHGYPKDIYSSFGFPRTVKHIDAALSEENTGKTYFFVANKYWRYDEYKRSMDPGYPKMIAHDFPGIGHKVDAVFMKDGFFYFFHGTRQYKFDPKTKRILTLQKANSWFNCRKN

SEQ ID NO: 2050 - protein, 450 aa, Artificial Sequence
  MMP-1 variant P154L
FPATLETQEQDVDLVQKYLEKYYNLKNDGRQVEKRRNSGPVVEKLKQMQEFFGLKVTGKPDAETLKVMKQPRCGVPDVAQFVLTEGNPRWEQTHLTYRIENYTPDLPRADVDHAIEKAFQLWSNVTPLTFTKVSEGQADIMISFVRGDHRDNSLFDGPGGNLAHAFQPGPGIGGDAHFDEDERWTNNFREYNLHRVAAHELGHSLGLSHSTDIGALMYPSYTFSGDVQLAQDDIDGIQAIYGRSQNPVQPIGPQTPKACDSKLTFDAITTIRGEVMFFKDRFYMRTNPFYPEVELNFISVFWPQLPNGLEAAYEFADRDEVRFFKGNKYWAVQGQNVLHGYPKDIYSSFGFPRTVKHIDAALSEENTGKTYFFVANKYWRYDEYKRSMDPGYPKMIAHDFPGIGHKVDAVFMKDGFFYFFHGTRQYKFDPKTKRILTLQKANSWFNCRKN

SEQ ID NO: 2051 - protein, 450 aa, Artificial Sequence
  MMP-1 variant P154A
FPATLETQEQDVDLVQKYLEKYYNLKNDGRQVEKRRNSGPVVEKLKQMQEFFGLKVTGKPDAETLKVMKQPRCGVPDVAQFVLTEGNPRWEQTHLTYRIENYTPDLPRADVDHAIEKAFQLWSNVTPLTFTKVSEGQADIMISFVRGDHRDNSAFDGPGGNLAHAFQPGPGIGGDAHFDEDERWTNNFREYNLHRVAAHELGHSLGLSHSTDIGALMYPSYTFSGDVQLAQDDIDGIQAIYGRSQNPVQPIGPQTPKACDSKLTFDAITTIRGEVMFFKDRFYMRTNPFYPEVELNFISVFWPQLPNGLEAAYEFADRDEVRFFKGNKYWAVQGQNVLHGYPKDIYSSFGFPRTVKHIDAALSEENTGKTYFFVANKYWRYDEYKRSMDPGYPKMIAHDFPGIGHKVDAVFMKDGFFYFFHGTRQYKFDPKTKRILTLQKANSWFNCRKN

SEQ ID NO: 2052 - protein, 450 aa, Artificial Sequence
  MMP-1 variant G157D
FPATLETQEQDVDLVQKYLEKYYNLKNDGRQVEKRRNSGPVVEKLKQMQEFFGLKVTGKPDAETLKVMKQPRCGVPDVAQFVLTEGNPRWEQTHLTYRIENYTPDLPRADVDHAIEKAFQLWSNVTPLTFTKVSEGQADIMISFVRGDHRDNSPFDDPGGNLAHAFQPGPGIGGDAHFDEDERWTNNFREYNLHRVAAHELGHSLGLSHSTDIGALMYPSYTFSGDVQLAQDDIDGIQAIYGRSQNPVQPIGPQTPKACDSKLTFDAITTIRGEVMFFKDRFYMRTNPFYPEVELNFISVFWPQLPNGLEAAYEFADRDEVRFFKGNKYWAVQGQNVLHGYPKDIYSSFGFPRTVKHIDAALSEENTGKTYFFVANKYWRYDEYKRSMDPGYPKMIAHDFPGIGHKVDAVFMKDGFFYFFHGTRQYKFDPKTKRILTLQKANSWFNCRKN

SEQ ID NO: 2053 - protein, 450 aa, Artificial Sequence
  MMP-1 variant G157E
FPATLETQEQDVDLVQKYLEKYYNLKNDGRQVEKRRNSGPVVEKLKQMQEFFGLKVTGKPDAETLKVMKQPRCGVPDVAQFVLTEGNPRWEQTHLTYRIENYTPDLPRADVDHAIEKAFQLWSNVTPLTFTKVSEGQADIMISFVRGDHRDNSPFDEPGGNLAHAFQPGPGIGGDAHFDEDERWTNNFREYNLHRVAAHELGHSLGLSHSTDIGALMYPSYTFSGDVQLAQDDIDGIQAIYGRSQNPVQPIGPQTPKACDSKLTFDAITTIRGEVMFFKDRFYMRTNPFYPEVELNFISVFWPQLPNGLEAAYEFADRDEVRFFKGNKYWAVQGQNVLHGYPKDIYSSFGFPRTVKHIDAALSEENTGKTYFFVANKYWRYDEYKRSMDPGYPKMIAHDFPGIGHKVDAVFMKDGFFYFFHGTRQYKFDPKTKRILTLQKANSWFNCRKN

SEQ ID NO: 2054 - protein, 450 aa, Artificial Sequence
  MMP-1 variant G157H
FPATLETQEQDVDLVQKYLEKYYNLKNDGRQVEKRRNSGPVVEKLKQMQEFFGLKVTGKPDAETLKVMKQPRCGVPDVAQFVLTEGNPRWEQTHLTYRIENYTPDLPRADVDHAIEKAFQLWSNVTPLTFTKVSEGQADIMISFVRGDHRDNSPFDHPGGNLAHAFQPGPGIGGDAHFDEDERWTNNFREYNLHRVAAHELGHSLGLSHSTDIGALMYPSYTFSGDVQLAQDDIDGIQAIYGRSQNPVQPIGPQTPKACDSKLTFDAITTIRGEVMFFKDRFYMRTNPFYPEVELNFISVFWPQLPNGLEAAYEFADRDEVRFFKGNKYWAVQGQNVLHGYPKDIYSSFGFPRTVKHIDAALSEENTGKTYFFVANKYWRYDEYKRSMDPGYPKMIAHDFPGIGHKVDAVFMKDGFFYFFHGTRQYKFDPKTKRILTLQKANSWFNCRKN

SEQ ID NO: 2055 - protein, 450 aa, Artificial Sequence
  MMP-1 variant G157K
FPATLETQEQDVDLVQKYLEKYYNLKNDGRQVEKRRNSGPVVEKLKQMQEFFGLKVTGKPDAETLKVMKQPRCGVPDVAQFVLTEGNPRWEQTHLTYRIENYTPDLPRADVDHAIEKAFQLWSNVTPLTFTKVSEGQADIMISFVRGDHRDNSPFDKPGGNLAHAFQPGPGIGGDAHFDEDERWTNNFREYNLHRVAAHELGHSLGLSHSTDIGALMYPSYTFSGDVQLAQDDIDGIQAIYGRSQNPVQPIGPQTPKACDSKLTFDAITTIRGEVMFFKDRFYMRTNPFYPEVELNFISVFWPQLPNGLEAAYEFADRDEVRFFKGNKYWAVQGQNVLHGYPKDIYSSFGFPRTVKHIDAALSEENTGKTYFFVANKYWRYDEYKRSMDPGYPKMIAHDFPGIGHKVDAVFMKDGFFYFFHGTRQYKFDPKTKRILTLQKANSWFNCRKN

SEQ ID NO: 2056 - protein, 450 aa, Artificial Sequence
  MMP-1 variant G157R
FPATLETQEQDVDLVQKYLEKYYNLKNDGRQVEKRRNSGPVVEKLKQMQEFFGLKVTGKPDAETLKVMKQPRCGVPDVAQFVLTEGNPRWEQTHLTYRIENYTPDLPRADVDHAIEKAFQLWSNVTPLTFTKVSEGQADIMISFVRGDHRDNSPFDRPGGNLAHAFQPGPGIGGDAHFDEDERWTNNFREYNLHRVAAHELGHSLGLSHSTDIGALMYPSYTFSGDVQLAQDDIDGIQAIYGRSQNPVQPIGPQTPKACDSKLTFDAITTIRGEVMFFKDRFYMRTNPFYPEVELNFISVFWPQLPNGLEAAYEFADRDEVRFFKGNKYWAVQGQNVLHGYPKDIYSSFGFPRTVKHIDAALSEENTGKTYFFVANKYWRYDEYKRSMDPGYPKMIAHDFPGIGHKVDAVFMKDGFFYFFHGTRQYKFDPKTKRILTLQKANSWFNCRKN

SEQ ID NO: 2057 - protein, 450 aa, Artificial Sequence
  MMP-1 variant G157C
FPATLETQEQDVDLVQKYLEKYYNLKNDGRQVEKRRNSGPVVEKLKQMQEFFGLKVTGKPDAETLKVMKQPRCGVPDVAQFVLTEGNPRWEQTHLTYRIENYTPDLPRADVDHAIEKAFQLWSNVTPLTFTKVSEGQADIMISFVRGDHRDNSPFDCPGGNLAHAFQPGPGIGGDAHFDEDERWTNNFREYNLHRVAAHELGHSLGLSHSTDIGALMYPSYTFSGDVQLAQDDIDGIQAIYGRSQNPVQPIGPQTPKACDSKLTFDAITTIRGEVMFFKDRFYMRTNPFYPEVELNFISVFWPQLPNGLEAAYEFADRDEVRFFKGNKYWAVQGQNVLHGYPKDIYSSFGFPRTVKHIDAALSEENTGKTYFFVANKYWRYDEYKRSMDPGYPKMIAHDFPGIGHKVDAVFMKDGFFYFFHGTRQYKFDPKTKRILTLQKANSWFNCRKN

SEQ ID NO: 2058 - protein, 450 aa, Artificial Sequence; identical to SEQ ID NO: 2
  MMP-1

SEQ ID NO: 2059 - protein, 450 aa, Artificial Sequence
  MMP-1 variant G157N
FPATLETQEQDVDLVQKYLEKYYNLKNDGRQVEKRRNSGPVVEKLKQMQEFFGLKVTGKPDAETLKVMKQPRCGVPDVAQFVLTEGNPRWEQTHLTYRIENYTPDLPRADVDHAIEKAFQLWSNVTPLTFTKVSEGQADIMISFVRGDHRDNSPFDNPGGNLAHAFQPGPGIGGDAHFDEDERWTNNFREYNLHRVAAHELGHSLGLSHSTDIGALMYPSYTFSGDVQLAQDDIDGIQAIYGRSQNPVQPIGPQTPKACDSKLTFDAITTIRGEVMFFKDRFYMRTNPFYPEVELNFISVFWPQLPNGLEAAYEFADRDEVRFFKGNKYWAVQGQNVLHGYPKDIYSSFGFPRTVKHIDAALSEENTGKTYFFVANKYWRYDEYKRSMDPGYPKMIAHDFPGIGHKVDAVFMKDGFFYFFHGTRQYKFDPKTKRILTLQKANSWFNCRKN

SEQ ID NO: 2060 - protein, 450 aa, Artificial Sequence
  MMP-1 variant G157Q
FPATLETQEQDVDLVQKYLEKYYNLKNDGRQVEKRRNSGPVVEKLKQMQEFFGLKVTGKPDAETLKVMKQPRCGVPDVAQFVLTEGNPRWEQTHLTYRIENYTPDLPRADVDHAIEKAFQLWSNVTPLTFTKVSEGQADIMISFVRGDHRDNSPFDQPGGNLAHAFQPGPGIGGDAHFDEDERWTNNFREYNLHRVAAHELGHSLGLSHSTDIGALMYPSYTFSGDVQLAQDDIDGIQAIYGRSQNPVQPIGPQTPKACDSKLTFDAITTIRGEVMFFKDRFYMRTNPFYPEVELNFISVFWPQLPNGLEAAYEFADRDEVRFFKGNKYWAVQGQNVLHGYPKDIYSSFGFPRTVKHIDAALSEENTGKTYFFVANKYWRYDEYKRSMDPGYPKMIAHDFPGIGHKVDAVFMKDGFFYFFHGTRQYKFDPKTKRILTLQKANSWFNCRKN

SEQ ID NO: 2061 - protein, 450 aa, Artificial Sequence
  MMP-1 variant G157T
FPATLETQEQDVDLVQKYLEKYYNLKNDGRQVEKRRNSGPVVEKLKQMQEFFGLKVTGKPDAETLKVMKQPRCGVPDVAQFVLTEGNPRWEQTHLTYRIENYTPDLPRADVDHAIEKAFQLWSNVTPLTFTKVSEGQADIMISFVRGDHRDNSPFDTPGGNLAHAFQPGPGIGGDAHFDEDERWTNNFREYNLHRVAAHELGHSLGLSHSTDIGALMYPSYTFSGDVQLAQDDIDGIQAIYGRSQNPVQPIGPQTPKACDSKLTFDAITTIRGEVMFFKDRFYMRTNPFYPEVELNFISVFWPQLPNGLEAAYEFADRDEVRFFKGNKYWAVQGQNVLHGYPKDIYSSFGFPRTVKHIDAALSEENTGKTYFFVANKYWRYDEYKRSMDPGYPKMIAHDFPGIGHKVDAVFMKDGFFYFFHGTRQYKFDPKTKRILTLQKANSWFNCRKN

SEQ ID NO: 2062 - protein, 450 aa, Artificial Sequence
  MMP-1 variant G157Y
FPATLETQEQDVDLVQKYLEKYYNLKNDGRQVEKRRNSGPVVEKLKQMQEFFGLKVTGKPDAETLKVMKQPRCGVPDVAQFVLTEGNPRWEQTHLTYRIENYTPDLPRADVDHAIEKAFQLWSNVTPLTFTKVSEGQADIMISFVRGDHRDNSPFDYPGGNLAHAFQPGPGIGGDAHFDEDERWTNNFREYNLHRVAAHELGHSLGLSHSTDIGALMYPSYTFSGDVQLAQDDIDGIQAIYGRSQNPVQPIGPQTPKACDSKLTFDAITTIRGEVMFFKDRFYMRTNPFYPEVELNFISVFWPQLPNGLEAAYEFADRDEVRFFKGNKYWAVQGQNVLHGYPKDIYSSFGFPRTVKHIDAALSEENTGKTYFFVANKYWRYDEYKRSMDPGYPKMIAHDFPGIGHKVDAVFMKDGFFYFFHGTRQYKFDPKTKRILTLQKANSWFNCRKN

SEQ ID NO: 2063 - protein, 450 aa, Artificial Sequence
  MMP-1 variant G157S
FPATLETQEQDVDLVQKYLEKYYNLKNDGRQVEKRRNSGPVVEKLKQMQEFFGLKVTGKPDAETLKVMKQPRCGVPDVAQFVLTEGNPRWEQTHLTYRIENYTPDLPRADVDHAIEKAFQLWSNVTPLTFTKVSEGQADIMISFVRGDHRDNSPFDSPGGNLAHAFQPGPGIGGDAHFDEDERWTNNFREYNLHRVAAHELGHSLGLSHSTDIGALMYPSYTFSGDVQLAQDDIDGIQAIYGRSQNPVQPIGPQTPKACDSKLTFDAITTIRGEVMFFKDRFYMRTNPFYPEVELNFISVFWPQLPNGLEAAYEFADRDEVRFFKGNKYWAVQGQNVLHGYPKDIYSSFGFPRTVKHIDAALSEENTGKTYFFVANKYWRYDEYKRSMDPGYPKMIAHDFPGIGHKVDAVFMKDGFFYFFHGTRQYKFDPKTKRILTLQKANSWFNCRKN

SEQ ID NO: 2064 - protein, 450 aa, Artificial Sequence
  MMP-1 variant G157F
FPATLETQEQDVDLVQKYLEKYYNLKNDGRQVEKRRNSGPVVEKLKQMQEFFGLKVTGKPDAETLKVMKQPRCGVPDVAQFVLTEGNPRWEQTHLTYRIENYTPDLPRADVDHAIEKAFQLWSNVTPLTFTKVSEGQADIMISFVRGDHRDNSPFDFPGGNLAHAFQPGPGIGGDAHFDEDERWTNNFREYNLHRVAAHELGHSLGLSHSTDIGALMYPSYTFSGDVQLAQDDIDGIQAIYGRSQNPVQPIGPQTPKACDSKLTFDAITTIRGEVMFFKDRFYMRTNPFYPEVELNFISVFWPQLPNGLEAAYEFADRDEVRFFKGNKYWAVQGQNVLHGYPKDIYSSFGFPRTVKHIDAALSEENTGKTYFFVANKYWRYDEYKRSMDPGYPKMIAHDFPGIGHKVDAVFMKDGFFYFFHGTRQYKFDPKTKRILTLQKANSWFNCRKN

SEQ ID NO: 2065 - protein, 450 aa, Artificial Sequence
  MMP-1 variant G157M
FPATLETQEQDVDLVQKYLEKYYNLKNDGRQVEKRRNSGPVVEKLKQMQEFFGLKVTGKPDAETLKVMKQPRCGVPDVAQFVLTEGNPRWEQTHLTYRIENYTPDLPRADVDHAIEKAFQLWSNVTPLTFTKVSEGQADIMISFVRGDHRDNSPFDMPGGNLAHAFQPGPGIGGDAHFDEDERWTNNFREYNLHRVAAHELGHSLGLSHSTDIGALMYPSYTFSGDVQLAQDDIDGIQAIYGRSQNPVQPIGPQTPKACDSKLTFDAITTIRGEVMFFKDRFYMRTNPFYPEVELNFISVFWPQLPNGLEAAYEFADRDEVRFFKGNKYWAVQGQNVLHGYPKDIYSSFGFPRTVKHIDAALSEENTGKTYFFVANKYWRYDEYKRSMDPGYPKMIAHDFPGIGHKVDAVFMKDGFFYFFHGTRQYKFDPKTKRILTLQKANSWFNCRKN

SEQ ID NO: 2066 - protein, 450 aa, Artificial Sequence
  MMP-1 variant G157W
FPATLETQEQDVDLVQKYLEKYYNLKNDGRQVEKRRNSGPVVEKLKQMQEFFGLKVTGKPDAETLKVMKQPRCGVPDVAQFVLTEGNPRWEQTHLTYRIENYTPDLPRADVDHAIEKAFQLWSNVTPLTFTKVSEGQADIMISFVRGDHRDNSPFDWPGGNLAHAFQPGPGIGGDAHFDEDERWTNNFREYNLHRVAAHELGHSLGLSHSTDIGALMYPSYTFSGDVQLAQDDIDGIQAIYGRSQNPVQPIGPQTPKACDSKLTFDAITTIRGEVMFFKDRFYMRTNPFYPEVELNFISVFWPQLPNGLEAAYEFADRDEVRFFKGNKYWAVQGQNVLHGYPKDIYSSFGFPRTVKHIDAALSEENTGKTYFFVANKYWRYDEYKRSMDPGYPKMIAHDFPGIGHKVDAVFMKDGFFYFFHGTRQYKFDPKTKRILTLQKANSWFNCRKN

SEQ ID NO: 2067 - protein, 450 aa, Artificial Sequence
  MMP-1 variant G157I
FPATLETQEQDVDLVQKYLEKYYNLKNDGRQVEKRRNSGPVVEKLKQMQEFFGLKVTGKPDAETLKVMKQPRCGVPDVAQFVLTEGNPRWEQTHLTYRIENYTPDLPRADVDHAIEKAFQLWSNVTPLTFTKVSEGQADIMISFVRGDHRDNSPFDIPGGNLAHAFQPGPGIGGDAHFDEDERWTNNFREYNLHRVAAHELGHSLGLSHSTDIGALMYPSYTFSGDVQLAQDDIDGIQAIYGRSQNPVQPIGPQTPKACDSKLTFDAITTIRGEVMFFKDRFYMRTNPFYPEVELNFISVFWPQLPNGLEAAYEFADRDEVRFFKGNKYWAVQGQNVLHGYPKDIYSSFGFPRTVKHIDAALSEENTGKTYFFVANKYWRYDEYKRSMDPGYPKMIAHDFPGIGHKVDAVFMKDGFFYFFHGTRQYKFDPKTKRILTLQKANSWFNCRKN

SEQ ID NO: 2068 - protein, 450 aa, Artificial Sequence
  MMP-1 variant G157V
FPATLETQEQDVDLVQKYLEKYYNLKNDGRQVEKRRNSGPVVEKLKQMQEFFGLKVTGKPDAETLKVMKQPRCGVPDVAQFVLTEGNPRWEQTHLTYRIENYTPDLPRADVDHAIEKAFQLWSNVTPLTFTKVSEGQADIMISFVRGDHRDNSPFDVPGGNLAHAFQPGPGIGGDAHFDEDERWTNNFREYNLHRVAAHELGHSLGLSHSTDIGALMYPSYTFSGDVQLAQDDIDGIQAIYGRSQNPVQPIGPQTPKACDSKLTFDAITTIRGEVMFFKDRFYMRTNPFYPEVELNFISVFWPQLPNGLEAAYEFADRDEVRFFKGNKYWAVQGQNVLHGYPKDIYSSFGFPRTVKHIDAALSEENTGKTYFFVANKYWRYDEYKRSMDPGYPKMIAHDFPGIGHKVDAVFMKDGFFYFFHGTRQYKFDPKTKRILTLQKANSWFNCRKN

SEQ ID NO: 2069 - protein, 450 aa, Artificial Sequence
  MMP-1 variant G157L
FPATLETQEQDVDLVQKYLEKYYNLKNDGRQVEKRRNSGPVVEKLKQMQEFFGLKVTGKPDAETLKVMKQPRCGVPDVAQFVLTEGNPRWEQTHLTYRIENYTPDLPRADVDHAIEKAFQLWSNVTPLTFTKVSEGQADIMISFVRGDHRDNSPFDLPGGNLAHAFQPGPGIGGDAHFDEDERWTNNFREYNLHRVAAHELGHSLGLSHSTDIGALMYPSYTFSGDVQLAQDDIDGIQAIYGRSQNPVQPIGPQTPKACDSKLTFDAITTIRGEVMFFKDRFYMRTNPFYPEVELNFISVFWPQLPNGLEAAYEFADRDEVRFFKGNKYWAVQGQNVLHGYPKDIYSSFGFPRTVKHIDAALSEENTGKTYFFVANKYWRYDEYKRSMDPGYPKMIAHDFPGIGHKVDAVFMKDGFFYFFHGTRQYKFDPKTKRILTLQKANSWFNCRKN

SEQ ID NO: 2070 - protein, 450 aa, Artificial Sequence
  MMP-1 variant G157A
FPATLETQEQDVDLVQKYLEKYYNLKNDGRQVEKRRNSGPVVEKLKQMQEFFGLKVTGKPDAETLKVMKQPRCGVPDVAQFVLTEGNPRWEQTHLTYRIENYTPDLPRADVDHAIEKAFQLWSNVTPLTFTKVSEGQADIMISFVRGDHRDNSPFDAPGGNLAHAFQPGPGIGGDAHFDEDERWTNNFREYNLHRVAAHELGHSLGLSHSTDIGALMYPSYTFSGDVQLAQDDIDGIQAIYGRSQNPVQPIGPQTPKACDSKLTFDAITTIRGEVMFFKDRFYMRTNPFYPEVELNFISVFWPQLPNGLEAAYEFADRDEVRFFKGNKYWAVQGQNVLHGYPKDIYSSFGFPRTVKHIDAALSEENTGKTYFFVANKYWRYDEYKRSMDPGYPKMIAHDFPGIGHKVDAVFMKDGFFYFFHGTRQYKFDPKTKRILTLQKANSWFNCRKN

SEQ ID NO: 2071 - protein, 450 aa, Artificial Sequence
  MMP-1 variant G157P
FPATLETQEQDVDLVQKYLEKYYNLKNDGRQVEKRRNSGPVVEKLKQMQEFFGLKVTGKPDAETLKVMKQPRCGVPDVAQFVLTEGNPRWEQTHLTYRIENYTPDLPRADVDHAIEKAFQLWSNVTPLTFTKVSEGQADIMISFVRGDHRDNSPFDPPGGNLAHAFQPGPGIGGDAHFDEDERWTNNFREYNLHRVAAHELGHSLGLSHSTDIGALMYPSYTFSGDVQLAQDDIDGIQAIYGRSQNPVQPIGPQTPKACDSKLTFDAITTIRGEVMFFKDRFYMRTNPFYPEVELNFISVFWPQLPNGLEAAYEFADRDEVRFFKGNKYWAVQGQNVLHGYPKDIYSSFGFPRTVKHIDAALSEENTGKTYFFVANKYWRYDEYKRSMDPGYPKMIAHDFPGIGHKVDAVFMKDGFFYFFHGTRQYKFDPKTKRILTLQKANSWFNCRKN

SEQ ID NO: 2072 - protein, 450 aa, Artificial Sequence
  MMP-1 variant P158D
FPATLETQEQDVDLVQKYLEKYYNLKNDGRQVEKRRNSGPVVEKLKQMQEFFGLKVTGKPDAETLKVMKQPRCGVPDVAQFVLTEGNPRWEQTHLTYRIENYTPDLPRADVDHAIEKAFQLWSNVTPLTFTKVSEGQADIMISFVRGDHRDNSPFDGDGGNLAHAFQPGPGIGGDAHFDEDERWTNNFREYNLHRVAAHELGHSLGLSHSTDIGALMYPSYTFSGDVQLAQDDIDGIQAIYGRSQNPVQPIGPQTPKACDSKLTFDAITTIRGEVMFFKDRFYMRTNPFYPEVELNFISVFWPQLPNGLEAAYEFADRDEVRFFKGNKYWAVQGQNVLHGYPKDIYSSFGFPRTVKHIDAALSEENTGKTYFFVANKYWRYDEYKRSMDPGYPKMIAHDFPGIGHKVDAVFMKDGFFYFFHGTRQYKFDPKTKRILTLQKANSWFNCRKN

SEQ ID NO: 2073 - protein, 450 aa, Artificial Sequence
  MMP-1 variant P158E
FPATLETQEQDVDLVQKYLEKYYNLKNDGRQVEKRRNSGPVVEKLKQMQEFFGLKVTGKPDAETLKVMKQPRCGVPDVAQFVLTEGNPRWEQTHLTYRIENYTPDLPRADVDHAIEKAFQLWSNVTPLTFTKVSEGQADIMISFVRGDHRDNSPFDGEGGNLAHAFQPGPGIGGDAHFDEDERWTNNFREYNLHRVAAHELGHSLGLSHSTDIGALMYPSYTFSGDVQLAQDDIDGIQAIYGRSQNPVQPIGPQTPKACDSKLTFDAITTIRGEVMFFKDRFYMRTNPFYPEVELNFISVFWPQLPNGLEAAYEFADRDEVRFFKGNKYWAVQGQNVLHGYPKDIYSSFGFPRTVKHIDAALSEENTGKTYFFVANKYWRYDEYKRSMDPGYPKMIAHDFPGIGHKVDAVFMKDGFFYFFHGTRQYKFDPKTKRILTLQKANSWFNCRKN

SEQ ID NO: 2074 - protein, 450 aa, Artificial Sequence
  MMP-1 variant P158H
FPATLETQEQDVDLVQKYLEKYYNLKNDGRQVEKRRNSGPVVEKLKQMQEFFGLKVTGKPDAETLKVMKQPRCGVPDVAQFVLTEGNPRWEQTHLTYRIENYTPDLPRADVDHAIEKAFQLWSNVTPLTFTKVSEGQADIMISFVRGDHRDNSPFDGHGGNLAHAFQPGPGIGGDAHFDEDERWTNNFREYNLHRVAAHELGHSLGLSHSTDIGALMYPSYTFSGDVQLAQDDIDGIQAIYGRSQNPVQPIGPQTPKACDSKLTFDAITTIRGEVMFFKDRFYMRTNPFYPEVELNFISVFWPQLPNGLEAAYEFADRDEVRFFKGNKYWAVQGQNVLHGYPKDIYSSFGFPRTVKHIDAALSEENTGKTYFFVANKYWRYDEYKRSMDPGYPKMIAHDFPGIGHKVDAVFMKDGFFYFFHGTRQYKFDPKTKRILTLQKANSWFNCRKN

SEQ ID NO: 2075 - protein, 450 aa, Artificial Sequence
  MMP-1 variant P158K
FPATLETQEQDVDLVQKYLEKYYNLKNDGRQVEKRRNSGPVVEKLKQMQEFFGLKVTGKPDAETLKVMKQPRCGVPDVAQFVLTEGNPRWEQTHLTYRIENYTPDLPRADVDHAIEKAFQLWSNVTPLTFTKVSEGQADIMISFVRGDHRDNSPFDGKGGNLAHAFQPGPGIGGDAHFDEDERWTNNFREYNLHRVAAHELGHSLGLSHSTDIGALMYPSYTFSGDVQLAQDDIDGIQAIYGRSQNPVQPIGPQTPKACDSKLTFDAITTIRGEVMFFKDRFYMRTNPFYPEVELNFISVFWPQLPNGLEAAYEFADRDEVRFFKGNKYWAVQGQNVLHGYPKDIYSSFGFPRTVKHIDAALSEENTGKTYFFVANKYWRYDEYKRSMDPGYPKMIAHDFPGIGHKVDAVFMKDGFFYFFHGTRQYKFDPKTKRILTLQKANSWFNCRKN

SEQ ID NO: 2076 - protein, 450 aa, Artificial Sequence
  MMP-1 variant P158R
FPATLETQEQDVDLVQKYLEKYYNLKNDGRQVEKRRNSGPVVEKLKQMQEFFGLKVTGKPDAETLKVMKQPRCGVPDVAQFVLTEGNPRWEQTHLTYRIENYTPDLPRADVDHAIEKAFQLWSNVTPLTFTKVSEGQADIMISFVRGDHRDNSPFDGRGGNLAHAFQPGPGIGGDAHFDEDERWTNNFREYNLHRVAAHELGHSLGLSHSTDIGALMYPSYTFSGDVQLAQDDIDGIQAIYGRSQNPVQPIGPQTPKACDSKLTFDAITTIRGEVMFFKDRFYMRTNPFYPEVELNFISVFWPQLPNGLEAAYEFADRDEVRFFKGNKYWAVQGQNVLHGYPKDIYSSFGFPRTVKHIDAALSEENTGKTYFFVANKYWRYDEYKRSMDPGYPKMIAHDFPGIGHKVDAVFMKDGFFYFFHGTRQYKFDPKTKRILTLQKANSWFNCRKN

SEQ ID NO: 2077 - protein, 450 aa, Artificial Sequence
  MMP-1 variant P158C
FPATLETQEQDVDLVQKYLEKYYNLKNDGRQVEKRRNSGPVVEKLKQMQEFFGLKVTGKPDAETLKVMKQPRCGVPDVAQFVLTEGNPRWEQTHLTYRIENYTPDLPRADVDHAIEKAFQLWSNVTPLTFTKVSEGQADIMISFVRGDHRDNSPFDGCGGNLAHAFQPGPGIGGDAHFDEDERWTNNFREYNLHRVAAHELGHSLGLSHSTDIGALMYPSYTFSGDVQLAQDDIDGIQAIYGRSQNPVQPIGPQTPKACDSKLTFDAITTIRGEVMFFKDRFYMRTNPFYPEVELNFISVFWPQLPNGLEAAYEFADRDEVRFFKGNKYWAVQGQNVLHGYPKDIYSSFGFPRTVKHIDAALSEENTGKTYFFVANKYWRYDEYKRSMDPGYPKMIAHDFPGIGHKVDAVFMKDGFFYFFHGTRQYKFDPKTKRILTLQKANSWFNCRKN

SEQ ID NO: 2078 - protein, 450 aa, Artificial Sequence
  MMP-1 variant P158N
FPATLETQEQDVDLVQKYLEKYYNLKNDGRQVEKRRNSGPVVEKLKQMQEFFGLKVTGKPDAETLKVMKQPRCGVPDVAQFVLTEGNPRWEQTHLTYRIENYTPDLPRADVDHAIEKAFQLWSNVTPLTFTKVSEGQADIMISFVRGDHRDNSPFDGNGGNLAHAFQPGPGIGGDAHFDEDERWTNNFREYNLHRVAAHELGHSLGLSHSTDIGALMYPSYTFSGDVQLAQDDIDGIQAIYGRSQNPVQPIGPQTPKACDSKLTFDAITTIRGEVMFFKDRFYMRTNPFYPEVELNFISVFWPQLPNGLEAAYEFADRDEVRFFKGNKYWAVQGQNVLHGYPKDIYSSFGFPRTVKHIDAALSEENTGKTYFFVANKYWRYDEYKRSMDPGYPKMIAHDFPGIGHKVDAVFMKDGFFYFFHGTRQYKFDPKTKRILTLQKANSWFNCRKN

SEQ ID NO: 2079 - protein, 450 aa, Artificial Sequence
  MMP-1 variant P158Q
FPATLETQEQDVDLVQKYLEKYYNLKNDGRQVEKRRNSGPVVEKLKQMQEFFGLKVTGKPDAETLKVMKQPRCGVPDVAQFVLTEGNPRWEQTHLTYRIENYTPDLPRADVDHAIEKAFQLWSNVTPLTFTKVSEGQADIMISFVRGDHRDNSPFDGQGGNLAHAFQPGPGIGGDAHFDEDERWTNNFREYNLHRVAAHELGHSLGLSHSTDIGALMYPSYTFSGDVQLAQDDIDGIQAIYGRSQNPVQPIGPQTPKACDSKLTFDAITTIRGEVMFFKDRFYMRTNPFYPEVELNFISVFWPQLPNGLEAAYEFADRDEVRFFKGNKYWAVQGQNVLHGYPKDIYSSFGFPRTVKHIDAALSEENTGKTYFFVANKYWRYDEYKRSMDPGYPKMIAHDFPGIGHKVDAVFMKDGFFYFFHGTRQYKFDPKTKRILTLQKANSWFNCRKN

SEQ ID NO: 2080 - protein, 450 aa, Artificial Sequence
  MMP-1 variant P158T
FPATLETQEQDVDLVQKYLEKYYNLKNDGRQVEKRRNSGPVVEKLKQMQEFFGLKVTGKPDAETLKVMKQPRCGVPDVAQFVLTEGNPRWEQTHLTYRIENYTPDLPRADVDHAIEKAFQLWSNVTPLTFTKVSEGQADIMISFVRGDHRDNSPFDGTGGNLAHAFQPGPGIGGDAHFDEDERWTNNFREYNLHRVAAHELGHSLGLSHSTDIGALMYPSYTFSGDVQLAQDDIDGIQAIYGRSQNPVQPIGPQTPKACDSKLTFDAITTIRGEVMFFKDRFYMRTNPFYPEVELNFISVFWPQLPNGLEAAYEFADRDEVRFFKGNKYWAVQGQNVLHGYPKDIYSSFGFPRTVKHIDAALSEENTGKTYFFVANKYWRYDEYKRSMDPGYPKMIAHDFPGIGHKVDAVFMKDGFFYFFHGTRQYKFDPKTKRILTLQKANSWFNCRKN

SEQ ID NO: 2081 - protein, 450 aa, Artificial Sequence
  MMP-1 variant P158Y
FPATLETQEQDVDLVQKYLEKYYNLKNDGRQVEKRRNSGPVVEKLKQMQEFFGLKVTGKPDAETLKVMKQPRCGVPDVAQFVLTEGNPRWEQTHLTYRIENYTPDLPRADVDHAIEKAFQLWSNVTPLTFTKVSEGQADIMISFVRGDHRDNSPFDGYGGNLAHAFQPGPGIGGDAHFDEDERWTNNFREYNLHRVAAHELGHSLGLSHSTDIGALMYPSYTFSGDVQLAQDDIDGIQAIYGRSQNPVQPIGPQTPKACDSKLTFDAITTIRGEVMFFKDRFYMRTNPFYPEVELNFISVFWPQLPNGLEAAYEFADRDEVRFFKGNKYWAVQGQNVLHGYPKDIYSSFGFPRTVKHIDAALSEENTGKTYFFVANKYWRYDEYKRSMDPGYPKMIAHDFPGIGHKVDAVFMKDGFFYFFHGTRQYKFDPKTKRILTLQKANSWFNCRKN

SEQ ID NO: 2082 - protein, 450 aa, Artificial Sequence
  MMP-1 variant P158S
FPATLETQEQDVDLVQKYLEKYYNLKNDGRQVEKRRNSGPVVEKLKQMQEFFGLKVTGKPDAETLKVMKQPRCGVPDVAQFVLTEGNPRWEQTHLTYRIENYTPDLPRADVDHAIEKAFQLWSNVTPLTFTKVSEGQADIMISFVRGDHRDNSPFDGSGGNLAHAFQPGPGIGGDAHFDEDERWTNNFREYNLHRVAAHELGHSLGLSHSTDIGALMYPSYTFSGDVQLAQDDIDGIQAIYGRSQNPVQPIGPQTPKACDSKLTFDAITTIRGEVMFFKDRFYMRTNPFYPEVELNFISVFWPQLPNGLEAAYEFADRDEVRFFKGNKYWAVQGQNVLHGYPKDIYSSFGFPRTVKHIDAALSEENTGKTYFFVANKYWRYDEYKRSMDPGYPKMIAHDFPGIGHKVDAVFMKDGFFYFFHGTRQYKFDPKTKRILTLQKANSWFNCRKN

SEQ ID NO: 2083 - protein, 450 aa, Artificial Sequence
  MMP-1 variant P158G
FPATLETQEQDVDLVQKYLEKYYNLKNDGRQVEKRRNSGPVVEKLKQMQEFFGLKVTGKPDAETLKVMKQPRCGVPDVAQFVLTEGNPRWEQTHLTYRIENYTPDLPRADVDHAIEKAFQLWSNVTPLTFTKVSEGQADIMISFVRGDHRDNSPFDGGGGNLAHAFQPGPGIGGDAHFDEDERWTNNFREYNLHRVAAHELGHSLGLSHSTDIGALMYPSYTFSGDVQLAQDDIDGIQAIYGRSQNPVQPIGPQTPKACDSKLTFDAITTIRGEVMFFKDRFYMRTNPFYPEVELNFISVFWPQLPNGLEAAYEFADRDEVRFFKGNKYWAVQGQNVLHGYPKDIYSSFGFPRTVKHIDAALSEENTGKTYFFVANKYWRYDEYKRSMDPGYPKMIAHDFPGIGHKVDAVFMKDGFFYFFHGTRQYKFDPKTKRILTLQKANSWFNCRKN

SEQ ID NO: 2084 - protein, 450 aa, Artificial Sequence
  MMP-1 variant P158F
FPATLETQEQDVDLVQKYLEKYYNLKNDGRQVEKRRNSGPVVEKLKQMQEFFGLKVTGKPDAETLKVMKQPRCGVPDVAQFVLTEGNPRWEQTHLTYRIENYTPDLPRADVDHAIEKAFQLWSNVTPLTFTKVSEGQADIMISFVRGDHRDNSPFDGFGGNLAHAFQPGPGIGGDAHFDEDERWTNNFREYNLHRVAAHELGHSLGLSHSTDIGALMYPSYTFSGDVQLAQDDIDGIQAIYGRSQNPVQPIGPQTPKACDSKLTFDAITTIRGEVMFFKDRFYMRTNPFYPEVELNFISVFWPQLPNGLEAAYEFADRDEVRFFKGNKYWAVQGQNVLHGYPKDIYSSFGFPRTVKHIDAALSEENTGKTYFFVANKYWRYDEYKRSMDPGYPKMIAHDFPGIGHKVDAVFMKDGFFYFFHGTRQYKFDPKTKRILTLQKANSWFNCRKN

SEQ ID NO: 2085 - protein, 450 aa, Artificial Sequence
  MMP-1 variant P158M
FPATLETQEQDVDLVQKYLEKYYNLKNDGRQVEKRRNSGPVVEKLKQMQEFFGLKVTGKPDAETLKVMKQPRCGVPDVAQFVLTEGNPRWEQTHLTYRIENYTPDLPRADVDHAIEKAFQLWSNVTPLTFTKVSEGQADIMISFVRGDHRDNSPFDGMGGNLAHAFQPGPGIGGDAHFDEDERWTNNFREYNLHRVAAHELGHSLGLSHSTDIGALMYPSYTFSGDVQLAQDDIDGIQAIYGRSQNPVQPIGPQTPKACDSKLTFDAITTIRGEVMFFKDRFYMRTNPFYPEVELNFISVFWPQLPNGLEAAYEFADRDEVRFFKGNKYWAVQGQNVLHGYPKDIYSSFGFPRTVKHIDAALSEENTGKTYFFVANKYWRYDEYKRSMDPGYPKMIAHDFPGIGHKVDAVFMKDGFFYFFHGTRQYKFDPKTKRILTLQKANSWFNCRKN

SEQ ID NO: 2086 - protein, 450 aa, Artificial Sequence
  MMP-1 variant P158W
FPATLETQEQDVDLVQKYLEKYYNLKNDGRQVEKRRNSGPVVEKLKQMQEFFGLKVTGKPDAETLKVMKQPRCGVPDVAQFVLTEGNPRWEQTHLTYRIENYTPDLPRADVDHAIEKAFQLWSNVTPLTFTKVSEGQADIMISFVRGDHRDNSPFDGWGGNLAHAFQPGPGIGGDAHFDEDERWTNNFREYNLHRVAAHELGHSLGLSHSTDIGALMYPSYTFSGDVQLAQDDIDGIQAIYGRSQNPVQPIGPQTPKACDSKLTFDAITTIRGEVMFFKDRFYMRTNPFYPEVELNFISVFWPQLPNGLEAAYEFADRDEVRFFKGNKYWAVQGQNVLHGYPKDIYSSFGFPRTVKHIDAALSEENTGKTYFFVANKYWRYDEYKRSMDPGYPKMIAHDFPGIGHKVDAVFMKDGFFYFFHGTRQYKFDPKTKRILTLQKANSWFNCRKN

SEQ ID NO: 2087 - protein, 450 aa, Artificial Sequence
  MMP-1 variant P158I
FPATLETQEQDVDLVQKYLEKYYNLKNDGRQVEKRRNSGPVVEKLKQMQEFFGLKVTGKPDAETLKVMKQPRCGVPDVAQFVLTEGNPRWEQTHLTYRIENYTPDLPRADVDHAIEKAFQLWSNVTPLTFTKVSEGQADIMISFVRGDHRDNSPFDGIGGNLAHAFQPGPGIGGDAHFDEDERWTNNFREYNLHRVAAHELGHSLGLSHSTDIGALMYPSYTFSGDVQLAQDDIDGIQAIYGRSQNPVQPIGPQTPKACDSKLTFDAITTIRGEVMFFKDRFYMRTNPFYPEVELNFISVFWPQLPNGLEAAYEFADRDEVRFFKGNKYWAVQGQNVLHGYPKDIYSSFGFPRTVKHIDAALSEENTGKTYFFVANKYWRYDEYKRSMDPGYPKMIAHDFPGIGHKVDAVFMKDGFFYFFHGTRQYKFDPKTKRILTLQKANSWFNCRKN

SEQ ID NO: 2088 - protein, 450 aa, Artificial Sequence
  MMP-1 variant P158V
FPATLETQEQDVDLVQKYLEKYYNLKNDGRQVEKRRNSGPVVEKLKQMQEFFGLKVTGKPDAETLKVMKQPRCGVPDVAQFVLTEGNPRWEQTHLTYRIENYTPDLPRADVDHAIEKAFQLWSNVTPLTFTKVSEGQADIMISFVRGDHRDNSPFDGVGGNLAHAFQPGPGIGGDAHFDEDERWTNNFREYNLHRVAAHELGHSLGLSHSTDIGALMYPSYTFSGDVQLAQDDIDGIQAIYGRSQNPVQPIGPQTPKACDSKLTFDAITTIRGEVMFFKDRFYMRTNPFYPEVELNFISVFWPQLPNGLEAAYEFADRDEVRFFKGNKYWAVQGQNVLHGYPKDIYSSFGFPRTVKHIDAALSEENTGKTYFFVANKYWRYDEYKRSMDPGYPKMIAHDFPGIGHKVDAVFMKDGFFYFFHGTRQYKFDPKTKRILTLQKANSWFNCRKN

SEQ ID NO: 2089 - protein, 450 aa, Artificial Sequence
  MMP-1 variant P158L
FPATLETQEQDVDLVQKYLEKYYNLKNDGRQVEKRRNSGPVVEKLKQMQEFFGLKVTGKPDAETLKVMKQPRCGVPDVAQFVLTEGNPRWEQTHLTYRIENYTPDLPRADVDHAIEKAFQLWSNVTPLTFTKVSEGQADIMISFVRGDHRDNSPFDGLGGNLAHAFQPGPGIGGDAHFDEDERWTNNFREYNLHRVAAHELGHSLGLSHSTDIGALMYPSYTFSGDVQLAQDDIDGIQAIYGRSQNPVQPIGPQTPKACDSKLTFDAITTIRGEVMFFKDRFYMRTNPFYPEVELNFISVFWPQLPNGLEAAYEFADRDEVRFFKGNKYWAVQGQNVLHGYPKDIYSSFGFPRTVKHIDAALSEENTGKTYFFVANKYWRYDEYKRSMDPGYPKMIAHDFPGIGHKVDAVFMKDGFFYFFHGTRQYKFDPKTKRILTLQKANSWFNCRKN

SEQ ID NO: 2090 - protein, 450 aa, Artificial Sequence
  MMP-1 variant P158A
FPATLETQEQDVDLVQKYLEKYYNLKNDGRQVEKRRNSGPVVEKLKQMQEFFGLKVTGKPDAETLKVMKQPRCGVPDVAQFVLTEGNPRWEQTHLTYRIENYTPDLPRADVDHAIEKAFQLWSNVTPLTFTKVSEGQADIMISFVRGDHRDNSPFDGAGGNLAHAFQPGPGIGGDAHFDEDERWTNNFREYNLHRVAAHELGHSLGLSHSTDIGALMYPSYTFSGDVQLAQDDIDGIQAIYGRSQNPVQPIGPQTPKACDSKLTFDAITTIRGEVMFFKDRFYMRTNPFYPEVELNFISVFWPQLPNGLEAAYEFADRDEVRFFKGNKYWAVQGQNVLHGYPKDIYSSFGFPRTVKHIDAALSEENTGKTYFFVANKYWRYDEYKRSMDPGYPKMIAHDFPGIGHKVDAVFMKDGFFYFFHGTRQYKFDPKTKRILTLQKANSWFNCRKN

SEQ ID NO: 2091 - protein, 450 aa, Artificial Sequence
  MMP-1 variant G160D
FPATLETQEQDVDLVQKYLEKYYNLKNDGRQVEKRRNSGPVVEKLKQMQEFFGLKVTGKPDAETLKVMKQPRCGVPDVAQFVLTEGNPRWEQTHLTYRIENYTPDLPRADVDHAIEKAFQLWSNVTPLTFTKVSEGQADIMISFVRGDHRDNSPFDGPGDNLAHAFQPGPGIGGDAHFDEDERWTNNFREYNLHRVAAHELGHSLGLSHSTDIGALMYPSYTFSGDVQLAQDDIDGIQAIYGRSQNPVQPIGPQTPKACDSKLTFDAITTIRGEVMFFKDRFYMRTNPFYPEVELNFISVFWPQLPNGLEAAYEFADRDEVRFFKGNKYWAVQGQNVLHGYPKDIYSSFGFPRTVKHIDAALSEENTGKTYFFVANKYWRYDEYKRSMDPGYPKMIAHDFPGIGHKVDAVFMKDGFFYFFHGTRQYKFDPKTKRILTLQKANSWFNCRKN

SEQ ID NO: 2092 - protein, 450 aa, Artificial Sequence
  MMP-1 variant G160E
FPATLETQEQDVDLVQKYLEKYYNLKNDGRQVEKRRNSGPVVEKLKQMQEFFGLKVTGKPDAETLKVMKQPRCGVPDVAQFVLTEGNPRWEQTHLTYRIENYTPDLPRADVDHAIEKAFQLWSNVTPLTFTKVSEGQADIMISFVRGDHRDNSPFDGPGENLAHAFQPGPGIGGDAHFDEDERWTNNFREYNLHRVAAHELGHSLGLSHSTDIGALMYPSYTFSGDVQLAQDDIDGIQAIYGRSQNPVQPIGPQTPKACDSKLTFDAITTIRGEVMFFKDRFYMRTNPFYPEVELNFISVFWPQLPNGLEAAYEFADRDEVRFFKGNKYWAVQGQNVLHGYPKDIYSSFGFPRTVKHIDAALSEENTGKTYFFVANKYWRYDEYKRSMDPGYPKMIAHDFPGIGHKVDAVFMKDGFFYFFHGTRQYKFDPKTKRILTLQKANSWFNCRKN

SEQ ID NO: 2093 - protein, 450 aa, Artificial Sequence
  MMP-1 variant G160H
FPATLETQEQDVDLVQKYLEKYYNLKNDGRQVEKRRNSGPVVEKLKQMQEFFGLKVTGKPDAETLKVMKQPRCGVPDVAQFVLTEGNPRWEQTHLTYRIENYTPDLPRADVDHAIEKAFQLWSNVTPLTFTKVSEGQADIMISFVRGDHRDNSPFDGPGHNLAHAFQPGPGIGGDAHFDEDERWTNNFREYNLHRVAAHELGHSLGLSHSTDIGALMYPSYTFSGDVQLAQDDIDGIQAIYGRSQNPVQPIGPQTPKACDSKLTFDAITTIRGEVMFFKDRFYMRTNPFYPEVELNFISVFWPQLPNGLEAAYEFADRDEVRFFKGNKYWAVQGQNVLHGYPKDIYSSFGFPRTVKHIDAALSEENTGKTYFFVANKYWRYDEYKRSMDPGYPKMIAHDFPGIGHKVDAVFMKDGFFYFFHGTRQYKFDPKTKRILTLQKANSWFNCRKN

SEQ ID NO: 2094 - protein, 450 aa, Artificial Sequence
  MMP-1 variant G160K
FPATLETQEQDVDLVQKYLEKYYNLKNDGRQVEKRRNSGPVVEKLKQMQEFFGLKVTGKPDAETLKVMKQPRCGVPDVAQFVLTEGNPRWEQTHLTYRIENYTPDLPRADVDHAIEKAFQLWSNVTPLTFTKVSEGQADIMISFVRGDHRDNSPFDGPGKNLAHAFQPGPGIGGDAHFDEDERWTNNFREYNLHRVAAHELGHSLGLSHSTDIGALMYPSYTFSGDVQLAQDDIDGIQAIYGRSQNPVQPIGPQTPKACDSKLTFDAITTIRGEVMFFKDRFYMRTNPFYPEVELNFISVFWPQLPNGLEAAYEFADRDEVRFFKGNKYWAVQGQNVLHGYPKDIYSSFGFPRTVKHIDAALSEENTGKTYFFVANKYWRYDEYKRSMDPGYPKMIAHDFPGIGHKVDAVFMKDGFFYFFHGTRQYKFDPKTKRILTLQKANSWFNCRKN

SEQ ID NO: 2095 - protein, 450 aa, Artificial Sequence
  MMP-1 variant G160R
FPATLETQEQDVDLVQKYLEKYYNLKNDGRQVEKRRNSGPVVEKLKQMQEFFGLKVTGKPDAETLKVMKQPRCGVPDVAQFVLTEGNPRWEQTHLTYRIENYTPDLPRADVDHAIEKAFQLWSNVTPLTFTKVSEGQADIMISFVRGDHRDNSPFDGPGRNLAHAFQPGPGIGGDAHFDEDERWTNNFREYNLHRVAAHELGHSLGLSHSTDIGALMYPSYTFSGDVQLAQDDIDGIQAIYGRSQNPVQPIGPQTPKACDSKLTFDAITTIRGEVMFFKDRFYMRTNPFYPEVELNFISVFWPQLPNGLEAAYEFADRDEVRFFKGNKYWAVQGQNVLHGYPKDIYSSFGFPRTVKHIDAALSEENTGKTYFFVANKYWRYDEYKRSMDPGYPKMIAHDFPGIGHKVDAVFMKDGFFYFFHGTRQYKFDPKTKRILTLQKANSWFNCRKN

SEQ ID NO: 2096 - protein, 450 aa, Artificial Sequence
  MMP-1 variant G160C
FPATLETQEQDVDLVQKYLEKYYNLKNDGRQVEKRRNSGPVVEKLKQMQEFFGLKVTGKPDAETLKVMKQPRCGVPDVAQFVLTEGNPRWEQTHLTYRIENYTPDLPRADVDHAIEKAFQLWSNVTPLTFTKVSEGQADIMISFVRGDHRDNSPFDGPGCNLAHAFQPGPGIGGDAHFDEDERWTNNFREYNLHRVAAHELGHSLGLSHSTDIGALMYPSYTFSGDVQLAQDDIDGIQAIYGRSQNPVQPIGPQTPKACDSKLTFDAITTIRGEVMFFKDRFYMRTNPFYPEVELNFISVFWPQLPNGLEAAYEFADRDEVRFFKGNKYWAVQGQNVLHGYPKDIYSSFGFPRTVKHIDAALSEENTGKTYFFVANKYWRYDEYKRSMDPGYPKMIAHDFPGIGHKVDAVFMKDGFFYFFHGTRQYKFDPKTKRILTLQKANSWFNCRKN

SEQ ID NO: 2097 - protein, 450 aa, Artificial Sequence
  MMP-1 variant G160N
FPATLETQEQDVDLVQKYLEKYYNLKNDGRQVEKRRNSGPVVEKLKQMQEFFGLKVTGKPDAETLKVMKQPRCGVPDVAQFVLTEGNPRWEQTHLTYRIENYTPDLPRADVDHAIEKAFQLWSNVTPLTFTKVSEGQADIMISFVRGDHRDNSPFDGPGNNLAHAFQPGPGIGGDAHFDEDERWTNNFREYNLHRVAAHELGHSLGLSHSTDIGALMYPSYTFSGDVQLAQDDIDGIQAIYGRSQNPVQPIGPQTPKACDSKLTFDAITTIRGEVMFFKDRFYMRTNPFYPEVELNFISVFWPQLPNGLEAAYEFADRDEVRFFKGNKYWAVQGQNVLHGYPKDIYSSFGFPRTVKHIDAALSEENTGKTYFFVANKYWRYDEYKRSMDPGYPKMIAHDFPGIGHKVDAVFMKDGFFYFFHGTRQYKFDPKTKRILTLQKANSWFNCRKN

SEQ ID NO: 2098 - protein, 450 aa, Artificial Sequence
  MMP-1 variant G160Q
FPATLETQEQDVDLVQKYLEKYYNLKNDGRQVEKRRNSGPVVEKLKQMQEFFGLKVTGKPDAETLKVMKQPRCGVPDVAQFVLTEGNPRWEQTHLTYRIENYTPDLPRADVDHAIEKAFQLWSNVTPLTFTKVSEGQADIMISFVRGDHRDNSPFDGPGQNLAHAFQPGPGIGGDAHFDEDERWTNNFREYNLHRVAAHELGHSLGLSHSTDIGALMYPSYTFSGDVQLAQDDIDGIQAIYGRSQNPVQPIGPQTPKACDSKLTFDAITTIRGEVMFFKDRFYMRTNPFYPEVELNFISVFWPQLPNGLEAAYEFADRDEVRFFKGNKYWAVQGQNVLHGYPKDIYSSFGFPRTVKHIDAALSEENTGKTYFFVANKYWRYDEYKRSMDPGYPKMIAHDFPGIGHKVDAVFMKDGFFYFFHGTRQYKFDPKTKRILTLQKANSWFNCRKN

SEQ ID NO: 2099 - protein, 450 aa, Artificial Sequence
  MMP-1 variant G160T
FPATLETQEQDVDLVQKYLEKYYNLKNDGRQVEKRRNSGPVVEKLKQMQEFFGLKVTGKPDAETLKVMKQPRCGVPDVAQFVLTEGNPRWEQTHLTYRIENYTPDLPRADVDHAIEKAFQLWSNVTPLTFTKVSEGQADIMISFVRGDHRDNSPFDGPGTNLAHAFQPGPGIGGDAHFDEDERWTNNFREYNLHRVAAHELGHSLGLSHSTDIGALMYPSYTFSGDVQLAQDDIDGIQAIYGRSQNPVQPIGPQTPKACDSKLTFDAITTIRGEVMFFKDRFYMRTNPFYPEVELNFISVFWPQLPNGLEAAYEFADRDEVRFFKGNKYWAVQGQNVLHGYPKDIYSSFGFPRTVKHIDAALSEENTGKTYFFVANKYWRYDEYKRSMDPGYPKMIAHDFPGIGHKVDAVFMKDGFFYFFHGTRQYKFDPKTKRILTLQKANSWFNCRKN

SEQ ID NO: 2100 - protein, 450 aa, Artificial Sequence
  MMP-1 variant G160Y
FPATLETQEQDVDLVQKYLEKYYNLKNDGRQVEKRRNSGPVVEKLKQMQEFFGLKVTGKPDAETLKVMKQPRCGVPDVAQFVLTEGNPRWEQTHLTYRIENYTPDLPRADVDHAIEKAFQLWSNVTPLTFTKVSEGQADIMISFVRGDHRDNSPFDGPGYNLAHAFQPGPGIGGDAHFDEDERWTNNFREYNLHRVAAHELGHSLGLSHSTDIGALMYPSYTFSGDVQLAQDDIDGIQAIYGRSQNPVQPIGPQTPKACDSKLTFDAITTIRGEVMFFKDRFYMRTNPFYPEVELNFISVFWPQLPNGLEAAYEFADRDEVRFFKGNKYWAVQGQNVLHGYPKDIYSSFGFPRTVKHIDAALSEENTGKTYFFVANKYWRYDEYKRSMDPGYPKMIAHDFPGIGHKVDAVFMKDGFFYFFHGTRQYKFDPKTKRILTLQKANSWFNCRKN

SEQ ID NO: 2101 - protein, 450 aa, Artificial Sequence
  MMP-1 variant G160S
FPATLETQEQDVDLVQKYLEKYYNLKNDGRQVEKRRNSGPVVEKLKQMQEFFGLKVTGKPDAETLKVMKQPRCGVPDVAQFVLTEGNPRWEQTHLTYRIENYTPDLPRADVDHAIEKAFQLWSNVTPLTFTKVSEGQADIMISFVRGDHRDNSPFDGPGSNLAHAFQPGPGIGGDAHFDEDERWTNNFREYNLHRVAAHELGHSLGLSHSTDIGALMYPSYTFSGDVQLAQDDIDGIQAIYGRSQNPVQPIGPQTPKACDSKLTFDAITTIRGEVMFFKDRFYMRTNPFYPEVELNFISVFWPQLPNGLEAAYEFADRDEVRFFKGNKYWAVQGQNVLHGYPKDIYSSFGFPRTVKHIDAALSEENTGKTYFFVANKYWRYDEYKRSMDPGYPKMIAHDFPGIGHKVDAVFMKDGFFYFFHGTRQYKFDPKTKRILTLQKANSWFNCRKN

SEQ ID NO: 2102 - protein, 450 aa, Artificial Sequence
  MMP-1 variant G160F
FPATLETQEQDVDLVQKYLEKYYNLKNDGRQVEKRRNSGPVVEKLKQMQEFFGLKVTGKPDAETLKVMKQPRCGVPDVAQFVLTEGNPRWEQTHLTYRIENYTPDLPRADVDHAIEKAFQLWSNVTPLTFTKVSEGQADIMISFVRGDHRDNSPFDGPGFNLAHAFQPGPGIGGDAHFDEDERWTNNFREYNLHRVAAHELGHSLGLSHSTDIGALMYPSYTFSGDVQLAQDDIDGIQAIYGRSQNPVQPIGPQTPKACDSKLTFDAITTIRGEVMFFKDRFYMRTNPFYPEVELNFISVFWPQLPNGLEAAYEFADRDEVRFFKGNKYWAVQGQNVLHGYPKDIYSSFGFPRTVKHIDAALSEENTGKTYFFVANKYWRYDEYKRSMDPGYPKMIAHDFPGIGHKVDAVFMKDGFFYFFHGTRQYKFDPKTKRILTLQKANSWFNCRKN

SEQ ID NO: 2103 - protein, 450 aa, Artificial Sequence
  MMP-1 variant G160M
FPATLETQEQDVDLVQKYLEKYYNLKNDGRQVEKRRNSGPVVEKLKQMQEFFGLKVTGKPDAETLKVMKQPRCGVPDVAQFVLTEGNPRWEQTHLTYRIENYTPDLPRADVDHAIEKAFQLWSNVTPLTFTKVSEGQADIMISFVRGDHRDNSPFDGPGMNLAHAFQPGPGIGGDAHFDEDERWTNNFREYNLHRVAAHELGHSLGLSHSTDIGALMYPSYTFSGDVQLAQDDIDGIQAIYGRSQNPVQPIGPQTPKACDSKLTFDAITTIRGEVMFFKDRFYMRTNPFYPEVELNFISVFWPQLPNGLEAAYEFADRDEVRFFKGNKYWAVQGQNVLHGYPKDIYSSFGFPRTVKHIDAALSEENTGKTYFFVANKYWRYDEYKRSMDPGYPKMIAHDFPGIGHKVDAVFMKDGFFYFFHGTRQYKFDPKTKRILTLQKANSWFNCRKN

SEQ ID NO: 2104 - protein, 450 aa, Artificial Sequence
  MMP-1 variant G160W
FPATLETQEQDVDLVQKYLEKYYNLKNDGRQVEKRRNSGPVVEKLKQMQEFFGLKVTGKPDAETLKVMKQPRCGVPDVAQFVLTEGNPRWEQTHLTYRIENYTPDLPRADVDHAIEKAFQLWSNVTPLTFTKVSEGQADIMISFVRGDHRDNSPFDGPGWNLAHAFQPGPGIGGDAHFDEDERWTNNFREYNLHRVAAHELGHSLGLSHSTDIGALMYPSYTFSGDVQLAQDDIDGIQAIYGRSQNPVQPIGPQTPKACDSKLTFDAITTIRGEVMFFKDRFYMRTNPFYPEVELNFISVFWPQLPNGLEAAYEFADRDEVRFFKGNKYWAVQGQNVLHGYPKDIYSSFGFPRTVKHIDAALSEENTGKTYFFVANKYWRYDEYKRSMDPGYPKMIAHDFPGIGHKVDAVFMKDGFFYFFHGTRQYKFDPKTKRILTLQKANSWFNCRKN

SEQ ID NO: 2105 - protein, 450 aa, Artificial Sequence
  MMP-1 variant G160I
FPATLETQEQDVDLVQKYLEKYYNLKNDGRQVEKRRNSGPVVEKLKQMQEFFGLKVTGKPDAETLKVMKQPRCGVPDVAQFVLTEGNPRWEQTHLTYRIENYTPDLPRADVDHAIEKAFQLWSNVTPLTFTKVSEGQADIMISFVRGDHRDNSPFDGPGINLAHAFQPGPGIGGDAHFDEDERWTNNFREYNLHRVAAHELGHSLGLSHSTDIGALMYPSYTFSGDVQLAQDDIDGIQAIYGRSQNPVQPIGPQTPKACDSKLTFDAITTIRGEVMFFKDRFYMRTNPFYPEVELNFISVFWPQLPNGLEAAYEFADRDEVRFFKGNKYWAVQGQNVLHGYPKDIYSSFGFPRTVKHIDAALSEENTGKTYFFVANKYWRYDEYKRSMDPGYPKMIAHDFPGIGHKVDAVFMKDGFFYFFHGTRQYKFDPKTKRILTLQKANSWFNCRKN

SEQ ID NO: 2106 - protein, 450 aa, Artificial Sequence
  MMP-1 variant G160V
FPATLETQEQDVDLVQKYLEKYYNLKNDGRQVEKRRNSGPVVEKLKQMQEFFGLKVTGKPDAETLKVMKQPRCGVPDVAQFVLTEGNPRWEQTHLTYRIENYTPDLPRADVDHAIEKAFQLWSNVTPLTFTKVSEGQADIMISFVRGDHRDNSPFDGPGVNLAHAFQPGPGIGGDAHFDEDERWTNNFREYNLHRVAAHELGHSLGLSHSTDIGALMYPSYTFSGDVQLAQDDIDGIQAIYGRSQNPVQPIGPQTPKACDSKLTFDAITTIRGEVMFFKDRFYMRTNPFYPEVELNFISVFWPQLPNGLEAAYEFADRDEVRFFKGNKYWAVQGQNVLHGYPKDIYSSFGFPRTVKHIDAALSEENTGKTYFFVANKYWRYDEYKRSMDPGYPKMIAHDFPGIGHKVDAVFMKDGFFYFFHGTRQYKFDPKTKRILTLQKANSWFNCRKN

SEQ ID NO: 2107 - protein, 450 aa, Artificial Sequence
  MMP-1 variant G160L
FPATLETQEQDVDLVQKYLEKYYNLKNDGRQVEKRRNSGPVVEKLKQMQEFFGLKVTGKPDAETLKVMKQPRCGVPDVAQFVLTEGNPRWEQTHLTYRIENYTPDLPRADVDHAIEKAFQLWSNVTPLTFTKVSEGQADIMISFVRGDHRDNSPFDGPGLNLAHAFQPGPGIGGDAHFDEDERWTNNFREYNLHRVAAHELGHSLGLSHSTDIGALMYPSYTFSGDVQLAQDDIDGIQAIYGRSQNPVQPIGPQTPKACDSKLTFDAITTIRGEVMFFKDRFYMRTNPFYPEVELNFISVFWPQLPNGLEAAYEFADRDEVRFFKGNKYWAVQGQNVLHGYPKDIYSSFGFPRTVKHIDAALSEENTGKTYFFVANKYWRYDEYKRSMDPGYPKMIAHDFPGIGHKVDAVFMKDGFFYFFHGTRQYKFDPKTKRILTLQKANSWFNCRKN

SEQ ID NO: 2108 - protein, 450 aa, Artificial Sequence
  MMP-1 variant G160A
FPATLETQEQDVDLVQKYLEKYYNLKNDGRQVEKRRNSGPVVEKLKQMQEFFGLKVTGKPDAETLKVMKQPRCGVPDVAQFVLTEGNPRWEQTHLTYRIENYTPDLPRADVDHAIEKAFQLWSNVTPLTFTKVSEGQADIMISFVRGDHRDNSPFDGPGANLAHAFQPGPGIGGDAHFDEDERWTNNFREYNLHRVAAHELGHSLGLSHSTDIGALMYPSYTFSGDVQLAQDDIDGIQAIYGRSQNPVQPIGPQTPKACDSKLTFDAITTIRGEVMFFKDRFYMRTNPFYPEVELNFISVFWPQLPNGLEAAYEFADRDEVRFFKGNKYWAVQGQNVLHGYPKDIYSSFGFPRTVKHIDAALSEENTGKTYFFVANKYWRYDEYKRSMDPGYPKMIAHDFPGIGHKVDAVFMKDGFFYFFHGTRQYKFDPKTKRILTLQKANSWFNCRKN

SEQ ID NO: 2109 - protein, 450 aa, Artificial Sequence
  MMP-1 variant G160P
FPATLETQEQDVDLVQKYLEKYYNLKNDGRQVEKRRNSGPVVEKLKQMQEFFGLKVTGKPDAETLKVMKQPRCGVPDVAQFVLTEGNPRWEQTHLTYRIENYTPDLPRADVDHAIEKAFQLWSNVTPLTFTKVSEGQADIMISFVRGDHRDNSPFDGPGPNLAHAFQPGPGIGGDAHFDEDERWTNNFREYNLHRVAAHELGHSLGLSHSTDIGALMYPSYTFSGDVQLAQDDIDGIQAIYGRSQNPVQPIGPQTPKACDSKLTFDAITTIRGEVMFFKDRFYMRTNPFYPEVELNFISVFWPQLPNGLEAAYEFADRDEVRFFKGNKYWAVQGQNVLHGYPKDIYSSFGFPRTVKHIDAALSEENTGKTYFFVANKYWRYDEYKRSMDPGYPKMIAHDFPGIGHKVDAVFMKDGFFYFFHGTRQYKFDPKTKRILTLQKANSWFNCRKN

SEQ ID NO: 2110 - protein, 450 aa, Artificial Sequence
  MMP-1 variant N161D
FPATLETQEQDVDLVQKYLEKYYNLKNDGRQVEKRRNSGPVVEKLKQMQEFFGLKVTGKPDAETLKVMKQPRCGVPDVAQFVLTEGNPRWEQTHLTYRIENYTPDLPRADVDHAIEKAFQLWSNVTPLTFTKVSEGQADIMISFVRGDHRDNSPFDGPGGDLAHAFQPGPGIGGDAHFDEDERWTNNFREYNLHRVAAHELGHSLGLSHSTDIGALMYPSYTFSGDVQLAQDDIDGIQAIYGRSQNPVQPIGPQTPKACDSKLTFDAITTIRGEVMFFKDRFYMRTNPFYPEVELNFISVFWPQLPNGLEAAYEFADRDEVRFFKGNKYWAVQGQNVLHGYPKDIYSSFGFPRTVKHIDAALSEENTGKTYFFVANKYWRYDEYKRSMDPGYPKMIAHDFPGIGHKVDAVFMKDGFFYFFHGTRQYKFDPKTKRILTLQKANSWFNCRKN

SEQ ID NO: 2111 - protein, 450 aa, Artificial Sequence
  MMP-1 variant N161E
FPATLETQEQDVDLVQKYLEKYYNLKNDGRQVEKRRNSGPVVEKLKQMQEFFGLKVTGKPDAETLKVMKQPRCGVPDVAQFVLTEGNPRWEQTHLTYRIENYTPDLPRADVDHAIEKAFQLWSNVTPLTFTKVSEGQADIMISFVRGDHRDNSPFDGPGGELAHAFQPGPGIGGDAHFDEDERWTNNFREYNLHRVAAHELGHSLGLSHSTDIGALMYPSYTFSGDVQLAQDDIDGIQAIYGRSQNPVQPIGPQTPKACDSKLTFDAITTIRGEVMFFKDRFYMRTNPFYPEVELNFISVFWPQLPNGLEAAYEFADRDEVRFFKGNKYWAVQGQNVLHGYPKDIYSSFGFPRTVKHIDAALSEENTGKTYFFVANKYWRYDEYKRSMDPGYPKMIAHDFPGIGHKVDAVFMKDGFFYFFHGTRQYKFDPKTKRILTLQKANSWFNCRKN

SEQ ID NO: 2112 - protein, 450 aa, Artificial Sequence
  MMP-1 variant N161H
FPATLETQEQDVDLVQKYLEKYYNLKNDGRQVEKRRNSGPVVEKLKQMQEFFGLKVTGKPDAETLKVMKQPRCGVPDVAQFVLTEGNPRWEQTHLTYRIENYTPDLPRADVDHAIEKAFQLWSNVTPLTFTKVSEGQADIMISFVRGDHRDNSPFDGPGGHLAHAFQPGPGIGGDAHFDEDERWTNNFREYNLHRVAAHELGHSLGLSHSTDIGALMYPSYTFSGDVQLAQDDIDGIQAIYGRSQNPVQPIGPQTPKACDSKLTFDAITTIRGEVMFFKDRFYMRTNPFYPEVELNFISVFWPQLPNGLEAAYEFADRDEVRFFKGNKYWAVQGQNVLHGYPKDIYSSFGFPRTVKHIDAALSEENTGKTYFFVANKYWRYDEYKRSMDPGYPKMIAHDFPGIGHKVDAVFMKDGFFYFFHGTRQYKFDPKTKRILTLQKANSWFNCRKN

SEQ ID NO: 2113 - protein, 450 aa, Artificial Sequence
  MMP-1 variant N161K
FPATLETQEQDVDLVQKYLEKYYNLKNDGRQVEKRRNSGPVVEKLKQMQEFFGLKVTGKPDAETLKVMKQPRCGVPDVAQFVLTEGNPRWEQTHLTYRIENYTPDLPRADVDHAIEKAFQLWSNVTPLTFTKVSEGQADIMISFVRGDHRDNSPFDGPGGKLAHAFQPGPGIGGDAHFDEDERWTNNFREYNLHRVAAHELGHSLGLSHSTDIGALMYPSYTFSGDVQLAQDDIDGIQAIYGRSQNPVQPIGPQTPKACDSKLTFDAITTIRGEVMFFKDRFYMRTNPFYPEVELNFISVFWPQLPNGLEAAYEFADRDEVRFFKGNKYWAVQGQNVLHGYPKDIYSSFGFPRTVKHIDAALSEENTGKTYFFVANKYWRYDEYKRSMDPGYPKMIAHDFPGIGHKVDAVFMKDGFFYFFHGTRQYKFDPKTKRILTLQKANSWFNCRKN

SEQ ID NO: 2114 - protein, 450 aa, Artificial Sequence
  MMP-1 variant N161R
FPATLETQEQDVDLVQKYLEKYYNLKNDGRQVEKRRNSGPVVEKLKQMQEFFGLKVTGKPDAETLKVMKQPRCGVPDVAQFVLTEGNPRWEQTHLTYRIENYTPDLPRADVDHAIEKAFQLWSNVTPLTFTKVSEGQADIMISFVRGDHRDNSPFDGPGGRLAHAFQPGPGIGGDAHFDEDERWTNNFREYNLHRVAAHELGHSLGLSHSTDIGALMYPSYTFSGDVQLAQDDIDGIQAIYGRSQNPVQPIGPQTPKACDSKLTFDAITTIRGEVMFFKDRFYMRTNPFYPEVELNFISVFWPQLPNGLEAAYEFADRDEVRFFKGNKYWAVQGQNVLHGYPKDIYSSFGFPRTVKHIDAALSEENTGKTYFFVANKYWRYDEYKRSMDPGYPKMIAHDFPGIGHKVDAVFMKDGFFYFFHGTRQYKFDPKTKRILTLQKANSWFNCRKN

SEQ ID NO: 2115 - protein, 450 aa, Artificial Sequence
  MMP-1 variant N161C
FPATLETQEQDVDLVQKYLEKYYNLKNDGRQVEKRRNSGPVVEKLKQMQEFFGLKVTGKPDAETLKVMKQPRCGVPDVAQFVLTEGNPRWEQTHLTYRIENYTPDLPRADVDHAIEKAFQLWSNVTPLTFTKVSEGQADIMISFVRGDHRDNSPFDGPGGCLAHAFQPGPGIGGDAHFDEDERWTNNFREYNLHRVAAHELGHSLGLSHSTDIGALMYPSYTFSGDVQLAQDDIDGIQAIYGRSQNPVQPIGPQTPKACDSKLTFDAITTIRGEVMFFKDRFYMRTNPFYPEVELNFISVFWPQLPNGLEAAYEFADRDEVRFFKGNKYWAVQGQNVLHGYPKDIYSSFGFPRTVKHIDAALSEENTGKTYFFVANKYWRYDEYKRSMDPGYPKMIAHDFPGIGHKVDAVFMKDGFFYFFHGTRQYKFDPKTKRILTLQKANSWFNCRKN

SEQ ID NO: 2116 - protein, 450 aa, Artificial Sequence
  MMP-1 variant N161Q
FPATLETQEQDVDLVQKYLEKYYNLKNDGRQVEKRRNSGPVVEKLKQMQEFFGLKVTGKPDAETLKVMKQPRCGVPDVAQFVLTEGNPRWEQTHLTYRIENYTPDLPRADVDHAIEKAFQLWSNVTPLTFTKVSEGQADIMISFVRGDHRDNSPFDGPGGQLAHAFQPGPGIGGDAHFDEDERWTNNFREYNLHRVAAHELGHSLGLSHSTDIGALMYPSYTFSGDVQLAQDDIDGIQAIYGRSQNPVQPIGPQTPKACDSKLTFDAITTIRGEVMFFKDRFYMRTNPFYPEVELNFISVFWPQLPNGLEAAYEFADRDEVRFFKGNKYWAVQGQNVLHGYPKDIYSSFGFPRTVKHIDAALSEENTGKTYFFVANKYWRYDEYKRSMDPGYPKMIAHDFPGIGHKVDAVFMKDGFFYFFHGTRQYKFDPKTKRILTLQKANSWFNCRKN

SEQ ID NO: 2117 - protein, 450 aa, Artificial Sequence
  MMP-1 variant N161T
FPATLETQEQDVDLVQKYLEKYYNLKNDGRQVEKRRNSGPVVEKLKQMQEFFGLKVTGKPDAETLKVMKQPRCGVPDVAQFVLTEGNPRWEQTHLTYRIENYTPDLPRADVDHAIEKAFQLWSNVTPLTFTKVSEGQADIMISFVRGDHRDNSPFDGPGGTLAHAFQPGPGIGGDAHFDEDERWTNNFREYNLHRVAAHELGHSLGLSHSTDIGALMYPSYTFSGDVQLAQDDIDGIQAIYGRSQNPVQPIGPQTPKACDSKLTFDAITTIRGEVMFFKDRFYMRTNPFYPEVELNFISVFWPQLPNGLEAAYEFADRDEVRFFKGNKYWAVQGQNVLHGYPKDIYSSFGFPRTVKHIDAALSEENTGKTYFFVANKYWRYDEYKRSMDPGYPKMIAHDFPGIGHKVDAVFMKDGFFYFFHGTRQYKFDPKTKRILTLQKANSWFNCRKN

SEQ ID NO: 2118 - protein, 450 aa, Artificial Sequence
  MMP-1 variant N161Y
FPATLETQEQDVDLVQKYLEKYYNLKNDGRQVEKRRNSGPVVEKLKQMQEFFGLKVTGKPDAETLKVMKQPRCGVPDVAQFVLTEGNPRWEQTHLTYRIENYTPDLPRADVDHAIEKAFQLWSNVTPLTFTKVSEGQADIMISFVRGDHRDNSPFDGPGGYLAHAFQPGPGIGGDAHFDEDERWTNNFREYNLHRVAAHELGHSLGLSHSTDIGALMYPSYTFSGDVQLAQDDIDGIQAIYGRSQNPVQPIGPQTPKACDSKLTFDAITTIRGEVMFFKDRFYMRTNPFYPEVELNFISVFWPQLPNGLEAAYEFADRDEVRFFKGNKYWAVQGQNVLHGYPKDIYSSFGFPRTVKHIDAALSEENTGKTYFFVANKYWRYDEYKRSMDPGYPKMIAHDFPGIGHKVDAVFMKDGFFYFFHGTRQYKFDPKTKRILTLQKANSWFNCRKN

SEQ ID NO: 2119 - protein, 450 aa, Artificial Sequence
  MMP-1 variant N161S
FPATLETQEQDVDLVQKYLEKYYNLKNDGRQVEKRRNSGPVVEKLKQMQEFFGLKVTGKPDAETLKVMKQPRCGVPDVAQFVLTEGNPRWEQTHLTYRIENYTPDLPRADVDHAIEKAFQLWSNVTPLTFTKVSEGQADIMISFVRGDHRDNSPFDGPGGSLAHAFQPGPGIGGDAHFDEDERWTNNFREYNLHRVAAHELGHSLGLSHSTDIGALMYPSYTFSGDVQLAQDDIDGIQAIYGRSQNPVQPIGPQTPKACDSKLTFDAITTIRGEVMFFKDRFYMRTNPFYPEVELNFISVFWPQLPNGLEAAYEFADRDEVRFFKGNKYWAVQGQNVLHGYPKDIYSSFGFPRTVKHIDAALSEENTGKTYFFVANKYWRYDEYKRSMDPGYPKMIAHDFPGIGHKVDAVFMKDGFFYFFHGTRQYKFDPKTKRILTLQKANSWFNCRKN

SEQ ID NO: 2120 - protein, 450 aa, Artificial Sequence
  MMP-1 variant N161G
FPATLETQEQDVDLVQKYLEKYYNLKNDGRQVEKRRNSGPVVEKLKQMQEFFGLKVTGKPDAETLKVMKQPRCGVPDVAQFVLTEGNPRWEQTHLTYRIENYTPDLPRADVDHAIEKAFQLWSNVTPLTFTKVSEGQADIMISFVRGDHRDNSPFDGPGGGLAHAFQPGPGIGGDAHFDEDERWTNNFREYNLHRVAAHELGHSLGLSHSTDIGALMYPSYTFSGDVQLAQDDIDGIQAIYGRSQNPVQPIGPQTPKACDSKLTFDAITTIRGEVMFFKDRFYMRTNPFYPEVELNFISVFWPQLPNGLEAAYEFADRDEVRFFKGNKYWAVQGQNVLHGYPKDIYSSFGFPRTVKHIDAALSEENTGKTYFFVANKYWRYDEYKRSMDPGYPKMIAHDFPGIGHKVDAVFMKDGFFYFFHGTRQYKFDPKTKRILTLQKANSWFNCRKN

SEQ ID NO: 2121 - protein, 450 aa, Artificial Sequence
  MMP-1 variant N161F
FPATLETQEQDVDLVQKYLEKYYNLKNDGRQVEKRRNSGPVVEKLKQMQEFFGLKVTGKPDAETLKVMKQPRCGVPDVAQFVLTEGNPRWEQTHLTYRIENYTPDLPRADVDHAIEKAFQLWSNVTPLTFTKVSEGQADIMISFVRGDHRDNSPFDGPGGFLAHAFQPGPGIGGDAHFDEDERWTNNFREYNLHRVAAHELGHSLGLSHSTDIGALMYPSYTFSGDVQLAQDDIDGIQAIYGRSQNPVQPIGPQTPKACDSKLTFDAITTIRGEVMFFKDRFYMRTNPFYPEVELNFISVFWPQLPNGLEAAYEFADRDEVRFFKGNKYWAVQGQNVLHGYPKDIYSSFGFPRTVKHIDAALSEENTGKTYFFVANKYWRYDEYKRSMDPGYPKMIAHDFPGIGHKVDAVFMKDGFFYFFHGTRQYKFDPKTKRILTLQKANSWFNCRKN

SEQ ID NO: 2122 - protein, 450 aa, Artificial Sequence
  MMP-1 variant N161M
FPATLETQEQDVDLVQKYLEKYYNLKNDGRQVEKRRNSGPVVEKLKQMQEFFGLKVTGKPDAETLKVMKQPRCGVPDVAQFVLTEGNPRWEQTHLTYRIENYTPDLPRADVDHAIEKAFQLWSNVTPLTFTKVSEGQADIMISFVRGDHRDNSPFDGPGGMLAHAFQPGPGIGGDAHFDEDERWTNNFREYNLHRVAAHELGHSLGLSHSTDIGALMYPSYTFSGDVQLAQDDIDGIQAIYGRSQNPVQPIGPQTPKACDSKLTFDAITTIRGEVMFFKDRFYMRTNPFYPEVELNFISVFWPQLPNGLEAAYEFADRDEVRFFKGNKYWAVQGQNVLHGYPKDIYSSFGFPRTVKHIDAALSEENTGKTYFFVANKYWRYDEYKRSMDPGYPKMIAHDFPGIGHKVDAVFMKDGFFYFFHGTRQYKFDPKTKRILTLQKANSWFNCRKN

SEQ ID NO: 2123 - protein, 450 aa, Artificial Sequence
  MMP-1 variant N161W
FPATLETQEQDVDLVQKYLEKYYNLKNDGRQVEKRRNSGPVVEKLKQMQEFFGLKVTGKPDAETLKVMKQPRCGVPDVAQFVLTEGNPRWEQTHLTYRIENYTPDLPRADVDHAIEKAFQLWSNVTPLTFTKVSEGQADIMISFVRGDHRDNSPFDGPGGWLAHAFQPGPGIGGDAHFDEDERWTNNFREYNLHRVAAHELGHSLGLSHSTDIGALMYPSYTFSGDVQLAQDDIDGIQAIYGRSQNPVQPIGPQTPKACDSKLTFDAITTIRGEVMFFKDRFYMRTNPFYPEVELNFISVFWPQLPNGLEAAYEFADRDEVRFFKGNKYWAVQGQNVLHGYPKDIYSSFGFPRTVKHIDAALSEENTGKTYFFVANKYWRYDEYKRSMDPGYPKMIAHDFPGIGHKVDAVFMKDGFFYFFHGTRQYKFDPKTKRILTLQKANSWFNCRKN

SEQ ID NO: 2124 - protein, 450 aa, Artificial Sequence
  MMP-1 variant N161I
FPATLETQEQDVDLVQKYLEKYYNLKNDGRQVEKRRNSGPVVEKLKQMQEFFGLKVTGKPDAETLKVMKQPRCGVPDVAQFVLTEGNPRWEQTHLTYRIENYTPDLPRADVDHAIEKAFQLWSNVTPLTFTKVSEGQADIMISFVRGDHRDNSPFDGPGGILAHAFQPGPGIGGDAHFDEDERWTNNFREYNLHRVAAHELGHSLGLSHSTDIGALMYPSYTFSGDVQLAQDDIDGIQAIYGRSQNPVQPIGPQTPKACDSKLTFDAITTIRGEVMFFKDRFYMRTNPFYPEVELNFISVFWPQLPNGLEAAYEFADRDEVRFFKGNKYWAVQGQNVLHGYPKDIYSSFGFPRTVKHIDAALSEENTGKTYFFVANKYWRYDEYKRSMDPGYPKMIAHDFPGIGHKVDAVFMKDGFFYFFHGTRQYKFDPKTKRILTLQKANSWFNCRKN

SEQ ID NO: 2125 - protein, 450 aa, Artificial Sequence
  MMP-1 variant N161V
FPATLETQEQDVDLVQKYLEKYYNLKNDGRQVEKRRNSGPVVEKLKQMQEFFGLKVTGKPDAETLKVMKQPRCGVPDVAQFVLTEGNPRWEQTHLTYRIENYTPDLPRADVDHAIEKAFQLWSNVTPLTFTKVSEGQADIMISFVRGDHRDNSPFDGPGGVLAHAFQPGPGIGGDAHFDEDERWTNNFREYNLHRVAAHELGHSLGLSHSTDIGALMYPSYTFSGDVQLAQDDIDGIQAIYGRSQNPVQPIGPQTPKACDSKLTFDAITTIRGEVMFFKDRFYMRTNPFYPEVELNFISVFWPQLPNGLEAAYEFADRDEVRFFKGNKYWAVQGQNVLHGYPKDIYSSFGFPRTVKHIDAALSEENTGKTYFFVANKYWRYDEYKRSMDPGYPKMIAHDFPGIGHKVDAVFMKDGFFYFFHGTRQYKFDPKTKRILTLQKANSWFNCRKN

SEQ ID NO: 2126 - protein, 450 aa, Artificial Sequence
  MMP-1 variant N161L
FPATLETQEQDVDLVQKYLEKYYNLKNDGRQVEKRRNSGPVVEKLKQMQEFFGLKVTGKPDAETLKVMKQPRCGVPDVAQFVLTEGNPRWEQTHLTYRIENYTPDLPRADVDHAIEKAFQLWSNVTPLTFTKVSEGQADIMISFVRGDHRDNSPFDGPGGLLAHAFQPGPGIGGDAHFDEDERWTNNFREYNLHRVAAHELGHSLGLSHSTDIGALMYPSYTFSGDVQLAQDDIDGIQAIYGRSQNPVQPIGPQTPKACDSKLTFDAITTIRGEVMFFKDRFYMRTNPFYPEVELNFISVFWPQLPNGLEAAYEFADRDEVRFFKGNKYWAVQGQNVLHGYPKDIYSSFGFPRTVKHIDAALSEENTGKTYFFVANKYWRYDEYKRSMDPGYPKMIAHDFPGIGHKVDAVFMKDGFFYFFHGTRQYKFDPKTKRILTLQKANSWFNCRKN

SEQ ID NO: 2127 - protein, 450 aa, Artificial Sequence
  MMP-1 variant N161A
FPATLETQEQDVDLVQKYLEKYYNLKNDGRQVEKRRNSGPVVEKLKQMQEFFGLKVTGKPDAETLKVMKQPRCGVPDVAQFVLTEGNPRWEQTHLTYRIENYTPDLPRADVDHAIEKAFQLWSNVTPLTFTKVSEGQADIMISFVRGDHRDNSPFDGPGGALAHAFQPGPGIGGDAHFDEDERWTNNFREYNLHRVAAHELGHSLGLSHSTDIGALMYPSYTFSGDVQLAQDDIDGIQAIYGRSQNPVQPIGPQTPKACDSKLTFDAITTIRGEVMFFKDRFYMRTNPFYPEVELNFISVFWPQLPNGLEAAYEFADRDEVRFFKGNKYWAVQGQNVLHGYPKDIYSSFGFPRTVKHIDAALSEENTGKTYFFVANKYWRYDEYKRSMDPGYPKMIAHDFPGIGHKVDAVFMKDGFFYFFHGTRQYKFDPKTKRILTLQKANSWFNCRKN

SEQ ID NO: 2128 - protein, 450 aa, Artificial Sequence
  MMP-1 variant N161P
FPATLETQEQDVDLVQKYLEKYYNLKNDGRQVEKRRNSGPVVEKLKQMQEFFGLKVTGKPDAETLKVMKQPRCGVPDVAQFVLTEGNPRWEQTHLTYRIENYTPDLPRADVDHAIEKAFQLWSNVTPLTFTKVSEGQADIMISFVRGDHRDNSPFDGPGGPLAHAFQPGPGIGGDAHFDEDERWTNNFREYNLHRVAAHELGHSLGLSHSTDIGALMYPSYTFSGDVQLAQDDIDGIQAIYGRSQNPVQPIGPQTPKACDSKLTFDAITTIRGEVMFFKDRFYMRTNPFYPEVELNFISVFWPQLPNGLEAAYEFADRDEVRFFKGNKYWAVQGQNVLHGYPKDIYSSFGFPRTVKHIDAALSEENTGKTYFFVANKYWRYDEYKRSMDPGYPKMIAHDFPGIGHKVDAVFMKDGFFYFFHGTRQYKFDPKTKRILTLQKANSWFNCRKN

SEQ ID NO: 2129 - protein, 450 aa, Artificial Sequence
  MMP-1 variant L162D
FPATLETQEQDVDLVQKYLEKYYNLKNDGRQVEKRRNSGPVVEKLKQMQEFFGLKVTGKPDAETLKVMKQPRCGVPDVAQFVLTEGNPRWEQTHLTYRIENYTPDLPRADVDHAIEKAFQLWSNVTPLTFTKVSEGQADIMISFVRGDHRDNSPFDGPGGNDAHAFQPGPGIGGDAHFDEDERWTNNFREYNLHRVAAHELGHSLGLSHSTDIGALMYPSYTFSGDVQLAQDDIDGIQAIYGRSQNPVQPIGPQTPKACDSKLTFDAITTIRGEVMFFKDRFYMRTNPFYPEVELNFISVFWPQLPNGLEAAYEFADRDEVRFFKGNKYWAVQGQNVLHGYPKDIYSSFGFPRTVKHIDAALSEENTGKTYFFVANKYWRYDEYKRSMDPGYPKMIAHDFPGIGHKVDAVFMKDGFFYFFHGTRQYKFDPKTKRILTLQKANSWFNCRKN

SEQ ID NO: 2130 - protein, 450 aa, Artificial Sequence
  MMP-1 variant L162E
FPATLETQEQDVDLVQKYLEKYYNLKNDGRQVEKRRNSGPVVEKLKQMQEFFGLKVTGKPDAETLKVMKQPRCGVPDVAQFVLTEGNPRWEQTHLTYRIENYTPDLPRADVDHAIEKAFQLWSNVTPLTFTKVSEGQADIMISFVRGDHRDNSPFDGPGGNEAHAFQPGPGIGGDAHFDEDERWTNNFREYNLHRVAAHELGHSLGLSHSTDIGALMYPSYTFSGDVQLAQDDIDGIQAIYGRSQNPVQPIGPQTPKACDSKLTFDAITTIRGEVMFFKDRFYMRTNPFYPEVELNFISVFWPQLPNGLEAAYEFADRDEVRFFKGNKYWAVQGQNVLHGYPKDIYSSFGFPRTVKHIDAALSEENTGKTYFFVANKYWRYDEYKRSMDPGYPKMIAHDFPGIGHKVDAVFMKDGFFYFFHGTRQYKFDPKTKRILTLQKANSWFNCRKN

SEQ ID NO: 2131 - protein, 450 aa, Artificial Sequence
  MMP-1 variant L162H
FPATLETQEQDVDLVQKYLEKYYNLKNDGRQVEKRRNSGPVVEKLKQMQEFFGLKVTGKPDAETLKVMKQPRCGVPDVAQFVLTEGNPRWEQTHLTYRIENYTPDLPRADVDHAIEKAFQLWSNVTPLTFTKVSEGQADIMISFVRGDHRDNSPFDGPGGNHAHAFQPGPGIGGDAHFDEDERWTNNFREYNLHRVAAHELGHSLGLSHSTDIGALMYPSYTFSGDVQLAQDDIDGIQAIYGRSQNPVQPIGPQTPKACDSKLTFDAITTIRGEVMFFKDRFYMRTNPFYPEVELNFISVFWPQLPNGLEAAYEFADRDEVRFFKGNKYWAVQGQNVLHGYPKDIYSSFGFPRTVKHIDAALSEENTGKTYFFVANKYWRYDEYKRSMDPGYPKMIAHDFPGIGHKVDAVFMKDGFFYFFHGTRQYKFDPKTKRILTLQKANSWFNCRKN

SEQ ID NO: 2132 - protein, 450 aa, Artificial Sequence
  MMP-1 variant L162K
FPATLETQEQDVDLVQKYLEKYYNLKNDGRQVEKRRNSGPVVEKLKQMQEFFGLKVTGKPDAETLKVMKQPRCGVPDVAQFVLTEGNPRWEQTHLTYRIENYTPDLPRADVDHAIEKAFQLWSNVTPLTFTKVSEGQADIMISFVRGDHRDNSPFDGPGGNKAHAFQPGPGIGGDAHFDEDERWTNNFREYNLHRVAAHELGHSLGLSHSTDIGALMYPSYTFSGDVQLAQDDIDGIQAIYGRSQNPVQPIGPQTPKACDSKLTFDAITTIRGEVMFFKDRFYMRTNPFYPEVELNFISVFWPQLPNGLEAAYEFADRDEVRFFKGNKYWAVQGQNVLHGYPKDIYSSFGFPRTVKHIDAALSEENTGKTYFFVANKYWRYDEYKRSMDPGYPKMIAHDFPGIGHKVDAVFMKDGFFYFFHGTRQYKFDPKTKRILTLQKANSWFNCRKN

SEQ ID NO: 2133 - protein, 450 aa, Artificial Sequence
  MMP-1 variant L162R
FPATLETQEQDVDLVQKYLEKYYNLKNDGRQVEKRRNSGPVVEKLKQMQEFFGLKVTGKPDAETLKVMKQPRCGVPDVAQFVLTEGNPRWEQTHLTYRIENYTPDLPRADVDHAIEKAFQLWSNVTPLTFTKVSEGQADIMISFVRGDHRDNSPFDGPGGNRAHAFQPGPGIGGDAHFDEDERWTNNFREYNLHRVAAHELGHSLGLSHSTDIGALMYPSYTFSGDVQLAQDDIDGIQAIYGRSQNPVQPIGPQTPKACDSKLTFDAITTIRGEVMFFKDRFYMRTNPFYPEVELNFISVFWPQLPNGLEAAYEFADRDEVRFFKGNKYWAVQGQNVLHGYPKDIYSSFGFPRTVKHIDAALSEENTGKTYFFVANKYWRYDEYKRSMDPGYPKMIAHDFPGIGHKVDAVFMKDGFFYFFHGTRQYKFDPKTKRILTLQKANSWFNCRKN

SEQ ID NO: 2134 - protein, 450 aa, Artificial Sequence
  MMP-1 variant L162C
FPATLETQEQDVDLVQKYLEKYYNLKNDGRQVEKRRNSGPVVEKLKQMQEFFGLKVTGKPDAETLKVMKQPRCGVPDVAQFVLTEGNPRWEQTHLTYRIENYTPDLPRADVDHAIEKAFQLWSNVTPLTFTKVSEGQADIMISFVRGDHRDNSPFDGPGGNCAHAFQPGPGIGGDAHFDEDERWTNNFREYNLHRVAAHELGHSLGLSHSTDIGALMYPSYTFSGDVQLAQDDIDGIQAIYGRSQNPVQPIGPQTPKACDSKLTFDAITTIRGEVMFFKDRFYMRTNPFYPEVELNFISVFWPQLPNGLEAAYEFADRDEVRFFKGNKYWAVQGQNVLHGYPKDIYSSFGFPRTVKHIDAALSEENTGKTYFFVANKYWRYDEYKRSMDPGYPKMIAHDFPGIGHKVDAVFMKDGFFYFFHGTRQYKFDPKTKRILTLQKANSWFNCRKN

SEQ ID NO: 2135 - protein, 450 aa, Artificial Sequence
  MMP-1 variant L162N
FPATLETQEQDVDLVQKYLEKYYNLKNDGRQVEKRRNSGPVVEKLKQMQEFFGLKVTGKPDAETLKVMKQPRCGVPDVAQFVLTEGNPRWEQTHLTYRIENYTPDLPRADVDHAIEKAFQLWSNVTPLTFTKVSEGQADIMISFVRGDHRDNSPFDGPGGNNAHAFQPGPGIGGDAHFDEDERWTNNFREYNLHRVAAHELGHSLGLSHSTDIGALMYPSYTFSGDVQLAQDDIDGIQAIYGRSQNPVQPIGPQTPKACDSKLTFDAITTIRGEVMFFKDRFYMRTNPFYPEVELNFISVFWPQLPNGLEAAYEFADRDEVRFFKGNKYWAVQGQNVLHGYPKDIYSSFGFPRTVKHIDAALSEENTGKTYFFVANKYWRYDEYKRSMDPGYPKMIAHDFPGIGHKVDAVFMKDGFFYFFHGTRQYKFDPKTKRILTLQKANSWFNCRKN

SEQ ID NO: 2136 - protein, 450 aa, Artificial Sequence
  MMP-1 variant L162Q
FPATLETQEQDVDLVQKYLEKYYNLKNDGRQVEKRRNSGPVVEKLKQMQEFFGLKVTGKPDAETLKVMKQPRCGVPDVAQFVLTEGNPRWEQTHLTYRIENYTPDLPRADVDHAIEKAFQLWSNVTPLTFTKVSEGQADIMISFVRGDHRDNSPFDGPGGNQAHAFQPGPGIGGDAHFDEDERWTNNFREYNLHRVAAHELGHSLGLSHSTDIGALMYPSYTFSGDVQLAQDDIDGIQAIYGRSQNPVQPIGPQTPKACDSKLTFDAITTIRGEVMFFKDRFYMRTNPFYPEVELNFISVFWPQLPNGLEAAYEFADRDEVRFFKGNKYWAVQGQNVLHGYPKDIYSSFGFPRTVKHIDAALSEENTGKTYFFVANKYWRYDEYKRSMDPGYPKMIAHDFPGIGHKVDAVFMKDGFFYFFHGTRQYKFDPKTKRILTLQKANSWFNCRKN

SEQ ID NO: 2137 - protein, 450 aa, Artificial Sequence
  MMP-1 variant L162T
FPATLETQEQDVDLVQKYLEKYYNLKNDGRQVEKRRNSGPVVEKLKQMQEFFGLKVTGKPDAETLKVMKQPRCGVPDVAQFVLTEGNPRWEQTHLTYRIENYTPDLPRADVDHAIEKAFQLWSNVTPLTFTKVSEGQADIMISFVRGDHRDNSPFDGPGGNTAHAFQPGPGIGGDAHFDEDERWTNNFREYNLHRVAAHELGHSLGLSHSTDIGALMYPSYTFSGDVQLAQDDIDGIQAIYGRSQNPVQPIGPQTPKACDSKLTFDAITTIRGEVMFFKDRFYMRTNPFYPEVELNFISVFWPQLPNGLEAAYEFADRDEVRFFKGNKYWAVQGQNVLHGYPKDIYSSFGFPRTVKHIDAALSEENTGKTYFFVANKYWRYDEYKRSMDPGYPKMIAHDFPGIGHKVDAVFMKDGFFYFFHGTRQYKFDPKTKRILTLQKANSWFNCRKN

SEQ ID NO: 2138 - protein, 450 aa, Artificial Sequence
  MMP-1 variant L162Y
FPATLETQEQDVDLVQKYLEKYYNLKNDGRQVEKRRNSGPVVEKLKQMQEFFGLKVTGKPDAETLKVMKQPRCGVPDVAQFVLTEGNPRWEQTHLTYRIENYTPDLPRADVDHAIEKAFQLWSNVTPLTFTKVSEGQADIMISFVRGDHRDNSPFDGPGGNYAHAFQPGPGIGGDAHFDEDERWTNNFREYNLHRVAAHELGHSLGLSHSTDIGALMYPSYTFSGDVQLAQDDIDGIQAIYGRSQNPVQPIGPQTPKACDSKLTFDAITTIRGEVMFFKDRFYMRTNPFYPEVELNFISVFWPQLPNGLEAAYEFADRDEVRFFKGNKYWAVQGQNVLHGYPKDIYSSFGFPRTVKHIDAALSEENTGKTYFFVANKYWRYDEYKRSMDPGYPKMIAHDFPGIGHKVDAVFMKDGFFYFFHGTRQYKFDPKTKRILTLQKANSWFNCRKN

SEQ ID NO: 2139 - protein, 450 aa, Artificial Sequence
  MMP-1 variant L162S
FPATLETQEQDVDLVQKYLEKYYNLKNDGRQVEKRRNSGPVVEKLKQMQEFFGLKVTGKPDAETLKVMKQPRCGVPDVAQFVLTEGNPRWEQTHLTYRIENYTPDLPRADVDHAIEKAFQLWSNVTPLTFTKVSEGQADIMISFVRGDHRDNSPFDGPGGNSAHAFQPGPGIGGDAHFDEDERWTNNFREYNLHRVAAHELGHSLGLSHSTDIGALMYPSYTFSGDVQLAQDDIDGIQAIYGRSQNPVQPIGPQTPKACDSKLTFDAITTIRGEVMFFKDRFYMRTNPFYPEVELNFISVFWPQLPNGLEAAYEFADRDEVRFFKGNKYWAVQGQNVLHGYPKDIYSSFGFPRTVKHIDAALSEENTGKTYFFVANKYWRYDEYKRSMDPGYPKMIAHDFPGIGHKVDAVFMKDGFFYFFHGTRQYKFDPKTKRILTLQKANSWFNCRKN

SEQ ID NO: 2140 - protein, 450 aa, Artificial Sequence
  MMP-1 variant L162G
FPATLETQEQDVDLVQKYLEKYYNLKNDGRQVEKRRNSGPVVEKLKQMQEFFGLKVTGKPDAETLKVMKQPRCGVPDVAQFVLTEGNPRWEQTHLTYRIENYTPDLPRADVDHAIEKAFQLWSNVTPLTFTKVSEGQADIMISFVRGDHRDNSPFDGPGGNGAHAFQPGPGIGGDAHFDEDERWTNNFREYNLHRVAAHELGHSLGLSHSTDIGALMYPSYTFSGDVQLAQDDIDGIQAIYGRSQNPVQPIGPQTPKACDSKLTFDAITTIRGEVMFFKDRFYMRTNPFYPEVELNFISVFWPQLPNGLEAAYEFADRDEVRFFKGNKYWAVQGQNVLHGYPKDIYSSFGFPRTVKHIDAALSEENTGKTYFFVANKYWRYDEYKRSMDPGYPKMIAHDFPGIGHKVDAVFMKDGFFYFFHGTRQYKFDPKTKRILTLQKANSWFNCRKN

SEQ ID NO: 2141 - protein, 450 aa, Artificial Sequence
  MMP-1 variant L162F
FPATLETQEQDVDLVQKYLEKYYNLKNDGRQVEKRRNSGPVVEKLKQMQEFFGLKVTGKPDAETLKVMKQPRCGVPDVAQFVLTEGNPRWEQTHLTYRIENYTPDLPRADVDHAIEKAFQLWSNVTPLTFTKVSEGQADIMISFVRGDHRDNSPFDGPGGNFAHAFQPGPGIGGDAHFDEDERWTNNFREYNLHRVAAHELGHSLGLSHSTDIGALMYPSYTFSGDVQLAQDDIDGIQAIYGRSQNPVQPIGPQTPKACDSKLTFDAITTIRGEVMFFKDRFYMRTNPFYPEVELNFISVFWPQLPNGLEAAYEFADRDEVRFFKGNKYWAVQGQNVLHGYPKDIYSSFGFPRTVKHIDAALSEENTGKTYFFVANKYWRYDEYKRSMDPGYPKMIAHDFPGIGHKVDAVFMKDGFFYFFHGTRQYKFDPKTKRILTLQKANSWFNCRKN

SEQ ID NO: 2142 - protein, 450 aa, Artificial Sequence
  MMP-1 variant L162M
FPATLETQEQDVDLVQKYLEKYYNLKNDGRQVEKRRNSGPVVEKLKQMQEFFGLKVTGKPDAETLKVMKQPRCGVPDVAQFVLTEGNPRWEQTHLTYRIENYTPDLPRADVDHAIEKAFQLWSNVTPLTFTKVSEGQADIMISFVRGDHRDNSPFDGPGGNMAHAFQPGPGIGGDAHFDEDERWTNNFREYNLHRVAAHELGHSLGLSHSTDIGALMYPSYTFSGDVQLAQDDIDGIQAIYGRSQNPVQPIGPQTPKACDSKLTFDAITTIRGEVMFFKDRFYMRTNPFYPEVELNFISVFWPQLPNGLEAAYEFADRDEVRFFKGNKYWAVQGQNVLHGYPKDIYSSFGFPRTVKHIDAALSEENTGKTYFFVANKYWRYDEYKRSMDPGYPKMIAHDFPGIGHKVDAVFMKDGFFYFFHGTRQYKFDPKTKRILTLQKANSWFNCRKN

SEQ ID NO: 2143 - protein, 450 aa, Artificial Sequence
  MMP-1 variant L162W
FPATLETQEQDVDLVQKYLEKYYNLKNDGRQVEKRRNSGPVVEKLKQMQEFFGLKVTGKPDAETLKVMKQPRCGVPDVAQFVLTEGNPRWEQTHLTYRIENYTPDLPRADVDHAIEKAFQLWSNVTPLTFTKVSEGQADIMISFVRGDHRDNSPFDGPGGNWAHAFQPGPGIGGDAHFDEDERWTNNFREYNLHRVAAHELGHSLGLSHSTDIGALMYPSYTFSGDVQLAQDDIDGIQAIYGRSQNPVQPIGPQTPKACDSKLTFDAITTIRGEVMFFKDRFYMRTNPFYPEVELNFISVFWPQLPNGLEAAYEFADRDEVRFFKGNKYWAVQGQNVLHGYPKDIYSSFGFPRTVKHIDAALSEENTGKTYFFVANKYWRYDEYKRSMDPGYPKMIAHDFPGIGHKVDAVFMKDGFFYFFHGTRQYKFDPKTKRILTLQKANSWFNCRKN

SEQ ID NO: 2144 - protein, 450 aa, Artificial Sequence
  MMP-1 variant L162I
FPATLETQEQDVDLVQKYLEKYYNLKNDGRQVEKRRNSGPVVEKLKQMQEFFGLKVTGKPDAETLKVMKQPRCGVPDVAQFVLTEGNPRWEQTHLTYRIENYTPDLPRADVDHAIEKAFQLWSNVTPLTFTKVSEGQADIMISFVRGDHRDNSPFDGPGGNIAHAFQPGPGIGGDAHFDEDERWTNNFREYNLHRVAAHELGHSLGLSHSTDIGALMYPSYTFSGDVQLAQDDIDGIQAIYGRSQNPVQPIGPQTPKACDSKLTFDAITTIRGEVMFFKDRFYMRTNPFYPEVELNFISVFWPQLPNGLEAAYEFADRDEVRFFKGNKYWAVQGQNVLHGYPKDIYSSFGFPRTVKHIDAALSEENTGKTYFFVANKYWRYDEYKRSMDPGYPKMIAHDFPGIGHKVDAVFMKDGFFYFFHGTRQYKFDPKTKRILTLQKANSWFNCRKN

SEQ ID NO: 2145 - protein, 450 aa, Artificial Sequence
  MMP-1 variant L162V
FPATLETQEQDVDLVQKYLEKYYNLKNDGRQVEKRRNSGPVVEKLKQMQEFFGLKVTGKPDAETLKVMKQPRCGVPDVAQFVLTEGNPRWEQTHLTYRIENYTPDLPRADVDHAIEKAFQLWSNVTPLTFTKVSEGQADIMISFVRGDHRDNSPFDGPGGNVAHAFQPGPGIGGDAHFDEDERWTNNFREYNLHRVAAHELGHSLGLSHSTDIGALMYPSYTFSGDVQLAQDDIDGIQAIYGRSQNPVQPIGPQTPKACDSKLTFDAITTIRGEVMFFKDRFYMRTNPFYPEVELNFISVFWPQLPNGLEAAYEFADRDEVRFFKGNKYWAVQGQNVLHGYPKDIYSSFGFPRTVKHIDAALSEENTGKTYFFVANKYWRYDEYKRSMDPGYPKMIAHDFPGIGHKVDAVFMKDGFFYFFHGTRQYKFDPKTKRILTLQKANSWFNCRKN

SEQ ID NO: 2146 - protein, 450 aa, Artificial Sequence
  MMP-1 variant L162A
FPATLETQEQDVDLVQKYLEKYYNLKNDGRQVEKRRNSGPVVEKLKQMQEFFGLKVTGKPDAETLKVMKQPRCGVPDVAQFVLTEGNPRWEQTHLTYRIENYTPDLPRADVDHAIEKAFQLWSNVTPLTFTKVSEGQADIMISFVRGDHRDNSPFDGPGGNAAHAFQPGPGIGGDAHFDEDERWTNNFREYNLHRVAAHELGHSLGLSHSTDIGALMYPSYTFSGDVQLAQDDIDGIQAIYGRSQNPVQPIGPQTPKACDSKLTFDAITTIRGEVMFFKDRFYMRTNPFYPEVELNFISVFWPQLPNGLEAAYEFADRDEVRFFKGNKYWAVQGQNVLHGYPKDIYSSFGFPRTVKHIDAALSEENTGKTYFFVANKYWRYDEYKRSMDPGYPKMIAHDFPGIGHKVDAVFMKDGFFYFFHGTRQYKFDPKTKRILTLQKANSWFNCRKN

SEQ ID NO: 2147 - protein, 450 aa, Artificial Sequence
  MMP-1 variant L162P
FPATLETQEQDVDLVQKYLEKYYNLKNDGRQVEKRRNSGPVVEKLKQMQEFFGLKVTGKPDAETLKVMKQPRCGVPDVAQFVLTEGNPRWEQTHLTYRIENYTPDLPRADVDHAIEKAFQLWSNVTPLTFTKVSEGQADIMISFVRGDHRDNSPFDGPGGNPAHAFQPGPGIGGDAHFDEDERWTNNFREYNLHRVAAHELGHSLGLSHSTDIGALMYPSYTFSGDVQLAQDDIDGIQAIYGRSQNPVQPIGPQTPKACDSKLTFDAITTIRGEVMFFKDRFYMRTNPFYPEVELNFISVFWPQLPNGLEAAYEFADRDEVRFFKGNKYWAVQGQNVLHGYPKDIYSSFGFPRTVKHIDAALSEENTGKTYFFVANKYWRYDEYKRSMDPGYPKMIAHDFPGIGHKVDAVFMKDGFFYFFHGTRQYKFDPKTKRILTLQKANSWFNCRKN

SEQ ID NO: 2148 - protein, 450 aa, Artificial Sequence
  MMP-1 variant A163D
FPATLETQEQDVDLVQKYLEKYYNLKNDGRQVEKRRNSGPVVEKLKQMQEFFGLKVTGKPDAETLKVMKQPRCGVPDVAQFVLTEGNPRWEQTHLTYRIENYTPDLPRADVDHAIEKAFQLWSNVTPLTFTKVSEGQADIMISFVRGDHRDNSPFDGPGGNLDHAFQPGPGIGGDAHFDEDERWTNNFREYNLHRVAAHELGHSLGLSHSTDIGALMYPSYTFSGDVQLAQDDIDGIQAIYGRSQNPVQPIGPQTPKACDSKLTFDAITTIRGEVMFFKDRFYMRTNPFYPEVELNFISVFWPQLPNGLEAAYEFADRDEVRFFKGNKYWAVQGQNVLHGYPKDIYSSFGFPRTVKHIDAALSEENTGKTYFFVANKYWRYDEYKRSMDPGYPKMIAHDFPGIGHKVDAVFMKDGFFYFFHGTRQYKFDPKTKRILTLQKANSWFNCRKN

SEQ ID NO: 2149 - protein, 450 aa, Artificial Sequence
  MMP-1 variant A163E
FPATLETQEQDVDLVQKYLEKYYNLKNDGRQVEKRRNSGPVVEKLKQMQEFFGLKVTGKPDAETLKVMKQPRCGVPDVAQFVLTEGNPRWEQTHLTYRIENYTPDLPRADVDHAIEKAFQLWSNVTPLTFTKVSEGQADIMISFVRGDHRDNSPFDGPGGNLEHAFQPGPGIGGDAHFDEDERWTNNFREYNLHRVAAHELGHSLGLSHSTDIGALMYPSYTFSGDVQLAQDDIDGIQAIYGRSQNPVQPIGPQTPKACDSKLTFDAITTIRGEVMFFKDRFYMRTNPFYPEVELNFISVFWPQLPNGLEAAYEFADRDEVRFFKGNKYWAVQGQNVLHGYPKDIYSSFGFPRTVKHIDAALSEENTGKTYFFVANKYWRYDEYKRSMDPGYPKMIAHDFPGIGHKVDAVFMKDGFFYFFHGTRQYKFDPKTKRILTLQKANSWFNCRKN

SEQ ID NO: 2150 - protein, 450 aa, Artificial Sequence
  MMP-1 variant A163H
FPATLETQEQDVDLVQKYLEKYYNLKNDGRQVEKRRNSGPVVEKLKQMQEFFGLKVTGKPDAETLKVMKQPRCGVPDVAQFVLTEGNPRWEQTHLTYRIENYTPDLPRADVDHAIEKAFQLWSNVTPLTFTKVSEGQADIMISFVRGDHRDNSPFDGPGGNLHHAFQPGPGIGGDAHFDEDERWTNNFREYNLHRVAAHELGHSLGLSHSTDIGALMYPSYTFSGDVQLAQDDIDGIQAIYGRSQNPVQPIGPQTPKACDSKLTFDAITTIRGEVMFFKDRFYMRTNPFYPEVELNFISVFWPQLPNGLEAAYEFADRDEVRFFKGNKYWAVQGQNVLHGYPKDIYSSFGFPRTVKHIDAALSEENTGKTYFFVANKYWRYDEYKRSMDPGYPKMIAHDFPGIGHKVDAVFMKDGFFYFFHGTRQYKFDPKTKRILTLQKANSWFNCRKN

SEQ ID NO: 2151 - protein, 450 aa, Artificial Sequence
  MMP-1 variant A163K
FPATLETQEQDVDLVQKYLEKYYNLKNDGRQVEKRRNSGPVVEKLKQMQEFFGLKVTGKPDAETLKVMKQPRCGVPDVAQFVLTEGNPRWEQTHLTYRIENYTPDLPRADVDHAIEKAFQLWSNVTPLTFTKVSEGQADIMISFVRGDHRDNSPFDGPGGNLKHAFQPGPGIGGDAHFDEDERWTNNFREYNLHRVAAHELGHSLGLSHSTDIGALMYPSYTFSGDVQLAQDDIDGIQAIYGRSQNPVQPIGPQTPKACDSKLTFDAITTIRGEVMFFKDRFYMRTNPFYPEVELNFISVFWPQLPNGLEAAYEFADRDEVRFFKGNKYWAVQGQNVLHGYPKDIYSSFGFPRTVKHIDAALSEENTGKTYFFVANKYWRYDEYKRSMDPGYPKMIAHDFPGIGHKVDAVFMKDGFFYFFHGTRQYKFDPKTKRILTLQKANSWFNCRKN

SEQ ID NO: 2152 - protein, 450 aa, Artificial Sequence
  MMP-1 variant A163R
FPATLETQEQDVDLVQKYLEKYYNLKNDGRQVEKRRNSGPVVEKLKQMQEFFGLKVTGKPDAETLKVMKQPRCGVPDVAQFVLTEGNPRWEQTHLTYRIENYTPDLPRADVDHAIEKAFQLWSNVTPLTFTKVSEGQADIMISFVRGDHRDNSPFDGPGGNLRHAFQPGPGIGGDAHFDEDERWTNNFREYNLHRVAAHELGHSLGLSHSTDIGALMYPSYTFSGDVQLAQDDIDGIQAIYGRSQNPVQPIGPQTPKACDSKLTFDAITTIRGEVMFFKDRFYMRTNPFYPEVELNFISVFWPQLPNGLEAAYEFADRDEVRFFKGNKYWAVQGQNVLHGYPKDIYSSFGFPRTVKHIDAALSEENTGKTYFFVANKYWRYDEYKRSMDPGYPKMIAHDFPGIGHKVDAVFMKDGFFYFFHGTRQYKFDPKTKRILTLQKANSWFNCRKN

SEQ ID NO: 2153 - protein, 450 aa, Artificial Sequence
  MMP-1 variant A163C
FPATLETQEQDVDLVQKYLEKYYNLKNDGRQVEKRRNSGPVVEKLKQMQEFFGLKVTGKPDAETLKVMKQPRCGVPDVAQFVLTEGNPRWEQTHLTYRIENYTPDLPRADVDHAIEKAFQLWSNVTPLTFTKVSEGQADIMISFVRGDHRDNSPFDGPGGNLCHAFQPGPGIGGDAHFDEDERWTNNFREYNLHRVAAHELGHSLGLSHSTDIGALMYPSYTFSGDVQLAQDDIDGIQAIYGRSQNPVQPIGPQTPKACDSKLTFDAITTIRGEVMFFKDRFYMRTNPFYPEVELNFISVFWPQLPNGLEAAYEFADRDEVRFFKGNKYWAVQGQNVLHGYPKDIYSSFGFPRTVKHIDAALSEENTGKTYFFVANKYWRYDEYKRSMDPGYPKMIAHDFPGIGHKVDAVFMKDGFFYFFHGTRQYKFDPKTKRILTLQKANSWFNCRKN

SEQ ID NO: 2154 - protein, 450 aa, Artificial Sequence
  MMP-1 variant A163N
FPATLETQEQDVDLVQKYLEKYYNLKNDGRQVEKRRNSGPVVEKLKQMQEFFGLKVTGKPDAETLKVMKQPRCGVPDVAQFVLTEGNPRWEQTHLTYRIENYTPDLPRADVDHAIEKAFQLWSNVTPLTFTKVSEGQADIMISFVRGDHRDNSPFDGPGGNLNHAFQPGPGIGGDAHFDEDERWTNNFREYNLHRVAAHELGHSLGLSHSTDIGALMYPSYTFSGDVQLAQDDIDGIQAIYGRSQNPVQPIGPQTPKACDSKLTFDAITTIRGEVMFFKDRFYMRTNPFYPEVELNFISVFWPQLPNGLEAAYEFADRDEVRFFKGNKYWAVQGQNVLHGYPKDIYSSFGFPRTVKHIDAALSEENTGKTYFFVANKYWRYDEYKRSMDPGYPKMIAHDFPGIGHKVDAVFMKDGFFYFFHGTRQYKFDPKTKRILTLQKANSWFNCRKN

SEQ ID NO: 2155 - protein, 450 aa, Artificial Sequence
  MMP-1 variant A163Q
FPATLETQEQDVDLVQKYLEKYYNLKNDGRQVEKRRNSGPVVEKLKQMQEFFGLKVTGKPDAETLKVMKQPRCGVPDVAQFVLTEGNPRWEQTHLTYRIENYTPDLPRADVDHAIEKAFQLWSNVTPLTFTKVSEGQADIMISFVRGDHRDNSPFDGPGGNLQHAFQPGPGIGGDAHFDEDERWTNNFREYNLHRVAAHELGHSLGLSHSTDIGALMYPSYTFSGDVQLAQDDIDGIQAIYGRSQNPVQPIGPQTPKACDSKLTFDAITTIRGEVMFFKDRFYMRTNPFYPEVELNFISVFWPQLPNGLEAAYEFADRDEVRFFKGNKYWAVQGQNVLHGYPKDIYSSFGFPRTVKHIDAALSEENTGKTYFFVANKYWRYDEYKRSMDPGYPKMIAHDFPGIGHKVDAVFMKDGFFYFFHGTRQYKFDPKTKRILTLQKANSWFNCRKN

SEQ ID NO: 2156 - protein, 450 aa, Artificial Sequence
  MMP-1 variant A163T
FPATLETQEQDVDLVQKYLEKYYNLKNDGRQVEKRRNSGPVVEKLKQMQEFFGLKVTGKPDAETLKVMKQPRCGVPDVAQFVLTEGNPRWEQTHLTYRIENYTPDLPRADVDHAIEKAFQLWSNVTPLTFTKVSEGQADIMISFVRGDHRDNSPFDGPGGNLTHAFQPGPGIGGDAHFDEDERWTNNFREYNLHRVAAHELGHSLGLSHSTDIGALMYPSYTFSGDVQLAQDDIDGIQAIYGRSQNPVQPIGPQTPKACDSKLTFDAITTIRGEVMFFKDRFYMRTNPFYPEVELNFISVFWPQLPNGLEAAYEFADRDEVRFFKGNKYWAVQGQNVLHGYPKDIYSSFGFPRTVKHIDAALSEENTGKTYFFVANKYWRYDEYKRSMDPGYPKMIAHDFPGIGHKVDAVFMKDGFFYFFHGTRQYKFDPKTKRILTLQKANSWFNCRKN

SEQ ID NO: 2157 - protein, 450 aa, Artificial Sequence
  MMP-1 variant A163Y
FPATLETQEQDVDLVQKYLEKYYNLKNDGRQVEKRRNSGPVVEKLKQMQEFFGLKVTGKPDAETLKVMKQPRCGVPDVAQFVLTEGNPRWEQTHLTYRIENYTPDLPRADVDHAIEKAFQLWSNVTPLTFTKVSEGQADIMISFVRGDHRDNSPFDGPGGNLYHAFQPGPGIGGDAHFDEDERWTNNFREYNLHRVAAHELGHSLGLSHSTDIGALMYPSYTFSGDVQLAQDDIDGIQAIYGRSQNPVQPIGPQTPKACDSKLTFDAITTIRGEVMFFKDRFYMRTNPFYPEVELNFISVFWPQLPNGLEAAYEFADRDEVRFFKGNKYWAVQGQNVLHGYPKDIYSSFGFPRTVKHIDAALSEENTGKTYFFVANKYWRYDEYKRSMDPGYPKMIAHDFPGIGHKVDAVFMKDGFFYFFHGTRQYKFDPKTKRILTLQKANSWFNCRKN

SEQ ID NO: 2158 - protein, 450 aa, Artificial Sequence
  MMP-1 variant A163S
FPATLETQEQDVDLVQKYLEKYYNLKNDGRQVEKRRNSGPVVEKLKQMQEFFGLKVTGKPDAETLKVMKQPRCGVPDVAQFVLTEGNPRWEQTHLTYRIENYTPDLPRADVDHAIEKAFQLWSNVTPLTFTKVSEGQADIMISFVRGDHRDNSPFDGPGGNLSHAFQPGPGIGGDAHFDEDERWTNNFREYNLHRVAAHELGHSLGLSHSTDIGALMYPSYTFSGDVQLAQDDIDGIQAIYGRSQNPVQPIGPQTPKACDSKLTFDAITTIRGEVMFFKDRFYMRTNPFYPEVELNFISVFWPQLPNGLEAAYEFADRDEVRFFKGNKYWAVQGQNVLHGYPKDIYSSFGFPRTVKHIDAALSEENTGKTYFFVANKYWRYDEYKRSMDPGYPKMIAHDFPGIGHKVDAVFMKDGFFYFFHGTRQYKFDPKTKRILTLQKANSWFNCRKN

SEQ ID NO: 2159 - protein, 450 aa, Artificial Sequence
  MMP-1 variant A163G
FPATLETQEQDVDLVQKYLEKYYNLKNDGRQVEKRRNSGPVVEKLKQMQEFFGLKVTGKPDAETLKVMKQPRCGVPDVAQFVLTEGNPRWEQTHLTYRIENYTPDLPRADVDHAIEKAFQLWSNVTPLTFTKVSEGQADIMISFVRGDHRDNSPFDGPGGNLGHAFQPGPGIGGDAHFDEDERWTNNFREYNLHRVAAHELGHSLGLSHSTDIGALMYPSYTFSGDVQLAQDDIDGIQAIYGRSQNPVQPIGPQTPKACDSKLTFDAITTIRGEVMFFKDRFYMRTNPFYPEVELNFISVFWPQLPNGLEAAYEFADRDEVRFFKGNKYWAVQGQNVLHGYPKDIYSSFGFPRTVKHIDAALSEENTGKTYFFVANKYWRYDEYKRSMDPGYPKMIAHDFPGIGHKVDAVFMKDGFFYFFHGTRQYKFDPKTKRILTLQKANSWFNCRKN

SEQ ID NO: 2160 - protein, 450 aa, Artificial Sequence
  MMP-1 variant A163F
FPATLETQEQDVDLVQKYLEKYYNLKNDGRQVEKRRNSGPVVEKLKQMQEFFGLKVTGKPDAETLKVMKQPRCGVPDVAQFVLTEGNPRWEQTHLTYRIENYTPDLPRADVDHAIEKAFQLWSNVTPLTFTKVSEGQADIMISFVRGDHRDNSPFDGPGGNLFHAFQPGPGIGGDAHFDEDERWTNNFREYNLHRVAAHELGHSLGLSHSTDIGALMYPSYTFSGDVQLAQDDIDGIQAIYGRSQNPVQPIGPQTPKACDSKLTFDAITTIRGEVMFFKDRFYMRTNPFYPEVELNFISVFWPQLPNGLEAAYEFADRDEVRFFKGNKYWAVQGQNVLHGYPKDIYSSFGFPRTVKHIDAALSEENTGKTYFFVANKYWRYDEYKRSMDPGYPKMIAHDFPGIGHKVDAVFMKDGFFYFFHGTRQYKFDPKTKRILTLQKANSWFNCRKN

SEQ ID NO: 2161 - protein, 450 aa, Artificial Sequence
  MMP-1 variant A163M
FPATLETQEQDVDLVQKYLEKYYNLKNDGRQVEKRRNSGPVVEKLKQMQEFFGLKVTGKPDAETLKVMKQPRCGVPDVAQFVLTEGNPRWEQTHLTYRIENYTPDLPRADVDHAIEKAFQLWSNVTPLTFTKVSEGQADIMISFVRGDHRDNSPFDGPGGNLMHAFQPGPGIGGDAHFDEDERWTNNFREYNLHRVAAHELGHSLGLSHSTDIGALMYPSYTFSGDVQLAQDDIDGIQAIYGRSQNPVQPIGPQTPKACDSKLTFDAITTIRGEVMFFKDRFYMRTNPFYPEVELNFISVFWPQLPNGLEAAYEFADRDEVRFFKGNKYWAVQGQNVLHGYPKDIYSSFGFPRTVKHIDAALSEENTGKTYFFVANKYWRYDEYKRSMDPGYPKMIAHDFPGIGHKVDAVFMKDGFFYFFHGTRQYKFDPKTKRILTLQKANSWFNCRKN

SEQ ID NO: 2162 - protein, 450 aa, Artificial Sequence
  MMP-1 variant A163W
FPATLETQEQDVDLVQKYLEKYYNLKNDGRQVEKRRNSGPVVEKLKQMQEFFGLKVTGKPDAETLKVMKQPRCGVPDVAQFVLTEGNPRWEQTHLTYRIENYTPDLPRADVDHAIEKAFQLWSNVTPLTFTKVSEGQADIMISFVRGDHRDNSPFDGPGGNLWHAFQPGPGIGGDAHFDEDERWTNNFREYNLHRVAAHELGHSLGLSHSTDIGALMYPSYTFSGDVQLAQDDIDGIQAIYGRSQNPVQPIGPQTPKACDSKLTFDAITTIRGEVMFFKDRFYMRTNPFYPEVELNFISVFWPQLPNGLEAAYEFADRDEVRFFKGNKYWAVQGQNVLHGYPKDIYSSFGFPRTVKHIDAALSEENTGKTYFFVANKYWRYDEYKRSMDPGYPKMIAHDFPGIGHKVDAVFMKDGFFYFFHGTRQYKFDPKTKRILTLQKANSWFNCRKN

SEQ ID NO: 2163 - protein, 450 aa, Artificial Sequence
  MMP-1 variant A163I
FPATLETQEQDVDLVQKYLEKYYNLKNDGRQVEKRRNSGPVVEKLKQMQEFFGLKVTGKPDAETLKVMKQPRCGVPDVAQFVLTEGNPRWEQTHLTYRIENYTPDLPRADVDHAIEKAFQLWSNVTPLTFTKVSEGQADIMISFVRGDHRDNSPFDGPGGNLIHAFQPGPGIGGDAHFDEDERWTNNFREYNLHRVAAHELGHSLGLSHSTDIGALMYPSYTFSGDVQLAQDDIDGIQAIYGRSQNPVQPIGPQTPKACDSKLTFDAITTIRGEVMFFKDRFYMRTNPFYPEVELNFISVFWPQLPNGLEAAYEFADRDEVRFFKGNKYWAVQGQNVLHGYPKDIYSSFGFPRTVKHIDAALSEENTGKTYFFVANKYWRYDEYKRSMDPGYPKMIAHDFPGIGHKVDAVFMKDGFFYFFHGTRQYKFDPKTKRILTLQKANSWFNCRKN

SEQ ID NO: 2164 - protein, 450 aa, Artificial Sequence
  MMP-1 variant A163V
FPATLETQEQDVDLVQKYLEKYYNLKNDGRQVEKRRNSGPVVEKLKQMQEFFGLKVTGKPDAETLKVMKQPRCGVPDVAQFVLTEGNPRWEQTHLTYRIENYTPDLPRADVDHAIEKAFQLWSNVTPLTFTKVSEGQADIMISFVRGDHRDNSPFDGPGGNLVHAFQPGPGIGGDAHFDEDERWTNNFREYNLHRVAAHELGHSLGLSHSTDIGALMYPSYTFSGDVQLAQDDIDGIQAIYGRSQNPVQPIGPQTPKACDSKLTFDAITTIRGEVMFFKDRFYMRTNPFYPEVELNFISVFWPQLPNGLEAAYEFADRDEVRFFKGNKYWAVQGQNVLHGYPKDIYSSFGFPRTVKHIDAALSEENTGKTYFFVANKYWRYDEYKRSMDPGYPKMIAHDFPGIGHKVDAVFMKDGFFYFFHGTRQYKFDPKTKRILTLQKANSWFNCRKN

SEQ ID NO: 2165 - protein, 450 aa, Artificial Sequence
  MMP-1 variant A163L
FPATLETQEQDVDLVQKYLEKYYNLKNDGRQVEKRRNSGPVVEKLKQMQEFFGLKVTGKPDAETLKVMKQPRCGVPDVAQFVLTEGNPRWEQTHLTYRIENYTPDLPRADVDHAIEKAFQLWSNVTPLTFTKVSEGQADIMISFVRGDHRDNSPFDGPGGNLLHAFQPGPGIGGDAHFDEDERWTNNFREYNLHRVAAHELGHSLGLSHSTDIGALMYPSYTFSGDVQLAQDDIDGIQAIYGRSQNPVQPIGPQTPKACDSKLTFDAITTIRGEVMFFKDRFYMRTNPFYPEVELNFISVFWPQLPNGLEAAYEFADRDEVRFFKGNKYWAVQGQNVLHGYPKDIYSSFGFPRTVKHIDAALSEENTGKTYFFVANKYWRYDEYKRSMDPGYPKMIAHDFPGIGHKVDAVFMKDGFFYFFHGTRQYKFDPKTKRILTLQKANSWFNCRKN

SEQ ID NO: 2166 - protein, 450 aa, Artificial Sequence
  MMP-1 variant A163P
FPATLETQEQDVDLVQKYLEKYYNLKNDGRQVEKRRNSGPVVEKLKQMQEFFGLKVTGKPDAETLKVMKQPRCGVPDVAQFVLTEGNPRWEQTHLTYRIENYTPDLPRADVDHAIEKAFQLWSNVTPLTFTKVSEGQADIMISFVRGDHRDNSPFDGPGGNLPHAFQPGPGIGGDAHFDEDERWTNNFREYNLHRVAAHELGHSLGLSHSTDIGALMYPSYTFSGDVQLAQDDIDGIQAIYGRSQNPVQPIGPQTPKACDSKLTFDAITTIRGEVMFFKDRFYMRTNPFYPEVELNFISVFWPQLPNGLEAAYEFADRDEVRFFKGNKYWAVQGQNVLHGYPKDIYSSFGFPRTVKHIDAALSEENTGKTYFFVANKYWRYDEYKRSMDPGYPKMIAHDFPGIGHKVDAVFMKDGFFYFFHGTRQYKFDPKTKRILTLQKANSWFNCRKN

SEQ ID NO: 2167 - protein, 450 aa, Artificial Sequence
  MMP-1 variant H164D
FPATLETQEQDVDLVQKYLEKYYNLKNDGRQVEKRRNSGPVVEKLKQMQEFFGLKVTGKPDAETLKVMKQPRCGVPDVAQFVLTEGNPRWEQTHLTYRIENYTPDLPRADVDHAIEKAFQLWSNVTPLTFTKVSEGQADIMISFVRGDHRDNSPFDGPGGNLADAFQPGPGIGGDAHFDEDERWTNNFREYNLHRVAAHELGHSLGLSHSTDIGALMYPSYTFSGDVQLAQDDIDGIQAIYGRSQNPVQPIGPQTPKACDSKLTFDAITTIRGEVMFFKDRFYMRTNPFYPEVELNFISVFWPQLPNGLEAAYEFADRDEVRFFKGNKYWAVQGQNVLHGYPKDIYSSFGFPRTVKHIDAALSEENTGKTYFFVANKYWRYDEYKRSMDPGYPKMIAHDFPGIGHKVDAVFMKDGFFYFFHGTRQYKFDPKTKRILTLQKANSWFNCRKN

SEQ ID NO: 2168 - protein, 450 aa, Artificial Sequence
  MMP-1 variant H164E
FPATLETQEQDVDLVQKYLEKYYNLKNDGRQVEKRRNSGPVVEKLKQMQEFFGLKVTGKPDAETLKVMKQPRCGVPDVAQFVLTEGNPRWEQTHLTYRIENYTPDLPRADVDHAIEKAFQLWSNVTPLTFTKVSEGQADIMISFVRGDHRDNSPFDGPGGNLAEAFQPGPGIGGDAHFDEDERWTNNFREYNLHRVAAHELGHSLGLSHSTDIGALMYPSYTFSGDVQLAQDDIDGIQAIYGRSQNPVQPIGPQTPKACDSKLTFDAITTIRGEVMFFKDRFYMRTNPFYPEVELNFISVFWPQLPNGLEAAYEFADRDEVRFFKGNKYWAVQGQNVLHGYPKDIYSSFGFPRTVKHIDAALSEENTGKTYFFVANKYWRYDEYKRSMDPGYPKMIAHDFPGIGHKVDAVFMKDGFFYFFHGTRQYKFDPKTKRILTLQKANSWFNCRKN

SEQ ID NO: 2169 - protein, 450 aa, Artificial Sequence
  MMP-1 variant H164K
FPATLETQEQDVDLVQKYLEKYYNLKNDGRQVEKRRNSGPVVEKLKQMQEFFGLKVTGKPDAETLKVMKQPRCGVPDVAQFVLTEGNPRWEQTHLTYRIENYTPDLPRADVDHAIEKAFQLWSNVTPLTFTKVSEGQADIMISFVRGDHRDNSPFDGPGGNLAKAFQPGPGIGGDAHFDEDERWTNNFREYNLHRVAAHELGHSLGLSHSTDIGALMYPSYTFSGDVQLAQDDIDGIQAIYGRSQNPVQPIGPQTPKACDSKLTFDAITTIRGEVMFFKDRFYMRTNPFYPEVELNFISVFWPQLPNGLEAAYEFADRDEVRFFKGNKYWAVQGQNVLHGYPKDIYSSFGFPRTVKHIDAALSEENTGKTYFFVANKYWRYDEYKRSMDPGYPKMIAHDFPGIGHKVDAVFMKDGFFYFFHGTRQYKFDPKTKRILTLQKANSWFNCRKN

SEQ ID NO: 2170 - protein, 450 aa, Artificial Sequence
  MMP-1 variant H164R
FPATLETQEQDVDLVQKYLEKYYNLKNDGRQVEKRRNSGPVVEKLKQMQEFFGLKVTGKPDAETLKVMKQPRCGVPDVAQFVLTEGNPRWEQTHLTYRIENYTPDLPRADVDHAIEKAFQLWSNVTPLTFTKVSEGQADIMISFVRGDHRDNSPFDGPGGNLARAFQPGPGIGGDAHFDEDERWTNNFREYNLHRVAAHELGHSLGLSHSTDIGALMYPSYTFSGDVQLAQDDIDGIQAIYGRSQNPVQPIGPQTPKACDSKLTFDAITTIRGEVMFFKDRFYMRTNPFYPEVELNFISVFWPQLPNGLEAAYEFADRDEVRFFKGNKYWAVQGQNVLHGYPKDIYSSFGFPRTVKHIDAALSEENTGKTYFFVANKYWRYDEYKRSMDPGYPKMIAHDFPGIGHKVDAVFMKDGFFYFFHGTRQYKFDPKTKRILTLQKANSWFNCRKN

SEQ ID NO: 2171 - protein, 450 aa, Artificial Sequence
  MMP-1 variant H164C
FPATLETQEQDVDLVQKYLEKYYNLKNDGRQVEKRRNSGPVVEKLKQMQEFFGLKVTGKPDAETLKVMKQPRCGVPDVAQFVLTEGNPRWEQTHLTYRIENYTPDLPRADVDHAIEKAFQLWSNVTPLTFTKVSEGQADIMISFVRGDHRDNSPFDGPGGNLACAFQPGPGIGGDAHFDEDERWTNNFREYNLHRVAAHELGHSLGLSHSTDIGALMYPSYTFSGDVQLAQDDIDGIQAIYGRSQNPVQPIGPQTPKACDSKLTFDAITTIRGEVMFFKDRFYMRTNPFYPEVELNFISVFWPQLPNGLEAAYEFADRDEVRFFKGNKYWAVQGQNVLHGYPKDIYSSFGFPRTVKHIDAALSEENTGKTYFFVANKYWRYDEYKRSMDPGYPKMIAHDFPGIGHKVDAVFMKDGFFYFFHGTRQYKFDPKTKRILTLQKANSWFNCRKN

SEQ ID NO: 2172 - protein, 450 aa, Artificial Sequence
  MMP-1 variant H164N
FPATLETQEQDVDLVQKYLEKYYNLKNDGRQVEKRRNSGPVVEKLKQMQEFFGLKVTGKPDAETLKVMKQPRCGVPDVAQFVLTEGNPRWEQTHLTYRIENYTPDLPRADVDHAIEKAFQLWSNVTPLTFTKVSEGQADIMISFVRGDHRDNSPFDGPGGNLANAFQPGPGIGGDAHFDEDERWTNNFREYNLHRVAAHELGHSLGLSHSTDIGALMYPSYTFSGDVQLAQDDIDGIQAIYGRSQNPVQPIGPQTPKACDSKLTFDAITTIRGEVMFFKDRFYMRTNPFYPEVELNFISVFWPQLPNGLEAAYEFADRDEVRFFKGNKYWAVQGQNVLHGYPKDIYSSFGFPRTVKHIDAALSEENTGKTYFFVANKYWRYDEYKRSMDPGYPKMIAHDFPGIGHKVDAVFMKDGFFYFFHGTRQYKFDPKTKRILTLQKANSWFNCRKN

SEQ ID NO: 2173 - protein, 450 aa, Artificial Sequence
  MMP-1 variant H164Q
FPATLETQEQDVDLVQKYLEKYYNLKNDGRQVEKRRNSGPVVEKLKQMQEFFGLKVTGKPDAETLKVMKQPRCGVPDVAQFVLTEGNPRWEQTHLTYRIENYTPDLPRADVDHAIEKAFQLWSNVTPLTFTKVSEGQADIMISFVRGDHRDNSPFDGPGGNLAQAFQPGPGIGGDAHFDEDERWTNNFREYNLHRVAAHELGHSLGLSHSTDIGALMYPSYTFSGDVQLAQDDIDGIQAIYGRSQNPVQPIGPQTPKACDSKLTFDAITTIRGEVMFFKDRFYMRTNPFYPEVELNFISVFWPQLPNGLEAAYEFADRDEVRFFKGNKYWAVQGQNVLHGYPKDIYSSFGFPRTVKHIDAALSEENTGKTYFFVANKYWRYDEYKRSMDPGYPKMIAHDFPGIGHKVDAVFMKDGFFYFFHGTRQYKFDPKTKRILTLQKANSWFNCRKN

SEQ ID NO: 2174 - protein, 450 aa, Artificial Sequence
  MMP-1 variant H164T
FPATLETQEQDVDLVQKYLEKYYNLKNDGRQVEKRRNSGPVVEKLKQMQEFFGLKVTGKPDAETLKVMKQPRCGVPDVAQFVLTEGNPRWEQTHLTYRIENYTPDLPRADVDHAIEKAFQLWSNVTPLTFTKVSEGQADIMISFVRGDHRDNSPFDGPGGNLATAFQPGPGIGGDAHFDEDERWTNNFREYNLHRVAAHELGHSLGLSHSTDIGALMYPSYTFSGDVQLAQDDIDGIQAIYGRSQNPVQPIGPQTPKACDSKLTFDAITTIRGEVMFFKDRFYMRTNPFYPEVELNFISVFWPQLPNGLEAAYEFADRDEVRFFKGNKYWAVQGQNVLHGYPKDIYSSFGFPRTVKHIDAALSEENTGKTYFFVANKYWRYDEYKRSMDPGYPKMIAHDFPGIGHKVDAVFMKDGFFYFFHGTRQYKFDPKTKRILTLQKANSWFNCRKN

SEQ ID NO: 2175 - protein, 450 aa, Artificial Sequence
  MMP-1 variant H164Y
FPATLETQEQDVDLVQKYLEKYYNLKNDGRQVEKRRNSGPVVEKLKQMQEFFGLKVTGKPDAETLKVMKQPRCGVPDVAQFVLTEGNPRWEQTHLTYRIENYTPDLPRADVDHAIEKAFQLWSNVTPLTFTKVSEGQADIMISFVRGDHRDNSPFDGPGGNLAYAFQPGPGIGGDAHFDEDERWTNNFREYNLHRVAAHELGHSLGLSHSTDIGALMYPSYTFSGDVQLAQDDIDGIQAIYGRSQNPVQPIGPQTPKACDSKLTFDAITTIRGEVMFFKDRFYMRTNPFYPEVELNFISVFWPQLPNGLEAAYEFADRDEVRFFKGNKYWAVQGQNVLHGYPKDIYSSFGFPRTVKHIDAALSEENTGKTYFFVANKYWRYDEYKRSMDPGYPKMIAHDFPGIGHKVDAVFMKDGFFYFFHGTRQYKFDPKTKRILTLQKANSWFNCRKN

SEQ ID NO: 2176 - protein, 450 aa, Artificial Sequence
  MMP-1 variant H164S
FPATLETQEQDVDLVQKYLEKYYNLKNDGRQVEKRRNSGPVVEKLKQMQEFFGLKVTGKPDAETLKVMKQPRCGVPDVAQFVLTEGNPRWEQTHLTYRIENYTPDLPRADVDHAIEKAFQLWSNVTPLTFTKVSEGQADIMISFVRGDHRDNSPFDGPGGNLASAFQPGPGIGGDAHFDEDERWTNNFREYNLHRVAAHELGHSLGLSHSTDIGALMYPSYTFSGDVQLAQDDIDGIQAIYGRSQNPVQPIGPQTPKACDSKLTFDAITTIRGEVMFFKDRFYMRTNPFYPEVELNFISVFWPQLPNGLEAAYEFADRDEVRFFKGNKYWAVQGQNVLHGYPKDIYSSFGFPRTVKHIDAALSEENTGKTYFFVANKYWRYDEYKRSMDPGYPKMIAHDFPGIGHKVDAVFMKDGFFYFFHGTRQYKFDPKTKRILTLQKANSWFNCRKN

SEQ ID NO: 2177 - protein, 450 aa, Artificial Sequence
  MMP-1 variant H164G
FPATLETQEQDVDLVQKYLEKYYNLKNDGRQVEKRRNSGPVVEKLKQMQEFFGLKVTGKPDAETLKVMKQPRCGVPDVAQFVLTEGNPRWEQTHLTYRIENYTPDLPRADVDHAIEKAFQLWSNVTPLTFTKVSEGQADIMISFVRGDHRDNSPFDGPGGNLAGAFQPGPGIGGDAHFDEDERWTNNFREYNLHRVAAHELGHSLGLSHSTDIGALMYPSYTFSGDVQLAQDDIDGIQAIYGRSQNPVQPIGPQTPKACDSKLTFDAITTIRGEVMFFKDRFYMRTNPFYPEVELNFISVFWPQLPNGLEAAYEFADRDEVRFFKGNKYWAVQGQNVLHGYPKDIYSSFGFPRTVKHIDAALSEENTGKTYFFVANKYWRYDEYKRSMDPGYPKMIAHDFPGIGHKVDAVFMKDGFFYFFHGTRQYKFDPKTKRILTLQKANSWFNCRKN

SEQ ID NO: 2178 - protein, 450 aa, Artificial Sequence
  MMP-1 variant H164F
FPATLETQEQDVDLVQKYLEKYYNLKNDGRQVEKRRNSGPVVEKLKQMQEFFGLKVTGKPDAETLKVMKQPRCGVPDVAQFVLTEGNPRWEQTHLTYRIENYTPDLPRADVDHAIEKAFQLWSNVTPLTFTKVSEGQADIMISFVRGDHRDNSPFDGPGGNLAFAFQPGPGIGGDAHFDEDERWTNNFREYNLHRVAAHELGHSLGLSHSTDIGALMYPSYTFSGDVQLAQDDIDGIQAIYGRSQNPVQPIGPQTPKACDSKLTFDAITTIRGEVMFFKDRFYMRTNPFYPEVELNFISVFWPQLPNGLEAAYEFADRDEVRFFKGNKYWAVQGQNVLHGYPKDIYSSFGFPRTVKHIDAALSEENTGKTYFFVANKYWRYDEYKRSMDPGYPKMIAHDFPGIGHKVDAVFMKDGFFYFFHGTRQYKFDPKTKRILTLQKANSWFNCRKN

SEQ ID NO: 2179 - protein, 450 aa, Artificial Sequence
  MMP-1 variant H164M
FPATLETQEQDVDLVQKYLEKYYNLKNDGRQVEKRRNSGPVVEKLKQMQEFFGLKVTGKPDAETLKVMKQPRCGVPDVAQFVLTEGNPRWEQTHLTYRIENYTPDLPRADVDHAIEKAFQLWSNVTPLTFTKVSEGQADIMISFVRGDHRDNSPFDGPGGNLAMAFQPGPGIGGDAHFDEDERWTNNFREYNLHRVAAHELGHSLGLSHSTDIGALMYPSYTFSGDVQLAQDDIDGIQAIYGRSQNPVQPIGPQTPKACDSKLTFDAITTIRGEVMFFKDRFYMRTNPFYPEVELNFISVFWPQLPNGLEAAYEFADRDEVRFFKGNKYWAVQGQNVLHGYPKDIYSSFGFPRTVKHIDAALSEENTGKTYFFVANKYWRYDEYKRSMDPGYPKMIAHDFPGIGHKVDAVFMKDGFFYFFHGTRQYKFDPKTKRILTLQKANSWFNCRKN

SEQ ID NO: 2180 - protein, 450 aa, Artificial Sequence
  MMP-1 variant H164W
FPATLETQEQDVDLVQKYLEKYYNLKNDGRQVEKRRNSGPVVEKLKQMQEFFGLKVTGKPDAETLKVMKQPRCGVPDVAQFVLTEGNPRWEQTHLTYRIENYTPDLPRADVDHAIEKAFQLWSNVTPLTFTKVSEGQADIMISFVRGDHRDNSPFDGPGGNLAWAFQPGPGIGGDAHFDEDERWTNNFREYNLHRVAAHELGHSLGLSHSTDIGALMYPSYTFSGDVQLAQDDIDGIQAIYGRSQNPVQPIGPQTPKACDSKLTFDAITTIRGEVMFFKDRFYMRTNPFYPEVELNFISVFWPQLPNGLEAAYEFADRDEVRFFKGNKYWAVQGQNVLHGYPKDIYSSFGFPRTVKHIDAALSEENTGKTYFFVANKYWRYDEYKRSMDPGYPKMIAHDFPGIGHKVDAVFMKDGFFYFFHGTRQYKFDPKTKRILTLQKANSWFNCRKN

SEQ ID NO: 2181 - protein, 450 aa, Artificial Sequence
  MMP-1 variant H164I
FPATLETQEQDVDLVQKYLEKYYNLKNDGRQVEKRRNSGPVVEKLKQMQEFFGLKVTGKPDAETLKVMKQPRCGVPDVAQFVLTEGNPRWEQTHLTYRIENYTPDLPRADVDHAIEKAFQLWSNVTPLTFTKVSEGQADIMISFVRGDHRDNSPFDGPGGNLAIAFQPGPGIGGDAHFDEDERWTNNFREYNLHRVAAHELGHSLGLSHSTDIGALMYPSYTFSGDVQLAQDDIDGIQAIYGRSQNPVQPIGPQTPKACDSKLTFDAITTIRGEVMFFKDRFYMRTNPFYPEVELNFISVFWPQLPNGLEAAYEFADRDEVRFFKGNKYWAVQGQNVLHGYPKDIYSSFGFPRTVKHIDAALSEENTGKTYFFVANKYWRYDEYKRSMDPGYPKMIAHDFPGIGHKVDAVFMKDGFFYFFHGTRQYKFDPKTKRILTLQKANSWFNCRKN

SEQ ID NO: 2182 - protein, 450 aa, Artificial Sequence
  MMP-1 variant H164V
FPATLETQEQDVDLVQKYLEKYYNLKNDGRQVEKRRNSGPVVEKLKQMQEFFGLKVTGKPDAETLKVMKQPRCGVPDVAQFVLTEGNPRWEQTHLTYRIENYTPDLPRADVDHAIEKAFQLWSNVTPLTFTKVSEGQADIMISFVRGDHRDNSPFDGPGGNLAVAFQPGPGIGGDAHFDEDERWTNNFREYNLHRVAAHELGHSLGLSHSTDIGALMYPSYTFSGDVQLAQDDIDGIQAIYGRSQNPVQPIGPQTPKACDSKLTFDAITTIRGEVMFFKDRFYMRTNPFYPEVELNFISVFWPQLPNGLEAAYEFADRDEVRFFKGNKYWAVQGQNVLHGYPKDIYSSFGFPRTVKHIDAALSEENTGKTYFFVANKYWRYDEYKRSMDPGYPKMIAHDFPGIGHKVDAVFMKDGFFYFFHGTRQYKFDPKTKRILTLQKANSWFNCRKN

SEQ ID NO: 2183 - protein, 450 aa, Artificial Sequence
  MMP-1 variant H164L
FPATLETQEQDVDLVQKYLEKYYNLKNDGRQVEKRRNSGPVVEKLKQMQEFFGLKVTGKPDAETLKVMKQPRCGVPDVAQFVLTEGNPRWEQTHLTYRIENYTPDLPRADVDHAIEKAFQLWSNVTPLTFTKVSEGQADIMISFVRGDHRDNSPFDGPGGNLALAFQPGPGIGGDAHFDEDERWTNNFREYNLHRVAAHELGHSLGLSHSTDIGALMYPSYTFSGDVQLAQDDIDGIQAIYGRSQNPVQPIGPQTPKACDSKLTFDAITTIRGEVMFFKDRFYMRTNPFYPEVELNFISVFWPQLPNGLEAAYEFADRDEVRFFKGNKYWAVQGQNVLHGYPKDIYSSFGFPRTVKHIDAALSEENTGKTYFFVANKYWRYDEYKRSMDPGYPKMIAHDFPGIGHKVDAVFMKDGFFYFFHGTRQYKFDPKTKRILTLQKANSWFNCRKN

SEQ ID NO: 2184 - protein, 450 aa, Artificial Sequence
  MMP-1 variant H164A
FPATLETQEQDVDLVQKYLEKYYNLKNDGRQVEKRRNSGPVVEKLKQMQEFFGLKVTGKPDAETLKVMKQPRCGVPDVAQFVLTEGNPRWEQTHLTYRIENYTPDLPRADVDHAIEKAFQLWSNVTPLTFTKVSEGQADIMISFVRGDHRDNSPFDGPGGNLAAAFQPGPGIGGDAHFDEDERWTNNFREYNLHRVAAHELGHSLGLSHSTDIGALMYPSYTFSGDVQLAQDDIDGIQAIYGRSQNPVQPIGPQTPKACDSKLTFDAITTIRGEVMFFKDRFYMRTNPFYPEVELNFISVFWPQLPNGLEAAYEFADRDEVRFFKGNKYWAVQGQNVLHGYPKDIYSSFGFPRTVKHIDAALSEENTGKTYFFVANKYWRYDEYKRSMDPGYPKMIAHDFPGIGHKVDAVFMKDGFFYFFHGTRQYKFDPKTKRILTLQKANSWFNCRKN

SEQ ID NO: 2185 - protein, 450 aa, Artificial Sequence
  MMP-1 variant H164P
FPATLETQEQDVDLVQKYLEKYYNLKNDGRQVEKRRNSGPVVEKLKQMQEFFGLKVTGKPDAETLKVMKQPRCGVPDVAQFVLTEGNPRWEQTHLTYRIENYTPDLPRADVDHAIEKAFQLWSNVTPLTFTKVSEGQADIMISFVRGDHRDNSPFDGPGGNLAPAFQPGPGIGGDAHFDEDERWTNNFREYNLHRVAAHELGHSLGLSHSTDIGALMYPSYTFSGDVQLAQDDIDGIQAIYGRSQNPVQPIGPQTPKACDSKLTFDAITTIRGEVMFFKDRFYMRTNPFYPEVELNFISVFWPQLPNGLEAAYEFADRDEVRFFKGNKYWAVQGQNVLHGYPKDIYSSFGFPRTVKHIDAALSEENTGKTYFFVANKYWRYDEYKRSMDPGYPKMIAHDFPGIGHKVDAVFMKDGFFYFFHGTRQYKFDPKTKRILTLQKANSWFNCRKN

SEQ ID NO: 2186 - protein, 450 aa, Artificial Sequence
  MMP-1 variant A165D
FPATLETQEQDVDLVQKYLEKYYNLKNDGRQVEKRRNSGPVVEKLKQMQEFFGLKVTGKPDAETLKVMKQPRCGVPDVAQFVLTEGNPRWEQTHLTYRIENYTPDLPRADVDHAIEKAFQLWSNVTPLTFTKVSEGQADIMISFVRGDHRDNSPFDGPGGNLAHDFQPGPGIGGDAHFDEDERWTNNFREYNLHRVAAHELGHSLGLSHSTDIGALMYPSYTFSGDVQLAQDDIDGIQAIYGRSQNPVQPIGPQTPKACDSKLTFDAITTIRGEVMFFKDRFYMRTNPFYPEVELNFISVFWPQLPNGLEAAYEFADRDEVRFFKGNKYWAVQGQNVLHGYPKDIYSSFGFPRTVKHIDAALSEENTGKTYFFVANKYWRYDEYKRSMDPGYPKMIAHDFPGIGHKVDAVFMKDGFFYFFHGTRQYKFDPKTKRILTLQKANSWFNCRKN

SEQ ID NO: 2187 - protein, 450 aa, Artificial Sequence
  MMP-1 variant A165E
FPATLETQEQDVDLVQKYLEKYYNLKNDGRQVEKRRNSGPVVEKLKQMQEFFGLKVTGKPDAETLKVMKQPRCGVPDVAQFVLTEGNPRWEQTHLTYRIENYTPDLPRADVDHAIEKAFQLWSNVTPLTFTKVSEGQADIMISFVRGDHRDNSPFDGPGGNLAHEFQPGPGIGGDAHFDEDERWTNNFREYNLHRVAAHELGHSLGLSHSTDIGALMYPSYTFSGDVQLAQDDIDGIQAIYGRSQNPVQPIGPQTPKACDSKLTFDAITTIRGEVMFFKDRFYMRTNPFYPEVELNFISVFWPQLPNGLEAAYEFADRDEVRFFKGNKYWAVQGQNVLHGYPKDIYSSFGFPRTVKHIDAALSEENTGKTYFFVANKYWRYDEYKRSMDPGYPKMIAHDFPGIGHKVDAVFMKDGFFYFFHGTRQYKFDPKTKRILTLQKANSWFNCRKN

SEQ ID NO: 2188 - protein, 450 aa, Artificial Sequence
  MMP-1 variant A165H
FPATLETQEQDVDLVQKYLEKYYNLKNDGRQVEKRRNSGPVVEKLKQMQEFFGLKVTGKPDAETLKVMKQPRCGVPDVAQFVLTEGNPRWEQTHLTYRIENYTPDLPRADVDHAIEKAFQLWSNVTPLTFTKVSEGQADIMISFVRGDHRDNSPFDGPGGNLAHHFQPGPGIGGDAHFDEDERWTNNFREYNLHRVAAHELGHSLGLSHSTDIGALMYPSYTFSGDVQLAQDDIDGIQAIYGRSQNPVQPIGPQTPKACDSKLTFDAITTIRGEVMFFKDRFYMRTNPFYPEVELNFISVFWPQLPNGLEAAYEFADRDEVRFFKGNKYWAVQGQNVLHGYPKDIYSSFGFPRTVKHIDAALSEENTGKTYFFVANKYWRYDEYKRSMDPGYPKMIAHDFPGIGHKVDAVFMKDGFFYFFHGTRQYKFDPKTKRILTLQKANSWFNCRKN

SEQ ID NO: 2189 - protein, 450 aa, Artificial Sequence
  MMP-1 variant A165K
FPATLETQEQDVDLVQKYLEKYYNLKNDGRQVEKRRNSGPVVEKLKQMQEFFGLKVTGKPDAETLKVMKQPRCGVPDVAQFVLTEGNPRWEQTHLTYRIENYTPDLPRADVDHAIEKAFQLWSNVTPLTFTKVSEGQADIMISFVRGDHRDNSPFDGPGGNLAHKFQPGPGIGGDAHFDEDERWTNNFREYNLHRVAAHELGHSLGLSHSTDIGALMYPSYTFSGDVQLAQDDIDGIQAIYGRSQNPVQPIGPQTPKACDSKLTFDAITTIRGEVMFFKDRFYMRTNPFYPEVELNFISVFWPQLPNGLEAAYEFADRDEVRFFKGNKYWAVQGQNVLHGYPKDIYSSFGFPRTVKHIDAALSEENTGKTYFFVANKYWRYDEYKRSMDPGYPKMIAHDFPGIGHKVDAVFMKDGFFYFFHGTRQYKFDPKTKRILTLQKANSWFNCRKN

SEQ ID NO: 2190 - protein, 450 aa, Artificial Sequence
  MMP-1 variant A165R
FPATLETQEQDVDLVQKYLEKYYNLKNDGRQVEKRRNSGPVVEKLKQMQEFFGLKVTGKPDAETLKVMKQPRCGVPDVAQFVLTEGNPRWEQTHLTYRIENYTPDLPRADVDHAIEKAFQLWSNVTPLTFTKVSEGQADIMISFVRGDHRDNSPFDGPGGNLAHRFQPGPGIGGDAHFDEDERWTNNFREYNLHRVAAHELGHSLGLSHSTDIGALMYPSYTFSGDVQLAQDDIDGIQAIYGRSQNPVQPIGPQTPKACDSKLTFDAITTIRGEVMFFKDRFYMRTNPFYPEVELNFISVFWPQLPNGLEAAYEFADRDEVRFFKGNKYWAVQGQNVLHGYPKDIYSSFGFPRTVKHIDAALSEENTGKTYFFVANKYWRYDEYKRSMDPGYPKMIAHDFPGIGHKVDAVFMKDGFFYFFHGTRQYKFDPKTKRILTLQKANSWFNCRKN

SEQ ID NO: 2191 - protein, 450 aa, Artificial Sequence
  MMP-1 variant A165C
FPATLETQEQDVDLVQKYLEKYYNLKNDGRQVEKRRNSGPVVEKLKQMQEFFGLKVTGKPDAETLKVMKQPRCGVPDVAQFVLTEGNPRWEQTHLTYRIENYTPDLPRADVDHAIEKAFQLWSNVTPLTFTKVSEGQADIMISFVRGDHRDNSPFDGPGGNLAHCFQPGPGIGGDAHFDEDERWTNNFREYNLHRVAAHELGHSLGLSHSTDIGALMYPSYTFSGDVQLAQDDIDGIQAIYGRSQNPVQPIGPQTPKACDSKLTFDAITTIRGEVMFFKDRFYMRTNPFYPEVELNFISVFWPQLPNGLEAAYEFADRDEVRFFKGNKYWAVQGQNVLHGYPKDIYSSFGFPRTVKHIDAALSEENTGKTYFFVANKYWRYDEYKRSMDPGYPKMIAHDFPGIGHKVDAVFMKDGFFYFFHGTRQYKFDPKTKRILTLQKANSWFNCRKN

SEQ ID NO: 2192 - protein, 450 aa, Artificial Sequence
  MMP-1 variant A165N
FPATLETQEQDVDLVQKYLEKYYNLKNDGRQVEKRRNSGPVVEKLKQMQEFFGLKVTGKPDAETLKVMKQPRCGVPDVAQFVLTEGNPRWEQTHLTYRIENYTPDLPRADVDHAIEKAFQLWSNVTPLTFTKVSEGQADIMISFVRGDHRDNSPFDGPGGNLAHNFQPGPGIGGDAHFDEDERWTNNFREYNLHRVAAHELGHSLGLSHSTDIGALMYPSYTFSGDVQLAQDDIDGIQAIYGRSQNPVQPIGPQTPKACDSKLTFDAITTIRGEVMFFKDRFYMRTNPFYPEVELNFISVFWPQLPNGLEAAYEFADRDEVRFFKGNKYWAVQGQNVLHGYPKDIYSSFGFPRTVKHIDAALSEENTGKTYFFVANKYWRYDEYKRSMDPGYPKMIAHDFPGIGHKVDAVFMKDGFFYFFHGTRQYKFDPKTKRILTLQKANSWFNCRKN

SEQ ID NO: 2193 - protein, 450 aa, Artificial Sequence
  MMP-1 variant A165Q
FPATLETQEQDVDLVQKYLEKYYNLKNDGRQVEKRRNSGPVVEKLKQMQEFFGLKVTGKPDAETLKVMKQPRCGVPDVAQFVLTEGNPRWEQTHLTYRIENYTPDLPRADVDHAIEKAFQLWSNVTPLTFTKVSEGQADIMISFVRGDHRDNSPFDGPGGNLAHQFQPGPGIGGDAHFDEDERWTNNFREYNLHRVAAHELGHSLGLSHSTDIGALMYPSYTFSGDVQLAQDDIDGIQAIYGRSQNPVQPIGPQTPKACDSKLTFDAITTIRGEVMFFKDRFYMRTNPFYPEVELNFISVFWPQLPNGLEAAYEFADRDEVRFFKGNKYWAVQGQNVLHGYPKDIYSSFGFPRTVKHIDAALSEENTGKTYFFVANKYWRYDEYKRSMDPGYPKMIAHDFPGIGHKVDAVFMKDGFFYFFHGTRQYKFDPKTKRILTLQKANSWFNCRKN

SEQ ID NO: 2194 - protein, 450 aa, Artificial Sequence
  MMP-1 variant A165T
FPATLETQEQDVDLVQKYLEKYYNLKNDGRQVEKRRNSGPVVEKLKQMQEFFGLKVTGKPDAETLKVMKQPRCGVPDVAQFVLTEGNPRWEQTHLTYRIENYTPDLPRADVDHAIEKAFQLWSNVTPLTFTKVSEGQADIMISFVRGDHRDNSPFDGPGGNLAHTFQPGPGIGGDAHFDEDERWTNNFREYNLHRVAAHELGHSLGLSHSTDIGALMYPSYTFSGDVQLAQDDIDGIQAIYGRSQNPVQPIGPQTPKACDSKLTFDAITTIRGEVMFFKDRFYMRTNPFYPEVELNFISVFWPQLPNGLEAAYEFADRDEVRFFKGNKYWAVQGQNVLHGYPKDIYSSFGFPRTVKHIDAALSEENTGKTYFFVANKYWRYDEYKRSMDPGYPKMIAHDFPGIGHKVDAVFMKDGFFYFFHGTRQYKFDPKTKRILTLQKANSWFNCRKN

SEQ ID NO: 2195 - protein, 450 aa, Artificial Sequence
  MMP-1 variant A165Y
FPATLETQEQDVDLVQKYLEKYYNLKNDGRQVEKRRNSGPVVEKLKQMQEFFGLKVTGKPDAETLKVMKQPRCGVPDVAQFVLTEGNPRWEQTHLTYRIENYTPDLPRADVDHAIEKAFQLWSNVTPLTFTKVSEGQADIMISFVRGDHRDNSPFDGPGGNLAHYFQPGPGIGGDAHFDEDERWTNNFREYNLHRVAAHELGHSLGLSHSTDIGALMYPSYTFSGDVQLAQDDIDGIQAIYGRSQNPVQPIGPQTPKACDSKLTFDAITTIRGEVMFFKDRFYMRTNPFYPEVELNFISVFWPQLPNGLEAAYEFADRDEVRFFKGNKYWAVQGQNVLHGYPKDIYSSFGFPRTVKHIDAALSEENTGKTYFFVANKYWRYDEYKRSMDPGYPKMIAHDFPGIGHKVDAVFMKDGFFYFFHGTRQYKFDPKTKRILTLQKANSWFNCRKN

SEQ ID NO: 2196 - protein, 450 aa, Artificial Sequence
  MMP-1 variant A165S
FPATLETQEQDVDLVQKYLEKYYNLKNDGRQVEKRRNSGPVVEKLKQMQEFFGLKVTGKPDAETLKVMKQPRCGVPDVAQFVLTEGNPRWEQTHLTYRIENYTPDLPRADVDHAIEKAFQLWSNVTPLTFTKVSEGQADIMISFVRGDHRDNSPFDGPGGNLAHSFQPGPGIGGDAHFDEDERWTNNFREYNLHRVAAHELGHSLGLSHSTDIGALMYPSYTFSGDVQLAQDDIDGIQAIYGRSQNPVQPIGPQTPKACDSKLTFDAITTIRGEVMFFKDRFYMRTNPFYPEVELNFISVFWPQLPNGLEAAYEFADRDEVRFFKGNKYWAVQGQNVLHGYPKDIYSSFGFPRTVKHIDAALSEENTGKTYFFVANKYWRYDEYKRSMDPGYPKMIAHDFPGIGHKVDAVFMKDGFFYFFHGTRQYKFDPKTKRILTLQKANSWFNCRKN

SEQ ID NO: 2197 - protein, 450 aa, Artificial Sequence
  MMP-1 variant A165G
FPATLETQEQDVDLVQKYLEKYYNLKNDGRQVEKRRNSGPVVEKLKQMQEFFGLKVTGKPDAETLKVMKQPRCGVPDVAQFVLTEGNPRWEQTHLTYRIENYTPDLPRADVDHAIEKAFQLWSNVTPLTFTKVSEGQADIMISFVRGDHRDNSPFDGPGGNLAHGFQPGPGIGGDAHFDEDERWTNNFREYNLHRVAAHELGHSLGLSHSTDIGALMYPSYTFSGDVQLAQDDIDGIQAIYGRSQNPVQPIGPQTPKACDSKLTFDAITTIRGEVMFFKDRFYMRTNPFYPEVELNFISVFWPQLPNGLEAAYEFADRDEVRFFKGNKYWAVQGQNVLHGYPKDIYSSFGFPRTVKHIDAALSEENTGKTYFFVANKYWRYDEYKRSMDPGYPKMIAHDFPGIGHKVDAVFMKDGFFYFFHGTRQYKFDPKTKRILTLQKANSWFNCRKN

SEQ ID NO: 2198 - protein, 450 aa, Artificial Sequence
  MMP-1 variant A165F
FPATLETQEQDVDLVQKYLEKYYNLKNDGRQVEKRRNSGPVVEKLKQMQEFFGLKVTGKPDAETLKVMKQPRCGVPDVAQFVLTEGNPRWEQTHLTYRIENYTPDLPRADVDHAIEKAFQLWSNVTPLTFTKVSEGQADIMISFVRGDHRDNSPFDGPGGNLAHFFQPGPGIGGDAHFDEDERWTNNFREYNLHRVAAHELGHSLGLSHSTDIGALMYPSYTFSGDVQLAQDDIDGIQAIYGRSQNPVQPIGPQTPKACDSKLTFDAITTIRGEVMFFKDRFYMRTNPFYPEVELNFISVFWPQLPNGLEAAYEFADRDEVRFFKGNKYWAVQGQNVLHGYPKDIYSSFGFPRTVKHIDAALSEENTGKTYFFVANKYWRYDEYKRSMDPGYPKMIAHDFPGIGHKVDAVFMKDGFFYFFHGTRQYKFDPKTKRILTLQKANSWFNCRKN

SEQ ID NO: 2199 - protein, 450 aa, Artificial Sequence
  MMP-1 variant A165M
FPATLETQEQDVDLVQKYLEKYYNLKNDGRQVEKRRNSGPVVEKLKQMQEFFGLKVTGKPDAETLKVMKQPRCGVPDVAQFVLTEGNPRWEQTHLTYRIENYTPDLPRADVDHAIEKAFQLWSNVTPLTFTKVSEGQADIMISFVRGDHRDNSPFDGPGGNLAHMFQPGPGIGGDAHFDEDERWTNNFREYNLHRVAAHELGHSLGLSHSTDIGALMYPSYTFSGDVQLAQDDIDGIQAIYGRSQNPVQPIGPQTPKACDSKLTFDAITTIRGEVMFFKDRFYMRTNPFYPEVELNFISVFWPQLPNGLEAAYEFADRDEVRFFKGNKYWAVQGQNVLHGYPKDIYSSFGFPRTVKHIDAALSEENTGKTYFFVANKYWRYDEYKRSMDPGYPKMIAHDFPGIGHKVDAVFMKDGFFYFFHGTRQYKFDPKTKRILTLQKANSWFNCRKN

SEQ ID NO: 2200 - protein, 450 aa, Artificial Sequence
  MMP-1 variant A165W
FPATLETQEQDVDLVQKYLEKYYNLKNDGRQVEKRRNSGPVVEKLKQMQEFFGLKVTGKPDAETLKVMKQPRCGVPDVAQFVLTEGNPRWEQTHLTYRIENYTPDLPRADVDHAIEKAFQLWSNVTPLTFTKVSEGQADIMISFVRGDHRDNSPFDGPGGNLAHWFQPGPGIGGDAHFDEDERWTNNFREYNLHRVAAHELGHSLGLSHSTDIGALMYPSYTFSGDVQLAQDDIDGIQAIYGRSQNPVQPIGPQTPKACDSKLTFDAITTIRGEVMFFKDRFYMRTNPFYPEVELNFISVFWPQLPNGLEAAYEFADRDEVRFFKGNKYWAVQGQNVLHGYPKDIYSSFGFPRTVKHIDAALSEENTGKTYFFVANKYWRYDEYKRSMDPGYPKMIAHDFPGIGHKVDAVFMKDGFFYFFHGTRQYKFDPKTKRILTLQKANSWFNCRKN

SEQ ID NO: 2201 - protein, 450 aa, Artificial Sequence
  MMP-1 variant A165I
FPATLETQEQDVDLVQKYLEKYYNLKNDGRQVEKRRNSGPVVEKLKQMQEFFGLKVTGKPDAETLKVMKQPRCGVPDVAQFVLTEGNPRWEQTHLTYRIENYTPDLPRADVDHAIEKAFQLWSNVTPLTFTKVSEGQADIMISFVRGDHRDNSPFDGPGGNLAHIFQPGPGIGGDAHFDEDERWTNNFREYNLHRVAAHELGHSLGLSHSTDIGALMYPSYTFSGDVQLAQDDIDGIQAIYGRSQNPVQPIGPQTPKACDSKLTFDAITTIRGEVMFFKDRFYMRTNPFYPEVELNFISVFWPQLPNGLEAAYEFADRDEVRFFKGNKYWAVQGQNVLHGYPKDIYSSFGFPRTVKHIDAALSEENTGKTYFFVANKYWRYDEYKRSMDPGYPKMIAHDFPGIGHKVDAVFMKDGFFYFFHGTRQYKFDPKTKRILTLQKANSWFNCRKN

SEQ ID NO: 2202 - protein, 450 aa, Artificial Sequence
  MMP-1 variant A165V
FPATLETQEQDVDLVQKYLEKYYNLKNDGRQVEKRRNSGPVVEKLKQMQEFFGLKVTGKPDAETLKVMKQPRCGVPDVAQFVLTEGNPRWEQTHLTYRIENYTPDLPRADVDHAIEKAFQLWSNVTPLTFTKVSEGQADIMISFVRGDHRDNSPFDGPGGNLAHVFQPGPGIGGDAHFDEDERWTNNFREYNLHRVAAHELGHSLGLSHSTDIGALMYPSYTFSGDVQLAQDDIDGIQAIYGRSQNPVQPIGPQTPKACDSKLTFDAITTIRGEVMFFKDRFYMRTNPFYPEVELNFISVFWPQLPNGLEAAYEFADRDEVRFFKGNKYWAVQGQNVLHGYPKDIYSSFGFPRTVKHIDAALSEENTGKTYFFVANKYWRYDEYKRSMDPGYPKMIAHDFPGIGHKVDAVFMKDGFFYFFHGTRQYKFDPKTKRILTLQKANSWFNCRKN

SEQ ID NO: 2203 - protein, 450 aa, Artificial Sequence
  MMP-1 variant A165L
FPATLETQEQDVDLVQKYLEKYYNLKNDGRQVEKRRNSGPVVEKLKQMQEFFGLKVTGKPDAETLKVMKQPRCGVPDVAQFVLTEGNPRWEQTHLTYRIENYTPDLPRADVDHAIEKAFQLWSNVTPLTFTKVSEGQADIMISFVRGDHRDNSPFDGPGGNLAHLFQPGPGIGGDAHFDEDERWTNNFREYNLHRVAAHELGHSLGLSHSTDIGALMYPSYTFSGDVQLAQDDIDGIQAIYGRSQNPVQPIGPQTPKACDSKLTFDAITTIRGEVMFFKDRFYMRTNPFYPEVELNFISVFWPQLPNGLEAAYEFADRDEVRFFKGNKYWAVQGQNVLHGYPKDIYSSFGFPRTVKHIDAALSEENTGKTYFFVANKYWRYDEYKRSMDPGYPKMIAHDFPGIGHKVDAVFMKDGFFYFFHGTRQYKFDPKTKRILTLQKANSWFNCRKN

SEQ ID NO: 2204 - protein, 450 aa, Artificial Sequence
  MMP-1 variant A165P
FPATLETQEQDVDLVQKYLEKYYNLKNDGRQVEKRRNSGPVVEKLKQMQEFFGLKVTGKPDAETLKVMKQPRCGVPDVAQFVLTEGNPRWEQTHLTYRIENYTPDLPRADVDHAIEKAFQLWSNVTPLTFTKVSEGQADIMISFVRGDHRDNSPFDGPGGNLAHPFQPGPGIGGDAHFDEDERWTNNFREYNLHRVAAHELGHSLGLSHSTDIGALMYPSYTFSGDVQLAQDDIDGIQAIYGRSQNPVQPIGPQTPKACDSKLTFDAITTIRGEVMFFKDRFYMRTNPFYPEVELNFISVFWPQLPNGLEAAYEFADRDEVRFFKGNKYWAVQGQNVLHGYPKDIYSSFGFPRTVKHIDAALSEENTGKTYFFVANKYWRYDEYKRSMDPGYPKMIAHDFPGIGHKVDAVFMKDGFFYFFHGTRQYKFDPKTKRILTLQKANSWFNCRKN

SEQ ID NO: 2205 - protein, 450 aa, Artificial Sequence
  MMP-1 variant F166D
FPATLETQEQDVDLVQKYLEKYYNLKNDGRQVEKRRNSGPVVEKLKQMQEFFGLKVTGKPDAETLKVMKQPRCGVPDVAQFVLTEGNPRWEQTHLTYRIENYTPDLPRADVDHAIEKAFQLWSNVTPLTFTKVSEGQADIMISFVRGDHRDNSPFDGPGGNLAHADQPGPGIGGDAHFDEDERWTNNFREYNLHRVAAHELGHSLGLSHSTDIGALMYPSYTFSGDVQLAQDDIDGIQAIYGRSQNPVQPIGPQTPKACDSKLTFDAITTIRGEVMFFKDRFYMRTNPFYPEVELNFISVFWPQLPNGLEAAYEFADRDEVRFFKGNKYWAVQGQNVLHGYPKDIYSSFGFPRTVKHIDAALSEENTGKTYFFVANKYWRYDEYKRSMDPGYPKMIAHDFPGIGHKVDAVFMKDGFFYFFHGTRQYKFDPKTKRILTLQKANSWFNCRKN

SEQ ID NO: 2206 - protein, 450 aa, Artificial Sequence
  MMP-1 variant F166E
FPATLETQEQDVDLVQKYLEKYYNLKNDGRQVEKRRNSGPVVEKLKQMQEFFGLKVTGKPDAETLKVMKQPRCGVPDVAQFVLTEGNPRWEQTHLTYRIENYTPDLPRADVDHAIEKAFQLWSNVTPLTFTKVSEGQADIMISFVRGDHRDNSPFDGPGGNLAHAEQPGPGIGGDAHFDEDERWTNNFREYNLHRVAAHELGHSLGLSHSTDIGALMYPSYTFSGDVQLAQDDIDGIQAIYGRSQNPVQPIGPQTPKACDSKLTFDAITTIRGEVMFFKDRFYMRTNPFYPEVELNFISVFWPQLPNGLEAAYEFADRDEVRFFKGNKYWAVQGQNVLHGYPKDIYSSFGFPRTVKHIDAALSEENTGKTYFFVANKYWRYDEYKRSMDPGYPKMIAHDFPGIGHKVDAVFMKDGFFYFFHGTRQYKFDPKTKRILTLQKANSWFNCRKN

SEQ ID NO: 2207 - protein, 450 aa, Artificial Sequence
  MMP-1 variant F166H
FPATLETQEQDVDLVQKYLEKYYNLKNDGRQVEKRRNSGPVVEKLKQMQEFFGLKVTGKPDAETLKVMKQPRCGVPDVAQFVLTEGNPRWEQTHLTYRIENYTPDLPRADVDHAIEKAFQLWSNVTPLTFTKVSEGQADIMISFVRGDHRDNSPFDGPGGNLAHAHQPGPGIGGDAHFDEDERWTNNFREYNLHRVAAHELGHSLGLSHSTDIGALMYPSYTFSGDVQLAQDDIDGIQAIYGRSQNPVQPIGPQTPKACDSKLTFDAITTIRGEVMFFKDRFYMRTNPFYPEVELNFISVFWPQLPNGLEAAYEFADRDEVRFFKGNKYWAVQGQNVLHGYPKDIYSSFGFPRTVKHIDAALSEENTGKTYFFVANKYWRYDEYKRSMDPGYPKMIAHDFPGIGHKVDAVFMKDGFFYFFHGTRQYKFDPKTKRILTLQKANSWFNCRKN

SEQ ID NO: 2208 - protein, 450 aa, Artificial Sequence
  MMP-1 variant F166K
FPATLETQEQDVDLVQKYLEKYYNLKNDGRQVEKRRNSGPVVEKLKQMQEFFGLKVTGKPDAETLKVMKQPRCGVPDVAQFVLTEGNPRWEQTHLTYRIENYTPDLPRADVDHAIEKAFQLWSNVTPLTFTKVSEGQADIMISFVRGDHRDNSPFDGPGGNLAHAKQPGPGIGGDAHFDEDERWTNNFREYNLHRVAAHELGHSLGLSHSTDIGALMYPSYTFSGDVQLAQDDIDGIQAIYGRSQNPVQPIGPQTPKACDSKLTFDAITTIRGEVMFFKDRFYMRTNPFYPEVELNFISVFWPQLPNGLEAAYEFADRDEVRFFKGNKYWAVQGQNVLHGYPKDIYSSFGFPRTVKHIDAALSEENTGKTYFFVANKYWRYDEYKRSMDPGYPKMIAHDFPGIGHKVDAVFMKDGFFYFFHGTRQYKFDPKTKRILTLQKANSWFNCRKN

SEQ ID NO: 2209 - protein, 450 aa, Artificial Sequence
  MMP-1 variant F166R
FPATLETQEQDVDLVQKYLEKYYNLKNDGRQVEKRRNSGPVVEKLKQMQEFFGLKVTGKPDAETLKVMKQPRCGVPDVAQFVLTEGNPRWEQTHLTYRIENYTPDLPRADVDHAIEKAFQLWSNVTPLTFTKVSEGQADIMISFVRGDHRDNSPFDGPGGNLAHARQPGPGIGGDAHFDEDERWTNNFREYNLHRVAAHELGHSLGLSHSTDIGALMYPSYTFSGDVQLAQDDIDGIQAIYGRSQNPVQPIGPQTPKACDSKLTFDAITTIRGEVMFFKDRFYMRTNPFYPEVELNFISVFWPQLPNGLEAAYEFADRDEVRFFKGNKYWAVQGQNVLHGYPKDIYSSFGFPRTVKHIDAALSEENTGKTYFFVANKYWRYDEYKRSMDPGYPKMIAHDFPGIGHKVDAVFMKDGFFYFFHGTRQYKFDPKTKRILTLQKANSWFNCRKN

SEQ ID NO: 2210 - protein, 450 aa, Artificial Sequence
  MMP-1 variant F166C
FPATLETQEQDVDLVQKYLEKYYNLKNDGRQVEKRRNSGPVVEKLKQMQEFFGLKVTGKPDAETLKVMKQPRCGVPDVAQFVLTEGNPRWEQTHLTYRIENYTPDLPRADVDHAIEKAFQLWSNVTPLTFTKVSEGQADIMISFVRGDHRDNSPFDGPGGNLAHACQPGPGIGGDAHFDEDERWTNNFREYNLHRVAAHELGHSLGLSHSTDIGALMYPSYTFSGDVQLAQDDIDGIQAIYGRSQNPVQPIGPQTPKACDSKLTFDAITTIRGEVMFFKDRFYMRTNPFYPEVELNFISVFWPQLPNGLEAAYEFADRDEVRFFKGNKYWAVQGQNVLHGYPKDIYSSFGFPRTVKHIDAALSEENTGKTYFFVANKYWRYDEYKRSMDPGYPKMIAHDFPGIGHKVDAVFMKDGFFYFFHGTRQYKFDPKTKRILTLQKANSWFNCRKN

SEQ ID NO: 2211 - protein, 450 aa, Artificial Sequence
  MMP-1 variant F166N
FPATLETQEQDVDLVQKYLEKYYNLKNDGRQVEKRRNSGPVVEKLKQMQEFFGLKVTGKPDAETLKVMKQPRCGVPDVAQFVLTEGNPRWEQTHLTYRIENYTPDLPRADVDHAIEKAFQLWSNVTPLTFTKVSEGQADIMISFVRGDHRDNSPFDGPGGNLAHANQPGPGIGGDAHFDEDERWTNNFREYNLHRVAAHELGHSLGLSHSTDIGALMYPSYTFSGDVQLAQDDIDGIQAIYGRSQNPVQPIGPQTPKACDSKLTFDAITTIRGEVMFFKDRFYMRTNPFYPEVELNFISVFWPQLPNGLEAAYEFADRDEVRFFKGNKYWAVQGQNVLHGYPKDIYSSFGFPRTVKHIDAALSEENTGKTYFFVANKYWRYDEYKRSMDPGYPKMIAHDFPGIGHKVDAVFMKDGFFYFFHGTRQYKFDPKTKRILTLQKANSWFNCRKN

SEQ ID NO: 2212 - protein, 450 aa, Artificial Sequence
  MMP-1 variant F166Q
FPATLETQEQDVDLVQKYLEKYYNLKNDGRQVEKRRNSGPVVEKLKQMQEFFGLKVTGKPDAETLKVMKQPRCGVPDVAQFVLTEGNPRWEQTHLTYRIENYTPDLPRADVDHAIEKAFQLWSNVTPLTFTKVSEGQADIMISFVRGDHRDNSPFDGPGGNLAHAQQPGPGIGGDAHFDEDERWTNNFREYNLHRVAAHELGHSLGLSHSTDIGALMYPSYTFSGDVQLAQDDIDGIQAIYGRSQNPVQPIGPQTPKACDSKLTFDAITTIRGEVMFFKDRFYMRTNPFYPEVELNFISVFWPQLPNGLEAAYEFADRDEVRFFKGNKYWAVQGQNVLHGYPKDIYSSFGFPRTVKHIDAALSEENTGKTYFFVANKYWRYDEYKRSMDPGYPKMIAHDFPGIGHKVDAVFMKDGFFYFFHGTRQYKFDPKTKRILTLQKANSWFNCRKN

SEQ ID NO: 2213 - protein, 450 aa, Artificial Sequence
  MMP-1 variant F166T
FPATLETQEQDVDLVQKYLEKYYNLKNDGRQVEKRRNSGPVVEKLKQMQEFFGLKVTGKPDAETLKVMKQPRCGVPDVAQFVLTEGNPRWEQTHLTYRIENYTPDLPRADVDHAIEKAFQLWSNVTPLTFTKVSEGQADIMISFVRGDHRDNSPFDGPGGNLAHATQPGPGIGGDAHFDEDERWTNNFREYNLHRVAAHELGHSLGLSHSTDIGALMYPSYTFSGDVQLAQDDIDGIQAIYGRSQNPVQPIGPQTPKACDSKLTFDAITTIRGEVMFFKDRFYMRTNPFYPEVELNFISVFWPQLPNGLEAAYEFADRDEVRFFKGNKYWAVQGQNVLHGYPKDIYSSFGFPRTVKHIDAALSEENTGKTYFFVANKYWRYDEYKRSMDPGYPKMIAHDFPGIGHKVDAVFMKDGFFYFFHGTRQYKFDPKTKRILTLQKANSWFNCRKN

SEQ ID NO: 2214 - protein, 450 aa, Artificial Sequence
  MMP-1 variant F166Y
FPATLETQEQDVDLVQKYLEKYYNLKNDGRQVEKRRNSGPVVEKLKQMQEFFGLKVTGKPDAETLKVMKQPRCGVPDVAQFVLTEGNPRWEQTHLTYRIENYTPDLPRADVDHAIEKAFQLWSNVTPLTFTKVSEGQADIMISFVRGDHRDNSPFDGPGGNLAHAYQPGPGIGGDAHFDEDERWTNNFREYNLHRVAAHELGHSLGLSHSTDIGALMYPSYTFSGDVQLAQDDIDGIQAIYGRSQNPVQPIGPQTPKACDSKLTFDAITTIRGEVMFFKDRFYMRTNPFYPEVELNFISVFWPQLPNGLEAAYEFADRDEVRFFKGNKYWAVQGQNVLHGYPKDIYSSFGFPRTVKHIDAALSEENTGKTYFFVANKYWRYDEYKRSMDPGYPKMIAHDFPGIGHKVDAVFMKDGFFYFFHGTRQYKFDPKTKRILTLQKANSWFNCRKN

SEQ ID NO: 2215 - protein, 450 aa, Artificial Sequence
  MMP-1 variant F166S
FPATLETQEQDVDLVQKYLEKYYNLKNDGRQVEKRRNSGPVVEKLKQMQEFFGLKVTGKPDAETLKVMKQPRCGVPDVAQFVLTEGNPRWEQTHLTYRIENYTPDLPRADVDHAIEKAFQLWSNVTPLTFTKVSEGQADIMISFVRGDHRDNSPFDGPGGNLAHASQPGPGIGGDAHFDEDERWTNNFREYNLHRVAAHELGHSLGLSHSTDIGALMYPSYTFSGDVQLAQDDIDGIQAIYGRSQNPVQPIGPQTPKACDSKLTFDAITTIRGEVMFFKDRFYMRTNPFYPEVELNFISVFWPQLPNGLEAAYEFADRDEVRFFKGNKYWAVQGQNVLHGYPKDIYSSFGFPRTVKHIDAALSEENTGKTYFFVANKYWRYDEYKRSMDPGYPKMIAHDFPGIGHKVDAVFMKDGFFYFFHGTRQYKFDPKTKRILTLQKANSWFNCRKN

SEQ ID NO: 2216 - protein, 450 aa, Artificial Sequence
  MMP-1 variant F166G
FPATLETQEQDVDLVQKYLEKYYNLKNDGRQVEKRRNSGPVVEKLKQMQEFFGLKVTGKPDAETLKVMKQPRCGVPDVAQFVLTEGNPRWEQTHLTYRIENYTPDLPRADVDHAIEKAFQLWSNVTPLTFTKVSEGQADIMISFVRGDHRDNSPFDGPGGNLAHAGQPGPGIGGDAHFDEDERWTNNFREYNLHRVAAHELGHSLGLSHSTDIGALMYPSYTFSGDVQLAQDDIDGIQAIYGRSQNPVQPIGPQTPKACDSKLTFDAITTIRGEVMFFKDRFYMRTNPFYPEVELNFISVFWPQLPNGLEAAYEFADRDEVRFFKGNKYWAVQGQNVLHGYPKDIYSSFGFPRTVKHIDAALSEENTGKTYFFVANKYWRYDEYKRSMDPGYPKMIAHDFPGIGHKVDAVFMKDGFFYFFHGTRQYKFDPKTKRILTLQKANSWFNCRKN

SEQ ID NO: 2217 - protein, 450 aa, Artificial Sequence
  MMP-1 variant F166M
FPATLETQEQDVDLVQKYLEKYYNLKNDGRQVEKRRNSGPVVEKLKQMQEFFGLKVTGKPDAETLKVMKQPRCGVPDVAQFVLTEGNPRWEQTHLTYRIENYTPDLPRADVDHAIEKAFQLWSNVTPLTFTKVSEGQADIMISFVRGDHRDNSPFDGPGGNLAHAMQPGPGIGGDAHFDEDERWTNNFREYNLHRVAAHELGHSLGLSHSTDIGALMYPSYTFSGDVQLAQDDIDGIQAIYGRSQNPVQPIGPQTPKACDSKLTFDAITTIRGEVMFFKDRFYMRTNPFYPEVELNFISVFWPQLPNGLEAAYEFADRDEVRFFKGNKYWAVQGQNVLHGYPKDIYSSFGFPRTVKHIDAALSEENTGKTYFFVANKYWRYDEYKRSMDPGYPKMIAHDFPGIGHKVDAVFMKDGFFYFFHGTRQYKFDPKTKRILTLQKANSWFNCRKN

SEQ ID NO: 2218 - protein, 450 aa, Artificial Sequence
  MMP-1 variant F166W
FPATLETQEQDVDLVQKYLEKYYNLKNDGRQVEKRRNSGPVVEKLKQMQEFFGLKVTGKPDAETLKVMKQPRCGVPDVAQFVLTEGNPRWEQTHLTYRIENYTPDLPRADVDHAIEKAFQLWSNVTPLTFTKVSEGQADIMISFVRGDHRDNSPFDGPGGNLAHAWQPGPGIGGDAHFDEDERWTNNFREYNLHRVAAHELGHSLGLSHSTDIGALMYPSYTFSGDVQLAQDDIDGIQAIYGRSQNPVQPIGPQTPKACDSKLTFDAITTIRGEVMFFKDRFYMRTNPFYPEVELNFISVFWPQLPNGLEAAYEFADRDEVRFFKGNKYWAVQGQNVLHGYPKDIYSSFGFPRTVKHIDAALSEENTGKTYFFVANKYWRYDEYKRSMDPGYPKMIAHDFPGIGHKVDAVFMKDGFFYFFHGTRQYKFDPKTKRILTLQKANSWFNCRKN

SEQ ID NO: 2219 - protein, 450 aa, Artificial Sequence
  MMP-1 variant F166I
FPATLETQEQDVDLVQKYLEKYYNLKNDGRQVEKRRNSGPVVEKLKQMQEFFGLKVTGKPDAETLKVMKQPRCGVPDVAQFVLTEGNPRWEQTHLTYRIENYTPDLPRADVDHAIEKAFQLWSNVTPLTFTKVSEGQADIMISFVRGDHRDNSPFDGPGGNLAHAIQPGPGIGGDAHFDEDERWTNNFREYNLHRVAAHELGHSLGLSHSTDIGALMYPSYTFSGDVQLAQDDIDGIQAIYGRSQNPVQPIGPQTPKACDSKLTFDAITTIRGEVMFFKDRFYMRTNPFYPEVELNFISVFWPQLPNGLEAAYEFADRDEVRFFKGNKYWAVQGQNVLHGYPKDIYSSFGFPRTVKHIDAALSEENTGKTYFFVANKYWRYDEYKRSMDPGYPKMIAHDFPGIGHKVDAVFMKDGFFYFFHGTRQYKFDPKTKRILTLQKANSWFNCRKN

SEQ ID NO: 2220 - protein, 450 aa, Artificial Sequence
  MMP-1 variant F166V
FPATLETQEQDVDLVQKYLEKYYNLKNDGRQVEKRRNSGPVVEKLKQMQEFFGLKVTGKPDAETLKVMKQPRCGVPDVAQFVLTEGNPRWEQTHLTYRIENYTPDLPRADVDHAIEKAFQLWSNVTPLTFTKVSEGQADIMISFVRGDHRDNSPFDGPGGNLAHAVQPGPGIGGDAHFDEDERWTNNFREYNLHRVAAHELGHSLGLSHSTDIGALMYPSYTFSGDVQLAQDDIDGIQAIYGRSQNPVQPIGPQTPKACDSKLTFDAITTIRGEVMFFKDRFYMRTNPFYPEVELNFISVFWPQLPNGLEAAYEFADRDEVRFFKGNKYWAVQGQNVLHGYPKDIYSSFGFPRTVKHIDAALSEENTGKTYFFVANKYWRYDEYKRSMDPGYPKMIAHDFPGIGHKVDAVFMKDGFFYFFHGTRQYKFDPKTKRILTLQKANSWFNCRKN

SEQ ID NO: 2221 - protein, 450 aa, Artificial Sequence
  MMP-1 variant F166L
FPATLETQEQDVDLVQKYLEKYYNLKNDGRQVEKRRNSGPVVEKLKQMQEFFGLKVTGKPDAETLKVMKQPRCGVPDVAQFVLTEGNPRWEQTHLTYRIENYTPDLPRADVDHAIEKAFQLWSNVTPLTFTKVSEGQADIMISFVRGDHRDNSPFDGPGGNLAHALQPGPGIGGDAHFDEDERWTNNFREYNLHRVAAHELGHSLGLSHSTDIGALMYPSYTFSGDVQLAQDDIDGIQAIYGRSQNPVQPIGPQTPKACDSKLTFDAITTIRGEVMFFKDRFYMRTNPFYPEVELNFISVFWPQLPNGLEAAYEFADRDEVRFFKGNKYWAVQGQNVLHGYPKDIYSSFGFPRTVKHIDAALSEENTGKTYFFVANKYWRYDEYKRSMDPGYPKMIAHDFPGIGHKVDAVFMKDGFFYFFHGTRQYKFDPKTKRILTLQKANSWFNCRKN

SEQ ID NO: 2222 - protein, 450 aa, Artificial Sequence
  MMP-1 variant F166A
FPATLETQEQDVDLVQKYLEKYYNLKNDGRQVEKRRNSGPVVEKLKQMQEFFGLKVTGKPDAETLKVMKQPRCGVPDVAQFVLTEGNPRWEQTHLTYRIENYTPDLPRADVDHAIEKAFQLWSNVTPLTFTKVSEGQADIMISFVRGDHRDNSPFDGPGGNLAHAAQPGPGIGGDAHFDEDERWTNNFREYNLHRVAAHELGHSLGLSHSTDIGALMYPSYTFSGDVQLAQDDIDGIQAIYGRSQNPVQPIGPQTPKACDSKLTFDAITTIRGEVMFFKDRFYMRTNPFYPEVELNFISVFWPQLPNGLEAAYEFADRDEVRFFKGNKYWAVQGQNVLHGYPKDIYSSFGFPRTVKHIDAALSEENTGKTYFFVANKYWRYDEYKRSMDPGYPKMIAHDFPGIGHKVDAVFMKDGFFYFFHGTRQYKFDPKTKRILTLQKANSWFNCRKN

SEQ ID NO: 2223 - protein, 450 aa, Artificial Sequence
  MMP-1 variant F166P
FPATLETQEQDVDLVQKYLEKYYNLKNDGRQVEKRRNSGPVVEKLKQMQEFFGLKVTGKPDAETLKVMKQPRCGVPDVAQFVLTEGNPRWEQTHLTYRIENYTPDLPRADVDHAIEKAFQLWSNVTPLTFTKVSEGQADIMISFVRGDHRDNSPFDGPGGNLAHAPQPGPGIGGDAHFDEDERWTNNFREYNLHRVAAHELGHSLGLSHSTDIGALMYPSYTFSGDVQLAQDDIDGIQAIYGRSQNPVQPIGPQTPKACDSKLTFDAITTIRGEVMFFKDRFYMRTNPFYPEVELNFISVFWPQLPNGLEAAYEFADRDEVRFFKGNKYWAVQGQNVLHGYPKDIYSSFGFPRTVKHIDAALSEENTGKTYFFVANKYWRYDEYKRSMDPGYPKMIAHDFPGIGHKVDAVFMKDGFFYFFHGTRQYKFDPKTKRILTLQKANSWFNCRKN

SEQ ID NO: 2224 - protein, 450 aa, Artificial Sequence
  MMP-1 variant Q167D
FPATLETQEQDVDLVQKYLEKYYNLKNDGRQVEKRRNSGPVVEKLKQMQEFFGLKVTGKPDAETLKVMKQPRCGVPDVAQFVLTEGNPRWEQTHLTYRIENYTPDLPRADVDHAIEKAFQLWSNVTPLTFTKVSEGQADIMISFVRGDHRDNSPFDGPGGNLAHAFDPGPGIGGDAHFDEDERWTNNFREYNLHRVAAHELGHSLGLSHSTDIGALMYPSYTFSGDVQLAQDDIDGIQAIYGRSQNPVQPIGPQTPKACDSKLTFDAITTIRGEVMFFKDRFYMRTNPFYPEVELNFISVFWPQLPNGLEAAYEFADRDEVRFFKGNKYWAVQGQNVLHGYPKDIYSSFGFPRTVKHIDAALSEENTGKTYFFVANKYWRYDEYKRSMDPGYPKMIAHDFPGIGHKVDAVFMKDGFFYFFHGTRQYKFDPKTKRILTLQKANSWFNCRKN

SEQ ID NO: 2225 - protein, 450 aa, Artificial Sequence
  MMP-1 variant Q167E
FPATLETQEQDVDLVQKYLEKYYNLKNDGRQVEKRRNSGPVVEKLKQMQEFFGLKVTGKPDAETLKVMKQPRCGVPDVAQFVLTEGNPRWEQTHLTYRIENYTPDLPRADVDHAIEKAFQLWSNVTPLTFTKVSEGQADIMISFVRGDHRDNSPFDGPGGNLAHAFEPGPGIGGDAHFDEDERWTNNFREYNLHRVAAHELGHSLGLSHSTDIGALMYPSYTFSGDVQLAQDDIDGIQAIYGRSQNPVQPIGPQTPKACDSKLTFDAITTIRGEVMFFKDRFYMRTNPFYPEVELNFISVFWPQLPNGLEAAYEFADRDEVRFFKGNKYWAVQGQNVLHGYPKDIYSSFGFPRTVKHIDAALSEENTGKTYFFVANKYWRYDEYKRSMDPGYPKMIAHDFPGIGHKVDAVFMKDGFFYFFHGTRQYKFDPKTKRILTLQKANSWFNCRKN

SEQ ID NO: 2226 - protein, 450 aa, Artificial Sequence
  MMP-1 variant Q167H
FPATLETQEQDVDLVQKYLEKYYNLKNDGRQVEKRRNSGPVVEKLKQMQEFFGLKVTGKPDAETLKVMKQPRCGVPDVAQFVLTEGNPRWEQTHLTYRIENYTPDLPRADVDHAIEKAFQLWSNVTPLTFTKVSEGQADIMISFVRGDHRDNSPFDGPGGNLAHAFHPGPGIGGDAHFDEDERWTNNFREYNLHRVAAHELGHSLGLSHSTDIGALMYPSYTFSGDVQLAQDDIDGIQAIYGRSQNPVQPIGPQTPKACDSKLTFDAITTIRGEVMFFKDRFYMRTNPFYPEVELNFISVFWPQLPNGLEAAYEFADRDEVRFFKGNKYWAVQGQNVLHGYPKDIYSSFGFPRTVKHIDAALSEENTGKTYFFVANKYWRYDEYKRSMDPGYPKMIAHDFPGIGHKVDAVFMKDGFFYFFHGTRQYKFDPKTKRILTLQKANSWFNCRKN

SEQ ID NO: 2227 - protein, 450 aa, Artificial Sequence
  MMP-1 variant Q167K
FPATLETQEQDVDLVQKYLEKYYNLKNDGRQVEKRRNSGPVVEKLKQMQEFFGLKVTGKPDAETLKVMKQPRCGVPDVAQFVLTEGNPRWEQTHLTYRIENYTPDLPRADVDHAIEKAFQLWSNVTPLTFTKVSEGQADIMISFVRGDHRDNSPFDGPGGNLAHAFKPGPGIGGDAHFDEDERWTNNFREYNLHRVAAHELGHSLGLSHSTDIGALMYPSYTFSGDVQLAQDDIDGIQAIYGRSQNPVQPIGPQTPKACDSKLTFDAITTIRGEVMFFKDRFYMRTNPFYPEVELNFISVFWPQLPNGLEAAYEFADRDEVRFFKGNKYWAVQGQNVLHGYPKDIYSSFGFPRTVKHIDAALSEENTGKTYFFVANKYWRYDEYKRSMDPGYPKMIAHDFPGIGHKVDAVFMKDGFFYFFHGTRQYKFDPKTKRILTLQKANSWFNCRKN

SEQ ID NO: 2228 - protein, 450 aa, Artificial Sequence
  MMP-1 variant Q167R
FPATLETQEQDVDLVQKYLEKYYNLKNDGRQVEKRRNSGPVVEKLKQMQEFFGLKVTGKPDAETLKVMKQPRCGVPDVAQFVLTEGNPRWEQTHLTYRIENYTPDLPRADVDHAIEKAFQLWSNVTPLTFTKVSEGQADIMISFVRGDHRDNSPFDGPGGNLAHAFRPGPGIGGDAHFDEDERWTNNFREYNLHRVAAHELGHSLGLSHSTDIGALMYPSYTFSGDVQLAQDDIDGIQAIYGRSQNPVQPIGPQTPKACDSKLTFDAITTIRGEVMFFKDRFYMRTNPFYPEVELNFISVFWPQLPNGLEAAYEFADRDEVRFFKGNKYWAVQGQNVLHGYPKDIYSSFGFPRTVKHIDAALSEENTGKTYFFVANKYWRYDEYKRSMDPGYPKMIAHDFPGIGHKVDAVFMKDGFFYFFHGTRQYKFDPKTKRILTLQKANSWFNCRKN

SEQ ID NO: 2229 - protein, 450 aa, Artificial Sequence
  MMP-1 variant Q167C
FPATLETQEQDVDLVQKYLEKYYNLKNDGRQVEKRRNSGPVVEKLKQMQEFFGLKVTGKPDAETLKVMKQPRCGVPDVAQFVLTEGNPRWEQTHLTYRIENYTPDLPRADVDHAIEKAFQLWSNVTPLTFTKVSEGQADIMISFVRGDHRDNSPFDGPGGNLAHAFQPGPGIGGDAHFDEDECWTNNFREYNLHRVAAHELGHSLGLSHSTDIGALMYPSYTFSGDVQLAQDDIDGIQAIYGRSQNPVQPIGPQTPKACDSKLTFDAITTIRGEVMFFKDRFYMRTNPFYPEVELNFISVFWPQLPNGLEAAYEFADRDEVRFFKGNKYWAVQGQNVLHGYPKDIYSSFGFPRTVKHIDAALSEENTGKTYFFVANKYWRYDEYKRSMDPGYPKMIAHDFPGIGHKVDAVFMKDGFFYFFHGTRQYKFDPKTKRILTLQKANSWFNCRKN

SEQ ID NO: 2230 - protein, 450 aa, Artificial Sequence
  MMP-1 variant Q167N
FPATLETQEQDVDLVQKYLEKYYNLKNDGRQVEKRRNSGPVVEKLKQMQEFFGLKVTGKPDAETLKVMKQPRCGVPDVAQFVLTEGNPRWEQTHLTYRIENYTPDLPRADVDHAIEKAFQLWSNVTPLTFTKVSEGQADIMISFVRGDHRDNSPFDGPGGNLAHAFNPGPGIGGDAHFDEDERWTNNFREYNLHRVAAHELGHSLGLSHSTDIGALMYPSYTFSGDVQLAQDDIDGIQAIYGRSQNPVQPIGPQTPKACDSKLTFDAITTIRGEVMFFKDRFYMRTNPFYPEVELNFISVFWPQLPNGLEAAYEFADRDEVRFFKGNKYWAVQGQNVLHGYPKDIYSSFGFPRTVKHIDAALSEENTGKTYFFVANKYWRYDEYKRSMDPGYPKMIAHDFPGIGHKVDAVFMKDGFFYFFHGTRQYKFDPKTKRILTLQKANSWFNCRKN

SEQ ID NO: 2231 - protein, 450 aa, Artificial Sequence
  MMP-1 variant Q167T
FPATLETQEQDVDLVQKYLEKYYNLKNDGRQVEKRRNSGPVVEKLKQMQEFFGLKVTGKPDAETLKVMKQPRCGVPDVAQFVLTEGNPRWEQTHLTYRIENYTPDLPRADVDHAIEKAFQLWSNVTPLTFTKVSEGQADIMISFVRGDHRDNSPFDGPGGNLAHAFTPGPGIGGDAHFDEDERWTNNFREYNLHRVAAHELGHSLGLSHSTDIGALMYPSYTFSGDVQLAQDDIDGIQAIYGRSQNPVQPIGPQTPKACDSKLTFDAITTIRGEVMFFKDRFYMRTNPFYPEVELNFISVFWPQLPNGLEAAYEFADRDEVRFFKGNKYWAVQGQNVLHGYPKDIYSSFGFPRTVKHIDAALSEENTGKTYFFVANKYWRYDEYKRSMDPGYPKMIAHDFPGIGHKVDAVFMKDGFFYFFHGTRQYKFDPKTKRILTLQKANSWFNCRKN

SEQ ID NO: 2232 - protein, 450 aa, Artificial Sequence
  MMP-1 variant Q167Y
FPATLETQEQDVDLVQKYLEKYYNLKNDGRQVEKRRNSGPVVEKLKQMQEFFGLKVTGKPDAETLKVMKQPRCGVPDVAQFVLTEGNPRWEQTHLTYRIENYTPDLPRADVDHAIEKAFQLWSNVTPLTFTKVSEGQADIMISFVRGDHRDNSPFDGPGGNLAHAFYPGPGIGGDAHFDEDERWTNNFREYNLHRVAAHELGHSLGLSHSTDIGALMYPSYTFSGDVQLAQDDIDGIQAIYGRSQNPVQPIGPQTPKACDSKLTFDAITTIRGEVMFFKDRFYMRTNPFYPEVELNFISVFWPQLPNGLEAAYEFADRDEVRFFKGNKYWAVQGQNVLHGYPKDIYSSFGFPRTVKHIDAALSEENTGKTYFFVANKYWRYDEYKRSMDPGYPKMIAHDFPGIGHKVDAVFMKDGFFYFFHGTRQYKFDPKTKRILTLQKANSWFNCRKN

SEQ ID NO: 2233 - protein, 450 aa, Artificial Sequence
  MMP-1 variant Q167S
FPATLETQEQDVDLVQKYLEKYYNLKNDGRQVEKRRNSGPVVEKLKQMQEFFGLKVTGKPDAETLKVMKQPRCGVPDVAQFVLTEGNPRWEQTHLTYRIENYTPDLPRADVDHAIEKAFQLWSNVTPLTFTKVSEGQADIMISFVRGDHRDNSPFDGPGGNLAHAFSPGPGIGGDAHFDEDERWTNNFREYNLHRVAAHELGHSLGLSHSTDIGALMYPSYTFSGDVQLAQDDIDGIQAIYGRSQNPVQPIGPQTPKACDSKLTFDAITTIRGEVMFFKDRFYMRTNPFYPEVELNFISVFWPQLPNGLEAAYEFADRDEVRFFKGNKYWAVQGQNVLHGYPKDIYSSFGFPRTVKHIDAALSEENTGKTYFFVANKYWRYDEYKRSMDPGYPKMIAHDFPGIGHKVDAVFMKDGFFYFFHGTRQYKFDPKTKRILTLQKANSWFNCRKN

SEQ ID NO: 2234 - protein, 450 aa, Artificial Sequence
  MMP-1 variant Q167G
FPATLETQEQDVDLVQKYLEKYYNLKNDGRQVEKRRNSGPVVEKLKQMQEFFGLKVTGKPDAETLKVMKQPRCGVPDVAQFVLTEGNPRWEQTHLTYRIENYTPDLPRADVDHAIEKAFQLWSNVTPLTFTKVSEGQADIMISFVRGDHRDNSPFDGPGGNLAHAFGPGPGIGGDAHFDEDERWTNNFREYNLHRVAAHELGHSLGLSHSTDIGALMYPSYTFSGDVQLAQDDIDGIQAIYGRSQNPVQPIGPQTPKACDSKLTFDAITTIRGEVMFFKDRFYMRTNPFYPEVELNFISVFWPQLPNGLEAAYEFADRDEVRFFKGNKYWAVQGQNVLHGYPKDIYSSFGFPRTVKHIDAALSEENTGKTYFFVANKYWRYDEYKRSMDPGYPKMIAHDFPGIGHKVDAVFMKDGFFYFFHGTRQYKFDPKTKRILTLQKANSWFNCRKN

SEQ ID NO: 2235 - protein, 450 aa, Artificial Sequence
  MMP-1 variant Q167F
FPATLETQEQDVDLVQKYLEKYYNLKNDGRQVEKRRNSGPVVEKLKQMQEFFGLKVTGKPDAETLKVMKQPRCGVPDVAQFVLTEGNPRWEQTHLTYRIENYTPDLPRADVDHAIEKAFQLWSNVTPLTFTKVSEGQADIMISFVRGDHRDNSPFDGPGGNLAHAFFPGPGIGGDAHFDEDERWTNNFREYNLHRVAAHELGHSLGLSHSTDIGALMYPSYTFSGDVQLAQDDIDGIQAIYGRSQNPVQPIGPQTPKACDSKLTFDAITTIRGEVMFFKDRFYMRTNPFYPEVELNFISVFWPQLPNGLEAAYEFADRDEVRFFKGNKYWAVQGQNVLHGYPKDIYSSFGFPRTVKHIDAALSEENTGKTYFFVANKYWRYDEYKRSMDPGYPKMIAHDFPGIGHKVDAVFMKDGFFYFFHGTRQYKFDPKTKRILTLQKANSWFNCRKN

SEQ ID NO: 2236 - protein, 450 aa, Artificial Sequence
  MMP-1 variant Q167M
FPATLETQEQDVDLVQKYLEKYYNLKNDGRQVEKRRNSGPVVEKLKQMQEFFGLKVTGKPDAETLKVMKQPRCGVPDVAQFVLTEGNPRWEQTHLTYRIENYTPDLPRADVDHAIEKAFQLWSNVTPLTFTKVSEGQADIMISFVRGDHRDNSPFDGPGGNLAHAFMPGPGIGGDAHFDEDERWTNNFREYNLHRVAAHELGHSLGLSHSTDIGALMYPSYTFSGDVQLAQDDIDGIQAIYGRSQNPVQPIGPQTPKACDSKLTFDAITTIRGEVMFFKDRFYMRTNPFYPEVELNFISVFWPQLPNGLEAAYEFADRDEVRFFKGNKYWAVQGQNVLHGYPKDIYSSFGFPRTVKHIDAALSEENTGKTYFFVANKYWRYDEYKRSMDPGYPKMIAHDFPGIGHKVDAVFMKDGFFYFFHGTRQYKFDPKTKRILTLQKANSWFNCRKN

SEQ ID NO: 2237 - protein, 450 aa, Artificial Sequence
  MMP-1 variant Q167W
FPATLETQEQDVDLVQKYLEKYYNLKNDGRQVEKRRNSGPVVEKLKQMQEFFGLKVTGKPDAETLKVMKQPRCGVPDVAQFVLTEGNPRWEQTHLTYRIENYTPDLPRADVDHAIEKAFQLWSNVTPLTFTKVSEGQADIMISFVRGDHRDNSPFDGPGGNLAHAFWPGPGIGGDAHFDEDERWTNNFREYNLHRVAAHELGHSLGLSHSTDIGALMYPSYTFSGDVQLAQDDIDGIQAIYGRSQNPVQPIGPQTPKACDSKLTFDAITTIRGEVMFFKDRFYMRTNPFYPEVELNFISVFWPQLPNGLEAAYEFADRDEVRFFKGNKYWAVQGQNVLHGYPKDIYSSFGFPRTVKHIDAALSEENTGKTYFFVANKYWRYDEYKRSMDPGYPKMIAHDFPGIGHKVDAVFMKDGFFYFFHGTRQYKFDPKTKRILTLQKANSWFNCRKN

SEQ ID NO: 2238 - protein, 450 aa, Artificial Sequence
  MMP-1 variant Q167I
FPATLETQEQDVDLVQKYLEKYYNLKNDGRQVEKRRNSGPVVEKLKQMQEFFGLKVTGKPDAETLKVMKQPRCGVPDVAQFVLTEGNPRWEQTHLTYRIENYTPDLPRADVDHAIEKAFQLWSNVTPLTFTKVSEGQADIMISFVRGDHRDNSPFDGPGGNLAHAFIPGPGIGGDAHFDEDERWTNNFREYNLHRVAAHELGHSLGLSHSTDIGALMYPSYTFSGDVQLAQDDIDGIQAIYGRSQNPVQPIGPQTPKACDSKLTFDAITTIRGEVMFFKDRFYMRTNPFYPEVELNFISVFWPQLPNGLEAAYEFADRDEVRFFKGNKYWAVQGQNVLHGYPKDIYSSFGFPRTVKHIDAALSEENTGKTYFFVANKYWRYDEYKRSMDPGYPKMIAHDFPGIGHKVDAVFMKDGFFYFFHGTRQYKFDPKTKRILTLQKANSWFNCRKN

SEQ ID NO: 2239 - protein, 450 aa, Artificial Sequence
  MMP-1 variant Q167V
FPATLETQEQDVDLVQKYLEKYYNLKNDGRQVEKRRNSGPVVEKLKQMQEFFGLKVTGKPDAETLKVMKQPRCGVPDVAQFVLTEGNPRWEQTHLTYRIENYTPDLPRADVDHAIEKAFQLWSNVTPLTFTKVSEGQADIMISFVRGDHRDNSPFDGPGGNLAHAFVPGPGIGGDAHFDEDERWTNNFREYNLHRVAAHELGHSLGLSHSTDIGALMYPSYTFSGDVQLAQDDIDGIQAIYGRSQNPVQPIGPQTPKACDSKLTFDAITTIRGEVMFFKDRFYMRTNPFYPEVELNFISVFWPQLPNGLEAAYEFADRDEVRFFKGNKYWAVQGQNVLHGYPKDIYSSFGFPRTVKHIDAALSEENTGKTYFFVANKYWRYDEYKRSMDPGYPKMIAHDFPGIGHKVDAVFMKDGFFYFFHGTRQYKFDPKTKRILTLQKANSWFNCRKN

SEQ ID NO: 2240 - protein, 450 aa, Artificial Sequence
  MMP-1 variant Q167L
FPATLETQEQDVDLVQKYLEKYYNLKNDGRQVEKRRNSGPVVEKLKQMQEFFGLKVTGKPDAETLKVMKQPRCGVPDVAQFVLTEGNPRWEQTHLTYRIENYTPDLPRADVDHAIEKAFQLWSNVTPLTFTKVSEGQADIMISFVRGDHRDNSPFDGPGGNLAHAFLPGPGIGGDAHFDEDERWTNNFREYNLHRVAAHELGHSLGLSHSTDIGALMYPSYTFSGDVQLAQDDIDGIQAIYGRSQNPVQPIGPQTPKACDSKLTFDAITTIRGEVMFFKDRFYMRTNPFYPEVELNFISVFWPQLPNGLEAAYEFADRDEVRFFKGNKYWAVQGQNVLHGYPKDIYSSFGFPRTVKHIDAALSEENTGKTYFFVANKYWRYDEYKRSMDPGYPKMIAHDFPGIGHKVDAVFMKDGFFYFFHGTRQYKFDPKTKRILTLQKANSWFNCRKN

SEQ ID NO: 2241 - protein, 450 aa, Artificial Sequence
  MMP-1 variant Q167A
FPATLETQEQDVDLVQKYLEKYYNLKNDGRQVEKRRNSGPVVEKLKQMQEFFGLKVTGKPDAETLKVMKQPRCGVPDVAQFVLTEGNPRWEQTHLTYRIENYTPDLPRADVDHAIEKAFQLWSNVTPLTFTKVSEGQADIMISFVRGDHRDNSPFDGPGGNLAHAFAPGPGIGGDAHFDEDERWTNNFREYNLHRVAAHELGHSLGLSHSTDIGALMYPSYTFSGDVQLAQDDIDGIQAIYGRSQNPVQPIGPQTPKACDSKLTFDAITTIRGEVMFFKDRFYMRTNPFYPEVELNFISVFWPQLPNGLEAAYEFADRDEVRFFKGNKYWAVQGQNVLHGYPKDIYSSFGFPRTVKHIDAALSEENTGKTYFFVANKYWRYDEYKRSMDPGYPKMIAHDFPGIGHKVDAVFMKDGFFYFFHGTRQYKFDPKTKRILTLQKANSWFNCRKN

SEQ ID NO: 2242 - protein, 450 aa, Artificial Sequence
  MMP-1 variant Q167P
FPATLETQEQDVDLVQKYLEKYYNLKNDGRQVEKRRNSGPVVEKLKQMQEFFGLKVTGKPDAETLKVMKQPRCGVPDVAQFVLTEGNPRWEQTHLTYRIENYTPDLPRADVDHAIEKAFQLWSNVTPLTFTKVSEGQADIMISFVRGDHRDNSPFDGPGGNLAHAFPPGPGIGGDAHFDEDERWTNNFREYNLHRVAAHELGHSLGLSHSTDIGALMYPSYTFSGDVQLAQDDIDGIQAIYGRSQNPVQPIGPQTPKACDSKLTFDAITTIRGEVMFFKDRFYMRTNPFYPEVELNFISVFWPQLPNGLEAAYEFADRDEVRFFKGNKYWAVQGQNVLHGYPKDIYSSFGFPRTVKHIDAALSEENTGKTYFFVANKYWRYDEYKRSMDPGYPKMIAHDFPGIGHKVDAVFMKDGFFYFFHGTRQYKFDPKTKRILTLQKANSWFNCRKN

SEQ ID NO: 2243 - protein, 450 aa, Artificial Sequence
  MMP-1 variant P168D
FPATLETQEQDVDLVQKYLEKYYNLKNDGRQVEKRRNSGPVVEKLKQMQEFFGLKVTGKPDAETLKVMKQPRCGVPDVAQFVLTEGNPRWEQTHLTYRIENYTPDLPRADVDHAIEKAFQLWSNVTPLTFTKVSEGQADIMISFVRGDHRDNSPFDGPGGNLAHAFQDGPGIGGDAHFDEDERWTNNFREYNLHRVAAHELGHSLGLSHSTDIGALMYPSYTFSGDVQLAQDDIDGIQAIYGRSQNPVQPIGPQTPKACDSKLTFDAITTIRGEVMFFKDRFYMRTNPFYPEVELNFISVFWPQLPNGLEAAYEFADRDEVRFFKGNKYWAVQGQNVLHGYPKDIYSSFGFPRTVKHIDAALSEENTGKTYFFVANKYWRYDEYKRSMDPGYPKMIAHDFPGIGHKVDAVFMKDGFFYFFHGTRQYKFDPKTKRILTLQKANSWFNCRKN

SEQ ID NO: 2244 - protein, 450 aa, Artificial Sequence
  MMP-1 variant P168E
FPATLETQEQDVDLVQKYLEKYYNLKNDGRQVEKRRNSGPVVEKLKQMQEFFGLKVTGKPDAETLKVMKQPRCGVPDVAQFVLTEGNPRWEQTHLTYRIENYTPDLPRADVDHAIEKAFQLWSNVTPLTFTKVSEGQADIMISFVRGDHRDNSPFDGPGGNLAHAFQEGPGIGGDAHFDEDERWTNNFREYNLHRVAAHELGHSLGLSHSTDIGALMYPSYTFSGDVQLAQDDIDGIQAIYGRSQNPVQPIGPQTPKACDSKLTFDAITTIRGEVMFFKDRFYMRTNPFYPEVELNFISVFWPQLPNGLEAAYEFADRDEVRFFKGNKYWAVQGQNVLHGYPKDIYSSFGFPRTVKHIDAALSEENTGKTYFFVANKYWRYDEYKRSMDPGYPKMIAHDFPGIGHKVDAVFMKDGFFYFFHGTRQYKFDPKTKRILTLQKANSWFNCRKN

SEQ ID NO: 2245 - protein, 450 aa, Artificial Sequence
  MMP-1 variant P168H
FPATLETQEQDVDLVQKYLEKYYNLKNDGRQVEKRRNSGPVVEKLKQMQEFFGLKVTGKPDAETLKVMKQPRCGVPDVAQFVLTEGNPRWEQTHLTYRIENYTPDLPRADVDHAIEKAFQLWSNVTPLTFTKVSEGQADIMISFVRGDHRDNSPFDGPGGNLAHAFQHGPGIGGDAHFDEDERWTNNFREYNLHRVAAHELGHSLGLSHSTDIGALMYPSYTFSGDVQLAQDDIDGIQAIYGRSQNPVQPIGPQTPKACDSKLTFDAITTIRGEVMFFKDRFYMRTNPFYPEVELNFISVFWPQLPNGLEAAYEFADRDEVRFFKGNKYWAVQGQNVLHGYPKDIYSSFGFPRTVKHIDAALSEENTGKTYFFVANKYWRYDEYKRSMDPGYPKMIAHDFPGIGHKVDAVFMKDGFFYFFHGTRQYKFDPKTKRILTLQKANSWFNCRKN

SEQ ID NO: 2246 - protein, 450 aa, Artificial Sequence
  MMP-1 variant P168K
FPATLETQEQDVDLVQKYLEKYYNLKNDGRQVEKRRNSGPVVEKLKQMQEFFGLKVTGKPDAETLKVMKQPRCGVPDVAQFVLTEGNPRWEQTHLTYRIENYTPDLPRADVDHAIEKAFQLWSNVTPLTFTKVSEGQADIMISFVRGDHRDNSPFDGPGGNLAHAFQKGPGIGGDAHFDEDERWTNNFREYNLHRVAAHELGHSLGLSHSTDIGALMYPSYTFSGDVQLAQDDIDGIQAIYGRSQNPVQPIGPQTPKACDSKLTFDAITTIRGEVMFFKDRFYMRTNPFYPEVELNFISVFWPQLPNGLEAAYEFADRDEVRFFKGNKYWAVQGQNVLHGYPKDIYSSFGFPRTVKHIDAALSEENTGKTYFFVANKYWRYDEYKRSMDPGYPKMIAHDFPGIGHKVDAVFMKDGFFYFFHGTRQYKFDPKTKRILTLQKANSWFNCRKN

SEQ ID NO: 2247 - protein, 450 aa, Artificial Sequence
  MMP-1 variant P168R
FPATLETQEQDVDLVQKYLEKYYNLKNDGRQVEKRRNSGPVVEKLKQMQEFFGLKVTGKPDAETLKVMKQPRCGVPDVAQFVLTEGNPRWEQTHLTYRIENYTPDLPRADVDHAIEKAFQLWSNVTPLTFTKVSEGQADIMISFVRGDHRDNSPFDGPGGNLAHAFQRGPGIGGDAHFDEDERWTNNFREYNLHRVAAHELGHSLGLSHSTDIGALMYPSYTFSGDVQLAQDDIDGIQAIYGRSQNPVQPIGPQTPKACDSKLTFDAITTIRGEVMFFKDRFYMRTNPFYPEVELNFISVFWPQLPNGLEAAYEFADRDEVRFFKGNKYWAVQGQNVLHGYPKDIYSSFGFPRTVKHIDAALSEENTGKTYFFVANKYWRYDEYKRSMDPGYPKMIAHDFPGIGHKVDAVFMKDGFFYFFHGTRQYKFDPKTKRILTLQKANSWFNCRKN

SEQ ID NO: 2248 - protein, 450 aa, Artificial Sequence
  MMP-1 variant P168C
FPATLETQEQDVDLVQKYLEKYYNLKNDGRQVEKRRNSGPVVEKLKQMQEFFGLKVTGKPDAETLKVMKQPRCGVPDVAQFVLTEGNPRWEQTHLTYRIENYTPDLPRADVDHAIEKAFQLWSNVTPLTFTKVSEGQADIMISFVRGDHRDNSPFDGPGGNLAHAFQCGPGIGGDAHFDEDERWTNNFREYNLHRVAAHELGHSLGLSHSTDIGALMYPSYTFSGDVQLAQDDIDGIQAIYGRSQNPVQPIGPQTPKACDSKLTFDAITTIRGEVMFFKDRFYMRTNPFYPEVELNFISVFWPQLPNGLEAAYEFADRDEVRFFKGNKYWAVQGQNVLHGYPKDIYSSFGFPRTVKHIDAALSEENTGKTYFFVANKYWRYDEYKRSMDPGYPKMIAHDFPGIGHKVDAVFMKDGFFYFFHGTRQYKFDPKTKRILTLQKANSWFNCRKN

SEQ ID NO: 2249 - protein, 450 aa, Artificial Sequence
  MMP-1 variant P168N
FPATLETQEQDVDLVQKYLEKYYNLKNDGRQVEKRRNSGPVVEKLKQMQEFFGLKVTGKPDAETLKVMKQPRCGVPDVAQFVLTEGNPRWEQTHLTYRIENYTPDLPRADVDHAIEKAFQLWSNVTPLTFTKVSEGQADIMISFVRGDHRDNSPFDGPGGNLAHAFQNGPGIGGDAHFDEDERWTNNFREYNLHRVAAHELGHSLGLSHSTDIGALMYPSYTFSGDVQLAQDDIDGIQAIYGRSQNPVQPIGPQTPKACDSKLTFDAITTIRGEVMFFKDRFYMRTNPFYPEVELNFISVFWPQLPNGLEAAYEFADRDEVRFFKGNKYWAVQGQNVLHGYPKDIYSSFGFPRTVKHIDAALSEENTGKTYFFVANKYWRYDEYKRSMDPGYPKMIAHDFPGIGHKVDAVFMKDGFFYFFHGTRQYKFDPKTKRILTLQKANSWFNCRKN

SEQ ID NO: 2250 - protein, 450 aa, Artificial Sequence
  MMP-1 variant P168Q
FPATLETQEQDVDLVQKYLEKYYNLKNDGRQVEKRRNSGPVVEKLKQMQEFFGLKVTGKPDAETLKVMKQPRCGVPDVAQFVLTEGNPRWEQTHLTYRIENYTPDLPRADVDHAIEKAFQLWSNVTPLTFTKVSEGQADIMISFVRGDHRDNSPFDGPGGNLAHAFQQGPGIGGDAHFDEDERWTNNFREYNLHRVAAHELGHSLGLSHSTDIGALMYPSYTFSGDVQLAQDDIDGIQAIYGRSQNPVQPIGPQTPKACDSKLTFDAITTIRGEVMFFKDRFYMRTNPFYPEVELNFISVFWPQLPNGLEAAYEFADRDEVRFFKGNKYWAVQGQNVLHGYPKDIYSSFGFPRTVKHIDAALSEENTGKTYFFVANKYWRYDEYKRSMDPGYPKMIAHDFPGIGHKVDAVFMKDGFFYFFHGTRQYKFDPKTKRILTLQKANSWFNCRKN

SEQ ID NO: 2251 - protein, 450 aa, Artificial Sequence
  MMP-1 variant P168T
FPATLETQEQDVDLVQKYLEKYYNLKNDGRQVEKRRNSGPVVEKLKQMQEFFGLKVTGKPDAETLKVMKQPRCGVPDVAQFVLTEGNPRWEQTHLTYRIENYTPDLPRADVDHAIEKAFQLWSNVTPLTFTKVSEGQADIMISFVRGDHRDNSPFDGPGGNLAHAFQTGPGIGGDAHFDEDERWTNNFREYNLHRVAAHELGHSLGLSHSTDIGALMYPSYTFSGDVQLAQDDIDGIQAIYGRSQNPVQPIGPQTPKACDSKLTFDAITTIRGEVMFFKDRFYMRTNPFYPEVELNFISVFWPQLPNGLEAAYEFADRDEVRFFKGNKYWAVQGQNVLHGYPKDIYSSFGFPRTVKHIDAALSEENTGKTYFFVANKYWRYDEYKRSMDPGYPKMIAHDFPGIGHKVDAVFMKDGFFYFFHGTRQYKFDPKTKRILTLQKANSWFNCRKN

SEQ ID NO: 2252 - protein, 450 aa, Artificial Sequence
  MMP-1 variant P168Y
FPATLETQEQDVDLVQKYLEKYYNLKNDGRQVEKRRNSGPVVEKLKQMQEFFGLKVTGKPDAETLKVMKQPRCGVPDVAQFVLTEGNPRWEQTHLTYRIENYTPDLPRADVDHAIEKAFQLWSNVTPLTFTKVSEGQADIMISFVRGDHRDNSPFDGPGGNLAHAFQYGPGIGGDAHFDEDERWTNNFREYNLHRVAAHELGHSLGLSHSTDIGALMYPSYTFSGDVQLAQDDIDGIQAIYGRSQNPVQPIGPQTPKACDSKLTFDAITTIRGEVMFFKDRFYMRTNPFYPEVELNFISVFWPQLPNGLEAAYEFADRDEVRFFKGNKYWAVQGQNVLHGYPKDIYSSFGFPRTVKHIDAALSEENTGKTYFFVANKYWRYDEYKRSMDPGYPKMIAHDFPGIGHKVDAVFMKDGFFYFFHGTRQYKFDPKTKRILTLQKANSWFNCRKN

SEQ ID NO: 2253 - protein, 450 aa, Artificial Sequence
  MMP-1 variant P168S
FPATLETQEQDVDLVQKYLEKYYNLKNDGRQVEKRRNSGPVVEKLKQMQEFFGLKVTGKPDAETLKVMKQPRCGVPDVAQFVLTEGNPRWEQTHLTYRIENYTPDLPRADVDHAIEKAFQLWSNVTPLTFTKVSEGQADIMISFVRGDHRDNSPFDGPGGNLAHAFQSGPGIGGDAHFDEDERWTNNFREYNLHRVAAHELGHSLGLSHSTDIGALMYPSYTFSGDVQLAQDDIDGIQAIYGRSQNPVQPIGPQTPKACDSKLTFDAITTIRGEVMFFKDRFYMRTNPFYPEVELNFISVFWPQLPNGLEAAYEFADRDEVRFFKGNKYWAVQGQNVLHGYPKDIYSSFGFPRTVKHIDAALSEENTGKTYFFVANKYWRYDEYKRSMDPGYPKMIAHDFPGIGHKVDAVFMKDGFFYFFHGTRQYKFDPKTKRILTLQKANSWFNCRKN

SEQ ID NO: 2254 - protein, 450 aa, Artificial Sequence
  MMP-1 variant P168G
FPATLETQEQDVDLVQKYLEKYYNLKNDGRQVEKRRNSGPVVEKLKQMQEFFGLKVTGKPDAETLKVMKQPRCGVPDVAQFVLTEGNPRWEQTHLTYRIENYTPDLPRADVDHAIEKAFQLWSNVTPLTFTKVSEGQADIMISFVRGDHRDNSPFDGPGGNLAHAFQGGPGIGGDAHFDEDERWTNNFREYNLHRVAAHELGHSLGLSHSTDIGALMYPSYTFSGDVQLAQDDIDGIQAIYGRSQNPVQPIGPQTPKACDSKLTFDAITTIRGEVMFFKDRFYMRTNPFYPEVELNFISVFWPQLPNGLEAAYEFADRDEVRFFKGNKYWAVQGQNVLHGYPKDIYSSFGFPRTVKHIDAALSEENTGKTYFFVANKYWRYDEYKRSMDPGYPKMIAHDFPGIGHKVDAVFMKDGFFYFFHGTRQYKFDPKTKRILTLQKANSWFNCRKN

SEQ ID NO: 2255 - protein, 450 aa, Artificial Sequence
  MMP-1 variant P168F
FPATLETQEQDVDLVQKYLEKYYNLKNDGRQVEKRRNSGPVVEKLKQMQEFFGLKVTGKPDAETLKVMKQPRCGVPDVAQFVLTEGNPRWEQTHLTYRIENYTPDLPRADVDHAIEKAFQLWSNVTPLTFTKVSEGQADIMISFVRGDHRDNSPFDGPGGNLAHAFQFGPGIGGDAHFDEDERWTNNFREYNLHRVAAHELGHSLGLSHSTDIGALMYPSYTFSGDVQLAQDDIDGIQAIYGRSQNPVQPIGPQTPKACDSKLTFDAITTIRGEVMFFKDRFYMRTNPFYPEVELNFISVFWPQLPNGLEAAYEFADRDEVRFFKGNKYWAVQGQNVLHGYPKDIYSSFGFPRTVKHIDAALSEENTGKTYFFVANKYWRYDEYKRSMDPGYPKMIAHDFPGIGHKVDAVFMKDGFFYFFHGTRQYKFDPKTKRILTLQKANSWFNCRKN

SEQ ID NO: 2256 - protein, 450 aa, Artificial Sequence
  MMP-1 variant P168M
FPATLETQEQDVDLVQKYLEKYYNLKNDGRQVEKRRNSGPVVEKLKQMQEFFGLKVTGKPDAETLKVMKQPRCGVPDVAQFVLTEGNPRWEQTHLTYRIENYTPDLPRADVDHAIEKAFQLWSNVTPLTFTKVSEGQADIMISFVRGDHRDNSPFDGPGGNLAHAFQMGPGIGGDAHFDEDERWTNNFREYNLHRVAAHELGHSLGLSHSTDIGALMYPSYTFSGDVQLAQDDIDGIQAIYGRSQNPVQPIGPQTPKACDSKLTFDAITTIRGEVMFFKDRFYMRTNPFYPEVELNFISVFWPQLPNGLEAAYEFADRDEVRFFKGNKYWAVQGQNVLHGYPKDIYSSFGFPRTVKHIDAALSEENTGKTYFFVANKYWRYDEYKRSMDPGYPKMIAHDFPGIGHKVDAVFMKDGFFYFFHGTRQYKFDPKTKRILTLQKANSWFNCRKN

SEQ ID NO: 2257 - protein, 450 aa, Artificial Sequence
  MMP-1 variant P168W
FPATLETQEQDVDLVQKYLEKYYNLKNDGRQVEKRRNSGPVVEKLKQMQEFFGLKVTGKPDAETLKVMKQPRCGVPDVAQFVLTEGNPRWEQTHLTYRIENYTPDLPRADVDHAIEKAFQLWSNVTPLTFTKVSEGQADIMISFVRGDHRDNSPFDGPGGNLAHAFQWGPGIGGDAHFDEDERWTNNFREYNLHRVAAHELGHSLGLSHSTDIGALMYPSYTFSGDVQLAQDDIDGIQAIYGRSQNPVQPIGPQTPKACDSKLTFDAITTIRGEVMFFKDRFYMRTNPFYPEVELNFISVFWPQLPNGLEAAYEFADRDEVRFFKGNKYWAVQGQNVLHGYPKDIYSSFGFPRTVKHIDAALSEENTGKTYFFVANKYWRYDEYKRSMDPGYPKMIAHDFPGIGHKVDAVFMKDGFFYFFHGTRQYKFDPKTKRILTLQKANSWFNCRKN

SEQ ID NO: 2258 - protein, 450 aa, Artificial Sequence
  MMP-1 variant P168I
FPATLETQEQDVDLVQKYLEKYYNLKNDGRQVEKRRNSGPVVEKLKQMQEFFGLKVTGKPDAETLKVMKQPRCGVPDVAQFVLTEGNPRWEQTHLTYRIENYTPDLPRADVDHAIEKAFQLWSNVTPLTFTKVSEGQADIMISFVRGDHRDNSPFDGPGGNLAHAFQIGPGIGGDAHFDEDERWTNNFREYNLHRVAAHELGHSLGLSHSTDIGALMYPSYTFSGDVQLAQDDIDGIQAIYGRSQNPVQPIGPQTPKACDSKLTFDAITTIRGEVMFFKDRFYMRTNPFYPEVELNFISVFWPQLPNGLEAAYEFADRDEVRFFKGNKYWAVQGQNVLHGYPKDIYSSFGFPRTVKHIDAALSEENTGKTYFFVANKYWRYDEYKRSMDPGYPKMIAHDFPGIGHKVDAVFMKDGFFYFFHGTRQYKFDPKTKRILTLQKANSWFNCRKN

SEQ ID NO: 2259 - protein, 450 aa, Artificial Sequence
  MMP-1 variant P168V
FPATLETQEQDVDLVQKYLEKYYNLKNDGRQVEKRRNSGPVVEKLKQMQEFFGLKVTGKPDAETLKVMKQPRCGVPDVAQFVLTEGNPRWEQTHLTYRIENYTPDLPRADVDHAIEKAFQLWSNVTPLTFTKVSEGQADIMISFVRGDHRDNSPFDGPGGNLAHAFQVGPGIGGDAHFDEDERWTNNFREYNLHRVAAHELGHSLGLSHSTDIGALMYPSYTFSGDVQLAQDDIDGIQAIYGRSQNPVQPIGPQTPKACDSKLTFDAITTIRGEVMFFKDRFYMRTNPFYPEVELNFISVFWPQLPNGLEAAYEFADRDEVRFFKGNKYWAVQGQNVLHGYPKDIYSSFGFPRTVKHIDAALSEENTGKTYFFVANKYWRYDEYKRSMDPGYPKMIAHDFPGIGHKVDAVFMKDGFFYFFHGTRQYKFDPKTKRILTLQKANSWFNCRKN

SEQ ID NO: 2260 - protein, 450 aa, Artificial Sequence
  MMP-1 variant P168L
FPATLETQEQDVDLVQKYLEKYYNLKNDGRQVEKRRNSGPVVEKLKQMQEFFGLKVTGKPDAETLKVMKQPRCGVPDVAQFVLTEGNPRWEQTHLTYRIENYTPDLPRADVDHAIEKAFQLWSNVTPLTFTKVSEGQADIMISFVRGDHRDNSPFDGPGGNLAHAFQLGPGIGGDAHFDEDERWTNNFREYNLHRVAAHELGHSLGLSHSTDIGALMYPSYTFSGDVQLAQDDIDGIQAIYGRSQNPVQPIGPQTPKACDSKLTFDAITTIRGEVMFFKDRFYMRTNPFYPEVELNFISVFWPQLPNGLEAAYEFADRDEVRFFKGNKYWAVQGQNVLHGYPKDIYSSFGFPRTVKHIDAALSEENTGKTYFFVANKYWRYDEYKRSMDPGYPKMIAHDFPGIGHKVDAVFMKDGFFYFFHGTRQYKFDPKTKRILTLQKANSWFNCRKN

SEQ ID NO: 2261 - protein, 450 aa, Artificial Sequence
  MMP-1 variant P168A
FPATLETQEQDVDLVQKYLEKYYNLKNDGRQVEKRRNSGPVVEKLKQMQEFFGLKVTGKPDAETLKVMKQPRCGVPDVAQFVLTEGNPRWEQTHLTYRIENYTPDLPRADVDHAIEKAFQLWSNVTPLTFTKVSEGQADIMISFVRGDHRDNSPFDGPGGNLAHAFQAGPGIGGDAHFDEDERWTNNFREYNLHRVAAHELGHSLGLSHSTDIGALMYPSYTFSGDVQLAQDDIDGIQAIYGRSQNPVQPIGPQTPKACDSKLTFDAITTIRGEVMFFKDRFYMRTNPFYPEVELNFISVFWPQLPNGLEAAYEFADRDEVRFFKGNKYWAVQGQNVLHGYPKDIYSSFGFPRTVKHIDAALSEENTGKTYFFVANKYWRYDEYKRSMDPGYPKMIAHDFPGIGHKVDAVFMKDGFFYFFHGTRQYKFDPKTKRILTLQKANSWFNCRKN

SEQ ID NO: 2262 - protein, 450 aa, Artificial Sequence
  MMP-1 variant G169D
FPATLETQEQDVDLVQKYLEKYYNLKNDGRQVEKRRNSGPVVEKLKQMQEFFGLKVTGKPDAETLKVMKQPRCGVPDVAQFVLTEGNPRWEQTHLTYRIENYTPDLPRADVDHAIEKAFQLWSNVTPLTFTKVSEGQADIMISFVRGDHRDNSPFDGPGGNLAHAFQPDPGIGGDAHFDEDERWTNNFREYNLHRVAAHELGHSLGLSHSTDIGALMYPSYTFSGDVQLAQDDIDGIQAIYGRSQNPVQPIGPQTPKACDSKLTFDAITTIRGEVMFFKDRFYMRTNPFYPEVELNFISVFWPQLPNGLEAAYEFADRDEVRFFKGNKYWAVQGQNVLHGYPKDIYSSFGFPRTVKHIDAALSEENTGKTYFFVANKYWRYDEYKRSMDPGYPKMIAHDFPGIGHKVDAVFMKDGFFYFFHGTRQYKFDPKTKRILTLQKANSWFNCRKN

SEQ ID NO: 2263 - protein, 450 aa, Artificial Sequence
  MMP-1 variant G169E
FPATLETQEQDVDLVQKYLEKYYNLKNDGRQVEKRRNSGPVVEKLKQMQEFFGLKVTGKPDAETLKVMKQPRCGVPDVAQFVLTEGNPRWEQTHLTYRIENYTPDLPRADVDHAIEKAFQLWSNVTPLTFTKVSEGQADIMISFVRGDHRDNSPFDGPGGNLAHAFQPEPGIGGDAHFDEDERWTNNFREYNLHRVAAHELGHSLGLSHSTDIGALMYPSYTFSGDVQLAQDDIDGIQAIYGRSQNPVQPIGPQTPKACDSKLTFDAITTIRGEVMFFKDRFYMRTNPFYPEVELNFISVFWPQLPNGLEAAYEFADRDEVRFFKGNKYWAVQGQNVLHGYPKDIYSSFGFPRTVKHIDAALSEENTGKTYFFVANKYWRYDEYKRSMDPGYPKMIAHDFPGIGHKVDAVFMKDGFFYFFHGTRQYKFDPKTKRILTLQKANSWFNCRKN

SEQ ID NO: 2264 - protein, 450 aa, Artificial Sequence
  MMP-1 variant G169H
FPATLETQEQDVDLVQKYLEKYYNLKNDGRQVEKRRNSGPVVEKLKQMQEFFGLKVTGKPDAETLKVMKQPRCGVPDVAQFVLTEGNPRWEQTHLTYRIENYTPDLPRADVDHAIEKAFQLWSNVTPLTFTKVSEGQADIMISFVRGDHRDNSPFDGPGGNLAHAFQPHPGIGGDAHFDEDERWTNNFREYNLHRVAAHELGHSLGLSHSTDIGALMYPSYTFSGDVQLAQDDIDGIQAIYGRSQNPVQPIGPQTPKACDSKLTFDAITTIRGEVMFFKDRFYMRTNPFYPEVELNFISVFWPQLPNGLEAAYEFADRDEVRFFKGNKYWAVQGQNVLHGYPKDIYSSFGFPRTVKHIDAALSEENTGKTYFFVANKYWRYDEYKRSMDPGYPKMIAHDFPGIGHKVDAVFMKDGFFYFFHGTRQYKFDPKTKRILTLQKANSWFNCRKN

SEQ ID NO: 2265 - protein, 450 aa, Artificial Sequence
  MMP-1 variant G169K
FPATLETQEQDVDLVQKYLEKYYNLKNDGRQVEKRRNSGPVVEKLKQMQEFFGLKVTGKPDAETLKVMKQPRCGVPDVAQFVLTEGNPRWEQTHLTYRIENYTPDLPRADVDHAIEKAFQLWSNVTPLTFTKVSEGQADIMISFVRGDHRDNSPFDGPGGNLAHAFQPKPGIGGDAHFDEDERWTNNFREYNLHRVAAHELGHSLGLSHSTDIGALMYPSYTFSGDVQLAQDDIDGIQAIYGRSQNPVQPIGPQTPKACDSKLTFDAITTIRGEVMFFKDRFYMRTNPFYPEVELNFISVFWPQLPNGLEAAYEFADRDEVRFFKGNKYWAVQGQNVLHGYPKDIYSSFGFPRTVKHIDAALSEENTGKTYFFVANKYWRYDEYKRSMDPGYPKMIAHDFPGIGHKVDAVFMKDGFFYFFHGTRQYKFDPKTKRILTLQKANSWFNCRKN

SEQ ID NO: 2266 - protein, 450 aa, Artificial Sequence
  MMP-1 variant G169R
FPATLETQEQDVDLVQKYLEKYYNLKNDGRQVEKRRNSGPVVEKLKQMQEFFGLKVTGKPDAETLKVMKQPRCGVPDVAQFVLTEGNPRWEQTHLTYRIENYTPDLPRADVDHAIEKAFQLWSNVTPLTFTKVSEGQADIMISFVRGDHRDNSPFDGPGGNLAHAFQPRPGIGGDAHFDEDERWTNNFREYNLHRVAAHELGHSLGLSHSTDIGALMYPSYTFSGDVQLAQDDIDGIQAIYGRSQNPVQPIGPQTPKACDSKLTFDAITTIRGEVMFFKDRFYMRTNPFYPEVELNFISVFWPQLPNGLEAAYEFADRDEVRFFKGNKYWAVQGQNVLHGYPKDIYSSFGFPRTVKHIDAALSEENTGKTYFFVANKYWRYDEYKRSMDPGYPKMIAHDFPGIGHKVDAVFMKDGFFYFFHGTRQYKFDPKTKRILTLQKANSWFNCRKN

SEQ ID NO: 2267 - protein, 450 aa, Artificial Sequence
  MMP-1 variant G169C
FPATLETQEQDVDLVQKYLEKYYNLKNDGRQVEKRRNSGPVVEKLKQMQEFFGLKVTGKPDAETLKVMKQPRCGVPDVAQFVLTEGNPRWEQTHLTYRIENYTPDLPRADVDHAIEKAFQLWSNVTPLTFTKVSEGQADIMISFVRGDHRDNSPFDGPGGNLAHAFQPCPGIGGDAHFDEDERWTNNFREYNLHRVAAHELGHSLGLSHSTDIGALMYPSYTFSGDVQLAQDDIDGIQAIYGRSQNPVQPIGPQTPKACDSKLTFDAITTIRGEVMFFKDRFYMRTNPFYPEVELNFISVFWPQLPNGLEAAYEFADRDEVRFFKGNKYWAVQGQNVLHGYPKDIYSSFGFPRTVKHIDAALSEENTGKTYFFVANKYWRYDEYKRSMDPGYPKMIAHDFPGIGHKVDAVFMKDGFFYFFHGTRQYKFDPKTKRILTLQKANSWFNCRKN

SEQ ID NO: 2268 - protein, 450 aa, Artificial Sequence
  MMP-1 variant G169N
FPATLETQEQDVDLVQKYLEKYYNLKNDGRQVEKRRNSGPVVEKLKQMQEFFGLKVTGKPDAETLKVMKQPRCGVPDVAQFVLTEGNPRWEQTHLTYRIENYTPDLPRADVDHAIEKAFQLWSNVTPLTFTKVSEGQADIMISFVRGDHRDNSPFDGPGGNLAHAFQPNPGIGGDAHFDEDERWTNNFREYNLHRVAAHELGHSLGLSHSTDIGALMYPSYTFSGDVQLAQDDIDGIQAIYGRSQNPVQPIGPQTPKACDSKLTFDAITTIRGEVMFFKDRFYMRTNPFYPEVELNFISVFWPQLPNGLEAAYEFADRDEVRFFKGNKYWAVQGQNVLHGYPKDIYSSFGFPRTVKHIDAALSEENTGKTYFFVANKYWRYDEYKRSMDPGYPKMIAHDFPGIGHKVDAVFMKDGFFYFFHGTRQYKFDPKTKRILTLQKANSWFNCRKN

SEQ ID NO: 2269 - protein, 450 aa, Artificial Sequence
  MMP-1 variant G169Q
FPATLETQEQDVDLVQKYLEKYYNLKNDGRQVEKRRNSGPVVEKLKQMQEFFGLKVTGKPDAETLKVMKQPRCGVPDVAQFVLTEGNPRWEQTHLTYRIENYTPDLPRADVDHAIEKAFQLWSNVTPLTFTKVSEGQADIMISFVRGDHRDNSPFDGPGGNLAHAFQPQPGIGGDAHFDEDERWTNNFREYNLHRVAAHELGHSLGLSHSTDIGALMYPSYTFSGDVQLAQDDIDGIQAIYGRSQNPVQPIGPQTPKACDSKLTFDAITTIRGEVMFFKDRFYMRTNPFYPEVELNFISVFWPQLPNGLEAAYEFADRDEVRFFKGNKYWAVQGQNVLHGYPKDIYSSFGFPRTVKHIDAALSEENTGKTYFFVANKYWRYDEYKRSMDPGYPKMIAHDFPGIGHKVDAVFMKDGFFYFFHGTRQYKFDPKTKRILTLQKANSWFNCRKN

SEQ ID NO: 2270 - protein, 450 aa, Artificial Sequence
  MMP-1 variant G169T
FPATLETQEQDVDLVQKYLEKYYNLKNDGRQVEKRRNSGPVVEKLKQMQEFFGLKVTGKPDAETLKVMKQPRCGVPDVAQFVLTEGNPRWEQTHLTYRIENYTPDLPRADVDHAIEKAFQLWSNVTPLTFTKVSEGQADIMISFVRGDHRDNSPFDGPGGNLAHAFQPTPGIGGDAHFDEDERWTNNFREYNLHRVAAHELGHSLGLSHSTDIGALMYPSYTFSGDVQLAQDDIDGIQAIYGRSQNPVQPIGPQTPKACDSKLTFDAITTIRGEVMFFKDRFYMRTNPFYPEVELNFISVFWPQLPNGLEAAYEFADRDEVRFFKGNKYWAVQGQNVLHGYPKDIYSSFGFPRTVKHIDAALSEENTGKTYFFVANKYWRYDEYKRSMDPGYPKMIAHDFPGIGHKVDAVFMKDGFFYFFHGTRQYKFDPKTKRILTLQKANSWFNCRKN

SEQ ID NO: 2271 - protein, 450 aa, Artificial Sequence
  MMP-1 variant G169Y
FPATLETQEQDVDLVQKYLEKYYNLKNDGRQVEKRRNSGPVVEKLKQMQEFFGLKVTGKPDAETLKVMKQPRCGVPDVAQFVLTEGNPRWEQTHLTYRIENYTPDLPRADVDHAIEKAFQLWSNVTPLTFTKVSEGQADIMISFVRGDHRDNSPFDGPGGNLAHAFQPYPGIGGDAHFDEDERWTNNFREYNLHRVAAHELGHSLGLSHSTDIGALMYPSYTFSGDVQLAQDDIDGIQAIYGRSQNPVQPIGPQTPKACDSKLTFDAITTIRGEVMFFKDRFYMRTNPFYPEVELNFISVFWPQLPNGLEAAYEFADRDEVRFFKGNKYWAVQGQNVLHGYPKDIYSSFGFPRTVKHIDAALSEENTGKTYFFVANKYWRYDEYKRSMDPGYPKMIAHDFPGIGHKVDAVFMKDGFFYFFHGTRQYKFDPKTKRILTLQKANSWFNCRKN

SEQ ID NO: 2272 - protein, 450 aa, Artificial Sequence
  MMP-1 variant G169S
FPATLETQEQDVDLVQKYLEKYYNLKNDGRQVEKRRNSGPVVEKLKQMQEFFGLKVTGKPDAETLKVMKQPRCGVPDVAQFVLTEGNPRWEQTHLTYRIENYTPDLPRADVDHAIEKAFQLWSNVTPLTFTKVSEGQADIMISFVRGDHRDNSPFDGPGGNLAHAFQPSPGIGGDAHFDEDERWTNNFREYNLHRVAAHELGHSLGLSHSTDIGALMYPSYTFSGDVQLAQDDIDGIQAIYGRSQNPVQPIGPQTPKACDSKLTFDAITTIRGEVMFFKDRFYMRTNPFYPEVELNFISVFWPQLPNGLEAAYEFADRDEVRFFKGNKYWAVQGQNVLHGYPKDIYSSFGFPRTVKHIDAALSEENTGKTYFFVANKYWRYDEYKRSMDPGYPKMIAHDFPGIGHKVDAVFMKDGFFYFFHGTRQYKFDPKTKRILTLQKANSWFNCRKN

SEQ ID NO: 2273 - protein, 450 aa, Artificial Sequence
  MMP-1 variant G169F
FPATLETQEQDVDLVQKYLEKYYNLKNDGRQVEKRRNSGPVVEKLKQMQEFFGLKVTGKPDAETLKVMKQPRCGVPDVAQFVLTEGNPRWEQTHLTYRIENYTPDLPRADVDHAIEKAFQLWSNVTPLTFTKVSEGQADIMISFVRGDHRDNSPFDGPGGNLAHAFQPFPGIGGDAHFDEDERWTNNFREYNLHRVAAHELGHSLGLSHSTDIGALMYPSYTFSGDVQLAQDDIDGIQAIYGRSQNPVQPIGPQTPKACDSKLTFDAITTIRGEVMFFKDRFYMRTNPFYPEVELNFISVFWPQLPNGLEAAYEFADRDEVRFFKGNKYWAVQGQNVLHGYPKDIYSSFGFPRTVKHIDAALSEENTGKTYFFVANKYWRYDEYKRSMDPGYPKMIAHDFPGIGHKVDAVFMKDGFFYFFHGTRQYKFDPKTKRILTLQKANSWFNCRKN

SEQ ID NO: 2274 - protein, 450 aa, Artificial Sequence
  MMP-1 variant G169M
FPATLETQEQDVDLVQKYLEKYYNLKNDGRQVEKRRNSGPVVEKLKQMQEFFGLKVTGKPDAETLKVMKQPRCGVPDVAQFVLTEGNPRWEQTHLTYRIENYTPDLPRADVDHAIEKAFQLWSNVTPLTFTKVSEGQADIMISFVRGDHRDNSPFDGPGGNLAHAFQPMPGIGGDAHFDEDERWTNNFREYNLHRVAAHELGHSLGLSHSTDIGALMYPSYTFSGDVQLAQDDIDGIQAIYGRSQNPVQPIGPQTPKACDSKLTFDAITTIRGEVMFFKDRFYMRTNPFYPEVELNFISVFWPQLPNGLEAAYEFADRDEVRFFKGNKYWAVQGQNVLHGYPKDIYSSFGFPRTVKHIDAALSEENTGKTYFFVANKYWRYDEYKRSMDPGYPKMIAHDFPGIGHKVDAVFMKDGFFYFFHGTRQYKFDPKTKRILTLQKANSWFNCRKN

SEQ ID NO: 2275 - protein, 450 aa, Artificial Sequence
  MMP-1 variant G169W
FPATLETQEQDVDLVQKYLEKYYNLKNDGRQVEKRRNSGPVVEKLKQMQEFFGLKVTGKPDAETLKVMKQPRCGVPDVAQFVLTEGNPRWEQTHLTYRIENYTPDLPRADVDHAIEKAFQLWSNVTPLTFTKVSEGQADIMISFVRGDHRDNSPFDGPGGNLAHAFQPWPGIGGDAHFDEDERWTNNFREYNLHRVAAHELGHSLGLSHSTDIGALMYPSYTFSGDVQLAQDDIDGIQAIYGRSQNPVQPIGPQTPKACDSKLTFDAITTIRGEVMFFKDRFYMRTNPFYPEVELNFISVFWPQLPNGLEAAYEFADRDEVRFFKGNKYWAVQGQNVLHGYPKDIYSSFGFPRTVKHIDAALSEENTGKTYFFVANKYWRYDEYKRSMDPGYPKMIAHDFPGIGHKVDAVFMKDGFFYFFHGTRQYKFDPKTKRILTLQKANSWFNCRKN

SEQ ID NO: 2276 - protein, 450 aa, Artificial Sequence
  MMP-1 variant G169I
FPATLETQEQDVDLVQKYLEKYYNLKNDGRQVEKRRNSGPVVEKLKQMQEFFGLKVTGKPDAETLKVMKQPRCGVPDVAQFVLTEGNPRWEQTHLTYRIENYTPDLPRADVDHAIEKAFQLWSNVTPLTFTKVSEGQADIMISFVRGDHRDNSPFDGPGGNLAHAFQPIPGIGGDAHFDEDERWTNNFREYNLHRVAAHELGHSLGLSHSTDIGALMYPSYTFSGDVQLAQDDIDGIQAIYGRSQNPVQPIGPQTPKACDSKLTFDAITTIRGEVMFFKDRFYMRTNPFYPEVELNFISVFWPQLPNGLEAAYEFADRDEVRFFKGNKYWAVQGQNVLHGYPKDIYSSFGFPRTVKHIDAALSEENTGKTYFFVANKYWRYDEYKRSMDPGYPKMIAHDFPGIGHKVDAVFMKDGFFYFFHGTRQYKFDPKTKRILTLQKANSWFNCRKN

SEQ ID NO: 2277 - protein, 450 aa, Artificial Sequence
  MMP-1 variant G169V
FPATLETQEQDVDLVQKYLEKYYNLKNDGRQVEKRRNSGPVVEKLKQMQEFFGLKVTGKPDAETLKVMKQPRCGVPDVAQFVLTEGNPRWEQTHLTYRIENYTPDLPRADVDHAIEKAFQLWSNVTPLTFTKVSEGQADIMISFVRGDHRDNSPFDGPGGNLAHAFQPVPGIGGDAHFDEDERWTNNFREYNLHRVAAHELGHSLGLSHSTDIGALMYPSYTFSGDVQLAQDDIDGIQAIYGRSQNPVQPIGPQTPKACDSKLTFDAITTIRGEVMFFKDRFYMRTNPFYPEVELNFISVFWPQLPNGLEAAYEFADRDEVRFFKGNKYWAVQGQNVLHGYPKDIYSSFGFPRTVKHIDAALSEENTGKTYFFVANKYWRYDEYKRSMDPGYPKMIAHDFPGIGHKVDAVFMKDGFFYFFHGTRQYKFDPKTKRILTLQKANSWFNCRKN

SEQ ID NO: 2278 - protein, 450 aa, Artificial Sequence
  MMP-1 variant G169L
FPATLETQEQDVDLVQKYLEKYYNLKNDGRQVEKRRNSGPVVEKLKQMQEFFGLKVTGKPDAETLKVMKQPRCGVPDVAQFVLTEGNPRWEQTHLTYRIENYTPDLPRADVDHAIEKAFQLWSNVTPLTFTKVSEGQADIMISFVRGDHRDNSPFDGPGGNLAHAFQPLPGIGGDAHFDEDERWTNNFREYNLHRVAAHELGHSLGLSHSTDIGALMYPSYTFSGDVQLAQDDIDGIQAIYGRSQNPVQPIGPQTPKACDSKLTFDAITTIRGEVMFFKDRFYMRTNPFYPEVELNFISVFWPQLPNGLEAAYEFADRDEVRFFKGNKYWAVQGQNVLHGYPKDIYSSFGFPRTVKHIDAALSEENTGKTYFFVANKYWRYDEYKRSMDPGYPKMIAHDFPGIGHKVDAVFMKDGFFYFFHGTRQYKFDPKTKRILTLQKANSWFNCRKN

SEQ ID NO: 2279 - protein, 450 aa, Artificial Sequence
  MMP-1 variant G169A
FPATLETQEQDVDLVQKYLEKYYNLKNDGRQVEKRRNSGPVVEKLKQMQEFFGLKVTGKPDAETLKVMKQPRCGVPDVAQFVLTEGNPRWEQTHLTYRIENYTPDLPRADVDHAIEKAFQLWSNVTPLTFTKVSEGQADIMISFVRGDHRDNSPFDGPGGNLAHAFQPAPGIGGDAHFDEDERWTNNFREYNLHRVAAHELGHSLGLSHSTDIGALMYPSYTFSGDVQLAQDDIDGIQAIYGRSQNPVQPIGPQTPKACDSKLTFDAITTIRGEVMFFKDRFYMRTNPFYPEVELNFISVFWPQLPNGLEAAYEFADRDEVRFFKGNKYWAVQGQNVLHGYPKDIYSSFGFPRTVKHIDAALSEENTGKTYFFVANKYWRYDEYKRSMDPGYPKMIAHDFPGIGHKVDAVFMKDGFFYFFHGTRQYKFDPKTKRILTLQKANSWFNCRKN

SEQ ID NO: 2280 - protein, 450 aa, Artificial Sequence
  MMP-1 variant G169P
FPATLETQEQDVDLVQKYLEKYYNLKNDGRQVEKRRNSGPVVEKLKQMQEFFGLKVTGKPDAETLKVMKQPRCGVPDVAQFVLTEGNPRWEQTHLTYRIENYTPDLPRADVDHAIEKAFQLWSNVTPLTFTKVSEGQADIMISFVRGDHRDNSPFDGPGGNLAHAFQPPPGIGGDAHFDEDERWTNNFREYNLHRVAAHELGHSLGLSHSTDIGALMYPSYTFSGDVQLAQDDIDGIQAIYGRSQNPVQPIGPQTPKACDSKLTFDAITTIRGEVMFFKDRFYMRTNPFYPEVELNFISVFWPQLPNGLEAAYEFADRDEVRFFKGNKYWAVQGQNVLHGYPKDIYSSFGFPRTVKHIDAALSEENTGKTYFFVANKYWRYDEYKRSMDPGYPKMIAHDFPGIGHKVDAVFMKDGFFYFFHGTRQYKFDPKTKRILTLQKANSWFNCRKN

SEQ ID NO: 2281 - protein, 450 aa, Artificial Sequence
  MMP-1 variant P170D
FPATLETQEQDVDLVQKYLEKYYNLKNDGRQVEKRRNSGPVVEKLKQMQEFFGLKVTGKPDAETLKVMKQPRCGVPDVAQFVLTEGNPRWEQTHLTYRIENYTPDLPRADVDHAIEKAFQLWSNVTPLTFTKVSEGQADIMISFVRGDHRDNSPFDGPGGNLAHAFQPGDGIGGDAHFDEDERWTNNFREYNLHRVAAHELGHSLGLSHSTDIGALMYPSYTFSGDVQLAQDDIDGIQAIYGRSQNPVQPIGPQTPKACDSKLTFDAITTIRGEVMFFKDRFYMRTNPFYPEVELNFISVFWPQLPNGLEAAYEFADRDEVRFFKGNKYWAVQGQNVLHGYPKDIYSSFGFPRTVKHIDAALSEENTGKTYFFVANKYWRYDEYKRSMDPGYPKMIAHDFPGIGHKVDAVFMKDGFFYFFHGTRQYKFDPKTKRILTLQKANSWFNCRKN

SEQ ID NO: 2282 - protein, 450 aa, Artificial Sequence
  MMP-1 variant P170E
FPATLETQEQDVDLVQKYLEKYYNLKNDGRQVEKRRNSGPVVEKLKQMQEFFGLKVTGKPDAETLKVMKQPRCGVPDVAQFVLTEGNPRWEQTHLTYRIENYTPDLPRADVDHAIEKAFQLWSNVTPLTFTKVSEGQADIMISFVRGDHRDNSPFDGPGGNLAHAFQPGEGIGGDAHFDEDERWTNNFREYNLHRVAAHELGHSLGLSHSTDIGALMYPSYTFSGDVQLAQDDIDGIQAIYGRSQNPVQPIGPQTPKACDSKLTFDAITTIRGEVMFFKDRFYMRTNPFYPEVELNFISVFWPQLPNGLEAAYEFADRDEVRFFKGNKYWAVQGQNVLHGYPKDIYSSFGFPRTVKHIDAALSEENTGKTYFFVANKYWRYDEYKRSMDPGYPKMIAHDFPGIGHKVDAVFMKDGFFYFFHGTRQYKFDPKTKRILTLQKANSWFNCRKN

SEQ ID NO: 2283 - protein, 450 aa, Artificial Sequence
  MMP-1 variant P170H
FPATLETQEQDVDLVQKYLEKYYNLKNDGRQVEKRRNSGPVVEKLKQMQEFFGLKVTGKPDAETLKVMKQPRCGVPDVAQFVLTEGNPRWEQTHLTYRIENYTPDLPRADVDHAIEKAFQLWSNVTPLTFTKVSEGQADIMISFVRGDHRDNSPFDGPGGNLAHAFQPGHGIGGDAHFDEDERWTNNFREYNLHRVAAHELGHSLGLSHSTDIGALMYPSYTFSGDVQLAQDDIDGIQAIYGRSQNPVQPIGPQTPKACDSKLTFDAITTIRGEVMFFKDRFYMRTNPFYPEVELNFISVFWPQLPNGLEAAYEFADRDEVRFFKGNKYWAVQGQNVLHGYPKDIYSSFGFPRTVKHIDAALSEENTGKTYFFVANKYWRYDEYKRSMDPGYPKMIAHDFPGIGHKVDAVFMKDGFFYFFHGTRQYKFDPKTKRILTLQKANSWFNCRKN

SEQ ID NO: 2284 - protein, 450 aa, Artificial Sequence
  MMP-1 variant P170K
FPATLETQEQDVDLVQKYLEKYYNLKNDGRQVEKRRNSGPVVEKLKQMQEFFGLKVTGKPDAETLKVMKQPRCGVPDVAQFVLTEGNPRWEQTHLTYRIENYTPDLPRADVDHAIEKAFQLWSNVTPLTFTKVSEGQADIMISFVRGDHRDNSPFDGPGGNLAHAFQPGKGIGGDAHFDEDERWTNNFREYNLHRVAAHELGHSLGLSHSTDIGALMYPSYTFSGDVQLAQDDIDGIQAIYGRSQNPVQPIGPQTPKACDSKLTFDAITTIRGEVMFFKDRFYMRTNPFYPEVELNFISVFWPQLPNGLEAAYEFADRDEVRFFKGNKYWAVQGQNVLHGYPKDIYSSFGFPRTVKHIDAALSEENTGKTYFFVANKYWRYDEYKRSMDPGYPKMIAHDFPGIGHKVDAVFMKDGFFYFFHGTRQYKFDPKTKRILTLQKANSWFNCRKN

SEQ ID NO: 2285 - protein, 450 aa, Artificial Sequence
  MMP-1 variant P170R
FPATLETQEQDVDLVQKYLEKYYNLKNDGRQVEKRRNSGPVVEKLKQMQEFFGLKVTGKPDAETLKVMKQPRCGVPDVAQFVLTEGNPRWEQTHLTYRIENYTPDLPRADVDHAIEKAFQLWSNVTPLTFTKVSEGQADIMISFVRGDHRDNSPFDGPGGNLAHAFQPGRGIGGDAHFDEDERWTNNFREYNLHRVAAHELGHSLGLSHSTDIGALMYPSYTFSGDVQLAQDDIDGIQAIYGRSQNPVQPIGPQTPKACDSKLTFDAITTIRGEVMFFKDRFYMRTNPFYPEVELNFISVFWPQLPNGLEAAYEFADRDEVRFFKGNKYWAVQGQNVLHGYPKDIYSSFGFPRTVKHIDAALSEENTGKTYFFVANKYWRYDEYKRSMDPGYPKMIAHDFPGIGHKVDAVFMKDGFFYFFHGTRQYKFDPKTKRILTLQKANSWFNCRKN

SEQ ID NO: 2286 - protein, 450 aa, Artificial Sequence
  MMP-1 variant P170C
FPATLETQEQDVDLVQKYLEKYYNLKNDGRQVEKRRNSGPVVEKLKQMQEFFGLKVTGKPDAETLKVMKQPRCGVPDVAQFVLTEGNPRWEQTHLTYRIENYTPDLPRADVDHAIEKAFQLWSNVTPLTFTKVSEGQADIMISFVRGDHRDNSPFDGPGGNLAHAFQPGCGIGGDAHFDEDERWTNNFREYNLHRVAAHELGHSLGLSHSTDIGALMYPSYTFSGDVQLAQDDIDGIQAIYGRSQNPVQPIGPQTPKACDSKLTFDAITTIRGEVMFFKDRFYMRTNPFYPEVELNFISVFWPQLPNGLEAAYEFADRDEVRFFKGNKYWAVQGQNVLHGYPKDIYSSFGFPRTVKHIDAALSEENTGKTYFFVANKYWRYDEYKRSMDPGYPKMIAHDFPGIGHKVDAVFMKDGFFYFFHGTRQYKFDPKTKRILTLQKANSWFNCRKN

SEQ ID NO: 2287 - protein, 450 aa, Artificial Sequence
  MMP-1 variant P170N
FPATLETQEQDVDLVQKYLEKYYNLKNDGRQVEKRRNSGPVVEKLKQMQEFFGLKVTGKPDAETLKVMKQPRCGVPDVAQFVLTEGNPRWEQTHLTYRIENYTPDLPRADVDHAIEKAFQLWSNVTPLTFTKVSEGQADIMISFVRGDHRDNSPFDGPGGNLAHAFQPGNGIGGDAHFDEDERWTNNFREYNLHRVAAHELGHSLGLSHSTDIGALMYPSYTFSGDVQLAQDDIDGIQAIYGRSQNPVQPIGPQTPKACDSKLTFDAITTIRGEVMFFKDRFYMRTNPFYPEVELNFISVFWPQLPNGLEAAYEFADRDEVRFFKGNKYWAVQGQNVLHGYPKDIYSSFGFPRTVKHIDAALSEENTGKTYFFVANKYWRYDEYKRSMDPGYPKMIAHDFPGIGHKVDAVFMKDGFFYFFHGTRQYKFDPKTKRILTLQKANSWFNCRKN

SEQ ID NO: 2288 - protein, 450 aa, Artificial Sequence
  MMP-1 variant P170Q
FPATLETQEQDVDLVQKYLEKYYNLKNDGRQVEKRRNSGPVVEKLKQMQEFFGLKVTGKPDAETLKVMKQPRCGVPDVAQFVLTEGNPRWEQTHLTYRIENYTPDLPRADVDHAIEKAFQLWSNVTPLTFTKVSEGQADIMISFVRGDHRDNSPFDGPGGNLAHAFQPGQGIGGDAHFDEDERWTNNFREYNLHRVAAHELGHSLGLSHSTDIGALMYPSYTFSGDVQLAQDDIDGIQAIYGRSQNPVQPIGPQTPKACDSKLTFDAITTIRGEVMFFKDRFYMRTNPFYPEVELNFISVFWPQLPNGLEAAYEFADRDEVRFFKGNKYWAVQGQNVLHGYPKDIYSSFGFPRTVKHIDAALSEENTGKTYFFVANKYWRYDEYKRSMDPGYPKMIAHDFPGIGHKVDAVFMKDGFFYFFHGTRQYKFDPKTKRILTLQKANSWFNCRKN

SEQ ID NO: 2289 - protein, 450 aa, Artificial Sequence
  MMP-1 variant P170T
FPATLETQEQDVDLVQKYLEKYYNLKNDGRQVEKRRNSGPVVEKLKQMQEFFGLKVTGKPDAETLKVMKQPRCGVPDVAQFVLTEGNPRWEQTHLTYRIENYTPDLPRADVDHAIEKAFQLWSNVTPLTFTKVSEGQADIMISFVRGDHRDNSPFDGPGGNLAHAFQPGTGIGGDAHFDEDERWTNNFREYNLHRVAAHELGHSLGLSHSTDIGALMYPSYTFSGDVQLAQDDIDGIQAIYGRSQNPVQPIGPQTPKACDSKLTFDAITTIRGEVMFFKDRFYMRTNPFYPEVELNFISVFWPQLPNGLEAAYEFADRDEVRFFKGNKYWAVQGQNVLHGYPKDIYSSFGFPRTVKHIDAALSEENTGKTYFFVANKYWRYDEYKRSMDPGYPKMIAHDFPGIGHKVDAVFMKDGFFYFFHGTRQYKFDPKTKRILTLQKANSWFNCRKN

SEQ ID NO: 2290 - protein, 450 aa, Artificial Sequence
  MMP-1 variant P170Y
FPATLETQEQDVDLVQKYLEKYYNLKNDGRQVEKRRNSGPVVEKLKQMQEFFGLKVTGKPDAETLKVMKQPRCGVPDVAQFVLTEGNPRWEQTHLTYRIENYTPDLPRADVDHAIEKAFQLWSNVTPLTFTKVSEGQADIMISFVRGDHRDNSPFDGPGGNLAHAFQPGYGIGGDAHFDEDERWTNNFREYNLHRVAAHELGHSLGLSHSTDIGALMYPSYTFSGDVQLAQDDIDGIQAIYGRSQNPVQPIGPQTPKACDSKLTFDAITTIRGEVMFFKDRFYMRTNPFYPEVELNFISVFWPQLPNGLEAAYEFADRDEVRFFKGNKYWAVQGQNVLHGYPKDIYSSFGFPRTVKHIDAALSEENTGKTYFFVANKYWRYDEYKRSMDPGYPKMIAHDFPGIGHKVDAVFMKDGFFYFFHGTRQYKFDPKTKRILTLQKANSWFNCRKN

SEQ ID NO: 2291 - protein, 450 aa, Artificial Sequence
  MMP-1 variant P170S
FPATLETQEQDVDLVQKYLEKYYNLKNDGRQVEKRRNSGPVVEKLKQMQEFFGLKVTGKPDAETLKVMKQPRCGVPDVAQFVLTEGNPRWEQTHLTYRIENYTPDLPRADVDHAIEKAFQLWSNVTPLTFTKVSEGQADIMISFVRGDHRDNSPFDGPGGNLAHAFQPGSGIGGDAHFDEDERWTNNFREYNLHRVAAHELGHSLGLSHSTDIGALMYPSYTFSGDVQLAQDDIDGIQAIYGRSQNPVQPIGPQTPKACDSKLTFDAITTIRGEVMFFKDRFYMRTNPFYPEVELNFISVFWPQLPNGLEAAYEFADRDEVRFFKGNKYWAVQGQNVLHGYPKDIYSSFGFPRTVKHIDAALSEENTGKTYFFVANKYWRYDEYKRSMDPGYPKMIAHDFPGIGHKVDAVFMKDGFFYFFHGTRQYKFDPKTKRILTLQKANSWFNCRKN

SEQ ID NO: 2292 - protein, 450 aa, Artificial Sequence
  MMP-1 variant P170G
FPATLETQEQDVDLVQKYLEKYYNLKNDGRQVEKRRNSGPVVEKLKQMQEFFGLKVTGKPDAETLKVMKQPRCGVPDVAQFVLTEGNPRWEQTHLTYRIENYTPDLPRADVDHAIEKAFQLWSNVTPLTFTKVSEGQADIMISFVRGDHRDNSPFDGPGGNLAHAFQPGGGIGGDAHFDEDERWTNNFREYNLHRVAAHELGHSLGLSHSTDIGALMYPSYTFSGDVQLAQDDIDGIQAIYGRSQNPVQPIGPQTPKACDSKLTFDAITTIRGEVMFFKDRFYMRTNPFYPEVELNFISVFWPQLPNGLEAAYEFADRDEVRFFKGNKYWAVQGQNVLHGYPKDIYSSFGFPRTVKHIDAALSEENTGKTYFFVANKYWRYDEYKRSMDPGYPKMIAHDFPGIGHKVDAVFMKDGFFYFFHGTRQYKFDPKTKRILTLQKANSWFNCRKN

SEQ ID NO: 2293 - protein, 450 aa, Artificial Sequence
  MMP-1 variant P170F
FPATLETQEQDVDLVQKYLEKYYNLKNDGRQVEKRRNSGPVVEKLKQMQEFFGLKVTGKPDAETLKVMKQPRCGVPDVAQFVLTEGNPRWEQTHLTYRIENYTPDLPRADVDHAIEKAFQLWSNVTPLTFTKVSEGQADIMISFVRGDHRDNSPFDGPGGNLAHAFQPGFGIGGDAHFDEDERWTNNFREYNLHRVAAHELGHSLGLSHSTDIGALMYPSYTFSGDVQLAQDDIDGIQAIYGRSQNPVQPIGPQTPKACDSKLTFDAITTIRGEVMFFKDRFYMRTNPFYPEVELNFISVFWPQLPNGLEAAYEFADRDEVRFFKGNKYWAVQGQNVLHGYPKDIYSSFGFPRTVKHIDAALSEENTGKTYFFVANKYWRYDEYKRSMDPGYPKMIAHDFPGIGHKVDAVFMKDGFFYFFHGTRQYKFDPKTKRILTLQKANSWFNCRKN

SEQ ID NO: 2294 - protein, 450 aa, Artificial Sequence
  MMP-1 variant P170M
FPATLETQEQDVDLVQKYLEKYYNLKNDGRQVEKRRNSGPVVEKLKQMQEFFGLKVTGKPDAETLKVMKQPRCGVPDVAQFVLTEGNPRWEQTHLTYRIENYTPDLPRADVDHAIEKAFQLWSNVTPLTFTKVSEGQADIMISFVRGDHRDNSPFDGPGGNLAHAFQPGMGIGGDAHFDEDERWTNNFREYNLHRVAAHELGHSLGLSHSTDIGALMYPSYTFSGDVQLAQDDIDGIQAIYGRSQNPVQPIGPQTPKACDSKLTFDAITTIRGEVMFFKDRFYMRTNPFYPEVELNFISVFWPQLPNGLEAAYEFADRDEVRFFKGNKYWAVQGQNVLHGYPKDIYSSFGFPRTVKHIDAALSEENTGKTYFFVANKYWRYDEYKRSMDPGYPKMIAHDFPGIGHKVDAVFMKDGFFYFFHGTRQYKFDPKTKRILTLQKANSWFNCRKN

SEQ ID NO: 2295 - protein, 450 aa, Artificial Sequence
  MMP-1 variant P170W
FPATLETQEQDVDLVQKYLEKYYNLKNDGRQVEKRRNSGPVVEKLKQMQEFFGLKVTGKPDAETLKVMKQPRCGVPDVAQFVLTEGNPRWEQTHLTYRIENYTPDLPRADVDHAIEKAFQLWSNVTPLTFTKVSEGQADIMISFVRGDHRDNSPFDGPGGNLAHAFQPGWGIGGDAHFDEDERWTNNFREYNLHRVAAHELGHSLGLSHSTDIGALMYPSYTFSGDVQLAQDDIDGIQAIYGRSQNPVQPIGPQTPKACDSKLTFDAITTIRGEVMFFKDRFYMRTNPFYPEVELNFISVFWPQLPNGLEAAYEFADRDEVRFFKGNKYWAVQGQNVLHGYPKDIYSSFGFPRTVKHIDAALSEENTGKTYFFVANKYWRYDEYKRSMDPGYPKMIAHDFPGIGHKVDAVFMKDGFFYFFHGTRQYKFDPKTKRILTLQKANSWFNCRKN

SEQ ID NO: 2296 - protein, 450 aa, Artificial Sequence
  MMP-1 variant P170I
FPATLETQEQDVDLVQKYLEKYYNLKNDGRQVEKRRNSGPVVEKLKQMQEFFGLKVTGKPDAETLKVMKQPRCGVPDVAQFVLTEGNPRWEQTHLTYRIENYTPDLPRADVDHAIEKAFQLWSNVTPLTFTKVSEGQADIMISFVRGDHRDNSPFDGPGGNLAHAFQPGIGIGGDAHFDEDERWTNNFREYNLHRVAAHELGHSLGLSHSTDIGALMYPSYTFSGDVQLAQDDIDGIQAIYGRSQNPVQPIGPQTPKACDSKLTFDAITTIRGEVMFFKDRFYMRTNPFYPEVELNFISVFWPQLPNGLEAAYEFADRDEVRFFKGNKYWAVQGQNVLHGYPKDIYSSFGFPRTVKHIDAALSEENTGKTYFFVANKYWRYDEYKRSMDPGYPKMIAHDFPGIGHKVDAVFMKDGFFYFFHGTRQYKFDPKTKRILTLQKANSWFNCRKN

SEQ ID NO: 2297 - protein, 450 aa, Artificial Sequence
  MMP-1 variant P170V
FPATLETQEQDVDLVQKYLEKYYNLKNDGRQVEKRRNSGPVVEKLKQMQEFFGLKVTGKPDAETLKVMKQPRCGVPDVAQFVLTEGNPRWEQTHLTYRIENYTPDLPRADVDHAIEKAFQLWSNVTPLTFTKVSEGQADIMISFVRGDHRDNSPFDGPGGNLAHAFQPGVGIGGDAHFDEDERWTNNFREYNLHRVAAHELGHSLGLSHSTDIGALMYPSYTFSGDVQLAQDDIDGIQAIYGRSQNPVQPIGPQTPKACDSKLTFDAITTIRGEVMFFKDRFYMRTNPFYPEVELNFISVFWPQLPNGLEAAYEFADRDEVRFFKGNKYWAVQGQNVLHGYPKDIYSSFGFPRTVKHIDAALSEENTGKTYFFVANKYWRYDEYKRSMDPGYPKMIAHDFPGIGHKVDAVFMKDGFFYFFHGTRQYKFDPKTKRILTLQKANSWFNCRKN

SEQ ID NO: 2298 - protein, 450 aa, Artificial Sequence
  MMP-1 variant P170L
FPATLETQEQDVDLVQKYLEKYYNLKNDGRQVEKRRNSGPVVEKLKQMQEFFGLKVTGKPDAETLKVMKQPRCGVPDVAQFVLTEGNPRWEQTHLTYRIENYTPDLPRADVDHAIEKAFQLWSNVTPLTFTKVSEGQADIMISFVRGDHRDNSPFDGPGGNLAHAFQPGLGIGGDAHFDEDERWTNNFREYNLHRVAAHELGHSLGLSHSTDIGALMYPSYTFSGDVQLAQDDIDGIQAIYGRSQNPVQPIGPQTPKACDSKLTFDAITTIRGEVMFFKDRFYMRTNPFYPEVELNFISVFWPQLPNGLEAAYEFADRDEVRFFKGNKYWAVQGQNVLHGYPKDIYSSFGFPRTVKHIDAALSEENTGKTYFFVANKYWRYDEYKRSMDPGYPKMIAHDFPGIGHKVDAVFMKDGFFYFFHGTRQYKFDPKTKRILTLQKANSWFNCRKN

SEQ ID NO: 2299 - protein, 450 aa, Artificial Sequence
  MMP-1 variant P170A
FPATLETQEQDVDLVQKYLEKYYNLKNDGRQVEKRRNSGPVVEKLKQMQEFFGLKVTGKPDAETLKVMKQPRCGVPDVAQFVLTEGNPRWEQTHLTYRIENYTPDLPRADVDHAIEKAFQLWSNVTPLTFTKVSEGQADIMISFVRGDHRDNSPFDGPGGNLAHAFQPGAGIGGDAHFDEDERWTNNFREYNLHRVAAHELGHSLGLSHSTDIGALMYPSYTFSGDVQLAQDDIDGIQAIYGRSQNPVQPIGPQTPKACDSKLTFDAITTIRGEVMFFKDRFYMRTNPFYPEVELNFISVFWPQLPNGLEAAYEFADRDEVRFFKGNKYWAVQGQNVLHGYPKDIYSSFGFPRTVKHIDAALSEENTGKTYFFVANKYWRYDEYKRSMDPGYPKMIAHDFPGIGHKVDAVFMKDGFFYFFHGTRQYKFDPKTKRILTLQKANSWFNCRKN

SEQ ID NO: 2300 - protein, 450 aa, Artificial Sequence
  MMP-1 variant I172D
FPATLETQEQDVDLVQKYLEKYYNLKNDGRQVEKRRNSGPVVEKLKQMQEFFGLKVTGKPDAETLKVMKQPRCGVPDVAQFVLTEGNPRWEQTHLTYRIENYTPDLPRADVDHAIEKAFQLWSNVTPLTFTKVSEGQADIMISFVRGDHRDNSPFDGPGGNLAHAFQPGPGDGGDAHFDEDERWTNNFREYNLHRVAAHELGHSLGLSHSTDIGALMYPSYTFSGDVQLAQDDIDGIQAIYGRSQNPVQPIGPQTPKACDSKLTFDAITTIRGEVMFFKDRFYMRTNPFYPEVELNFISVFWPQLPNGLEAAYEFADRDEVRFFKGNKYWAVQGQNVLHGYPKDIYSSFGFPRTVKHIDAALSEENTGKTYFFVANKYWRYDEYKRSMDPGYPKMIAHDFPGIGHKVDAVFMKDGFFYFFHGTRQYKFDPKTKRILTLQKANSWFNCRKN

SEQ ID NO: 2301 - protein, 450 aa, Artificial Sequence
  MMP-1 variant I172E
FPATLETQEQDVDLVQKYLEKYYNLKNDGRQVEKRRNSGPVVEKLKQMQEFFGLKVTGKPDAETLKVMKQPRCGVPDVAQFVLTEGNPRWEQTHLTYRIENYTPDLPRADVDHAIEKAFQLWSNVTPLTFTKVSEGQADIMISFVRGDHRDNSPFDGPGGNLAHAFQPGPGEGGDAHFDEDERWTNNFREYNLHRVAAHELGHSLGLSHSTDIGALMYPSYTFSGDVQLAQDDIDGIQAIYGRSQNPVQPIGPQTPKACDSKLTFDAITTIRGEVMFFKDRFYMRTNPFYPEVELNFISVFWPQLPNGLEAAYEFADRDEVRFFKGNKYWAVQGQNVLHGYPKDIYSSFGFPRTVKHIDAALSEENTGKTYFFVANKYWRYDEYKRSMDPGYPKMIAHDFPGIGHKVDAVFMKDGFFYFFHGTRQYKFDPKTKRILTLQKANSWFNCRKN

SEQ ID NO: 2302 - protein, 450 aa, Artificial Sequence
  MMP-1 variant I172H
FPATLETQEQDVDLVQKYLEKYYNLKNDGRQVEKRRNSGPVVEKLKQMQEFFGLKVTGKPDAETLKVMKQPRCGVPDVAQFVLTEGNPRWEQTHLTYRIENYTPDLPRADVDHAIEKAFQLWSNVTPLTFTKVSEGQADIMISFVRGDHRDNSPFDGPGGNLAHAFQPGPGHGGDAHFDEDERWTNNFREYNLHRVAAHELGHSLGLSHSTDIGALMYPSYTFSGDVQLAQDDIDGIQAIYGRSQNPVQPIGPQTPKACDSKLTFDAITTIRGEVMFFKDRFYMRTNPFYPEVELNFISVFWPQLPNGLEAAYEFADRDEVRFFKGNKYWAVQGQNVLHGYPKDIYSSFGFPRTVKHIDAALSEENTGKTYFFVANKYWRYDEYKRSMDPGYPKMIAHDFPGIGHKVDAVFMKDGFFYFFHGTRQYKFDPKTKRILTLQKANSWFNCRKN

SEQ ID NO: 2303 - protein, 450 aa, Artificial Sequence
  MMP-1 variant I172K
FPATLETQEQDVDLVQKYLEKYYNLKNDGRQVEKRRNSGPVVEKLKQMQEFFGLKVTGKPDAETLKVMKQPRCGVPDVAQFVLTEGNPRWEQTHLTYRIENYTPDLPRADVDHAIEKAFQLWSNVTPLTFTKVSEGQADIMISFVRGDHRDNSPFDGPGGNLAHAFQPGPGKGGDAHFDEDERWTNNFREYNLHRVAAHELGHSLGLSHSTDIGALMYPSYTFSGDVQLAQDDIDGIQAIYGRSQNPVQPIGPQTPKACDSKLTFDAITTIRGEVMFFKDRFYMRTNPFYPEVELNFISVFWPQLPNGLEAAYEFADRDEVRFFKGNKYWAVQGQNVLHGYPKDIYSSFGFPRTVKHIDAALSEENTGKTYFFVANKYWRYDEYKRSMDPGYPKMIAHDFPGIGHKVDAVFMKDGFFYFFHGTRQYKFDPKTKRILTLQKANSWFNCRKN

SEQ ID NO: 2304 - protein, 450 aa, Artificial Sequence
  MMP-1 variant I172R
FPATLETQEQDVDLVQKYLEKYYNLKNDGRQVEKRRNSGPVVEKLKQMQEFFGLKVTGKPDAETLKVMKQPRCGVPDVAQFVLTEGNPRWEQTHLTYRIENYTPDLPRADVDHAIEKAFQLWSNVTPLTFTKVSEGQADIMISFVRGDHRDNSPFDGPGGNLAHAFQPGPGRGGDAHFDEDERWTNNFREYNLHRVAAHELGHSLGLSHSTDIGALMYPSYTFSGDVQLAQDDIDGIQAIYGRSQNPVQPIGPQTPKACDSKLTFDAITTIRGEVMFFKDRFYMRTNPFYPEVELNFISVFWPQLPNGLEAAYEFADRDEVRFFKGNKYWAVQGQNVLHGYPKDIYSSFGFPRTVKHIDAALSEENTGKTYFFVANKYWRYDEYKRSMDPGYPKMIAHDFPGIGHKVDAVFMKDGFFYFFHGTRQYKFDPKTKRILTLQKANSWFNCRKN

SEQ ID NO: 2305 - protein, 450 aa, Artificial Sequence
  MMP-1 variant I172C
FPATLETQEQDVDLVQKYLEKYYNLKNDGRQVEKRRNSGPVVEKLKQMQEFFGLKVTGKPDAETLKVMKQPRCGVPDVAQFVLTEGNPRWEQTHLTYRIENYTPDLPRADVDHAIEKAFQLWSNVTPLTFTKVSEGQADIMISFVRGDHRDNSPFDGPGGNLAHAFQPGPGCGGDAHFDEDERWTNNFREYNLHRVAAHELGHSLGLSHSTDIGALMYPSYTFSGDVQLAQDDIDGIQAIYGRSQNPVQPIGPQTPKACDSKLTFDAITTIRGEVMFFKDRFYMRTNPFYPEVELNFISVFWPQLPNGLEAAYEFADRDEVRFFKGNKYWAVQGQNVLHGYPKDIYSSFGFPRTVKHIDAALSEENTGKTYFFVANKYWRYDEYKRSMDPGYPKMIAHDFPGIGHKVDAVFMKDGFFYFFHGTRQYKFDPKTKRILTLQKANSWFNCRKN

SEQ ID NO: 2306 - protein, 450 aa, Artificial Sequence
  MMP-1 variant I172N
FPATLETQEQDVDLVQKYLEKYYNLKNDGRQVEKRRNSGPVVEKLKQMQEFFGLKVTGKPDAETLKVMKQPRCGVPDVAQFVLTEGNPRWEQTHLTYRIENYTPDLPRADVDHAIEKAFQLWSNVTPLTFTKVSEGQADIMISFVRGDHRDNSPFDGPGGNLAHAFQPGPGNGGDAHFDEDERWTNNFREYNLHRVAAHELGHSLGLSHSTDIGALMYPSYTFSGDVQLAQDDIDGIQAIYGRSQNPVQPIGPQTPKACDSKLTFDAITTIRGEVMFFKDRFYMRTNPFYPEVELNFISVFWPQLPNGLEAAYEFADRDEVRFFKGNKYWAVQGQNVLHGYPKDIYSSFGFPRTVKHIDAALSEENTGKTYFFVANKYWRYDEYKRSMDPGYPKMIAHDFPGIGHKVDAVFMKDGFFYFFHGTRQYKFDPKTKRILTLQKANSWFNCRKN

SEQ ID NO: 2307 - protein, 450 aa, Artificial Sequence
  MMP-1 variant I172Q
FPATLETQEQDVDLVQKYLEKYYNLKNDGRQVEKRRNSGPVVEKLKQMQEFFGLKVTGKPDAETLKVMKQPRCGVPDVAQFVLTEGNPRWEQTHLTYRIENYTPDLPRADVDHAIEKAFQLWSNVTPLTFTKVSEGQADIMISFVRGDHRDNSPFDGPGGNLAHAFQPGPGQGGDAHFDEDERWTNNFREYNLHRVAAHELGHSLGLSHSTDIGALMYPSYTFSGDVQLAQDDIDGIQAIYGRSQNPVQPIGPQTPKACDSKLTFDAITTIRGEVMFFKDRFYMRTNPFYPEVELNFISVFWPQLPNGLEAAYEFADRDEVRFFKGNKYWAVQGQNVLHGYPKDIYSSFGFPRTVKHIDAALSEENTGKTYFFVANKYWRYDEYKRSMDPGYPKMIAHDFPGIGHKVDAVFMKDGFFYFFHGTRQYKFDPKTKRILTLQKANSWFNCRKN

SEQ ID NO: 2308 - protein, 450 aa, Artificial Sequence
  MMP-1 variant I172T
FPATLETQEQDVDLVQKYLEKYYNLKNDGRQVEKRRNSGPVVEKLKQMQEFFGLKVTGKPDAETLKVMKQPRCGVPDVAQFVLTEGNPRWEQTHLTYRIENYTPDLPRADVDHAIEKAFQLWSNVTPLTFTKVSEGQADIMISFVRGDHRDNSPFDGPGGNLAHAFQPGPGTGGDAHFDEDERWTNNFREYNLHRVAAHELGHSLGLSHSTDIGALMYPSYTFSGDVQLAQDDIDGIQAIYGRSQNPVQPIGPQTPKACDSKLTFDAITTIRGEVMFFKDRFYMRTNPFYPEVELNFISVFWPQLPNGLEAAYEFADRDEVRFFKGNKYWAVQGQNVLHGYPKDIYSSFGFPRTVKHIDAALSEENTGKTYFFVANKYWRYDEYKRSMDPGYPKMIAHDFPGIGHKVDAVFMKDGFFYFFHGTRQYKFDPKTKRILTLQKANSWFNCRKN

SEQ ID NO: 2309 - protein, 450 aa, Artificial Sequence
  MMP-1 variant I172Y
FPATLETQEQDVDLVQKYLEKYYNLKNDGRQVEKRRNSGPVVEKLKQMQEFFGLKVTGKPDAETLKVMKQPRCGVPDVAQFVLTEGNPRWEQTHLTYRIENYTPDLPRADVDHAIEKAFQLWSNVTPLTFTKVSEGQADIMISFVRGDHRDNSPFDGPGGNLAHAFQPGPGYGGDAHFDEDERWTNNFREYNLHRVAAHELGHSLGLSHSTDIGALMYPSYTFSGDVQLAQDDIDGIQAIYGRSQNPVQPIGPQTPKACDSKLTFDAITTIRGEVMFFKDRFYMRTNPFYPEVELNFISVFWPQLPNGLEAAYEFADRDEVRFFKGNKYWAVQGQNVLHGYPKDIYSSFGFPRTVKHIDAALSEENTGKTYFFVANKYWRYDEYKRSMDPGYPKMIAHDFPGIGHKVDAVFMKDGFFYFFHGTRQYKFDPKTKRILTLQKANSWFNCRKN

SEQ ID NO: 2310 - protein, 450 aa, Artificial Sequence
  MMP-1 variant I172S
FPATLETQEQDVDLVQKYLEKYYNLKNDGRQVEKRRNSGPVVEKLKQMQEFFGLKVTGKPDAETLKVMKQPRCGVPDVAQFVLTEGNPRWEQTHLTYRIENYTPDLPRADVDHAIEKAFQLWSNVTPLTFTKVSEGQADIMISFVRGDHRDNSPFDGPGGNLAHAFQPGPGSGGDAHFDEDERWTNNFREYNLHRVAAHELGHSLGLSHSTDIGALMYPSYTFSGDVQLAQDDIDGIQAIYGRSQNPVQPIGPQTPKACDSKLTFDAITTIRGEVMFFKDRFYMRTNPFYPEVELNFISVFWPQLPNGLEAAYEFADRDEVRFFKGNKYWAVQGQNVLHGYPKDIYSSFGFPRTVKHIDAALSEENTGKTYFFVANKYWRYDEYKRSMDPGYPKMIAHDFPGIGHKVDAVFMKDGFFYFFHGTRQYKFDPKTKRILTLQKANSWFNCRKN

SEQ ID NO: 2311 - protein, 450 aa, Artificial Sequence
  MMP-1 variant I172G
FPATLETQEQDVDLVQKYLEKYYNLKNDGRQVEKRRNSGPVVEKLKQMQEFFGLKVTGKPDAETLKVMKQPRCGVPDVAQFVLTEGNPRWEQTHLTYRIENYTPDLPRADVDHAIEKAFQLWSNVTPLTFTKVSEGQADIMISFVRGDHRDNSPFDGPGGNLAHAFQPGPGGGGDAHFDEDERWTNNFREYNLHRVAAHELGHSLGLSHSTDIGALMYPSYTFSGDVQLAQDDIDGIQAIYGRSQNPVQPIGPQTPKACDSKLTFDAITTIRGEVMFFKDRFYMRTNPFYPEVELNFISVFWPQLPNGLEAAYEFADRDEVRFFKGNKYWAVQGQNVLHGYPKDIYSSFGFPRTVKHIDAALSEENTGKTYFFVANKYWRYDEYKRSMDPGYPKMIAHDFPGIGHKVDAVFMKDGFFYFFHGTRQYKFDPKTKRILTLQKANSWFNCRKN

SEQ ID NO: 2312 - protein, 450 aa, Artificial Sequence
  MMP-1 variant I172F
FPATLETQEQDVDLVQKYLEKYYNLKNDGRQVEKRRNSGPVVEKLKQMQEFFGLKVTGKPDAETLKVMKQPRCGVPDVAQFVLTEGNPRWEQTHLTYRIENYTPDLPRADVDHAIEKAFQLWSNVTPLTFTKVSEGQADIMISFVRGDHRDNSPFDGPGGNLAHAFQPGPGFGGDAHFDEDERWTNNFREYNLHRVAAHELGHSLGLSHSTDIGALMYPSYTFSGDVQLAQDDIDGIQAIYGRSQNPVQPIGPQTPKACDSKLTFDAITTIRGEVMFFKDRFYMRTNPFYPEVELNFISVFWPQLPNGLEAAYEFADRDEVRFFKGNKYWAVQGQNVLHGYPKDIYSSFGFPRTVKHIDAALSEENTGKTYFFVANKYWRYDEYKRSMDPGYPKMIAHDFPGIGHKVDAVFMKDGFFYFFHGTRQYKFDPKTKRILTLQKANSWFNCRKN

SEQ ID NO: 2313 - protein, 450 aa, Artificial Sequence
  MMP-1 variant I172M
FPATLETQEQDVDLVQKYLEKYYNLKNDGRQVEKRRNSGPVVEKLKQMQEFFGLKVTGKPDAETLKVMKQPRCGVPDVAQFVLTEGNPRWEQTHLTYRIENYTPDLPRADVDHAIEKAFQLWSNVTPLTFTKVSEGQADIMISFVRGDHRDNSPFDGPGGNLAHAFQPGPGMGGDAHFDEDERWTNNFREYNLHRVAAHELGHSLGLSHSTDIGALMYPSYTFSGDVQLAQDDIDGIQAIYGRSQNPVQPIGPQTPKACDSKLTFDAITTIRGEVMFFKDRFYMRTNPFYPEVELNFISVFWPQLPNGLEAAYEFADRDEVRFFKGNKYWAVQGQNVLHGYPKDIYSSFGFPRTVKHIDAALSEENTGKTYFFVANKYWRYDEYKRSMDPGYPKMIAHDFPGIGHKVDAVFMKDGFFYFFHGTRQYKFDPKTKRILTLQKANSWFNCRKN

SEQ ID NO: 2314 - protein, 450 aa, Artificial Sequence
  MMP-1 variant I172W
FPATLETQEQDVDLVQKYLEKYYNLKNDGRQVEKRRNSGPVVEKLKQMQEFFGLKVTGKPDAETLKVMKQPRCGVPDVAQFVLTEGNPRWEQTHLTYRIENYTPDLPRADVDHAIEKAFQLWSNVTPLTFTKVSEGQADIMISFVRGDHRDNSPFDGPGGNLAHAFQPGPGWGGDAHFDEDERWTNNFREYNLHRVAAHELGHSLGLSHSTDIGALMYPSYTFSGDVQLAQDDIDGIQAIYGRSQNPVQPIGPQTPKACDSKLTFDAITTIRGEVMFFKDRFYMRTNPFYPEVELNFISVFWPQLPNGLEAAYEFADRDEVRFFKGNKYWAVQGQNVLHGYPKDIYSSFGFPRTVKHIDAALSEENTGKTYFFVANKYWRYDEYKRSMDPGYPKMIAHDFPGIGHKVDAVFMKDGFFYFFHGTRQYKFDPKTKRILTLQKANSWFNCRKN

SEQ ID NO: 2315 - protein, 450 aa, Artificial Sequence
  MMP-1 variant I172V
FPATLETQEQDVDLVQKYLEKYYNLKNDGRQVEKRRNSGPVVEKLKQMQEFFGLKVTGKPDAETLKVMKQPRCGVPDVAQFVLTEGNPRWEQTHLTYRIENYTPDLPRADVDHAIEKAFQLWSNVTPLTFTKVSEGQADIMISFVRGDHRDNSPFDGPGGNLAHAFQPGPGVGGDAHFDEDERWTNNFREYNLHRVAAHELGHSLGLSHSTDIGALMYPSYTFSGDVQLAQDDIDGIQAIYGRSQNPVQPIGPQTPKACDSKLTFDAITTIRGEVMFFKDRFYMRTNPFYPEVELNFISVFWPQLPNGLEAAYEFADRDEVRFFKGNKYWAVQGQNVLHGYPKDIYSSFGFPRTVKHIDAALSEENTGKTYFFVANKYWRYDEYKRSMDPGYPKMIAHDFPGIGHKVDAVFMKDGFFYFFHGTRQYKFDPKTKRILTLQKANSWFNCRKN

SEQ ID NO: 2316 - protein, 450 aa, Artificial Sequence
  MMP-1 variant I172L
FPATLETQEQDVDLVQKYLEKYYNLKNDGRQVEKRRNSGPVVEKLKQMQEFFGLKVTGKPDAETLKVMKQPRCGVPDVAQFVLTEGNPRWEQTHLTYRIENYTPDLPRADVDHAIEKAFQLWSNVTPLTFTKVSEGQADIMISFVRGDHRDNSPFDGPGGNLAHAFQPGPGLGGDAHFDEDERWTNNFREYNLHRVAAHELGHSLGLSHSTDIGALMYPSYTFSGDVQLAQDDIDGIQAIYGRSQNPVQPIGPQTPKACDSKLTFDAITTIRGEVMFFKDRFYMRTNPFYPEVELNFISVFWPQLPNGLEAAYEFADRDEVRFFKGNKYWAVQGQNVLHGYPKDIYSSFGFPRTVKHIDAALSEENTGKTYFFVANKYWRYDEYKRSMDPGYPKMIAHDFPGIGHKVDAVFMKDGFFYFFHGTRQYKFDPKTKRILTLQKANSWFNCRKN

SEQ ID NO: 2317 - protein, 450 aa, Artificial Sequence
  MMP-1 variant I172A
FPATLETQEQDVDLVQKYLEKYYNLKNDGRQVEKRRNSGPVVEKLKQMQEFFGLKVTGKPDAETLKVMKQPRCGVPDVAQFVLTEGNPRWEQTHLTYRIENYTPDLPRADVDHAIEKAFQLWSNVTPLTFTKVSEGQADIMISFVRGDHRDNSPFDGPGGNLAHAFQPGPGAGGDAHFDEDERWTNNFREYNLHRVAAHELGHSLGLSHSTDIGALMYPSYTFSGDVQLAQDDIDGIQAIYGRSQNPVQPIGPQTPKACDSKLTFDAITTIRGEVMFFKDRFYMRTNPFYPEVELNFISVFWPQLPNGLEAAYEFADRDEVRFFKGNKYWAVQGQNVLHGYPKDIYSSFGFPRTVKHIDAALSEENTGKTYFFVANKYWRYDEYKRSMDPGYPKMIAHDFPGIGHKVDAVFMKDGFFYFFHGTRQYKFDPKTKRILTLQKANSWFNCRKN

SEQ ID NO: 2318 - protein, 450 aa, Artificial Sequence
  MMP-1 variant I172P
FPATLETQEQDVDLVQKYLEKYYNLKNDGRQVEKRRNSGPVVEKLKQMQEFFGLKVTGKPDAETLKVMKQPRCGVPDVAQFVLTEGNPRWEQTHLTYRIENYTPDLPRADVDHAIEKAFQLWSNVTPLTFTKVSEGQADIMISFVRGDHRDNSPFDGPGGNLAHAFQPGPGPGGDAHFDEDERWTNNFREYNLHRVAAHELGHSLGLSHSTDIGALMYPSYTFSGDVQLAQDDIDGIQAIYGRSQNPVQPIGPQTPKACDSKLTFDAITTIRGEVMFFKDRFYMRTNPFYPEVELNFISVFWPQLPNGLEAAYEFADRDEVRFFKGNKYWAVQGQNVLHGYPKDIYSSFGFPRTVKHIDAALSEENTGKTYFFVANKYWRYDEYKRSMDPGYPKMIAHDFPGIGHKVDAVFMKDGFFYFFHGTRQYKFDPKTKRILTLQKANSWFNCRKN

SEQ ID NO: 2319 - protein, 450 aa, Artificial Sequence
  MMP-1 variant G173D
FPATLETQEQDVDLVQKYLEKYYNLKNDGRQVEKRRNSGPVVEKLKQMQEFFGLKVTGKPDAETLKVMKQPRCGVPDVAQFVLTEGNPRWEQTHLTYRIENYTPDLPRADVDHAIEKAFQLWSNVTPLTFTKVSEGQADIMISFVRGDHRDNSPFDGPGGNLAHAFQPGPGIDGDAHFDEDERWTNNFREYNLHRVAAHELGHSLGLSHSTDIGALMYPSYTFSGDVQLAQDDIDGIQAIYGRSQNPVQPIGPQTPKACDSKLTFDAITTIRGEVMFFKDRFYMRTNPFYPEVELNFISVFWPQLPNGLEAAYEFADRDEVRFFKGNKYWAVQGQNVLHGYPKDIYSSFGFPRTVKHIDAALSEENTGKTYFFVANKYWRYDEYKRSMDPGYPKMIAHDFPGIGHKVDAVFMKDGFFYFFHGTRQYKFDPKTKRILTLQKANSWFNCRKN

SEQ ID NO: 2320 - protein, 450 aa, Artificial Sequence
  MMP-1 variant G173E
FPATLETQEQDVDLVQKYLEKYYNLKNDGRQVEKRRNSGPVVEKLKQMQEFFGLKVTGKPDAETLKVMKQPRCGVPDVAQFVLTEGNPRWEQTHLTYRIENYTPDLPRADVDHAIEKAFQLWSNVTPLTFTKVSEGQADIMISFVRGDHRDNSPFDGPGGNLAHAFQPGPGIEGDAHFDEDERWTNNFREYNLHRVAAHELGHSLGLSHSTDIGALMYPSYTFSGDVQLAQDDIDGIQAIYGRSQNPVQPIGPQTPKACDSKLTFDAITTIRGEVMFFKDRFYMRTNPFYPEVELNFISVFWPQLPNGLEAAYEFADRDEVRFFKGNKYWAVQGQNVLHGYPKDIYSSFGFPRTVKHIDAALSEENTGKTYFFVANKYWRYDEYKRSMDPGYPKMIAHDFPGIGHKVDAVFMKDGFFYFFHGTRQYKFDPKTKRILTLQKANSWFNCRKN

SEQ ID NO: 2321 - protein, 450 aa, Artificial Sequence
  MMP-1 variant G173H
FPATLETQEQDVDLVQKYLEKYYNLKNDGRQVEKRRNSGPVVEKLKQMQEFFGLKVTGKPDAETLKVMKQPRCGVPDVAQFVLTEGNPRWEQTHLTYRIENYTPDLPRADVDHAIEKAFQLWSNVTPLTFTKVSEGQADIMISFVRGDHRDNSPFDGPGGNLAHAFQPGPGIHGDAHFDEDERWTNNFREYNLHRVAAHELGHSLGLSHSTDIGALMYPSYTFSGDVQLAQDDIDGIQAIYGRSQNPVQPIGPQTPKACDSKLTFDAITTIRGEVMFFKDRFYMRTNPFYPEVELNFISVFWPQLPNGLEAAYEFADRDEVRFFKGNKYWAVQGQNVLHGYPKDIYSSFGFPRTVKHIDAALSEENTGKTYFFVANKYWRYDEYKRSMDPGYPKMIAHDFPGIGHKVDAVFMKDGFFYFFHGTRQYKFDPKTKRILTLQKANSWFNCRKN

SEQ ID NO: 2322 - protein, 450 aa, Artificial Sequence
  MMP-1 variant G173K
FPATLETQEQDVDLVQKYLEKYYNLKNDGRQVEKRRNSGPVVEKLKQMQEFFGLKVTGKPDAETLKVMKQPRCGVPDVAQFVLTEGNPRWEQTHLTYRIENYTPDLPRADVDHAIEKAFQLWSNVTPLTFTKVSEGQADIMISFVRGDHRDNSPFDGPGGNLAHAFQPGPGIKGDAHFDEDERWTNNFREYNLHRVAAHELGHSLGLSHSTDIGALMYPSYTFSGDVQLAQDDIDGIQAIYGRSQNPVQPIGPQTPKACDSKLTFDAITTIRGEVMFFKDRFYMRTNPFYPEVELNFISVFWPQLPNGLEAAYEFADRDEVRFFKGNKYWAVQGQNVLHGYPKDIYSSFGFPRTVKHIDAALSEENTGKTYFFVANKYWRYDEYKRSMDPGYPKMIAHDFPGIGHKVDAVFMKDGFFYFFHGTRQYKFDPKTKRILTLQKANSWFNCRKN

SEQ ID NO: 2323 - protein, 450 aa, Artificial Sequence
  MMP-1 variant G173R
FPATLETQEQDVDLVQKYLEKYYNLKNDGRQVEKRRNSGPVVEKLKQMQEFFGLKVTGKPDAETLKVMKQPRCGVPDVAQFVLTEGNPRWEQTHLTYRIENYTPDLPRADVDHAIEKAFQLWSNVTPLTFTKVSEGQADIMISFVRGDHRDNSPFDGPGGNLAHAFQPGPGIRGDAHFDEDERWTNNFREYNLHRVAAHELGHSLGLSHSTDIGALMYPSYTFSGDVQLAQDDIDGIQAIYGRSQNPVQPIGPQTPKACDSKLTFDAITTIRGEVMFFKDRFYMRTNPFYPEVELNFISVFWPQLPNGLEAAYEFADRDEVRFFKGNKYWAVQGQNVLHGYPKDIYSSFGFPRTVKHIDAALSEENTGKTYFFVANKYWRYDEYKRSMDPGYPKMIAHDFPGIGHKVDAVFMKDGFFYFFHGTRQYKFDPKTKRILTLQKANSWFNCRKN

SEQ ID NO: 2324 - protein, 450 aa, Artificial Sequence
  MMP-1 variant G173C
FPATLETQEQDVDLVQKYLEKYYNLKNDGRQVEKRRNSGPVVEKLKQMQEFFGLKVTGKPDAETLKVMKQPRCGVPDVAQFVLTEGNPRWEQTHLTYRIENYTPDLPRADVDHAIEKAFQLWSNVTPLTFTKVSEGQADIMISFVRGDHRDNSPFDGPGGNLAHAFQPGPGICGDAHFDEDERWTNNFREYNLHRVAAHELGHSLGLSHSTDIGALMYPSYTFSGDVQLAQDDIDGIQAIYGRSQNPVQPIGPQTPKACDSKLTFDAITTIRGEVMFFKDRFYMRTNPFYPEVELNFISVFWPQLPNGLEAAYEFADRDEVRFFKGNKYWAVQGQNVLHGYPKDIYSSFGFPRTVKHIDAALSEENTGKTYFFVANKYWRYDEYKRSMDPGYPKMIAHDFPGIGHKVDAVFMKDGFFYFFHGTRQYKFDPKTKRILTLQKANSWFNCRKN

SEQ ID NO: 2325 - protein, 450 aa, Artificial Sequence
  MMP-1 variant G173N
FPATLETQEQDVDLVQKYLEKYYNLKNDGRQVEKRRNSGPVVEKLKQMQEFFGLKVTGKPDAETLKVMKQPRCGVPDVAQFVLTEGNPRWEQTHLTYRIENYTPDLPRADVDHAIEKAFQLWSNVTPLTFTKVSEGQADIMISFVRGDHRDNSPFDGPGGNLAHAFQPGPGINGDAHFDEDERWTNNFREYNLHRVAAHELGHSLGLSHSTDIGALMYPSYTFSGDVQLAQDDIDGIQAIYGRSQNPVQPIGPQTPKACDSKLTFDAITTIRGEVMFFKDRFYMRTNPFYPEVELNFISVFWPQLPNGLEAAYEFADRDEVRFFKGNKYWAVQGQNVLHGYPKDIYSSFGFPRTVKHIDAALSEENTGKTYFFVANKYWRYDEYKRSMDPGYPKMIAHDFPGIGHKVDAVFMKDGFFYFFHGTRQYKFDPKTKRILTLQKANSWFNCRKN

SEQ ID NO: 2326 - protein, 450 aa, Artificial Sequence
  MMP-1 variant G173Q
FPATLETQEQDVDLVQKYLEKYYNLKNDGRQVEKRRNSGPVVEKLKQMQEFFGLKVTGKPDAETLKVMKQPRCGVPDVAQFVLTEGNPRWEQTHLTYRIENYTPDLPRADVDHAIEKAFQLWSNVTPLTFTKVSEGQADIMISFVRGDHRDNSPFDGPGGNLAHAFQPGPGIQGDAHFDEDERWTNNFREYNLHRVAAHELGHSLGLSHSTDIGALMYPSYTFSGDVQLAQDDIDGIQAIYGRSQNPVQPIGPQTPKACDSKLTFDAITTIRGEVMFFKDRFYMRTNPFYPEVELNFISVFWPQLPNGLEAAYEFADRDEVRFFKGNKYWAVQGQNVLHGYPKDIYSSFGFPRTVKHIDAALSEENTGKTYFFVANKYWRYDEYKRSMDPGYPKMIAHDFPGIGHKVDAVFMKDGFFYFFHGTRQYKFDPKTKRILTLQKANSWFNCRKN

SEQ ID NO: 2327 - protein, 450 aa, Artificial Sequence
  MMP-1 variant G173T
FPATLETQEQDVDLVQKYLEKYYNLKNDGRQVEKRRNSGPVVEKLKQMQEFFGLKVTGKPDAETLKVMKQPRCGVPDVAQFVLTEGNPRWEQTHLTYRIENYTPDLPRADVDHAIEKAFQLWSNVTPLTFTKVSEGQADIMISFVRGDHRDNSPFDGPGGNLAHAFQPGPGITGDAHFDEDERWTNNFREYNLHRVAAHELGHSLGLSHSTDIGALMYPSYTFSGDVQLAQDDIDGIQAIYGRSQNPVQPIGPQTPKACDSKLTFDAITTIRGEVMFFKDRFYMRTNPFYPEVELNFISVFWPQLPNGLEAAYEFADRDEVRFFKGNKYWAVQGQNVLHGYPKDIYSSFGFPRTVKHIDAALSEENTGKTYFFVANKYWRYDEYKRSMDPGYPKMIAHDFPGIGHKVDAVFMKDGFFYFFHGTRQYKFDPKTKRILTLQKANSWFNCRKN

SEQ ID NO: 2328 - protein, 450 aa, Artificial Sequence
  MMP-1 variant G173Y
FPATLETQEQDVDLVQKYLEKYYNLKNDGRQVEKRRNSGPVVEKLKQMQEFFGLKVTGKPDAETLKVMKQPRCGVPDVAQFVLTEGNPRWEQTHLTYRIENYTPDLPRADVDHAIEKAFQLWSNVTPLTFTKVSEGQADIMISFVRGDHRDNSPFDGPGGNLAHAFQPGPGIYGDAHFDEDERWTNNFREYNLHRVAAHELGHSLGLSHSTDIGALMYPSYTFSGDVQLAQDDIDGIQAIYGRSQNPVQPIGPQTPKACDSKLTFDAITTIRGEVMFFKDRFYMRTNPFYPEVELNFISVFWPQLPNGLEAAYEFADRDEVRFFKGNKYWAVQGQNVLHGYPKDIYSSFGFPRTVKHIDAALSEENTGKTYFFVANKYWRYDEYKRSMDPGYPKMIAHDFPGIGHKVDAVFMKDGFFYFFHGTRQYKFDPKTKRILTLQKANSWFNCRKN

SEQ ID NO: 2329 - protein, 450 aa, Artificial Sequence
  MMP-1 variant G173S
FPATLETQEQDVDLVQKYLEKYYNLKNDGRQVEKRRNSGPVVEKLKQMQEFFGLKVTGKPDAETLKVMKQPRCGVPDVAQFVLTEGNPRWEQTHLTYRIENYTPDLPRADVDHAIEKAFQLWSNVTPLTFTKVSEGQADIMISFVRGDHRDNSPFDGPGGNLAHAFQPGPGISGDAHFDEDERWTNNFREYNLHRVAAHELGHSLGLSHSTDIGALMYPSYTFSGDVQLAQDDIDGIQAIYGRSQNPVQPIGPQTPKACDSKLTFDAITTIRGEVMFFKDRFYMRTNPFYPEVELNFISVFWPQLPNGLEAAYEFADRDEVRFFKGNKYWAVQGQNVLHGYPKDIYSSFGFPRTVKHIDAALSEENTGKTYFFVANKYWRYDEYKRSMDPGYPKMIAHDFPGIGHKVDAVFMKDGFFYFFHGTRQYKFDPKTKRILTLQKANSWFNCRKN

SEQ ID NO: 2330 - protein, 450 aa, Artificial Sequence
  MMP-1 variant G173F
FPATLETQEQDVDLVQKYLEKYYNLKNDGRQVEKRRNSGPVVEKLKQMQEFFGLKVTGKPDAETLKVMKQPRCGVPDVAQFVLTEGNPRWEQTHLTYRIENYTPDLPRADVDHAIEKAFQLWSNVTPLTFTKVSEGQADIMISFVRGDHRDNSPFDGPGGNLAHAFQPGPGIFGDAHFDEDERWTNNFREYNLHRVAAHELGHSLGLSHSTDIGALMYPSYTFSGDVQLAQDDIDGIQAIYGRSQNPVQPIGPQTPKACDSKLTFDAITTIRGEVMFFKDRFYMRTNPFYPEVELNFISVFWPQLPNGLEAAYEFADRDEVRFFKGNKYWAVQGQNVLHGYPKDIYSSFGFPRTVKHIDAALSEENTGKTYFFVANKYWRYDEYKRSMDPGYPKMIAHDFPGIGHKVDAVFMKDGFFYFFHGTRQYKFDPKTKRILTLQKANSWFNCRKN

SEQ ID NO: 2331 - protein, 450 aa, Artificial Sequence
  MMP-1 variant G173M
FPATLETQEQDVDLVQKYLEKYYNLKNDGRQVEKRRNSGPVVEKLKQMQEFFGLKVTGKPDAETLKVMKQPRCGVPDVAQFVLTEGNPRWEQTHLTYRIENYTPDLPRADVDHAIEKAFQLWSNVTPLTFTKVSEGQADIMISFVRGDHRDNSPFDGPGGNLAHAFQPGPGIMGDAHFDEDERWTNNFREYNLHRVAAHELGHSLGLSHSTDIGALMYPSYTFSGDVQLAQDDIDGIQAIYGRSQNPVQPIGPQTPKACDSKLTFDAITTIRGEVMFFKDRFYMRTNPFYPEVELNFISVFWPQLPNGLEAAYEFADRDEVRFFKGNKYWAVQGQNVLHGYPKDIYSSFGFPRTVKHIDAALSEENTGKTYFFVANKYWRYDEYKRSMDPGYPKMIAHDFPGIGHKVDAVFMKDGFFYFFHGTRQYKFDPKTKRILTLQKANSWFNCRKN

SEQ ID NO: 2332 - protein, 450 aa, Artificial Sequence
  MMP-1 variant G173W
FPATLETQEQDVDLVQKYLEKYYNLKNDGRQVEKRRNSGPVVEKLKQMQEFFGLKVTGKPDAETLKVMKQPRCGVPDVAQFVLTEGNPRWEQTHLTYRIENYTPDLPRADVDHAIEKAFQLWSNVTPLTFTKVSEGQADIMISFVRGDHRDNSPFDGPGGNLAHAFQPGPGIWGDAHFDEDERWTNNFREYNLHRVAAHELGHSLGLSHSTDIGALMYPSYTFSGDVQLAQDDIDGIQAIYGRSQNPVQPIGPQTPKACDSKLTFDAITTIRGEVMFFKDRFYMRTNPFYPEVELNFISVFWPQLPNGLEAAYEFADRDEVRFFKGNKYWAVQGQNVLHGYPKDIYSSFGFPRTVKHIDAALSEENTGKTYFFVANKYWRYDEYKRSMDPGYPKMIAHDFPGIGHKVDAVFMKDGFFYFFHGTRQYKFDPKTKRILTLQKANSWFNCRKN

SEQ ID NO: 2333 - protein, 450 aa, Artificial Sequence
  MMP-1 variant G173I
FPATLETQEQDVDLVQKYLEKYYNLKNDGRQVEKRRNSGPVVEKLKQMQEFFGLKVTGKPDAETLKVMKQPRCGVPDVAQFVLTEGNPRWEQTHLTYRIENYTPDLPRADVDHAIEKAFQLWSNVTPLTFTKVSEGQADIMISFVRGDHRDNSPFDGPGGNLAHAFQPGPGIIGDAHFDEDERWTNNFREYNLHRVAAHELGHSLGLSHSTDIGALMYPSYTFSGDVQLAQDDIDGIQAIYGRSQNPVQPIGPQTPKACDSKLTFDAITTIRGEVMFFKDRFYMRTNPFYPEVELNFISVFWPQLPNGLEAAYEFADRDEVRFFKGNKYWAVQGQNVLHGYPKDIYSSFGFPRTVKHIDAALSEENTGKTYFFVANKYWRYDEYKRSMDPGYPKMIAHDFPGIGHKVDAVFMKDGFFYFFHGTRQYKFDPKTKRILTLQKANSWFNCRKN

SEQ ID NO: 2334 - protein, 450 aa, Artificial Sequence
  MMP-1 variant G173V
FPATLETQEQDVDLVQKYLEKYYNLKNDGRQVEKRRNSGPVVEKLKQMQEFFGLKVTGKPDAETLKVMKQPRCGVPDVAQFVLTEGNPRWEQTHLTYRIENYTPDLPRADVDHAIEKAFQLWSNVTPLTFTKVSEGQADIMISFVRGDHRDNSPFDGPGGNLAHAFQPGPGIVGDAHFDEDERWTNNFREYNLHRVAAHELGHSLGLSHSTDIGALMYPSYTFSGDVQLAQDDIDGIQAIYGRSQNPVQPIGPQTPKACDSKLTFDAITTIRGEVMFFKDRFYMRTNPFYPEVELNFISVFWPQLPNGLEAAYEFADRDEVRFFKGNKYWAVQGQNVLHGYPKDIYSSFGFPRTVKHIDAALSEENTGKTYFFVANKYWRYDEYKRSMDPGYPKMIAHDFPGIGHKVDAVFMKDGFFYFFHGTRQYKFDPKTKRILTLQKANSWFNCRKN

SEQ ID NO: 2335 - protein, 450 aa, Artificial Sequence
  MMP-1 variant G173L
FPATLETQEQDVDLVQKYLEKYYNLKNDGRQVEKRRNSGPVVEKLKQMQEFFGLKVTGKPDAETLKVMKQPRCGVPDVAQFVLTEGNPRWEQTHLTYRIENYTPDLPRADVDHAIEKAFQLWSNVTPLTFTKVSEGQADIMISFVRGDHRDNSPFDGPGGNLAHAFQPGPGILGDAHFDEDERWTNNFREYNLHRVAAHELGHSLGLSHSTDIGALMYPSYTFSGDVQLAQDDIDGIQAIYGRSQNPVQPIGPQTPKACDSKLTFDAITTIRGEVMFFKDRFYMRTNPFYPEVELNFISVFWPQLPNGLEAAYEFADRDEVRFFKGNKYWAVQGQNVLHGYPKDIYSSFGFPRTVKHIDAALSEENTGKTYFFVANKYWRYDEYKRSMDPGYPKMIAHDFPGIGHKVDAVFMKDGFFYFFHGTRQYKFDPKTKRILTLQKANSWFNCRKN

SEQ ID NO: 2336 - protein, 450 aa, Artificial Sequence
  MMP-1 variant G173A
FPATLETQEQDVDLVQKYLEKYYNLKNDGRQVEKRRNSGPVVEKLKQMQEFFGLKVTGKPDAETLKVMKQPRCGVPDVAQFVLTEGNPRWEQTHLTYRIENYTPDLPRADVDHAIEKAFQLWSNVTPLTFTKVSEGQADIMISFVRGDHRDNSPFDGPGGNLAHAFQPGPGIAGDAHFDEDERWTNNFREYNLHRVAAHELGHSLGLSHSTDIGALMYPSYTFSGDVQLAQDDIDGIQAIYGRSQNPVQPIGPQTPKACDSKLTFDAITTIRGEVMFFKDRFYMRTNPFYPEVELNFISVFWPQLPNGLEAAYEFADRDEVRFFKGNKYWAVQGQNVLHGYPKDIYSSFGFPRTVKHIDAALSEENTGKTYFFVANKYWRYDEYKRSMDPGYPKMIAHDFPGIGHKVDAVFMKDGFFYFFHGTRQYKFDPKTKRILTLQKANSWFNCRKN

SEQ ID NO: 2337 - protein, 450 aa, Artificial Sequence
  MMP-1 variant G173P
FPATLETQEQDVDLVQKYLEKYYNLKNDGRQVEKRRNSGPVVEKLKQMQEFFGLKVTGKPDAETLKVMKQPRCGVPDVAQFVLTEGNPRWEQTHLTYRIENYTPDLPRADVDHAIEKAFQLWSNVTPLTFTKVSEGQADIMISFVRGDHRDNSPFDGPGGNLAHAFQPGPGIPGDAHFDEDERWTNNFREYNLHRVAAHELGHSLGLSHSTDIGALMYPSYTFSGDVQLAQDDIDGIQAIYGRSQNPVQPIGPQTPKACDSKLTFDAITTIRGEVMFFKDRFYMRTNPFYPEVELNFISVFWPQLPNGLEAAYEFADRDEVRFFKGNKYWAVQGQNVLHGYPKDIYSSFGFPRTVKHIDAALSEENTGKTYFFVANKYWRYDEYKRSMDPGYPKMIAHDFPGIGHKVDAVFMKDGFFYFFHGTRQYKFDPKTKRILTLQKANSWFNCRKN

SEQ ID NO: 2338 - protein, 450 aa, Artificial Sequence
  MMP-1 variant G174D
FPATLETQEQDVDLVQKYLEKYYNLKNDGRQVEKRRNSGPVVEKLKQMQEFFGLKVTGKPDAETLKVMKQPRCGVPDVAQFVLTEGNPRWEQTHLTYRIENYTPDLPRADVDHAIEKAFQLWSNVTPLTFTKVSEGQADIMISFVRGDHRDNSPFDGPGGNLAHAFQPGPGIGDDAHFDEDERWTNNFREYNLHRVAAHELGHSLGLSHSTDIGALMYPSYTFSGDVQLAQDDIDGIQAIYGRSQNPVQPIGPQTPKACDSKLTFDAITTIRGEVMFFKDRFYMRTNPFYPEVELNFISVFWPQLPNGLEAAYEFADRDEVRFFKGNKYWAVQGQNVLHGYPKDIYSSFGFPRTVKHIDAALSEENTGKTYFFVANKYWRYDEYKRSMDPGYPKMIAHDFPGIGHKVDAVFMKDGFFYFFHGTRQYKFDPKTKRILTLQKANSWFNCRKN

SEQ ID NO: 2339 - protein, 450 aa, Artificial Sequence
  MMP-1 variant G174E
FPATLETQEQDVDLVQKYLEKYYNLKNDGRQVEKRRNSGPVVEKLKQMQEFFGLKVTGKPDAETLKVMKQPRCGVPDVAQFVLTEGNPRWEQTHLTYRIENYTPDLPRADVDHAIEKAFQLWSNVTPLTFTKVSEGQADIMISFVRGDHRDNSPFDGPGGNLAHAFQPGPGIGEDAHFDEDERWTNNFREYNLHRVAAHELGHSLGLSHSTDIGALMYPSYTFSGDVQLAQDDIDGIQAIYGRSQNPVQPIGPQTPKACDSKLTFDAITTIRGEVMFFKDRFYMRTNPFYPEVELNFISVFWPQLPNGLEAAYEFADRDEVRFFKGNKYWAVQGQNVLHGYPKDIYSSFGFPRTVKHIDAALSEENTGKTYFFVANKYWRYDEYKRSMDPGYPKMIAHDFPGIGHKVDAVFMKDGFFYFFHGTRQYKFDPKTKRILTLQKANSWFNCRKN

SEQ ID NO: 2340 - protein, 450 aa, Artificial Sequence
  MMP-1 variant G174H
FPATLETQEQDVDLVQKYLEKYYNLKNDGRQVEKRRNSGPVVEKLKQMQEFFGLKVTGKPDAETLKVMKQPRCGVPDVAQFVLTEGNPRWEQTHLTYRIENYTPDLPRADVDHAIEKAFQLWSNVTPLTFTKVSEGQADIMISFVRGDHRDNSPFDGPGGNLAHAFQPGPGIGHDAHFDEDERWTNNFREYNLHRVAAHELGHSLGLSHSTDIGALMYPSYTFSGDVQLAQDDIDGIQAIYGRSQNPVQPIGPQTPKACDSKLTFDAITTIRGEVMFFKDRFYMRTNPFYPEVELNFISVFWPQLPNGLEAAYEFADRDEVRFFKGNKYWAVQGQNVLHGYPKDIYSSFGFPRTVKHIDAALSEENTGKTYFFVANKYWRYDEYKRSMDPGYPKMIAHDFPGIGHKVDAVFMKDGFFYFFHGTRQYKFDPKTKRILTLQKANSWFNCRKN

SEQ ID NO: 2341 - protein, 450 aa, Artificial Sequence
  MMP-1 variant G174K
FPATLETQEQDVDLVQKYLEKYYNLKNDGRQVEKRRNSGPVVEKLKQMQEFFGLKVTGKPDAETLKVMKQPRCGVPDVAQFVLTEGNPRWEQTHLTYRIENYTPDLPRADVDHAIEKAFQLWSNVTPLTFTKVSEGQADIMISFVRGDHRDNSPFDGPGGNLAHAFQPGPGIGKDAHFDEDERWTNNFREYNLHRVAAHELGHSLGLSHSTDIGALMYPSYTFSGDVQLAQDDIDGIQAIYGRSQNPVQPIGPQTPKACDSKLTFDAITTIRGEVMFFKDRFYMRTNPFYPEVELNFISVFWPQLPNGLEAAYEFADRDEVRFFKGNKYWAVQGQNVLHGYPKDIYSSFGFPRTVKHIDAALSEENTGKTYFFVANKYWRYDEYKRSMDPGYPKMIAHDFPGIGHKVDAVFMKDGFFYFFHGTRQYKFDPKTKRILTLQKANSWFNCRKN

SEQ ID NO: 2342 - protein, 450 aa, Artificial Sequence
  MMP-1 variant G174R
FPATLETQEQDVDLVQKYLEKYYNLKNDGRQVEKRRNSGPVVEKLKQMQEFFGLKVTGKPDAETLKVMKQPRCGVPDVAQFVLTEGNPRWEQTHLTYRIENYTPDLPRADVDHAIEKAFQLWSNVTPLTFTKVSEGQADIMISFVRGDHRDNSPFDGPGGNLAHAFQPGPGIGRDAHFDEDERWTNNFREYNLHRVAAHELGHSLGLSHSTDIGALMYPSYTFSGDVQLAQDDIDGIQAIYGRSQNPVQPIGPQTPKACDSKLTFDAITTIRGEVMFFKDRFYMRTNPFYPEVELNFISVFWPQLPNGLEAAYEFADRDEVRFFKGNKYWAVQGQNVLHGYPKDIYSSFGFPRTVKHIDAALSEENTGKTYFFVANKYWRYDEYKRSMDPGYPKMIAHDFPGIGHKVDAVFMKDGFFYFFHGTRQYKFDPKTKRILTLQKANSWFNCRKN

SEQ ID NO: 2343 - protein, 450 aa, Artificial Sequence
  MMP-1 variant G174C
FPATLETQEQDVDLVQKYLEKYYNLKNDGRQVEKRRNSGPVVEKLKQMQEFFGLKVTGKPDAETLKVMKQPRCGVPDVAQFVLTEGNPRWEQTHLTYRIENYTPDLPRADVDHAIEKAFQLWSNVTPLTFTKVSEGQADIMISFVRGDHRDNSPFDGPGGNLAHAFQPGPGIGCDAHFDEDERWTNNFREYNLHRVAAHELGHSLGLSHSTDIGALMYPSYTFSGDVQLAQDDIDGIQAIYGRSQNPVQPIGPQTPKACDSKLTFDAITTIRGEVMFFKDRFYMRTNPFYPEVELNFISVFWPQLPNGLEAAYEFADRDEVRFFKGNKYWAVQGQNVLHGYPKDIYSSFGFPRTVKHIDAALSEENTGKTYFFVANKYWRYDEYKRSMDPGYPKMIAHDFPGIGHKVDAVFMKDGFFYFFHGTRQYKFDPKTKRILTLQKANSWFNCRKN

SEQ ID NO: 2344 - protein, 450 aa, Artificial Sequence
  MMP-1 variant G174N
FPATLETQEQDVDLVQKYLEKYYNLKNDGRQVEKRRNSGPVVEKLKQMQEFFGLKVTGKPDAETLKVMKQPRCGVPDVAQFVLTEGNPRWEQTHLTYRIENYTPDLPRADVDHAIEKAFQLWSNVTPLTFTKVSEGQADIMISFVRGDHRDNSPFDGPGGNLAHAFQPGPGIGNDAHFDEDERWTNNFREYNLHRVAAHELGHSLGLSHSTDIGALMYPSYTFSGDVQLAQDDIDGIQAIYGRSQNPVQPIGPQTPKACDSKLTFDAITTIRGEVMFFKDRFYMRTNPFYPEVELNFISVFWPQLPNGLEAAYEFADRDEVRFFKGNKYWAVQGQNVLHGYPKDIYSSFGFPRTVKHIDAALSEENTGKTYFFVANKYWRYDEYKRSMDPGYPKMIAHDFPGIGHKVDAVFMKDGFFYFFHGTRQYKFDPKTKRILTLQKANSWFNCRKN

SEQ ID NO: 2345 - protein, 450 aa, Artificial Sequence
  MMP-1 variant G174Q
FPATLETQEQDVDLVQKYLEKYYNLKNDGRQVEKRRNSGPVVEKLKQMQEFFGLKVTGKPDAETLKVMKQPRCGVPDVAQFVLTEGNPRWEQTHLTYRIENYTPDLPRADVDHAIEKAFQLWSNVTPLTFTKVSEGQADIMISFVRGDHRDNSPFDGPGGNLAHAFQPGPGIGQDAHFDEDERWTNNFREYNLHRVAAHELGHSLGLSHSTDIGALMYPSYTFSGDVQLAQDDIDGIQAIYGRSQNPVQPIGPQTPKACDSKLTFDAITTIRGEVMFFKDRFYMRTNPFYPEVELNFISVFWPQLPNGLEAAYEFADRDEVRFFKGNKYWAVQGQNVLHGYPKDIYSSFGFPRTVKHIDAALSEENTGKTYFFVANKYWRYDEYKRSMDPGYPKMIAHDFPGIGHKVDAVFMKDGFFYFFHGTRQYKFDPKTKRILTLQKANSWFNCRKN

SEQ ID NO: 2346 - protein, 450 aa, Artificial Sequence
  MMP-1 variant G174T
FPATLETQEQDVDLVQKYLEKYYNLKNDGRQVEKRRNSGPVVEKLKQMQEFFGLKVTGKPDAETLKVMKQPRCGVPDVAQFVLTEGNPRWEQTHLTYRIENYTPDLPRADVDHAIEKAFQLWSNVTPLTFTKVSEGQADIMISFVRGDHRDNSPFDGPGGNLAHAFQPGPGIGTDAHFDEDERWTNNFREYNLHRVAAHELGHSLGLSHSTDIGALMYPSYTFSGDVQLAQDDIDGIQAIYGRSQNPVQPIGPQTPKACDSKLTFDAITTIRGEVMFFKDRFYMRTNPFYPEVELNFISVFWPQLPNGLEAAYEFADRDEVRFFKGNKYWAVQGQNVLHGYPKDIYSSFGFPRTVKHIDAALSEENTGKTYFFVANKYWRYDEYKRSMDPGYPKMIAHDFPGIGHKVDAVFMKDGFFYFFHGTRQYKFDPKTKRILTLQKANSWFNCRKN

SEQ ID NO: 2347 - protein, 450 aa, Artificial Sequence
  MMP-1 variant G174Y
FPATLETQEQDVDLVQKYLEKYYNLKNDGRQVEKRRNSGPVVEKLKQMQEFFGLKVTGKPDAETLKVMKQPRCGVPDVAQFVLTEGNPRWEQTHLTYRIENYTPDLPRADVDHAIEKAFQLWSNVTPLTFTKVSEGQADIMISFVRGDHRDNSPFDGPGGNLAHAFQPGPGIGYDAHFDEDERWTNNFREYNLHRVAAHELGHSLGLSHSTDIGALMYPSYTFSGDVQLAQDDIDGIQAIYGRSQNPVQPIGPQTPKACDSKLTFDAITTIRGEVMFFKDRFYMRTNPFYPEVELNFISVFWPQLPNGLEAAYEFADRDEVRFFKGNKYWAVQGQNVLHGYPKDIYSSFGFPRTVKHIDAALSEENTGKTYFFVANKYWRYDEYKRSMDPGYPKMIAHDFPGIGHKVDAVFMKDGFFYFFHGTRQYKFDPKTKRILTLQKANSWFNCRKN

SEQ ID NO: 2348 - protein, 450 aa, Artificial Sequence
  MMP-1 variant G174S
FPATLETQEQDVDLVQKYLEKYYNLKNDGRQVEKRRNSGPVVEKLKQMQEFFGLKVTGKPDAETLKVMKQPRCGVPDVAQFVLTEGNPRWEQTHLTYRIENYTPDLPRADVDHAIEKAFQLWSNVTPLTFTKVSEGQADIMISFVRGDHRDNSPFDGPGGNLAHAFQPGPGIGSDAHFDEDERWTNNFREYNLHRVAAHELGHSLGLSHSTDIGALMYPSYTFSGDVQLAQDDIDGIQAIYGRSQNPVQPIGPQTPKACDSKLTFDAITTIRGEVMFFKDRFYMRTNPFYPEVELNFISVFWPQLPNGLEAAYEFADRDEVRFFKGNKYWAVQGQNVLHGYPKDIYSSFGFPRTVKHIDAALSEENTGKTYFFVANKYWRYDEYKRSMDPGYPKMIAHDFPGIGHKVDAVFMKDGFFYFFHGTRQYKFDPKTKRILTLQKANSWFNCRKN

SEQ ID NO: 2349 - protein, 450 aa, Artificial Sequence
  MMP-1 variant G174F
FPATLETQEQDVDLVQKYLEKYYNLKNDGRQVEKRRNSGPVVEKLKQMQEFFGLKVTGKPDAETLKVMKQPRCGVPDVAQFVLTEGNPRWEQTHLTYRIENYTPDLPRADVDHAIEKAFQLWSNVTPLTFTKVSEGQADIMISFVRGDHRDNSPFDGPGGNLAHAFQPGPGIGFDAHFDEDERWTNNFREYNLHRVAAHELGHSLGLSHSTDIGALMYPSYTFSGDVQLAQDDIDGIQAIYGRSQNPVQPIGPQTPKACDSKLTFDAITTIRGEVMFFKDRFYMRTNPFYPEVELNFISVFWPQLPNGLEAAYEFADRDEVRFFKGNKYWAVQGQNVLHGYPKDIYSSFGFPRTVKHIDAALSEENTGKTYFFVANKYWRYDEYKRSMDPGYPKMIAHDFPGIGHKVDAVFMKDGFFYFFHGTRQYKFDPKTKRILTLQKANSWFNCRKN

SEQ ID NO: 2350 - protein, 450 aa, Artificial Sequence
  MMP-1 variant G174M
FPATLETQEQDVDLVQKYLEKYYNLKNDGRQVEKRRNSGPVVEKLKQMQEFFGLKVTGKPDAETLKVMKQPRCGVPDVAQFVLTEGNPRWEQTHLTYRIENYTPDLPRADVDHAIEKAFQLWSNVTPLTFTKVSEGQADIMISFVRGDHRDNSPFDGPGGNLAHAFQPGPGIGMDAHFDEDERWTNNFREYNLHRVAAHELGHSLGLSHSTDIGALMYPSYTFSGDVQLAQDDIDGIQAIYGRSQNPVQPIGPQTPKACDSKLTFDAITTIRGEVMFFKDRFYMRTNPFYPEVELNFISVFWPQLPNGLEAAYEFADRDEVRFFKGNKYWAVQGQNVLHGYPKDIYSSFGFPRTVKHIDAALSEENTGKTYFFVANKYWRYDEYKRSMDPGYPKMIAHDFPGIGHKVDAVFMKDGFFYFFHGTRQYKFDPKTKRILTLQKANSWFNCRKN

SEQ ID NO: 2351 - protein, 450 aa, Artificial Sequence
  MMP-1 variant G174W
FPATLETQEQDVDLVQKYLEKYYNLKNDGRQVEKRRNSGPVVEKLKQMQEFFGLKVTGKPDAETLKVMKQPRCGVPDVAQFVLTEGNPRWEQTHLTYRIENYTPDLPRADVDHAIEKAFQLWSNVTPLTFTKVSEGQADIMISFVRGDHRDNSPFDGPGGNLAHAFQPGPGIGWDAHFDEDERWTNNFREYNLHRVAAHELGHSLGLSHSTDIGALMYPSYTFSGDVQLAQDDIDGIQAIYGRSQNPVQPIGPQTPKACDSKLTFDAITTIRGEVMFFKDRFYMRTNPFYPEVELNFISVFWPQLPNGLEAAYEFADRDEVRFFKGNKYWAVQGQNVLHGYPKDIYSSFGFPRTVKHIDAALSEENTGKTYFFVANKYWRYDEYKRSMDPGYPKMIAHDFPGIGHKVDAVFMKDGFFYFFHGTRQYKFDPKTKRILTLQKANSWFNCRKN

SEQ ID NO: 2352 - protein, 450 aa, Artificial Sequence
  MMP-1 variant G174I
FPATLETQEQDVDLVQKYLEKYYNLKNDGRQVEKRRNSGPVVEKLKQMQEFFGLKVTGKPDAETLKVMKQPRCGVPDVAQFVLTEGNPRWEQTHLTYRIENYTPDLPRADVDHAIEKAFQLWSNVTPLTFTKVSEGQADIMISFVRGDHRDNSPFDGPGGNLAHAFQPGPGIGIDAHFDEDERWTNNFREYNLHRVAAHELGHSLGLSHSTDIGALMYPSYTFSGDVQLAQDDIDGIQAIYGRSQNPVQPIGPQTPKACDSKLTFDAITTIRGEVMFFKDRFYMRTNPFYPEVELNFISVFWPQLPNGLEAAYEFADRDEVRFFKGNKYWAVQGQNVLHGYPKDIYSSFGFPRTVKHIDAALSEENTGKTYFFVANKYWRYDEYKRSMDPGYPKMIAHDFPGIGHKVDAVFMKDGFFYFFHGTRQYKFDPKTKRILTLQKANSWFNCRKN

SEQ ID NO: 2353 - protein, 450 aa, Artificial Sequence
  MMP-1 variant G174V
FPATLETQEQDVDLVQKYLEKYYNLKNDGRQVEKRRNSGPVVEKLKQMQEFFGLKVTGKPDAETLKVMKQPRCGVPDVAQFVLTEGNPRWEQTHLTYRIENYTPDLPRADVDHAIEKAFQLWSNVTPLTFTKVSEGQADIMISFVRGDHRDNSPFDGPGGNLAHAFQPGPGIGVDAHFDEDERWTNNFREYNLHRVAAHELGHSLGLSHSTDIGALMYPSYTFSGDVQLAQDDIDGIQAIYGRSQNPVQPIGPQTPKACDSKLTFDAITTIRGEVMFFKDRFYMRTNPFYPEVELNFISVFWPQLPNGLEAAYEFADRDEVRFFKGNKYWAVQGQNVLHGYPKDIYSSFGFPRTVKHIDAALSEENTGKTYFFVANKYWRYDEYKRSMDPGYPKMIAHDFPGIGHKVDAVFMKDGFFYFFHGTRQYKFDPKTKRILTLQKANSWFNCRKN

SEQ ID NO: 2354 - protein, 450 aa, Artificial Sequence
  MMP-1 variant G174L
FPATLETQEQDVDLVQKYLEKYYNLKNDGRQVEKRRNSGPVVEKLKQMQEFFGLKVTGKPDAETLKVMKQPRCGVPDVAQFVLTEGNPRWEQTHLTYRIENYTPDLPRADVDHAIEKAFQLWSNVTPLTFTKVSEGQADIMISFVRGDHRDNSPFDGPGGNLAHAFQPGPGIGLDAHFDEDERWTNNFREYNLHRVAAHELGHSLGLSHSTDIGALMYPSYTFSGDVQLAQDDIDGIQAIYGRSQNPVQPIGPQTPKACDSKLTFDAITTIRGEVMFFKDRFYMRTNPFYPEVELNFISVFWPQLPNGLEAAYEFADRDEVRFFKGNKYWAVQGQNVLHGYPKDIYSSFGFPRTVKHIDAALSEENTGKTYFFVANKYWRYDEYKRSMDPGYPKMIAHDFPGIGHKVDAVFMKDGFFYFFHGTRQYKFDPKTKRILTLQKANSWFNCRKN

SEQ ID NO: 2355 - protein, 450 aa, Artificial Sequence
  MMP-1 variant G174A
FPATLETQEQDVDLVQKYLEKYYNLKNDGRQVEKRRNSGPVVEKLKQMQEFFGLKVTGKPDAETLKVMKQPRCGVPDVAQFVLTEGNPRWEQTHLTYRIENYTPDLPRADVDHAIEKAFQLWSNVTPLTFTKVSEGQADIMISFVRGDHRDNSPFDGPGGNLAHAFQPGPGIGADAHFDEDERWTNNFREYNLHRVAAHELGHSLGLSHSTDIGALMYPSYTFSGDVQLAQDDIDGIQAIYGRSQNPVQPIGPQTPKACDSKLTFDAITTIRGEVMFFKDRFYMRTNPFYPEVELNFISVFWPQLPNGLEAAYEFADRDEVRFFKGNKYWAVQGQNVLHGYPKDIYSSFGFPRTVKHIDAALSEENTGKTYFFVANKYWRYDEYKRSMDPGYPKMIAHDFPGIGHKVDAVFMKDGFFYFFHGTRQYKFDPKTKRILTLQKANSWFNCRKN

SEQ ID NO: 2356 - protein, 450 aa, Artificial Sequence
  MMP-1 variant G174P
FPATLETQEQDVDLVQKYLEKYYNLKNDGRQVEKRRNSGPVVEKLKQMQEFFGLKVTGKPDAETLKVMKQPRCGVPDVAQFVLTEGNPRWEQTHLTYRIENYTPDLPRADVDHAIEKAFQLWSNVTPLTFTKVSEGQADIMISFVRGDHRDNSPFDGPGGNLAHAFQPGPGIGPDAHFDEDERWTNNFREYNLHRVAAHELGHSLGLSHSTDIGALMYPSYTFSGDVQLAQDDIDGIQAIYGRSQNPVQPIGPQTPKACDSKLTFDAITTIRGEVMFFKDRFYMRTNPFYPEVELNFISVFWPQLPNGLEAAYEFADRDEVRFFKGNKYWAVQGQNVLHGYPKDIYSSFGFPRTVKHIDAALSEENTGKTYFFVANKYWRYDEYKRSMDPGYPKMIAHDFPGIGHKVDAVFMKDGFFYFFHGTRQYKFDPKTKRILTLQKANSWFNCRKN

SEQ ID NO: 2357 - protein, 450 aa, Artificial Sequence
  MMP-1 variant D175E
FPATLETQEQDVDLVQKYLEKYYNLKNDGRQVEKRRNSGPVVEKLKQMQEFFGLKVTGKPDAETLKVMKQPRCGVPDVAQFVLTEGNPRWEQTHLTYRIENYTPDLPRADVDHAIEKAFQLWSNVTPLTFTKVSEGQADIMISFVRGDHRDNSPFDGPGGNLAHAFQPGPGIGGEAHFDEDERWTNNFREYNLHRVAAHELGHSLGLSHSTDIGALMYPSYTFSGDVQLAQDDIDGIQAIYGRSQNPVQPIGPQTPKACDSKLTFDAITTIRGEVMFFKDRFYMRTNPFYPEVELNFISVFWPQLPNGLEAAYEFADRDEVRFFKGNKYWAVQGQNVLHGYPKDIYSSFGFPRTVKHIDAALSEENTGKTYFFVANKYWRYDEYKRSMDPGYPKMIAHDFPGIGHKVDAVFMKDGFFYFFHGTRQYKFDPKTKRILTLQKANSWFNCRKN

SEQ ID NO: 2358 - protein, 450 aa, Artificial Sequence
  MMP-1 variant D175H
FPATLETQEQDVDLVQKYLEKYYNLKNDGRQVEKRRNSGPVVEKLKQMQEFFGLKVTGKPDAETLKVMKQPRCGVPDVAQFVLTEGNPRWEQTHLTYRIENYTPDLPRADVDHAIEKAFQLWSNVTPLTFTKVSEGQADIMISFVRGDHRDNSPFDGPGGNLAHAFQPGPGIGGHAHFDEDERWTNNFREYNLHRVAAHELGHSLGLSHSTDIGALMYPSYTFSGDVQLAQDDIDGIQAIYGRSQNPVQPIGPQTPKACDSKLTFDAITTIRGEVMFFKDRFYMRTNPFYPEVELNFISVFWPQLPNGLEAAYEFADRDEVRFFKGNKYWAVQGQNVLHGYPKDIYSSFGFPRTVKHIDAALSEENTGKTYFFVANKYWRYDEYKRSMDPGYPKMIAHDFPGIGHKVDAVFMKDGFFYFFHGTRQYKFDPKTKRILTLQKANSWFNCRKN

SEQ ID NO: 2359 - protein, 450 aa, Artificial Sequence
  MMP-1 variant D175K
FPATLETQEQDVDLVQKYLEKYYNLKNDGRQVEKRRNSGPVVEKLKQMQEFFGLKVTGKPDAETLKVMKQPRCGVPDVAQFVLTEGNPRWEQTHLTYRIENYTPDLPRADVDHAIEKAFQLWSNVTPLTFTKVSEGQADIMISFVRGDHRDNSPFDGPGGNLAHAFQPGPGIGGKAHFDEDERWTNNFREYNLHRVAAHELGHSLGLSHSTDIGALMYPSYTFSGDVQLAQDDIDGIQAIYGRSQNPVQPIGPQTPKACDSKLTFDAITTIRGEVMFFKDRFYMRTNPFYPEVELNFISVFWPQLPNGLEAAYEFADRDEVRFFKGNKYWAVQGQNVLHGYPKDIYSSFGFPRTVKHIDAALSEENTGKTYFFVANKYWRYDEYKRSMDPGYPKMIAHDFPGIGHKVDAVFMKDGFFYFFHGTRQYKFDPKTKRILTLQKANSWFNCRKN

SEQ ID NO: 2360 - protein, 450 aa, Artificial Sequence
  MMP-1 variant D175R
FPATLETQEQDVDLVQKYLEKYYNLKNDGRQVEKRRNSGPVVEKLKQMQEFFGLKVTGKPDAETLKVMKQPRCGVPDVAQFVLTEGNPRWEQTHLTYRIENYTPDLPRADVDHAIEKAFQLWSNVTPLTFTKVSEGQADIMISFVRGDHRDNSPFDGPGGNLAHAFQPGPGIGGRAHFDEDERWTNNFREYNLHRVAAHELGHSLGLSHSTDIGALMYPSYTFSGDVQLAQDDIDGIQAIYGRSQNPVQPIGPQTPKACDSKLTFDAITTIRGEVMFFKDRFYMRTNPFYPEVELNFISVFWPQLPNGLEAAYEFADRDEVRFFKGNKYWAVQGQNVLHGYPKDIYSSFGFPRTVKHIDAALSEENTGKTYFFVANKYWRYDEYKRSMDPGYPKMIAHDFPGIGHKVDAVFMKDGFFYFFHGTRQYKFDPKTKRILTLQKANSWFNCRKN

SEQ ID NO: 2361 - protein, 450 aa, Artificial Sequence
  MMP-1 variant D175C
FPATLETQEQDVDLVQKYLEKYYNLKNDGRQVEKRRNSGPVVEKLKQMQEFFGLKVTGKPDAETLKVMKQPRCGVPDVAQFVLTEGNPRWEQTHLTYRIENYTPDLPRADVDHAIEKAFQLWSNVTPLTFTKVSEGQADIMISFVRGDHRDNSPFDGPGGNLAHAFQPGPGIGGCAHFDEDERWTNNFREYNLHRVAAHELGHSLGLSHSTDIGALMYPSYTFSGDVQLAQDDIDGIQAIYGRSQNPVQPIGPQTPKACDSKLTFDAITTIRGEVMFFKDRFYMRTNPFYPEVELNFISVFWPQLPNGLEAAYEFADRDEVRFFKGNKYWAVQGQNVLHGYPKDIYSSFGFPRTVKHIDAALSEENTGKTYFFVANKYWRYDEYKRSMDPGYPKMIAHDFPGIGHKVDAVFMKDGFFYFFHGTRQYKFDPKTKRILTLQKANSWFNCRKN

SEQ ID NO: 2362 - protein, 450 aa, Artificial Sequence
  MMP-1 variant D175N
FPATLETQEQDVDLVQKYLEKYYNLKNDGRQVEKRRNSGPVVEKLKQMQEFFGLKVTGKPDAETLKVMKQPRCGVPDVAQFVLTEGNPRWEQTHLTYRIENYTPDLPRADVDHAIEKAFQLWSNVTPLTFTKVSEGQADIMISFVRGDHRDNSPFDGPGGNLAHAFQPGPGIGGNAHFDEDERWTNNFREYNLHRVAAHELGHSLGLSHSTDIGALMYPSYTFSGDVQLAQDDIDGIQAIYGRSQNPVQPIGPQTPKACDSKLTFDAITTIRGEVMFFKDRFYMRTNPFYPEVELNFISVFWPQLPNGLEAAYEFADRDEVRFFKGNKYWAVQGQNVLHGYPKDIYSSFGFPRTVKHIDAALSEENTGKTYFFVANKYWRYDEYKRSMDPGYPKMIAHDFPGIGHKVDAVFMKDGFFYFFHGTRQYKFDPKTKRILTLQKANSWFNCRKN

SEQ ID NO: 2363 - protein, 450 aa, Artificial Sequence
  MMP-1 variant D175Q
FPATLETQEQDVDLVQKYLEKYYNLKNDGRQVEKRRNSGPVVEKLKQMQEFFGLKVTGKPDAETLKVMKQPRCGVPDVAQFVLTEGNPRWEQTHLTYRIENYTPDLPRADVDHAIEKAFQLWSNVTPLTFTKVSEGQADIMISFVRGDHRDNSPFDGPGGNLAHAFQPGPGIGGQAHFDEDERWTNNFREYNLHRVAAHELGHSLGLSHSTDIGALMYPSYTFSGDVQLAQDDIDGIQAIYGRSQNPVQPIGPQTPKACDSKLTFDAITTIRGEVMFFKDRFYMRTNPFYPEVELNFISVFWPQLPNGLEAAYEFADRDEVRFFKGNKYWAVQGQNVLHGYPKDIYSSFGFPRTVKHIDAALSEENTGKTYFFVANKYWRYDEYKRSMDPGYPKMIAHDFPGIGHKVDAVFMKDGFFYFFHGTRQYKFDPKTKRILTLQKANSWFNCRKN

SEQ ID NO: 2364 - protein, 450 aa, Artificial Sequence
  MMP-1 variant D175T
FPATLETQEQDVDLVQKYLEKYYNLKNDGRQVEKRRNSGPVVEKLKQMQEFFGLKVTGKPDAETLKVMKQPRCGVPDVAQFVLTEGNPRWEQTHLTYRIENYTPDLPRADVDHAIEKAFQLWSNVTPLTFTKVSEGQADIMISFVRGDHRDNSPFDGPGGNLAHAFQPGPGIGGTAHFDEDERWTNNFREYNLHRVAAHELGHSLGLSHSTDIGALMYPSYTFSGDVQLAQDDIDGIQAIYGRSQNPVQPIGPQTPKACDSKLTFDAITTIRGEVMFFKDRFYMRTNPFYPEVELNFISVFWPQLPNGLEAAYEFADRDEVRFFKGNKYWAVQGQNVLHGYPKDIYSSFGFPRTVKHIDAALSEENTGKTYFFVANKYWRYDEYKRSMDPGYPKMIAHDFPGIGHKVDAVFMKDGFFYFFHGTRQYKFDPKTKRILTLQKANSWFNCRKN

SEQ ID NO: 2365 - protein, 450 aa, Artificial Sequence
  MMP-1 variant D175Y
FPATLETQEQDVDLVQKYLEKYYNLKNDGRQVEKRRNSGPVVEKLKQMQEFFGLKVTGKPDAETLKVMKQPRCGVPDVAQFVLTEGNPRWEQTHLTYRIENYTPDLPRADVDHAIEKAFQLWSNVTPLTFTKVSEGQADIMISFVRGDHRDNSPFDGPGGNLAHAFQPGPGIGGYAHFDEDERWTNNFREYNLHRVAAHELGHSLGLSHSTDIGALMYPSYTFSGDVQLAQDDIDGIQAIYGRSQNPVQPIGPQTPKACDSKLTFDAITTIRGEVMFFKDRFYMRTNPFYPEVELNFISVFWPQLPNGLEAAYEFADRDEVRFFKGNKYWAVQGQNVLHGYPKDIYSSFGFPRTVKHIDAALSEENTGKTYFFVANKYWRYDEYKRSMDPGYPKMIAHDFPGIGHKVDAVFMKDGFFYFFHGTRQYKFDPKTKRILTLQKANSWFNCRKN

SEQ ID NO: 2366 - protein, 450 aa, Artificial Sequence
  MMP-1 variant D175S
FPATLETQEQDVDLVQKYLEKYYNLKNDGRQVEKRRNSGPVVEKLKQMQEFFGLKVTGKPDAETLKVMKQPRCGVPDVAQFVLTEGNPRWEQTHLTYRIENYTPDLPRADVDHAIEKAFQLWSNVTPLTFTKVSEGQADIMISFVRGDHRDNSPFDGPGGNLAHAFQPGPGIGGSAHFDEDERWTNNFREYNLHRVAAHELGHSLGLSHSTDIGALMYPSYTFSGDVQLAQDDIDGIQAIYGRSQNPVQPIGPQTPKACDSKLTFDAITTIRGEVMFFKDRFYMRTNPFYPEVELNFISVFWPQLPNGLEAAYEFADRDEVRFFKGNKYWAVQGQNVLHGYPKDIYSSFGFPRTVKHIDAALSEENTGKTYFFVANKYWRYDEYKRSMDPGYPKMIAHDFPGIGHKVDAVFMKDGFFYFFHGTRQYKFDPKTKRILTLQKANSWFNCRKN

SEQ ID NO: 2367 - protein, 450 aa, Artificial Sequence
  MMP-1 variant D175G
FPATLETQEQDVDLVQKYLEKYYNLKNDGRQVEKRRNSGPVVEKLKQMQEFFGLKVTGKPDAETLKVMKQPRCGVPDVAQFVLTEGNPRWEQTHLTYRIENYTPDLPRADVDHAIEKAFQLWSNVTPLTFTKVSEGQADIMISFVRGDHRDNSPFDGPGGNLAHAFQPGPGIGGGAHFDEDERWTNNFREYNLHRVAAHELGHSLGLSHSTDIGALMYPSYTFSGDVQLAQDDIDGIQAIYGRSQNPVQPIGPQTPKACDSKLTFDAITTIRGEVMFFKDRFYMRTNPFYPEVELNFISVFWPQLPNGLEAAYEFADRDEVRFFKGNKYWAVQGQNVLHGYPKDIYSSFGFPRTVKHIDAALSEENTGKTYFFVANKYWRYDEYKRSMDPGYPKMIAHDFPGIGHKVDAVFMKDGFFYFFHGTRQYKFDPKTKRILTLQKANSWFNCRKN

SEQ ID NO: 2368 - protein, 450 aa, Artificial Sequence
  MMP-1 variant D175F
FPATLETQEQDVDLVQKYLEKYYNLKNDGRQVEKRRNSGPVVEKLKQMQEFFGLKVTGKPDAETLKVMKQPRCGVPDVAQFVLTEGNPRWEQTHLTYRIENYTPDLPRADVDHAIEKAFQLWSNVTPLTFTKVSEGQADIMISFVRGDHRDNSPFDGPGGNLAHAFQPGPGIGGFAHFDEDERWTNNFREYNLHRVAAHELGHSLGLSHSTDIGALMYPSYTFSGDVQLAQDDIDGIQAIYGRSQNPVQPIGPQTPKACDSKLTFDAITTIRGEVMFFKDRFYMRTNPFYPEVELNFISVFWPQLPNGLEAAYEFADRDEVRFFKGNKYWAVQGQNVLHGYPKDIYSSFGFPRTVKHIDAALSEENTGKTYFFVANKYWRYDEYKRSMDPGYPKMIAHDFPGIGHKVDAVFMKDGFFYFFHGTRQYKFDPKTKRILTLQKANSWFNCRKN

SEQ ID NO: 2369 - protein, 450 aa, Artificial Sequence
  MMP-1 variant D175M
FPATLETQEQDVDLVQKYLEKYYNLKNDGRQVEKRRNSGPVVEKLKQMQEFFGLKVTGKPDAETLKVMKQPRCGVPDVAQFVLTEGNPRWEQTHLTYRIENYTPDLPRADVDHAIEKAFQLWSNVTPLTFTKVSEGQADIMISFVRGDHRDNSPFDGPGGNLAHAFQPGPGIGGMAHFDEDERWTNNFREYNLHRVAAHELGHSLGLSHSTDIGALMYPSYTFSGDVQLAQDDIDGIQAIYGRSQNPVQPIGPQTPKACDSKLTFDAITTIRGEVMFFKDRFYMRTNPFYPEVELNFISVFWPQLPNGLEAAYEFADRDEVRFFKGNKYWAVQGQNVLHGYPKDIYSSFGFPRTVKHIDAALSEENTGKTYFFVANKYWRYDEYKRSMDPGYPKMIAHDFPGIGHKVDAVFMKDGFFYFFHGTRQYKFDPKTKRILTLQKANSWFNCRKN

SEQ ID NO: 2370 - protein, 450 aa, Artificial Sequence
  MMP-1 variant D175W
FPATLETQEQDVDLVQKYLEKYYNLKNDGRQVEKRRNSGPVVEKLKQMQEFFGLKVTGKPDAETLKVMKQPRCGVPDVAQFVLTEGNPRWEQTHLTYRIENYTPDLPRADVDHAIEKAFQLWSNVTPLTFTKVSEGQADIMISFVRGDHRDNSPFDGPGGNLAHAFQPGPGIGGWAHFDEDERWTNNFREYNLHRVAAHELGHSLGLSHSTDIGALMYPSYTFSGDVQLAQDDIDGIQAIYGRSQNPVQPIGPQTPKACDSKLTFDAITTIRGEVMFFKDRFYMRTNPFYPEVELNFISVFWPQLPNGLEAAYEFADRDEVRFFKGNKYWAVQGQNVLHGYPKDIYSSFGFPRTVKHIDAALSEENTGKTYFFVANKYWRYDEYKRSMDPGYPKMIAHDFPGIGHKVDAVFMKDGFFYFFHGTRQYKFDPKTKRILTLQKANSWFNCRKN

SEQ ID NO: 2371 - protein, 450 aa, Artificial Sequence
  MMP-1 variant D175I
FPATLETQEQDVDLVQKYLEKYYNLKNDGRQVEKRRNSGPVVEKLKQMQEFFGLKVTGKPDAETLKVMKQPRCGVPDVAQFVLTEGNPRWEQTHLTYRIENYTPDLPRADVDHAIEKAFQLWSNVTPLTFTKVSEGQADIMISFVRGDHRDNSPFDGPGGNLAHAFQPGPGIGGIAHFDEDERWTNNFREYNLHRVAAHELGHSLGLSHSTDIGALMYPSYTFSGDVQLAQDDIDGIQAIYGRSQNPVQPIGPQTPKACDSKLTFDAITTIRGEVMFFKDRFYMRTNPFYPEVELNFISVFWPQLPNGLEAAYEFADRDEVRFFKGNKYWAVQGQNVLHGYPKDIYSSFGFPRTVKHIDAALSEENTGKTYFFVANKYWRYDEYKRSMDPGYPKMIAHDFPGIGHKVDAVFMKDGFFYFFHGTRQYKFDPKTKRILTLQKANSWFNCRKN

SEQ ID NO: 2372 - protein, 450 aa, Artificial Sequence
  MMP-1 variant D175V
FPATLETQEQDVDLVQKYLEKYYNLKNDGRQVEKRRNSGPVVEKLKQMQEFFGLKVTGKPDAETLKVMKQPRCGVPDVAQFVLTEGNPRWEQTHLTYRIENYTPDLPRADVDHAIEKAFQLWSNVTPLTFTKVSEGQADIMISFVRGDHRDNSPFDGPGGNLAHAFQPGPGIGGVAHFDEDERWTNNFREYNLHRVAAHELGHSLGLSHSTDIGALMYPSYTFSGDVQLAQDDIDGIQAIYGRSQNPVQPIGPQTPKACDSKLTFDAITTIRGEVMFFKDRFYMRTNPFYPEVELNFISVFWPQLPNGLEAAYEFADRDEVRFFKGNKYWAVQGQNVLHGYPKDIYSSFGFPRTVKHIDAALSEENTGKTYFFVANKYWRYDEYKRSMDPGYPKMIAHDFPGIGHKVDAVFMKDGFFYFFHGTRQYKFDPKTKRILTLQKANSWFNCRKN

SEQ ID NO: 2373 - protein, 450 aa, Artificial Sequence
  MMP-1 variant D175L
FPATLETQEQDVDLVQKYLEKYYNLKNDGRQVEKRRNSGPVVEKLKQMQEFFGLKVTGKPDAETLKVMKQPRCGVPDVAQFVLTEGNPRWEQTHLTYRIENYTPDLPRADVDHAIEKAFQLWSNVTPLTFTKVSEGQADIMISFVRGDHRDNSPFDGPGGNLAHAFQPGPGIGGLAHFDEDERWTNNFREYNLHRVAAHELGHSLGLSHSTDIGALMYPSYTFSGDVQLAQDDIDGIQAIYGRSQNPVQPIGPQTPKACDSKLTFDAITTIRGEVMFFKDRFYMRTNPFYPEVELNFISVFWPQLPNGLEAAYEFADRDEVRFFKGNKYWAVQGQNVLHGYPKDIYSSFGFPRTVKHIDAALSEENTGKTYFFVANKYWRYDEYKRSMDPGYPKMIAHDFPGIGHKVDAVFMKDGFFYFFHGTRQYKFDPKTKRILTLQKANSWFNCRKN

SEQ ID NO: 2374 - protein, 450 aa, Artificial Sequence
  MMP-1 variant D175A
FPATLETQEQDVDLVQKYLEKYYNLKNDGRQVEKRRNSGPVVEKLKQMQEFFGLKVTGKPDAETLKVMKQPRCGVPDVAQFVLTEGNPRWEQTHLTYRIENYTPDLPRADVDHAIEKAFQLWSNVTPLTFTKVSEGQADIMISFVRGDHRDNSPFDGPGGNLAHAFQPGPGIGGAAHFDEDERWTNNFREYNLHRVAAHELGHSLGLSHSTDIGALMYPSYTFSGDVQLAQDDIDGIQAIYGRSQNPVQPIGPQTPKACDSKLTFDAITTIRGEVMFFKDRFYMRTNPFYPEVELNFISVFWPQLPNGLEAAYEFADRDEVRFFKGNKYWAVQGQNVLHGYPKDIYSSFGFPRTVKHIDAALSEENTGKTYFFVANKYWRYDEYKRSMDPGYPKMIAHDFPGIGHKVDAVFMKDGFFYFFHGTRQYKFDPKTKRILTLQKANSWFNCRKN

SEQ ID NO: 2375 - protein, 450 aa, Artificial Sequence
  MMP-1 variant D175P
FPATLETQEQDVDLVQKYLEKYYNLKNDGRQVEKRRNSGPVVEKLKQMQEFFGLKVTGKPDAETLKVMKQPRCGVPDVAQFVLTEGNPRWEQTHLTYRIENYTPDLPRADVDHAIEKAFQLWSNVTPLTFTKVSEGQADIMISFVRGDHRDNSPFDGPGGNLAHAFQPGPGIGGPAHFDEDERWTNNFREYNLHRVAAHELGHSLGLSHSTDIGALMYPSYTFSGDVQLAQDDIDGIQAIYGRSQNPVQPIGPQTPKACDSKLTFDAITTIRGEVMFFKDRFYMRTNPFYPEVELNFISVFWPQLPNGLEAAYEFADRDEVRFFKGNKYWAVQGQNVLHGYPKDIYSSFGFPRTVKHIDAALSEENTGKTYFFVANKYWRYDEYKRSMDPGYPKMIAHDFPGIGHKVDAVFMKDGFFYFFHGTRQYKFDPKTKRILTLQKANSWFNCRKN

SEQ ID NO: 2376 - protein, 450 aa, Artificial Sequence
  MMP-1 variant H177D
FPATLETQEQDVDLVQKYLEKYYNLKNDGRQVEKRRNSGPVVEKLKQMQEFFGLKVTGKPDAETLKVMKQPRCGVPDVAQFVLTEGNPRWEQTHLTYRIENYTPDLPRADVDHAIEKAFQLWSNVTPLTFTKVSEGQADIMISFVRGDHRDNSPFDGPGGNLAHAFQPGPGIGGDADFDEDERWTNNFREYNLHRVAAHELGHSLGLSHSTDIGALMYPSYTFSGDVQLAQDDIDGIQAIYGRSQNPVQPIGPQTPKACDSKLTFDAITTIRGEVMFFKDRFYMRTNPFYPEVELNFISVFWPQLPNGLEAAYEFADRDEVRFFKGNKYWAVQGQNVLHGYPKDIYSSFGFPRTVKHIDAALSEENTGKTYFFVANKYWRYDEYKRSMDPGYPKMIAHDFPGIGHKVDAVFMKDGFFYFFHGTRQYKFDPKTKRILTLQKANSWFNCRKN

SEQ ID NO: 2377 - protein, 450 aa, Artificial Sequence
  MMP-1 variant H177E
FPATLETQEQDVDLVQKYLEKYYNLKNDGRQVEKRRNSGPVVEKLKQMQEFFGLKVTGKPDAETLKVMKQPRCGVPDVAQFVLTEGNPRWEQTHLTYRIENYTPDLPRADVDHAIEKAFQLWSNVTPLTFTKVSEGQADIMISFVRGDHRDNSPFDGPGGNLAHAFQPGPGIGGDAEFDEDERWTNNFREYNLHRVAAHELGHSLGLSHSTDIGALMYPSYTFSGDVQLAQDDIDGIQAIYGRSQNPVQPIGPQTPKACDSKLTFDAITTIRGEVMFFKDRFYMRTNPFYPEVELNFISVFWPQLPNGLEAAYEFADRDEVRFFKGNKYWAVQGQNVLHGYPKDIYSSFGFPRTVKHIDAALSEENTGKTYFFVANKYWRYDEYKRSMDPGYPKMIAHDFPGIGHKVDAVFMKDGFFYFFHGTRQYKFDPKTKRILTLQKANSWFNCRKN

SEQ ID NO: 2378 - protein, 450 aa, Artificial Sequence
  MMP-1 variant H177K
FPATLETQEQDVDLVQKYLEKYYNLKNDGRQVEKRRNSGPVVEKLKQMQEFFGLKVTGKPDAETLKVMKQPRCGVPDVAQFVLTEGNPRWEQTHLTYRIENYTPDLPRADVDHAIEKAFQLWSNVTPLTFTKVSEGQADIMISFVRGDHRDNSPFDGPGGNLAHAFQPGPGIGGDAKFDEDERWTNNFREYNLHRVAAHELGHSLGLSHSTDIGALMYPSYTFSGDVQLAQDDIDGIQAIYGRSQNPVQPIGPQTPKACDSKLTFDAITTIRGEVMFFKDRFYMRTNPFYPEVELNFISVFWPQLPNGLEAAYEFADRDEVRFFKGNKYWAVQGQNVLHGYPKDIYSSFGFPRTVKHIDAALSEENTGKTYFFVANKYWRYDEYKRSMDPGYPKMIAHDFPGIGHKVDAVFMKDGFFYFFHGTRQYKFDPKTKRILTLQKANSWFNCRKN

SEQ ID NO: 2379 - protein, 450 aa, Artificial Sequence
  MMP-1 variant H177R
FPATLETQEQDVDLVQKYLEKYYNLKNDGRQVEKRRNSGPVVEKLKQMQEFFGLKVTGKPDAETLKVMKQPRCGVPDVAQFVLTEGNPRWEQTHLTYRIENYTPDLPRADVDHAIEKAFQLWSNVTPLTFTKVSEGQADIMISFVRGDHRDNSPFDGPGGNLAHAFQPGPGIGGDARFDEDERWTNNFREYNLHRVAAHELGHSLGLSHSTDIGALMYPSYTFSGDVQLAQDDIDGIQAIYGRSQNPVQPIGPQTPKACDSKLTFDAITTIRGEVMFFKDRFYMRTNPFYPEVELNFISVFWPQLPNGLEAAYEFADRDEVRFFKGNKYWAVQGQNVLHGYPKDIYSSFGFPRTVKHIDAALSEENTGKTYFFVANKYWRYDEYKRSMDPGYPKMIAHDFPGIGHKVDAVFMKDGFFYFFHGTRQYKFDPKTKRILTLQKANSWFNCRKN

SEQ ID NO: 2380 - protein, 450 aa, Artificial Sequence
  MMP-1 variant H177C
FPATLETQEQDVDLVQKYLEKYYNLKNDGRQVEKRRNSGPVVEKLKQMQEFFGLKVTGKPDAETLKVMKQPRCGVPDVAQFVLTEGNPRWEQTHLTYRIENYTPDLPRADVDHAIEKAFQLWSNVTPLTFTKVSEGQADIMISFVRGDHRDNSPFDGPGGNLAHAFQPGPGIGGDACFDEDERWTNNFREYNLHRVAAHELGHSLGLSHSTDIGALMYPSYTFSGDVQLAQDDIDGIQAIYGRSQNPVQPIGPQTPKACDSKLTFDAITTIRGEVMFFKDRFYMRTNPFYPEVELNFISVFWPQLPNGLEAAYEFADRDEVRFFKGNKYWAVQGQNVLHGYPKDIYSSFGFPRTVKHIDAALSEENTGKTYFFVANKYWRYDEYKRSMDPGYPKMIAHDFPGIGHKVDAVFMKDGFFYFFHGTRQYKFDPKTKRILTLQKANSWFNCRKN

SEQ ID NO: 2381 - protein, 450 aa, Artificial Sequence
  MMP-1 variant H177N
FPATLETQEQDVDLVQKYLEKYYNLKNDGRQVEKRRNSGPVVEKLKQMQEFFGLKVTGKPDAETLKVMKQPRCGVPDVAQFVLTEGNPRWEQTHLTYRIENYTPDLPRADVDHAIEKAFQLWSNVTPLTFTKVSEGQADIMISFVRGDHRDNSPFDGPGGNLAHAFQPGPGIGGDANFDEDERWTNNFREYNLHRVAAHELGHSLGLSHSTDIGALMYPSYTFSGDVQLAQDDIDGIQAIYGRSQNPVQPIGPQTPKACDSKLTFDAITTIRGEVMFFKDRFYMRTNPFYPEVELNFISVFWPQLPNGLEAAYEFADRDEVRFFKGNKYWAVQGQNVLHGYPKDIYSSFGFPRTVKHIDAALSEENTGKTYFFVANKYWRYDEYKRSMDPGYPKMIAHDFPGIGHKVDAVFMKDGFFYFFHGTRQYKFDPKTKRILTLQKANSWFNCRKN

SEQ ID NO: 2382 - protein, 450 aa, Artificial Sequence; identical to SEQ ID NO: 786
  MMP-1 variant H177Q

SEQ ID NO: 2383 - protein, 450 aa, Artificial Sequence
  MMP-1 variant H177T
FPATLETQEQDVDLVQKYLEKYYNLKNDGRQVEKRRNSGPVVEKLKQMQEFFGLKVTGKPDAETLKVMKQPRCGVPDVAQFVLTEGNPRWEQTHLTYRIENYTPDLPRADVDHAIEKAFQLWSNVTPLTFTKVSEGQADIMISFVRGDHRDNSPFDGPGGNLAHAFQPGPGIGGDATFDEDERWTNNFREYNLHRVAAHELGHSLGLSHSTDIGALMYPSYTFSGDVQLAQDDIDGIQAIYGRSQNPVQPIGPQTPKACDSKLTFDAITTIRGEVMFFKDRFYMRTNPFYPEVELNFISVFWPQLPNGLEAAYEFADRDEVRFFKGNKYWAVQGQNVLHGYPKDIYSSFGFPRTVKHIDAALSEENTGKTYFFVANKYWRYDEYKRSMDPGYPKMIAHDFPGIGHKVDAVFMKDGFFYFFHGTRQYKFDPKTKRILTLQKANSWFNCRKN

SEQ ID NO: 2384 - protein, 450 aa, Artificial Sequence
  MMP-1 variant H177Y
FPATLETQEQDVDLVQKYLEKYYNLKNDGRQVEKRRNSGPVVEKLKQMQEFFGLKVTGKPDAETLKVMKQPRCGVPDVAQFVLTEGNPRWEQTHLTYRIENYTPDLPRADVDHAIEKAFQLWSNVTPLTFTKVSEGQADIMISFVRGDHRDNSPFDGPGGNLAHAFQPGPGIGGDAYFDEDERWTNNFREYNLHRVAAHELGHSLGLSHSTDIGALMYPSYTFSGDVQLAQDDIDGIQAIYGRSQNPVQPIGPQTPKACDSKLTFDAITTIRGEVMFFKDRFYMRTNPFYPEVELNFISVFWPQLPNGLEAAYEFADRDEVRFFKGNKYWAVQGQNVLHGYPKDIYSSFGFPRTVKHIDAALSEENTGKTYFFVANKYWRYDEYKRSMDPGYPKMIAHDFPGIGHKVDAVFMKDGFFYFFHGTRQYKFDPKTKRILTLQKANSWFNCRKN

SEQ ID NO: 2385 - protein, 450 aa, Artificial Sequence
  MMP-1 variant H177S
FPATLETQEQDVDLVQKYLEKYYNLKNDGRQVEKRRNSGPVVEKLKQMQEFFGLKVTGKPDAETLKVMKQPRCGVPDVAQFVLTEGNPRWEQTHLTYRIENYTPDLPRADVDHAIEKAFQLWSNVTPLTFTKVSEGQADIMISFVRGDHRDNSPFDGPGGNLAHAFQPGPGIGGDASFDEDERWTNNFREYNLHRVAAHELGHSLGLSHSTDIGALMYPSYTFSGDVQLAQDDIDGIQAIYGRSQNPVQPIGPQTPKACDSKLTFDAITTIRGEVMFFKDRFYMRTNPFYPEVELNFISVFWPQLPNGLEAAYEFADRDEVRFFKGNKYWAVQGQNVLHGYPKDIYSSFGFPRTVKHIDAALSEENTGKTYFFVANKYWRYDEYKRSMDPGYPKMIAHDFPGIGHKVDAVFMKDGFFYFFHGTRQYKFDPKTKRILTLQKANSWFNCRKN

SEQ ID NO: 2386 - protein, 450 aa, Artificial Sequence
  MMP-1 variant H177G
FPATLETQEQDVDLVQKYLEKYYNLKNDGRQVEKRRNSGPVVEKLKQMQEFFGLKVTGKPDAETLKVMKQPRCGVPDVAQFVLTEGNPRWEQTHLTYRIENYTPDLPRADVDHAIEKAFQLWSNVTPLTFTKVSEGQADIMISFVRGDHRDNSPFDGPGGNLAHAFQPGPGIGGDAGFDEDERWTNNFREYNLHRVAAHELGHSLGLSHSTDIGALMYPSYTFSGDVQLAQDDIDGIQAIYGRSQNPVQPIGPQTPKACDSKLTFDAITTIRGEVMFFKDRFYMRTNPFYPEVELNFISVFWPQLPNGLEAAYEFADRDEVRFFKGNKYWAVQGQNVLHGYPKDIYSSFGFPRTVKHIDAALSEENTGKTYFFVANKYWRYDEYKRSMDPGYPKMIAHDFPGIGHKVDAVFMKDGFFYFFHGTRQYKFDPKTKRILTLQKANSWFNCRKN

SEQ ID NO: 2387 - protein, 450 aa, Artificial Sequence
  MMP-1 variant H177F
FPATLETQEQDVDLVQKYLEKYYNLKNDGRQVEKRRNSGPVVEKLKQMQEFFGLKVTGKPDAETLKVMKQPRCGVPDVAQFVLTEGNPRWEQTHLTYRIENYTPDLPRADVDHAIEKAFQLWSNVTPLTFTKVSEGQADIMISFVRGDHRDNSPFDGPGGNLAHAFQPGPGIGGDAFFDEDERWTNNFREYNLHRVAAHELGHSLGLSHSTDIGALMYPSYTFSGDVQLAQDDIDGIQAIYGRSQNPVQPIGPQTPKACDSKLTFDAITTIRGEVMFFKDRFYMRTNPFYPEVELNFISVFWPQLPNGLEAAYEFADRDEVRFFKGNKYWAVQGQNVLHGYPKDIYSSFGFPRTVKHIDAALSEENTGKTYFFVANKYWRYDEYKRSMDPGYPKMIAHDFPGIGHKVDAVFMKDGFFYFFHGTRQYKFDPKTKRILTLQKANSWFNCRKN

SEQ ID NO: 2388 - protein, 450 aa, Artificial Sequence
  MMP-1 variant H177M
FPATLETQEQDVDLVQKYLEKYYNLKNDGRQVEKRRNSGPVVEKLKQMQEFFGLKVTGKPDAETLKVMKQPRCGVPDVAQFVLTEGNPRWEQTHLTYRIENYTPDLPRADVDHAIEKAFQLWSNVTPLTFTKVSEGQADIMISFVRGDHRDNSPFDGPGGNLAHAFQPGPGIGGDAMFDEDERWTNNFREYNLHRVAAHELGHSLGLSHSTDIGALMYPSYTFSGDVQLAQDDIDGIQAIYGRSQNPVQPIGPQTPKACDSKLTFDAITTIRGEVMFFKDRFYMRTNPFYPEVELNFISVFWPQLPNGLEAAYEFADRDEVRFFKGNKYWAVQGQNVLHGYPKDIYSSFGFPRTVKHIDAALSEENTGKTYFFVANKYWRYDEYKRSMDPGYPKMIAHDFPGIGHKVDAVFMKDGFFYFFHGTRQYKFDPKTKRILTLQKANSWFNCRKN

SEQ ID NO: 2389 - protein, 450 aa, Artificial Sequence
  MMP-1 variant H177W
FPATLETQEQDVDLVQKYLEKYYNLKNDGRQVEKRRNSGPVVEKLKQMQEFFGLKVTGKPDAETLKVMKQPRCGVPDVAQFVLTEGNPRWEQTHLTYRIENYTPDLPRADVDHAIEKAFQLWSNVTPLTFTKVSEGQADIMISFVRGDHRDNSPFDGPGGNLAHAFQPGPGIGGDAWFDEDERWTNNFREYNLHRVAAHELGHSLGLSHSTDIGALMYPSYTFSGDVQLAQDDIDGIQAIYGRSQNPVQPIGPQTPKACDSKLTFDAITTIRGEVMFFKDRFYMRTNPFYPEVELNFISVFWPQLPNGLEAAYEFADRDEVRFFKGNKYWAVQGQNVLHGYPKDIYSSFGFPRTVKHIDAALSEENTGKTYFFVANKYWRYDEYKRSMDPGYPKMIAHDFPGIGHKVDAVFMKDGFFYFFHGTRQYKFDPKTKRILTLQKANSWFNCRKN

SEQ ID NO: 2390 - protein, 450 aa, Artificial Sequence
  MMP-1 variant H177I
FPATLETQEQDVDLVQKYLEKYYNLKNDGRQVEKRRNSGPVVEKLKQMQEFFGLKVTGKPDAETLKVMKQPRCGVPDVAQFVLTEGNPRWEQTHLTYRIENYTPDLPRADVDHAIEKAFQLWSNVTPLTFTKVSEGQADIMISFVRGDHRDNSPFDGPGGNLAHAFQPGPGIGGDAIFDEDERWTNNFREYNLHRVAAHELGHSLGLSHSTDIGALMYPSYTFSGDVQLAQDDIDGIQAIYGRSQNPVQPIGPQTPKACDSKLTFDAITTIRGEVMFFKDRFYMRTNPFYPEVELNFISVFWPQLPNGLEAAYEFADRDEVRFFKGNKYWAVQGQNVLHGYPKDIYSSFGFPRTVKHIDAALSEENTGKTYFFVANKYWRYDEYKRSMDPGYPKMIAHDFPGIGHKVDAVFMKDGFFYFFHGTRQYKFDPKTKRILTLQKANSWFNCRKN

SEQ ID NO: 2391 - protein, 450 aa, Artificial Sequence
  MMP-1 variant H177V
FPATLETQEQDVDLVQKYLEKYYNLKNDGRQVEKRRNSGPVVEKLKQMQEFFGLKVTGKPDAETLKVMKQPRCGVPDVAQFVLTEGNPRWEQTHLTYRIENYTPDLPRADVDHAIEKAFQLWSNVTPLTFTKVSEGQADIMISFVRGDHRDNSPFDGPGGNLAHAFQPGPGIGGDAVFDEDERWTNNFREYNLHRVAAHELGHSLGLSHSTDIGALMYPSYTFSGDVQLAQDDIDGIQAIYGRSQNPVQPIGPQTPKACDSKLTFDAITTIRGEVMFFKDRFYMRTNPFYPEVELNFISVFWPQLPNGLEAAYEFADRDEVRFFKGNKYWAVQGQNVLHGYPKDIYSSFGFPRTVKHIDAALSEENTGKTYFFVANKYWRYDEYKRSMDPGYPKMIAHDFPGIGHKVDAVFMKDGFFYFFHGTRQYKFDPKTKRILTLQKANSWFNCRKN

SEQ ID NO: 2392 - protein, 450 aa, Artificial Sequence
  MMP-1 variant H177L
FPATLETQEQDVDLVQKYLEKYYNLKNDGRQVEKRRNSGPVVEKLKQMQEFFGLKVTGKPDAETLKVMKQPRCGVPDVAQFVLTEGNPRWEQTHLTYRIENYTPDLPRADVDHAIEKAFQLWSNVTPLTFTKVSEGQADIMISFVRGDHRDNSPFDGPGGNLAHAFQPGPGIGGDALFDEDERWTNNFREYNLHRVAAHELGHSLGLSHSTDIGALMYPSYTFSGDVQLAQDDIDGIQAIYGRSQNPVQPIGPQTPKACDSKLTFDAITTIRGEVMFFKDRFYMRTNPFYPEVELNFISVFWPQLPNGLEAAYEFADRDEVRFFKGNKYWAVQGQNVLHGYPKDIYSSFGFPRTVKHIDAALSEENTGKTYFFVANKYWRYDEYKRSMDPGYPKMIAHDFPGIGHKVDAVFMKDGFFYFFHGTRQYKFDPKTKRILTLQKANSWFNCRKN

SEQ ID NO: 2393 - protein, 450 aa, Artificial Sequence
  MMP-1 variant H177A
FPATLETQEQDVDLVQKYLEKYYNLKNDGRQVEKRRNSGPVVEKLKQMQEFFGLKVTGKPDAETLKVMKQPRCGVPDVAQFVLTEGNPRWEQTHLTYRIENYTPDLPRADVDHAIEKAFQLWSNVTPLTFTKVSEGQADIMISFVRGDHRDNSPFDGPGGNLAHAFQPGPGIGGDAAFDEDERWTNNFREYNLHRVAAHELGHSLGLSHSTDIGALMYPSYTFSGDVQLAQDDIDGIQAIYGRSQNPVQPIGPQTPKACDSKLTFDAITTIRGEVMFFKDRFYMRTNPFYPEVELNFISVFWPQLPNGLEAAYEFADRDEVRFFKGNKYWAVQGQNVLHGYPKDIYSSFGFPRTVKHIDAALSEENTGKTYFFVANKYWRYDEYKRSMDPGYPKMIAHDFPGIGHKVDAVFMKDGFFYFFHGTRQYKFDPKTKRILTLQKANSWFNCRKN

SEQ ID NO: 2394 - protein, 450 aa, Artificial Sequence
  MMP-1 variant H177P
FPATLETQEQDVDLVQKYLEKYYNLKNDGRQVEKRRNSGPVVEKLKQMQEFFGLKVTGKPDAETLKVMKQPRCGVPDVAQFVLTEGNPRWEQTHLTYRIENYTPDLPRADVDHAIEKAFQLWSNVTPLTFTKVSEGQADIMISFVRGDHRDNSPFDGPGGNLAHAFQPGPGIGGDAPFDEDERWTNNFREYNLHRVAAHELGHSLGLSHSTDIGALMYPSYTFSGDVQLAQDDIDGIQAIYGRSQNPVQPIGPQTPKACDSKLTFDAITTIRGEVMFFKDRFYMRTNPFYPEVELNFISVFWPQLPNGLEAAYEFADRDEVRFFKGNKYWAVQGQNVLHGYPKDIYSSFGFPRTVKHIDAALSEENTGKTYFFVANKYWRYDEYKRSMDPGYPKMIAHDFPGIGHKVDAVFMKDGFFYFFHGTRQYKFDPKTKRILTLQKANSWFNCRKN

SEQ ID NO: 2395 - protein, 450 aa, Artificial Sequence
  MMP-1 variant F178D
FPATLETQEQDVDLVQKYLEKYYNLKNDGRQVEKRRNSGPVVEKLKQMQEFFGLKVTGKPDAETLKVMKQPRCGVPDVAQFVLTEGNPRWEQTHLTYRIENYTPDLPRADVDHAIEKAFQLWSNVTPLTFTKVSEGQADIMISFVRGDHRDNSPFDGPGGNLAHAFQPGPGIGGDAHDDEDERWTNNFREYNLHRVAAHELGHSLGLSHSTDIGALMYPSYTFSGDVQLAQDDIDGIQAIYGRSQNPVQPIGPQTPKACDSKLTFDAITTIRGEVMFFKDRFYMRTNPFYPEVELNFISVFWPQLPNGLEAAYEFADRDEVRFFKGNKYWAVQGQNVLHGYPKDIYSSFGFPRTVKHIDAALSEENTGKTYFFVANKYWRYDEYKRSMDPGYPKMIAHDFPGIGHKVDAVFMKDGFFYFFHGTRQYKFDPKTKRILTLQKANSWFNCRKN

SEQ ID NO: 2396 - protein, 450 aa, Artificial Sequence
  MMP-1 variant F178E
FPATLETQEQDVDLVQKYLEKYYNLKNDGRQVEKRRNSGPVVEKLKQMQEFFGLKVTGKPDAETLKVMKQPRCGVPDVAQFVLTEGNPRWEQTHLTYRIENYTPDLPRADVDHAIEKAFQLWSNVTPLTFTKVSEGQADIMISFVRGDHRDNSPFDGPGGNLAHAFQPGPGIGGDAHEDEDERWTNNFREYNLHRVAAHELGHSLGLSHSTDIGALMYPSYTFSGDVQLAQDDIDGIQAIYGRSQNPVQPIGPQTPKACDSKLTFDAITTIRGEVMFFKDRFYMRTNPFYPEVELNFISVFWPQLPNGLEAAYEFADRDEVRFFKGNKYWAVQGQNVLHGYPKDIYSSFGFPRTVKHIDAALSEENTGKTYFFVANKYWRYDEYKRSMDPGYPKMIAHDFPGIGHKVDAVFMKDGFFYFFHGTRQYKFDPKTKRILTLQKANSWFNCRKN

SEQ ID NO: 2397 - protein, 450 aa, Artificial Sequence
  MMP-1 variant F178H
FPATLETQEQDVDLVQKYLEKYYNLKNDGRQVEKRRNSGPVVEKLKQMQEFFGLKVTGKPDAETLKVMKQPRCGVPDVAQFVLTEGNPRWEQTHLTYRIENYTPDLPRADVDHAIEKAFQLWSNVTPLTFTKVSEGQADIMISFVRGDHRDNSPFDGPGGNLAHAFQPGPGIGGDAHHDEDERWTNNFREYNLHRVAAHELGHSLGLSHSTDIGALMYPSYTFSGDVQLAQDDIDGIQAIYGRSQNPVQPIGPQTPKACDSKLTFDAITTIRGEVMFFKDRFYMRTNPFYPEVELNFISVFWPQLPNGLEAAYEFADRDEVRFFKGNKYWAVQGQNVLHGYPKDIYSSFGFPRTVKHIDAALSEENTGKTYFFVANKYWRYDEYKRSMDPGYPKMIAHDFPGIGHKVDAVFMKDGFFYFFHGTRQYKFDPKTKRILTLQKANSWFNCRKN

SEQ ID NO: 2398 - protein, 450 aa, Artificial Sequence
  MMP-1 variant F178K
FPATLETQEQDVDLVQKYLEKYYNLKNDGRQVEKRRNSGPVVEKLKQMQEFFGLKVTGKPDAETLKVMKQPRCGVPDVAQFVLTEGNPRWEQTHLTYRIENYTPDLPRADVDHAIEKAFQLWSNVTPLTFTKVSEGQADIMISFVRGDHRDNSPFDGPGGNLAHAFQPGPGIGGDAHKDEDERWTNNFREYNLHRVAAHELGHSLGLSHSTDIGALMYPSYTFSGDVQLAQDDIDGIQAIYGRSQNPVQPIGPQTPKACDSKLTFDAITTIRGEVMFFKDRFYMRTNPFYPEVELNFISVFWPQLPNGLEAAYEFADRDEVRFFKGNKYWAVQGQNVLHGYPKDIYSSFGFPRTVKHIDAALSEENTGKTYFFVANKYWRYDEYKRSMDPGYPKMIAHDFPGIGHKVDAVFMKDGFFYFFHGTRQYKFDPKTKRILTLQKANSWFNCRKN

SEQ ID NO: 2399 - protein, 450 aa, Artificial Sequence
  MMP-1 variant F178R
FPATLETQEQDVDLVQKYLEKYYNLKNDGRQVEKRRNSGPVVEKLKQMQEFFGLKVTGKPDAETLKVMKQPRCGVPDVAQFVLTEGNPRWEQTHLTYRIENYTPDLPRADVDHAIEKAFQLWSNVTPLTFTKVSEGQADIMISFVRGDHRDNSPFDGPGGNLAHAFQPGPGIGGDAHRDEDERWTNNFREYNLHRVAAHELGHSLGLSHSTDIGALMYPSYTFSGDVQLAQDDIDGIQAIYGRSQNPVQPIGPQTPKACDSKLTFDAITTIRGEVMFFKDRFYMRTNPFYPEVELNFISVFWPQLPNGLEAAYEFADRDEVRFFKGNKYWAVQGQNVLHGYPKDIYSSFGFPRTVKHIDAALSEENTGKTYFFVANKYWRYDEYKRSMDPGYPKMIAHDFPGIGHKVDAVFMKDGFFYFFHGTRQYKFDPKTKRILTLQKANSWFNCRKN

SEQ ID NO: 2400 - protein, 450 aa, Artificial Sequence
  MMP-1 variant F178C
FPATLETQEQDVDLVQKYLEKYYNLKNDGRQVEKRRNSGPVVEKLKQMQEFFGLKVTGKPDAETLKVMKQPRCGVPDVAQFVLTEGNPRWEQTHLTYRIENYTPDLPRADVDHAIEKAFQLWSNVTPLTFTKVSEGQADIMISFVRGDHRDNSPFDGPGGNLAHAFQPGPGIGGDAHCDEDERWTNNFREYNLHRVAAHELGHSLGLSHSTDIGALMYPSYTFSGDVQLAQDDIDGIQAIYGRSQNPVQPIGPQTPKACDSKLTFDAITTIRGEVMFFKDRFYMRTNPFYPEVELNFISVFWPQLPNGLEAAYEFADRDEVRFFKGNKYWAVQGQNVLHGYPKDIYSSFGFPRTVKHIDAALSEENTGKTYFFVANKYWRYDEYKRSMDPGYPKMIAHDFPGIGHKVDAVFMKDGFFYFFHGTRQYKFDPKTKRILTLQKANSWFNCRKN

SEQ ID NO: 2401 - protein, 450 aa, Artificial Sequence
  MMP-1 variant F178N
FPATLETQEQDVDLVQKYLEKYYNLKNDGRQVEKRRNSGPVVEKLKQMQEFFGLKVTGKPDAETLKVMKQPRCGVPDVAQFVLTEGNPRWEQTHLTYRIENYTPDLPRADVDHAIEKAFQLWSNVTPLTFTKVSEGQADIMISFVRGDHRDNSPFDGPGGNLAHAFQPGPGIGGDAHNDEDERWTNNFREYNLHRVAAHELGHSLGLSHSTDIGALMYPSYTFSGDVQLAQDDIDGIQAIYGRSQNPVQPIGPQTPKACDSKLTFDAITTIRGEVMFFKDRFYMRTNPFYPEVELNFISVFWPQLPNGLEAAYEFADRDEVRFFKGNKYWAVQGQNVLHGYPKDIYSSFGFPRTVKHIDAALSEENTGKTYFFVANKYWRYDEYKRSMDPGYPKMIAHDFPGIGHKVDAVFMKDGFFYFFHGTRQYKFDPKTKRILTLQKANSWFNCRKN

SEQ ID NO: 2402 - protein, 450 aa, Artificial Sequence
  MMP-1 variant F178Q
FPATLETQEQDVDLVQKYLEKYYNLKNDGRQVEKRRNSGPVVEKLKQMQEFFGLKVTGKPDAETLKVMKQPRCGVPDVAQFVLTEGNPRWEQTHLTYRIENYTPDLPRADVDHAIEKAFQLWSNVTPLTFTKVSEGQADIMISFVRGDHRDNSPFDGPGGNLAHAFQPGPGIGGDAHQDEDERWTNNFREYNLHRVAAHELGHSLGLSHSTDIGALMYPSYTFSGDVQLAQDDIDGIQAIYGRSQNPVQPIGPQTPKACDSKLTFDAITTIRGEVMFFKDRFYMRTNPFYPEVELNFISVFWPQLPNGLEAAYEFADRDEVRFFKGNKYWAVQGQNVLHGYPKDIYSSFGFPRTVKHIDAALSEENTGKTYFFVANKYWRYDEYKRSMDPGYPKMIAHDFPGIGHKVDAVFMKDGFFYFFHGTRQYKFDPKTKRILTLQKANSWFNCRKN

SEQ ID NO: 2403 - protein, 450 aa, Artificial Sequence
  MMP-1 variant F178T
FPATLETQEQDVDLVQKYLEKYYNLKNDGRQVEKRRNSGPVVEKLKQMQEFFGLKVTGKPDAETLKVMKQPRCGVPDVAQFVLTEGNPRWEQTHLTYRIENYTPDLPRADVDHAIEKAFQLWSNVTPLTFTKVSEGQADIMISFVRGDHRDNSPFDGPGGNLAHAFQPGPGIGGDAHTDEDERWTNNFREYNLHRVAAHELGHSLGLSHSTDIGALMYPSYTFSGDVQLAQDDIDGIQAIYGRSQNPVQPIGPQTPKACDSKLTFDAITTIRGEVMFFKDRFYMRTNPFYPEVELNFISVFWPQLPNGLEAAYEFADRDEVRFFKGNKYWAVQGQNVLHGYPKDIYSSFGFPRTVKHIDAALSEENTGKTYFFVANKYWRYDEYKRSMDPGYPKMIAHDFPGIGHKVDAVFMKDGFFYFFHGTRQYKFDPKTKRILTLQKANSWFNCRKN

SEQ ID NO: 2404 - protein, 450 aa, Artificial Sequence
  MMP-1 variant F178Y
FPATLETQEQDVDLVQKYLEKYYNLKNDGRQVEKRRNSGPVVEKLKQMQEFFGLKVTGKPDAETLKVMKQPRCGVPDVAQFVLTEGNPRWEQTHLTYRIENYTPDLPRADVDHAIEKAFQLWSNVTPLTFTKVSEGQADIMISFVRGDHRDNSPFDGPGGNLAHAFQPGPGIGGDAHYDEDERWTNNFREYNLHRVAAHELGHSLGLSHSTDIGALMYPSYTFSGDVQLAQDDIDGIQAIYGRSQNPVQPIGPQTPKACDSKLTFDAITTIRGEVMFFKDRFYMRTNPFYPEVELNFISVFWPQLPNGLEAAYEFADRDEVRFFKGNKYWAVQGQNVLHGYPKDIYSSFGFPRTVKHIDAALSEENTGKTYFFVANKYWRYDEYKRSMDPGYPKMIAHDFPGIGHKVDAVFMKDGFFYFFHGTRQYKFDPKTKRILTLQKANSWFNCRKN

SEQ ID NO: 2405 - protein, 450 aa, Artificial Sequence
  MMP-1 variant F178S
FPATLETQEQDVDLVQKYLEKYYNLKNDGRQVEKRRNSGPVVEKLKQMQEFFGLKVTGKPDAETLKVMKQPRCGVPDVAQFVLTEGNPRWEQTHLTYRIENYTPDLPRADVDHAIEKAFQLWSNVTPLTFTKVSEGQADIMISFVRGDHRDNSPFDGPGGNLAHAFQPGPGIGGDAHSDEDERWTNNFREYNLHRVAAHELGHSLGLSHSTDIGALMYPSYTFSGDVQLAQDDIDGIQAIYGRSQNPVQPIGPQTPKACDSKLTFDAITTIRGEVMFFKDRFYMRTNPFYPEVELNFISVFWPQLPNGLEAAYEFADRDEVRFFKGNKYWAVQGQNVLHGYPKDIYSSFGFPRTVKHIDAALSEENTGKTYFFVANKYWRYDEYKRSMDPGYPKMIAHDFPGIGHKVDAVFMKDGFFYFFHGTRQYKFDPKTKRILTLQKANSWFNCRKN

SEQ ID NO: 2406 - protein, 450 aa, Artificial Sequence
  MMP-1 variant F178G
FPATLETQEQDVDLVQKYLEKYYNLKNDGRQVEKRRNSGPVVEKLKQMQEFFGLKVTGKPDAETLKVMKQPRCGVPDVAQFVLTEGNPRWEQTHLTYRIENYTPDLPRADVDHAIEKAFQLWSNVTPLTFTKVSEGQADIMISFVRGDHRDNSPFDGPGGNLAHAFQPGPGIGGDAHGDEDERWTNNFREYNLHRVAAHELGHSLGLSHSTDIGALMYPSYTFSGDVQLAQDDIDGIQAIYGRSQNPVQPIGPQTPKACDSKLTFDAITTIRGEVMFFKDRFYMRTNPFYPEVELNFISVFWPQLPNGLEAAYEFADRDEVRFFKGNKYWAVQGQNVLHGYPKDIYSSFGFPRTVKHIDAALSEENTGKTYFFVANKYWRYDEYKRSMDPGYPKMIAHDFPGIGHKVDAVFMKDGFFYFFHGTRQYKFDPKTKRILTLQKANSWFNCRKN

SEQ ID NO: 2407 - protein, 450 aa, Artificial Sequence
  MMP-1 variant F178M
FPATLETQEQDVDLVQKYLEKYYNLKNDGRQVEKRRNSGPVVEKLKQMQEFFGLKVTGKPDAETLKVMKQPRCGVPDVAQFVLTEGNPRWEQTHLTYRIENYTPDLPRADVDHAIEKAFQLWSNVTPLTFTKVSEGQADIMISFVRGDHRDNSPFDGPGGNLAHAFQPGPGIGGDAHMDEDERWTNNFREYNLHRVAAHELGHSLGLSHSTDIGALMYPSYTFSGDVQLAQDDIDGIQAIYGRSQNPVQPIGPQTPKACDSKLTFDAITTIRGEVMFFKDRFYMRTNPFYPEVELNFISVFWPQLPNGLEAAYEFADRDEVRFFKGNKYWAVQGQNVLHGYPKDIYSSFGFPRTVKHIDAALSEENTGKTYFFVANKYWRYDEYKRSMDPGYPKMIAHDFPGIGHKVDAVFMKDGFFYFFHGTRQYKFDPKTKRILTLQKANSWFNCRKN

SEQ ID NO: 2408 - protein, 450 aa, Artificial Sequence
  MMP-1 variant F178W
FPATLETQEQDVDLVQKYLEKYYNLKNDGRQVEKRRNSGPVVEKLKQMQEFFGLKVTGKPDAETLKVMKQPRCGVPDVAQFVLTEGNPRWEQTHLTYRIENYTPDLPRADVDHAIEKAFQLWSNVTPLTFTKVSEGQADIMISFVRGDHRDNSPFDGPGGNLAHAFQPGPGIGGDAHWDEDERWTNNFREYNLHRVAAHELGHSLGLSHSTDIGALMYPSYTFSGDVQLAQDDIDGIQAIYGRSQNPVQPIGPQTPKACDSKLTFDAITTIRGEVMFFKDRFYMRTNPFYPEVELNFISVFWPQLPNGLEAAYEFADRDEVRFFKGNKYWAVQGQNVLHGYPKDIYSSFGFPRTVKHIDAALSEENTGKTYFFVANKYWRYDEYKRSMDPGYPKMIAHDFPGIGHKVDAVFMKDGFFYFFHGTRQYKFDPKTKRILTLQKANSWFNCRKN

SEQ ID NO: 2409 - protein, 450 aa, Artificial Sequence
  MMP-1 variant F178I
FPATLETQEQDVDLVQKYLEKYYNLKNDGRQVEKRRNSGPVVEKLKQMQEFFGLKVTGKPDAETLKVMKQPRCGVPDVAQFVLTEGNPRWEQTHLTYRIENYTPDLPRADVDHAIEKAFQLWSNVTPLTFTKVSEGQADIMISFVRGDHRDNSPFDGPGGNLAHAFQPGPGIGGDAHIDEDERWTNNFREYNLHRVAAHELGHSLGLSHSTDIGALMYPSYTFSGDVQLAQDDIDGIQAIYGRSQNPVQPIGPQTPKACDSKLTFDAITTIRGEVMFFKDRFYMRTNPFYPEVELNFISVFWPQLPNGLEAAYEFADRDEVRFFKGNKYWAVQGQNVLHGYPKDIYSSFGFPRTVKHIDAALSEENTGKTYFFVANKYWRYDEYKRSMDPGYPKMIAHDFPGIGHKVDAVFMKDGFFYFFHGTRQYKFDPKTKRILTLQKANSWFNCRKN

SEQ ID NO: 2410 - protein, 450 aa, Artificial Sequence
  MMP-1 variant F178V
FPATLETQEQDVDLVQKYLEKYYNLKNDGRQVEKRRNSGPVVEKLKQMQEFFGLKVTGKPDAETLKVMKQPRCGVPDVAQFVLTEGNPRWEQTHLTYRIENYTPDLPRADVDHAIEKAFQLWSNVTPLTFTKVSEGQADIMISFVRGDHRDNSPFDGPGGNLAHAFQPGPGIGGDAHVDEDERWTNNFREYNLHRVAAHELGHSLGLSHSTDIGALMYPSYTFSGDVQLAQDDIDGIQAIYGRSQNPVQPIGPQTPKACDSKLTFDAITTIRGEVMFFKDRFYMRTNPFYPEVELNFISVFWPQLPNGLEAAYEFADRDEVRFFKGNKYWAVQGQNVLHGYPKDIYSSFGFPRTVKHIDAALSEENTGKTYFFVANKYWRYDEYKRSMDPGYPKMIAHDFPGIGHKVDAVFMKDGFFYFFHGTRQYKFDPKTKRILTLQKANSWFNCRKN

SEQ ID NO: 2411 - protein, 450 aa, Artificial Sequence
  MMP-1 variant F178L
FPATLETQEQDVDLVQKYLEKYYNLKNDGRQVEKRRNSGPVVEKLKQMQEFFGLKVTGKPDAETLKVMKQPRCGVPDVAQFVLTEGNPRWEQTHLTYRIENYTPDLPRADVDHAIEKAFQLWSNVTPLTFTKVSEGQADIMISFVRGDHRDNSPFDGPGGNLAHAFQPGPGIGGDAHLDEDERWTNNFREYNLHRVAAHELGHSLGLSHSTDIGALMYPSYTFSGDVQLAQDDIDGIQAIYGRSQNPVQPIGPQTPKACDSKLTFDAITTIRGEVMFFKDRFYMRTNPFYPEVELNFISVFWPQLPNGLEAAYEFADRDEVRFFKGNKYWAVQGQNVLHGYPKDIYSSFGFPRTVKHIDAALSEENTGKTYFFVANKYWRYDEYKRSMDPGYPKMIAHDFPGIGHKVDAVFMKDGFFYFFHGTRQYKFDPKTKRILTLQKANSWFNCRKN

SEQ ID NO: 2412 - protein, 450 aa, Artificial Sequence
  MMP-1 variant F178A
FPATLETQEQDVDLVQKYLEKYYNLKNDGRQVEKRRNSGPVVEKLKQMQEFFGLKVTGKPDAETLKVMKQPRCGVPDVAQFVLTEGNPRWEQTHLTYRIENYTPDLPRADVDHAIEKAFQLWSNVTPLTFTKVSEGQADIMISFVRGDHRDNSPFDGPGGNLAHAFQPGPGIGGDAHADEDERWTNNFREYNLHRVAAHELGHSLGLSHSTDIGALMYPSYTFSGDVQLAQDDIDGIQAIYGRSQNPVQPIGPQTPKACDSKLTFDAITTIRGEVMFFKDRFYMRTNPFYPEVELNFISVFWPQLPNGLEAAYEFADRDEVRFFKGNKYWAVQGQNVLHGYPKDIYSSFGFPRTVKHIDAALSEENTGKTYFFVANKYWRYDEYKRSMDPGYPKMIAHDFPGIGHKVDAVFMKDGFFYFFHGTRQYKFDPKTKRILTLQKANSWFNCRKN

SEQ ID NO: 2413 - protein, 450 aa, Artificial Sequence
  MMP-1 variant F178P
FPATLETQEQDVDLVQKYLEKYYNLKNDGRQVEKRRNSGPVVEKLKQMQEFFGLKVTGKPDAETLKVMKQPRCGVPDVAQFVLTEGNPRWEQTHLTYRIENYTPDLPRADVDHAIEKAFQLWSNVTPLTFTKVSEGQADIMISFVRGDHRDNSPFDGPGGNLAHAFQPGPGIGGDAHPDEDERWTNNFREYNLHRVAAHELGHSLGLSHSTDIGALMYPSYTFSGDVQLAQDDIDGIQAIYGRSQNPVQPIGPQTPKACDSKLTFDAITTIRGEVMFFKDRFYMRTNPFYPEVELNFISVFWPQLPNGLEAAYEFADRDEVRFFKGNKYWAVQGQNVLHGYPKDIYSSFGFPRTVKHIDAALSEENTGKTYFFVANKYWRYDEYKRSMDPGYPKMIAHDFPGIGHKVDAVFMKDGFFYFFHGTRQYKFDPKTKRILTLQKANSWFNCRKN

SEQ ID NO: 2414 - protein, 450 aa, Artificial Sequence
  MMP-1 variant R183D
FPATLETQEQDVDLVQKYLEKYYNLKNDGRQVEKRRNSGPVVEKLKQMQEFFGLKVTGKPDAETLKVMKQPRCGVPDVAQFVLTEGNPRWEQTHLTYRIENYTPDLPRADVDHAIEKAFQLWSNVTPLTFTKVSEGQADIMISFVRGDHRDNSPFDGPGGNLAHAFQPGPGIGGDAHFDEDEDWTNNFREYNLHRVAAHELGHSLGLSHSTDIGALMYPSYTFSGDVQLAQDDIDGIQAIYGRSQNPVQPIGPQTPKACDSKLTFDAITTIRGEVMFFKDRFYMRTNPFYPEVELNFISVFWPQLPNGLEAAYEFADRDEVRFFKGNKYWAVQGQNVLHGYPKDIYSSFGFPRTVKHIDAALSEENTGKTYFFVANKYWRYDEYKRSMDPGYPKMIAHDFPGIGHKVDAVFMKDGFFYFFHGTRQYKFDPKTKRILTLQKANSWFNCRKN

SEQ ID NO: 2415 - protein, 450 aa, Artificial Sequence
  MMP-1 variant R183E
FPATLETQEQDVDLVQKYLEKYYNLKNDGRQVEKRRNSGPVVEKLKQMQEFFGLKVTGKPDAETLKVMKQPRCGVPDVAQFVLTEGNPRWEQTHLTYRIENYTPDLPRADVDHAIEKAFQLWSNVTPLTFTKVSEGQADIMISFVRGDHRDNSPFDGPGGNLAHAFQPGPGIGGDAHFDEDEEWTNNFREYNLHRVAAHELGHSLGLSHSTDIGALMYPSYTFSGDVQLAQDDIDGIQAIYGRSQNPVQPIGPQTPKACDSKLTFDAITTIRGEVMFFKDRFYMRTNPFYPEVELNFISVFWPQLPNGLEAAYEFADRDEVRFFKGNKYWAVQGQNVLHGYPKDIYSSFGFPRTVKHIDAALSEENTGKTYFFVANKYWRYDEYKRSMDPGYPKMIAHDFPGIGHKVDAVFMKDGFFYFFHGTRQYKFDPKTKRILTLQKANSWFNCRKN

SEQ ID NO: 2416 - protein, 450 aa, Artificial Sequence
  MMP-1 variant R183H
FPATLETQEQDVDLVQKYLEKYYNLKNDGRQVEKRRNSGPVVEKLKQMQEFFGLKVTGKPDAETLKVMKQPRCGVPDVAQFVLTEGNPRWEQTHLTYRIENYTPDLPRADVDHAIEKAFQLWSNVTPLTFTKVSEGQADIMISFVRGDHRDNSPFDGPGGNLAHAFQPGPGIGGDAHFDEDEHWTNNFREYNLHRVAAHELGHSLGLSHSTDIGALMYPSYTFSGDVQLAQDDIDGIQAIYGRSQNPVQPIGPQTPKACDSKLTFDAITTIRGEVMFFKDRFYMRTNPFYPEVELNFISVFWPQLPNGLEAAYEFADRDEVRFFKGNKYWAVQGQNVLHGYPKDIYSSFGFPRTVKHIDAALSEENTGKTYFFVANKYWRYDEYKRSMDPGYPKMIAHDFPGIGHKVDAVFMKDGFFYFFHGTRQYKFDPKTKRILTLQKANSWFNCRKN

SEQ ID NO: 2417 - protein, 450 aa, Artificial Sequence
  MMP-1 variant R183K
FPATLETQEQDVDLVQKYLEKYYNLKNDGRQVEKRRNSGPVVEKLKQMQEFFGLKVTGKPDAETLKVMKQPRCGVPDVAQFVLTEGNPRWEQTHLTYRIENYTPDLPRADVDHAIEKAFQLWSNVTPLTFTKVSEGQADIMISFVRGDHRDNSPFDGPGGNLAHAFQPGPGIGGDAHFDEDEKWTNNFREYNLHRVAAHELGHSLGLSHSTDIGALMYPSYTFSGDVQLAQDDIDGIQAIYGRSQNPVQPIGPQTPKACDSKLTFDAITTIRGEVMFFKDRFYMRTNPFYPEVELNFISVFWPQLPNGLEAAYEFADRDEVRFFKGNKYWAVQGQNVLHGYPKDIYSSFGFPRTVKHIDAALSEENTGKTYFFVANKYWRYDEYKRSMDPGYPKMIAHDFPGIGHKVDAVFMKDGFFYFFHGTRQYKFDPKTKRILTLQKANSWFNCRKN

SEQ ID NO: 2418 - protein, 450 aa, Artificial Sequence; identical to SEQ ID NO: 2229
  MMP-1 variant R183C

SEQ ID NO: 2419 - protein, 450 aa, Artificial Sequence
  MMP-1 variant R183N
FPATLETQEQDVDLVQKYLEKYYNLKNDGRQVEKRRNSGPVVEKLKQMQEFFGLKVTGKPDAETLKVMKQPRCGVPDVAQFVLTEGNPRWEQTHLTYRIENYTPDLPRADVDHAIEKAFQLWSNVTPLTFTKVSEGQADIMISFVRGDHRDNSPFDGPGGNLAHAFQPGPGIGGDAHFDEDENWTNNFREYNLHRVAAHELGHSLGLSHSTDIGALMYPSYTFSGDVQLAQDDIDGIQAIYGRSQNPVQPIGPQTPKACDSKLTFDAITTIRGEVMFFKDRFYMRTNPFYPEVELNFISVFWPQLPNGLEAAYEFADRDEVRFFKGNKYWAVQGQNVLHGYPKDIYSSFGFPRTVKHIDAALSEENTGKTYFFVANKYWRYDEYKRSMDPGYPKMIAHDFPGIGHKVDAVFMKDGFFYFFHGTRQYKFDPKTKRILTLQKANSWFNCRKN

SEQ ID NO: 2420 - protein, 450 aa, Artificial Sequence
  MMP-1 variant R183Q
FPATLETQEQDVDLVQKYLEKYYNLKNDGRQVEKRRNSGPVVEKLKQMQEFFGLKVTGKPDAETLKVMKQPRCGVPDVAQFVLTEGNPRWEQTHLTYRIENYTPDLPRADVDHAIEKAFQLWSNVTPLTFTKVSEGQADIMISFVRGDHRDNSPFDGPGGNLAHAFQPGPGIGGDAHFDEDEQWTNNFREYNLHRVAAHELGHSLGLSHSTDIGALMYPSYTFSGDVQLAQDDIDGIQAIYGRSQNPVQPIGPQTPKACDSKLTFDAITTIRGEVMFFKDRFYMRTNPFYPEVELNFISVFWPQLPNGLEAAYEFADRDEVRFFKGNKYWAVQGQNVLHGYPKDIYSSFGFPRTVKHIDAALSEENTGKTYFFVANKYWRYDEYKRSMDPGYPKMIAHDFPGIGHKVDAVFMKDGFFYFFHGTRQYKFDPKTKRILTLQKANSWFNCRKN

SEQ ID NO: 2421 - protein, 450 aa, Artificial Sequence
  MMP-1 variant R183T
FPATLETQEQDVDLVQKYLEKYYNLKNDGRQVEKRRNSGPVVEKLKQMQEFFGLKVTGKPDAETLKVMKQPRCGVPDVAQFVLTEGNPRWEQTHLTYRIENYTPDLPRADVDHAIEKAFQLWSNVTPLTFTKVSEGQADIMISFVRGDHRDNSPFDGPGGNLAHAFQPGPGIGGDAHFDEDETWTNNFREYNLHRVAAHELGHSLGLSHSTDIGALMYPSYTFSGDVQLAQDDIDGIQAIYGRSQNPVQPIGPQTPKACDSKLTFDAITTIRGEVMFFKDRFYMRTNPFYPEVELNFISVFWPQLPNGLEAAYEFADRDEVRFFKGNKYWAVQGQNVLHGYPKDIYSSFGFPRTVKHIDAALSEENTGKTYFFVANKYWRYDEYKRSMDPGYPKMIAHDFPGIGHKVDAVFMKDGFFYFFHGTRQYKFDPKTKRILTLQKANSWFNCRKN

SEQ ID NO: 2422 - protein, 450 aa, Artificial Sequence
  MMP-1 variant R183Y
FPATLETQEQDVDLVQKYLEKYYNLKNDGRQVEKRRNSGPVVEKLKQMQEFFGLKVTGKPDAETLKVMKQPRCGVPDVAQFVLTEGNPRWEQTHLTYRIENYTPDLPRADVDHAIEKAFQLWSNVTPLTFTKVSEGQADIMISFVRGDHRDNSPFDGPGGNLAHAFQPGPGIGGDAHFDEDEYWTNNFREYNLHRVAAHELGHSLGLSHSTDIGALMYPSYTFSGDVQLAQDDIDGIQAIYGRSQNPVQPIGPQTPKACDSKLTFDAITTIRGEVMFFKDRFYMRTNPFYPEVELNFISVFWPQLPNGLEAAYEFADRDEVRFFKGNKYWAVQGQNVLHGYPKDIYSSFGFPRTVKHIDAALSEENTGKTYFFVANKYWRYDEYKRSMDPGYPKMIAHDFPGIGHKVDAVFMKDGFFYFFHGTRQYKFDPKTKRILTLQKANSWFNCRKN

SEQ ID NO: 2423 - protein, 450 aa, Artificial Sequence
  MMP-1 variant R183S
FPATLETQEQDVDLVQKYLEKYYNLKNDGRQVEKRRNSGPVVEKLKQMQEFFGLKVTGKPDAETLKVMKQPRCGVPDVAQFVLTEGNPRWEQTHLTYRIENYTPDLPRADVDHAIEKAFQLWSNVTPLTFTKVSEGQADIMISFVRGDHRDNSPFDGPGGNLAHAFQPGPGIGGDAHFDEDESWTNNFREYNLHRVAAHELGHSLGLSHSTDIGALMYPSYTFSGDVQLAQDDIDGIQAIYGRSQNPVQPIGPQTPKACDSKLTFDAITTIRGEVMFFKDRFYMRTNPFYPEVELNFISVFWPQLPNGLEAAYEFADRDEVRFFKGNKYWAVQGQNVLHGYPKDIYSSFGFPRTVKHIDAALSEENTGKTYFFVANKYWRYDEYKRSMDPGYPKMIAHDFPGIGHKVDAVFMKDGFFYFFHGTRQYKFDPKTKRILTLQKANSWFNCRKN

SEQ ID NO: 2424 - protein, 450 aa, Artificial Sequence
  MMP-1 variant R183G
FPATLETQEQDVDLVQKYLEKYYNLKNDGRQVEKRRNSGPVVEKLKQMQEFFGLKVTGKPDAETLKVMKQPRCGVPDVAQFVLTEGNPRWEQTHLTYRIENYTPDLPRADVDHAIEKAFQLWSNVTPLTFTKVSEGQADIMISFVRGDHRDNSPFDGPGGNLAHAFQPGPGIGGDAHFDEDEGWTNNFREYNLHRVAAHELGHSLGLSHSTDIGALMYPSYTFSGDVQLAQDDIDGIQAIYGRSQNPVQPIGPQTPKACDSKLTFDAITTIRGEVMFFKDRFYMRTNPFYPEVELNFISVFWPQLPNGLEAAYEFADRDEVRFFKGNKYWAVQGQNVLHGYPKDIYSSFGFPRTVKHIDAALSEENTGKTYFFVANKYWRYDEYKRSMDPGYPKMIAHDFPGIGHKVDAVFMKDGFFYFFHGTRQYKFDPKTKRILTLQKANSWFNCRKN

SEQ ID NO: 2425 - protein, 450 aa, Artificial Sequence
  MMP-1 variant R183F
FPATLETQEQDVDLVQKYLEKYYNLKNDGRQVEKRRNSGPVVEKLKQMQEFFGLKVTGKPDAETLKVMKQPRCGVPDVAQFVLTEGNPRWEQTHLTYRIENYTPDLPRADVDHAIEKAFQLWSNVTPLTFTKVSEGQADIMISFVRGDHRDNSPFDGPGGNLAHAFQPGPGIGGDAHFDEDEFWTNNFREYNLHRVAAHELGHSLGLSHSTDIGALMYPSYTFSGDVQLAQDDIDGIQAIYGRSQNPVQPIGPQTPKACDSKLTFDAITTIRGEVMFFKDRFYMRTNPFYPEVELNFISVFWPQLPNGLEAAYEFADRDEVRFFKGNKYWAVQGQNVLHGYPKDIYSSFGFPRTVKHIDAALSEENTGKTYFFVANKYWRYDEYKRSMDPGYPKMIAHDFPGIGHKVDAVFMKDGFFYFFHGTRQYKFDPKTKRILTLQKANSWFNCRKN

SEQ ID NO: 2426 - protein, 450 aa, Artificial Sequence
  MMP-1 variant R183M
FPATLETQEQDVDLVQKYLEKYYNLKNDGRQVEKRRNSGPVVEKLKQMQEFFGLKVTGKPDAETLKVMKQPRCGVPDVAQFVLTEGNPRWEQTHLTYRIENYTPDLPRADVDHAIEKAFQLWSNVTPLTFTKVSEGQADIMISFVRGDHRDNSPFDGPGGNLAHAFQPGPGIGGDAHFDEDEMWTNNFREYNLHRVAAHELGHSLGLSHSTDIGALMYPSYTFSGDVQLAQDDIDGIQAIYGRSQNPVQPIGPQTPKACDSKLTFDAITTIRGEVMFFKDRFYMRTNPFYPEVELNFISVFWPQLPNGLEAAYEFADRDEVRFFKGNKYWAVQGQNVLHGYPKDIYSSFGFPRTVKHIDAALSEENTGKTYFFVANKYWRYDEYKRSMDPGYPKMIAHDFPGIGHKVDAVFMKDGFFYFFHGTRQYKFDPKTKRILTLQKANSWFNCRKN

SEQ ID NO: 2427 - protein, 450 aa, Artificial Sequence
  MMP-1 variant R183W
FPATLETQEQDVDLVQKYLEKYYNLKNDGRQVEKRRNSGPVVEKLKQMQEFFGLKVTGKPDAETLKVMKQPRCGVPDVAQFVLTEGNPRWEQTHLTYRIENYTPDLPRADVDHAIEKAFQLWSNVTPLTFTKVSEGQADIMISFVRGDHRDNSPFDGPGGNLAHAFQPGPGIGGDAHFDEDEWWTNNFREYNLHRVAAHELGHSLGLSHSTDIGALMYPSYTFSGDVQLAQDDIDGIQAIYGRSQNPVQPIGPQTPKACDSKLTFDAITTIRGEVMFFKDRFYMRTNPFYPEVELNFISVFWPQLPNGLEAAYEFADRDEVRFFKGNKYWAVQGQNVLHGYPKDIYSSFGFPRTVKHIDAALSEENTGKTYFFVANKYWRYDEYKRSMDPGYPKMIAHDFPGIGHKVDAVFMKDGFFYFFHGTRQYKFDPKTKRILTLQKANSWFNCRKN

SEQ ID NO: 2428 - protein, 450 aa, Artificial Sequence
  MMP-1 variant R183I
FPATLETQEQDVDLVQKYLEKYYNLKNDGRQVEKRRNSGPVVEKLKQMQEFFGLKVTGKPDAETLKVMKQPRCGVPDVAQFVLTEGNPRWEQTHLTYRIENYTPDLPRADVDHAIEKAFQLWSNVTPLTFTKVSEGQADIMISFVRGDHRDNSPFDGPGGNLAHAFQPGPGIGGDAHFDEDEIWTNNFREYNLHRVAAHELGHSLGLSHSTDIGALMYPSYTFSGDVQLAQDDIDGIQAIYGRSQNPVQPIGPQTPKACDSKLTFDAITTIRGEVMFFKDRFYMRTNPFYPEVELNFISVFWPQLPNGLEAAYEFADRDEVRFFKGNKYWAVQGQNVLHGYPKDIYSSFGFPRTVKHIDAALSEENTGKTYFFVANKYWRYDEYKRSMDPGYPKMIAHDFPGIGHKVDAVFMKDGFFYFFHGTRQYKFDPKTKRILTLQKANSWFNCRKN

SEQ ID NO: 2429 - protein, 450 aa, Artificial Sequence
  MMP-1 variant R183V
FPATLETQEQDVDLVQKYLEKYYNLKNDGRQVEKRRNSGPVVEKLKQMQEFFGLKVTGKPDAETLKVMKQPRCGVPDVAQFVLTEGNPRWEQTHLTYRIENYTPDLPRADVDHAIEKAFQLWSNVTPLTFTKVSEGQADIMISFVRGDHRDNSPFDGPGGNLAHAFQPGPGIGGDAHFDEDEVWTNNFREYNLHRVAAHELGHSLGLSHSTDIGALMYPSYTFSGDVQLAQDDIDGIQAIYGRSQNPVQPIGPQTPKACDSKLTFDAITTIRGEVMFFKDRFYMRTNPFYPEVELNFISVFWPQLPNGLEAAYEFADRDEVRFFKGNKYWAVQGQNVLHGYPKDIYSSFGFPRTVKHIDAALSEENTGKTYFFVANKYWRYDEYKRSMDPGYPKMIAHDFPGIGHKVDAVFMKDGFFYFFHGTRQYKFDPKTKRILTLQKANSWFNCRKN

SEQ ID NO: 2430 - protein, 450 aa, Artificial Sequence
  MMP-1 variant R183L
FPATLETQEQDVDLVQKYLEKYYNLKNDGRQVEKRRNSGPVVEKLKQMQEFFGLKVTGKPDAETLKVMKQPRCGVPDVAQFVLTEGNPRWEQTHLTYRIENYTPDLPRADVDHAIEKAFQLWSNVTPLTFTKVSEGQADIMISFVRGDHRDNSPFDGPGGNLAHAFQPGPGIGGDAHFDEDELWTNNFREYNLHRVAAHELGHSLGLSHSTDIGALMYPSYTFSGDVQLAQDDIDGIQAIYGRSQNPVQPIGPQTPKACDSKLTFDAITTIRGEVMFFKDRFYMRTNPFYPEVELNFISVFWPQLPNGLEAAYEFADRDEVRFFKGNKYWAVQGQNVLHGYPKDIYSSFGFPRTVKHIDAALSEENTGKTYFFVANKYWRYDEYKRSMDPGYPKMIAHDFPGIGHKVDAVFMKDGFFYFFHGTRQYKFDPKTKRILTLQKANSWFNCRKN

SEQ ID NO: 2431 - protein, 450 aa, Artificial Sequence
  MMP-1 variant R183A
FPATLETQEQDVDLVQKYLEKYYNLKNDGRQVEKRRNSGPVVEKLKQMQEFFGLKVTGKPDAETLKVMKQPRCGVPDVAQFVLTEGNPRWEQTHLTYRIENYTPDLPRADVDHAIEKAFQLWSNVTPLTFTKVSEGQADIMISFVRGDHRDNSPFDGPGGNLAHAFQPGPGIGGDAHFDEDEAWTNNFREYNLHRVAAHELGHSLGLSHSTDIGALMYPSYTFSGDVQLAQDDIDGIQAIYGRSQNPVQPIGPQTPKACDSKLTFDAITTIRGEVMFFKDRFYMRTNPFYPEVELNFISVFWPQLPNGLEAAYEFADRDEVRFFKGNKYWAVQGQNVLHGYPKDIYSSFGFPRTVKHIDAALSEENTGKTYFFVANKYWRYDEYKRSMDPGYPKMIAHDFPGIGHKVDAVFMKDGFFYFFHGTRQYKFDPKTKRILTLQKANSWFNCRKN

SEQ ID NO: 2432 - protein, 450 aa, Artificial Sequence
  MMP-1 variant R183P
FPATLETQEQDVDLVQKYLEKYYNLKNDGRQVEKRRNSGPVVEKLKQMQEFFGLKVTGKPDAETLKVMKQPRCGVPDVAQFVLTEGNPRWEQTHLTYRIENYTPDLPRADVDHAIEKAFQLWSNVTPLTFTKVSEGQADIMISFVRGDHRDNSPFDGPGGNLAHAFQPGPGIGGDAHFDEDEPWTNNFREYNLHRVAAHELGHSLGLSHSTDIGALMYPSYTFSGDVQLAQDDIDGIQAIYGRSQNPVQPIGPQTPKACDSKLTFDAITTIRGEVMFFKDRFYMRTNPFYPEVELNFISVFWPQLPNGLEAAYEFADRDEVRFFKGNKYWAVQGQNVLHGYPKDIYSSFGFPRTVKHIDAALSEENTGKTYFFVANKYWRYDEYKRSMDPGYPKMIAHDFPGIGHKVDAVFMKDGFFYFFHGTRQYKFDPKTKRILTLQKANSWFNCRKN

SEQ ID NO: 2433 - protein, 450 aa, Artificial Sequence
  MMP-1 variant W184D
FPATLETQEQDVDLVQKYLEKYYNLKNDGRQVEKRRNSGPVVEKLKQMQEFFGLKVTGKPDAETLKVMKQPRCGVPDVAQFVLTEGNPRWEQTHLTYRIENYTPDLPRADVDHAIEKAFQLWSNVTPLTFTKVSEGQADIMISFVRGDHRDNSPFDGPGGNLAHAFQPGPGIGGDAHFDEDERDTNNFREYNLHRVAAHELGHSLGLSHSTDIGALMYPSYTFSGDVQLAQDDIDGIQAIYGRSQNPVQPIGPQTPKACDSKLTFDAITTIRGEVMFFKDRFYMRTNPFYPEVELNFISVFWPQLPNGLEAAYEFADRDEVRFFKGNKYWAVQGQNVLHGYPKDIYSSFGFPRTVKHIDAALSEENTGKTYFFVANKYWRYDEYKRSMDPGYPKMIAHDFPGIGHKVDAVFMKDGFFYFFHGTRQYKFDPKTKRILTLQKANSWFNCRKN

SEQ ID NO: 2434 - protein, 450 aa, Artificial Sequence
  MMP-1 variant W184E
FPATLETQEQDVDLVQKYLEKYYNLKNDGRQVEKRRNSGPVVEKLKQMQEFFGLKVTGKPDAETLKVMKQPRCGVPDVAQFVLTEGNPRWEQTHLTYRIENYTPDLPRADVDHAIEKAFQLWSNVTPLTFTKVSEGQADIMISFVRGDHRDNSPFDGPGGNLAHAFQPGPGIGGDAHFDEDERETNNFREYNLHRVAAHELGHSLGLSHSTDIGALMYPSYTFSGDVQLAQDDIDGIQAIYGRSQNPVQPIGPQTPKACDSKLTFDAITTIRGEVMFFKDRFYMRTNPFYPEVELNFISVFWPQLPNGLEAAYEFADRDEVRFFKGNKYWAVQGQNVLHGYPKDIYSSFGFPRTVKHIDAALSEENTGKTYFFVANKYWRYDEYKRSMDPGYPKMIAHDFPGIGHKVDAVFMKDGFFYFFHGTRQYKFDPKTKRILTLQKANSWFNCRKN

SEQ ID NO: 2435 - protein, 450 aa, Artificial Sequence
  MMP-1 variant W184H
FPATLETQEQDVDLVQKYLEKYYNLKNDGRQVEKRRNSGPVVEKLKQMQEFFGLKVTGKPDAETLKVMKQPRCGVPDVAQFVLTEGNPRWEQTHLTYRIENYTPDLPRADVDHAIEKAFQLWSNVTPLTFTKVSEGQADIMISFVRGDHRDNSPFDGPGGNLAHAFQPGPGIGGDAHFDEDERHTNNFREYNLHRVAAHELGHSLGLSHSTDIGALMYPSYTFSGDVQLAQDDIDGIQAIYGRSQNPVQPIGPQTPKACDSKLTFDAITTIRGEVMFFKDRFYMRTNPFYPEVELNFISVFWPQLPNGLEAAYEFADRDEVRFFKGNKYWAVQGQNVLHGYPKDIYSSFGFPRTVKHIDAALSEENTGKTYFFVANKYWRYDEYKRSMDPGYPKMIAHDFPGIGHKVDAVFMKDGFFYFFHGTRQYKFDPKTKRILTLQKANSWFNCRKN

SEQ ID NO: 2436 - protein, 450 aa, Artificial Sequence
  MMP-1 variant W184K
FPATLETQEQDVDLVQKYLEKYYNLKNDGRQVEKRRNSGPVVEKLKQMQEFFGLKVTGKPDAETLKVMKQPRCGVPDVAQFVLTEGNPRWEQTHLTYRIENYTPDLPRADVDHAIEKAFQLWSNVTPLTFTKVSEGQADIMISFVRGDHRDNSPFDGPGGNLAHAFQPGPGIGGDAHFDEDERKTNNFREYNLHRVAAHELGHSLGLSHSTDIGALMYPSYTFSGDVQLAQDDIDGIQAIYGRSQNPVQPIGPQTPKACDSKLTFDAITTIRGEVMFFKDRFYMRTNPFYPEVELNFISVFWPQLPNGLEAAYEFADRDEVRFFKGNKYWAVQGQNVLHGYPKDIYSSFGFPRTVKHIDAALSEENTGKTYFFVANKYWRYDEYKRSMDPGYPKMIAHDFPGIGHKVDAVFMKDGFFYFFHGTRQYKFDPKTKRILTLQKANSWFNCRKN

SEQ ID NO: 2437 - protein, 450 aa, Artificial Sequence
  MMP-1 variant W184R
FPATLETQEQDVDLVQKYLEKYYNLKNDGRQVEKRRNSGPVVEKLKQMQEFFGLKVTGKPDAETLKVMKQPRCGVPDVAQFVLTEGNPRWEQTHLTYRIENYTPDLPRADVDHAIEKAFQLWSNVTPLTFTKVSEGQADIMISFVRGDHRDNSPFDGPGGNLAHAFQPGPGIGGDAHFDEDERRTNNFREYNLHRVAAHELGHSLGLSHSTDIGALMYPSYTFSGDVQLAQDDIDGIQAIYGRSQNPVQPIGPQTPKACDSKLTFDAITTIRGEVMFFKDRFYMRTNPFYPEVELNFISVFWPQLPNGLEAAYEFADRDEVRFFKGNKYWAVQGQNVLHGYPKDIYSSFGFPRTVKHIDAALSEENTGKTYFFVANKYWRYDEYKRSMDPGYPKMIAHDFPGIGHKVDAVFMKDGFFYFFHGTRQYKFDPKTKRILTLQKANSWFNCRKN

SEQ ID NO: 2438 - protein, 450 aa, Artificial Sequence
  MMP-1 variant W184C
FPATLETQEQDVDLVQKYLEKYYNLKNDGRQVEKRRNSGPVVEKLKQMQEFFGLKVTGKPDAETLKVMKQPRCGVPDVAQFVLTEGNPRWEQTHLTYRIENYTPDLPRADVDHAIEKAFQLWSNVTPLTFTKVSEGQADIMISFVRGDHRDNSPFDGPGGNLAHAFQPGPGIGGDAHFDEDERCTNNFREYNLHRVAAHELGHSLGLSHSTDIGALMYPSYTFSGDVQLAQDDIDGIQAIYGRSQNPVQPIGPQTPKACDSKLTFDAITTIRGEVMFFKDRFYMRTNPFYPEVELNFISVFWPQLPNGLEAAYEFADRDEVRFFKGNKYWAVQGQNVLHGYPKDIYSSFGFPRTVKHIDAALSEENTGKTYFFVANKYWRYDEYKRSMDPGYPKMIAHDFPGIGHKVDAVFMKDGFFYFFHGTRQYKFDPKTKRILTLQKANSWFNCRKN

SEQ ID NO: 2439 - protein, 450 aa, Artificial Sequence
  MMP-1 variant W184N
FPATLETQEQDVDLVQKYLEKYYNLKNDGRQVEKRRNSGPVVEKLKQMQEFFGLKVTGKPDAETLKVMKQPRCGVPDVAQFVLTEGNPRWEQTHLTYRIENYTPDLPRADVDHAIEKAFQLWSNVTPLTFTKVSEGQADIMISFVRGDHRDNSPFDGPGGNLAHAFQPGPGIGGDAHFDEDERNTNNFREYNLHRVAAHELGHSLGLSHSTDIGALMYPSYTFSGDVQLAQDDIDGIQAIYGRSQNPVQPIGPQTPKACDSKLTFDAITTIRGEVMFFKDRFYMRTNPFYPEVELNFISVFWPQLPNGLEAAYEFADRDEVRFFKGNKYWAVQGQNVLHGYPKDIYSSFGFPRTVKHIDAALSEENTGKTYFFVANKYWRYDEYKRSMDPGYPKMIAHDFPGIGHKVDAVFMKDGFFYFFHGTRQYKFDPKTKRILTLQKANSWFNCRKN

SEQ ID NO: 2440 - protein, 450 aa, Artificial Sequence
  MMP-1 variant W184Q
FPATLETQEQDVDLVQKYLEKYYNLKNDGRQVEKRRNSGPVVEKLKQMQEFFGLKVTGKPDAETLKVMKQPRCGVPDVAQFVLTEGNPRWEQTHLTYRIENYTPDLPRADVDHAIEKAFQLWSNVTPLTFTKVSEGQADIMISFVRGDHRDNSPFDGPGGNLAHAFQPGPGIGGDAHFDEDERQTNNFREYNLHRVAAHELGHSLGLSHSTDIGALMYPSYTFSGDVQLAQDDIDGIQAIYGRSQNPVQPIGPQTPKACDSKLTFDAITTIRGEVMFFKDRFYMRTNPFYPEVELNFISVFWPQLPNGLEAAYEFADRDEVRFFKGNKYWAVQGQNVLHGYPKDIYSSFGFPRTVKHIDAALSEENTGKTYFFVANKYWRYDEYKRSMDPGYPKMIAHDFPGIGHKVDAVFMKDGFFYFFHGTRQYKFDPKTKRILTLQKANSWFNCRKN

SEQ ID NO: 2441 - protein, 450 aa, Artificial Sequence
  MMP-1 variant W184T
FPATLETQEQDVDLVQKYLEKYYNLKNDGRQVEKRRNSGPVVEKLKQMQEFFGLKVTGKPDAETLKVMKQPRCGVPDVAQFVLTEGNPRWEQTHLTYRIENYTPDLPRADVDHAIEKAFQLWSNVTPLTFTKVSEGQADIMISFVRGDHRDNSPFDGPGGNLAHAFQPGPGIGGDAHFDEDERTTNNFREYNLHRVAAHELGHSLGLSHSTDIGALMYPSYTFSGDVQLAQDDIDGIQAIYGRSQNPVQPIGPQTPKACDSKLTFDAITTIRGEVMFFKDRFYMRTNPFYPEVELNFISVFWPQLPNGLEAAYEFADRDEVRFFKGNKYWAVQGQNVLHGYPKDIYSSFGFPRTVKHIDAALSEENTGKTYFFVANKYWRYDEYKRSMDPGYPKMIAHDFPGIGHKVDAVFMKDGFFYFFHGTRQYKFDPKTKRILTLQKANSWFNCRKN

SEQ ID NO: 2442 - protein, 450 aa, Artificial Sequence
  MMP-1 variant W184Y
FPATLETQEQDVDLVQKYLEKYYNLKNDGRQVEKRRNSGPVVEKLKQMQEFFGLKVTGKPDAETLKVMKQPRCGVPDVAQFVLTEGNPRWEQTHLTYRIENYTPDLPRADVDHAIEKAFQLWSNVTPLTFTKVSEGQADIMISFVRGDHRDNSPFDGPGGNLAHAFQPGPGIGGDAHFDEDERYTNNFREYNLHRVAAHELGHSLGLSHSTDIGALMYPSYTFSGDVQLAQDDIDGIQAIYGRSQNPVQPIGPQTPKACDSKLTFDAITTIRGEVMFFKDRFYMRTNPFYPEVELNFISVFWPQLPNGLEAAYEFADRDEVRFFKGNKYWAVQGQNVLHGYPKDIYSSFGFPRTVKHIDAALSEENTGKTYFFVANKYWRYDEYKRSMDPGYPKMIAHDFPGIGHKVDAVFMKDGFFYFFHGTRQYKFDPKTKRILTLQKANSWFNCRKN

SEQ ID NO: 2443 - protein, 450 aa, Artificial Sequence
  MMP-1 variant W184S
FPATLETQEQDVDLVQKYLEKYYNLKNDGRQVEKRRNSGPVVEKLKQMQEFFGLKVTGKPDAETLKVMKQPRCGVPDVAQFVLTEGNPRWEQTHLTYRIENYTPDLPRADVDHAIEKAFQLWSNVTPLTFTKVSEGQADIMISFVRGDHRDNSPFDGPGGNLAHAFQPGPGIGGDAHFDEDERSTNNFREYNLHRVAAHELGHSLGLSHSTDIGALMYPSYTFSGDVQLAQDDIDGIQAIYGRSQNPVQPIGPQTPKACDSKLTFDAITTIRGEVMFFKDRFYMRTNPFYPEVELNFISVFWPQLPNGLEAAYEFADRDEVRFFKGNKYWAVQGQNVLHGYPKDIYSSFGFPRTVKHIDAALSEENTGKTYFFVANKYWRYDEYKRSMDPGYPKMIAHDFPGIGHKVDAVFMKDGFFYFFHGTRQYKFDPKTKRILTLQKANSWFNCRKN

SEQ ID NO: 2444 - protein, 450 aa, Artificial Sequence
  MMP-1 variant W184G
FPATLETQEQDVDLVQKYLEKYYNLKNDGRQVEKRRNSGPVVEKLKQMQEFFGLKVTGKPDAETLKVMKQPRCGVPDVAQFVLTEGNPRWEQTHLTYRIENYTPDLPRADVDHAIEKAFQLWSNVTPLTFTKVSEGQADIMISFVRGDHRDNSPFDGPGGNLAHAFQPGPGIGGDAHFDEDERGTNNFREYNLHRVAAHELGHSLGLSHSTDIGALMYPSYTFSGDVQLAQDDIDGIQAIYGRSQNPVQPIGPQTPKACDSKLTFDAITTIRGEVMFFKDRFYMRTNPFYPEVELNFISVFWPQLPNGLEAAYEFADRDEVRFFKGNKYWAVQGQNVLHGYPKDIYSSFGFPRTVKHIDAALSEENTGKTYFFVANKYWRYDEYKRSMDPGYPKMIAHDFPGIGHKVDAVFMKDGFFYFFHGTRQYKFDPKTKRILTLQKANSWFNCRKN

SEQ ID NO: 2445 - protein, 450 aa, Artificial Sequence
  MMP-1 variant W184F
FPATLETQEQDVDLVQKYLEKYYNLKNDGRQVEKRRNSGPVVEKLKQMQEFFGLKVTGKPDAETLKVMKQPRCGVPDVAQFVLTEGNPRWEQTHLTYRIENYTPDLPRADVDHAIEKAFQLWSNVTPLTFTKVSEGQADIMISFVRGDHRDNSPFDGPGGNLAHAFQPGPGIGGDAHFDEDERFTNNFREYNLHRVAAHELGHSLGLSHSTDIGALMYPSYTFSGDVQLAQDDIDGIQAIYGRSQNPVQPIGPQTPKACDSKLTFDAITTIRGEVMFFKDRFYMRTNPFYPEVELNFISVFWPQLPNGLEAAYEFADRDEVRFFKGNKYWAVQGQNVLHGYPKDIYSSFGFPRTVKHIDAALSEENTGKTYFFVANKYWRYDEYKRSMDPGYPKMIAHDFPGIGHKVDAVFMKDGFFYFFHGTRQYKFDPKTKRILTLQKANSWFNCRKN

SEQ ID NO: 2446 - protein, 450 aa, Artificial Sequence
  MMP-1 variant W184M
FPATLETQEQDVDLVQKYLEKYYNLKNDGRQVEKRRNSGPVVEKLKQMQEFFGLKVTGKPDAETLKVMKQPRCGVPDVAQFVLTEGNPRWEQTHLTYRIENYTPDLPRADVDHAIEKAFQLWSNVTPLTFTKVSEGQADIMISFVRGDHRDNSPFDGPGGNLAHAFQPGPGIGGDAHFDEDERMTNNFREYNLHRVAAHELGHSLGLSHSTDIGALMYPSYTFSGDVQLAQDDIDGIQAIYGRSQNPVQPIGPQTPKACDSKLTFDAITTIRGEVMFFKDRFYMRTNPFYPEVELNFISVFWPQLPNGLEAAYEFADRDEVRFFKGNKYWAVQGQNVLHGYPKDIYSSFGFPRTVKHIDAALSEENTGKTYFFVANKYWRYDEYKRSMDPGYPKMIAHDFPGIGHKVDAVFMKDGFFYFFHGTRQYKFDPKTKRILTLQKANSWFNCRKN

SEQ ID NO: 2447 - protein, 450 aa, Artificial Sequence
  MMP-1 variant W184I
FPATLETQEQDVDLVQKYLEKYYNLKNDGRQVEKRRNSGPVVEKLKQMQEFFGLKVTGKPDAETLKVMKQPRCGVPDVAQFVLTEGNPRWEQTHLTYRIENYTPDLPRADVDHAIEKAFQLWSNVTPLTFTKVSEGQADIMISFVRGDHRDNSPFDGPGGNLAHAFQPGPGIGGDAHFDEDERITNNFREYNLHRVAAHELGHSLGLSHSTDIGALMYPSYTFSGDVQLAQDDIDGIQAIYGRSQNPVQPIGPQTPKACDSKLTFDAITTIRGEVMFFKDRFYMRTNPFYPEVELNFISVFWPQLPNGLEAAYEFADRDEVRFFKGNKYWAVQGQNVLHGYPKDIYSSFGFPRTVKHIDAALSEENTGKTYFFVANKYWRYDEYKRSMDPGYPKMIAHDFPGIGHKVDAVFMKDGFFYFFHGTRQYKFDPKTKRILTLQKANSWFNCRKN

SEQ ID NO: 2448 - protein, 450 aa, Artificial Sequence
  MMP-1 variant W184V
FPATLETQEQDVDLVQKYLEKYYNLKNDGRQVEKRRNSGPVVEKLKQMQEFFGLKVTGKPDAETLKVMKQPRCGVPDVAQFVLTEGNPRWEQTHLTYRIENYTPDLPRADVDHAIEKAFQLWSNVTPLTFTKVSEGQADIMISFVRGDHRDNSPFDGPGGNLAHAFQPGPGIGGDAHFDEDERVTNNFREYNLHRVAAHELGHSLGLSHSTDIGALMYPSYTFSGDVQLAQDDIDGIQAIYGRSQNPVQPIGPQTPKACDSKLTFDAITTIRGEVMFFKDRFYMRTNPFYPEVELNFISVFWPQLPNGLEAAYEFADRDEVRFFKGNKYWAVQGQNVLHGYPKDIYSSFGFPRTVKHIDAALSEENTGKTYFFVANKYWRYDEYKRSMDPGYPKMIAHDFPGIGHKVDAVFMKDGFFYFFHGTRQYKFDPKTKRILTLQKANSWFNCRKN

SEQ ID NO: 2449 - protein, 450 aa, Artificial Sequence
  MMP-1 variant W184L
FPATLETQEQDVDLVQKYLEKYYNLKNDGRQVEKRRNSGPVVEKLKQMQEFFGLKVTGKPDAETLKVMKQPRCGVPDVAQFVLTEGNPRWEQTHLTYRIENYTPDLPRADVDHAIEKAFQLWSNVTPLTFTKVSEGQADIMISFVRGDHRDNSPFDGPGGNLAHAFQPGPGIGGDAHFDEDERLTNNFREYNLHRVAAHELGHSLGLSHSTDIGALMYPSYTFSGDVQLAQDDIDGIQAIYGRSQNPVQPIGPQTPKACDSKLTFDAITTIRGEVMFFKDRFYMRTNPFYPEVELNFISVFWPQLPNGLEAAYEFADRDEVRFFKGNKYWAVQGQNVLHGYPKDIYSSFGFPRTVKHIDAALSEENTGKTYFFVANKYWRYDEYKRSMDPGYPKMIAHDFPGIGHKVDAVFMKDGFFYFFHGTRQYKFDPKTKRILTLQKANSWFNCRKN

SEQ ID NO: 2450 - protein, 450 aa, Artificial Sequence
  MMP-1 variant W184A
FPATLETQEQDVDLVQKYLEKYYNLKNDGRQVEKRRNSGPVVEKLKQMQEFFGLKVTGKPDAETLKVMKQPRCGVPDVAQFVLTEGNPRWEQTHLTYRIENYTPDLPRADVDHAIEKAFQLWSNVTPLTFTKVSEGQADIMISFVRGDHRDNSPFDGPGGNLAHAFQPGPGIGGDAHFDEDERATNNFREYNLHRVAAHELGHSLGLSHSTDIGALMYPSYTFSGDVQLAQDDIDGIQAIYGRSQNPVQPIGPQTPKACDSKLTFDAITTIRGEVMFFKDRFYMRTNPFYPEVELNFISVFWPQLPNGLEAAYEFADRDEVRFFKGNKYWAVQGQNVLHGYPKDIYSSFGFPRTVKHIDAALSEENTGKTYFFVANKYWRYDEYKRSMDPGYPKMIAHDFPGIGHKVDAVFMKDGFFYFFHGTRQYKFDPKTKRILTLQKANSWFNCRKN

SEQ ID NO: 2451 - protein, 450 aa, Artificial Sequence
  MMP-1 variant W184P
FPATLETQEQDVDLVQKYLEKYYNLKNDGRQVEKRRNSGPVVEKLKQMQEFFGLKVTGKPDAETLKVMKQPRCGVPDVAQFVLTEGNPRWEQTHLTYRIENYTPDLPRADVDHAIEKAFQLWSNVTPLTFTKVSEGQADIMISFVRGDHRDNSPFDGPGGNLAHAFQPGPGIGGDAHFDEDERPTNNFREYNLHRVAAHELGHSLGLSHSTDIGALMYPSYTFSGDVQLAQDDIDGIQAIYGRSQNPVQPIGPQTPKACDSKLTFDAITTIRGEVMFFKDRFYMRTNPFYPEVELNFISVFWPQLPNGLEAAYEFADRDEVRFFKGNKYWAVQGQNVLHGYPKDIYSSFGFPRTVKHIDAALSEENTGKTYFFVANKYWRYDEYKRSMDPGYPKMIAHDFPGIGHKVDAVFMKDGFFYFFHGTRQYKFDPKTKRILTLQKANSWFNCRKN

SEQ ID NO: 2452 - protein, 450 aa, Artificial Sequence
  MMP-1 variant N186D
FPATLETQEQDVDLVQKYLEKYYNLKNDGRQVEKRRNSGPVVEKLKQMQEFFGLKVTGKPDAETLKVMKQPRCGVPDVAQFVLTEGNPRWEQTHLTYRIENYTPDLPRADVDHAIEKAFQLWSNVTPLTFTKVSEGQADIMISFVRGDHRDNSPFDGPGGNLAHAFQPGPGIGGDAHFDEDERWTDNFREYNLHRVAAHELGHSLGLSHSTDIGALMYPSYTFSGDVQLAQDDIDGIQAIYGRSQNPVQPIGPQTPKACDSKLTFDAITTIRGEVMFFKDRFYMRTNPFYPEVELNFISVFWPQLPNGLEAAYEFADRDEVRFFKGNKYWAVQGQNVLHGYPKDIYSSFGFPRTVKHIDAALSEENTGKTYFFVANKYWRYDEYKRSMDPGYPKMIAHDFPGIGHKVDAVFMKDGFFYFFHGTRQYKFDPKTKRILTLQKANSWFNCRKN

SEQ ID NO: 2453 - protein, 450 aa, Artificial Sequence
  MMP-1 variant N186E
FPATLETQEQDVDLVQKYLEKYYNLKNDGRQVEKRRNSGPVVEKLKQMQEFFGLKVTGKPDAETLKVMKQPRCGVPDVAQFVLTEGNPRWEQTHLTYRIENYTPDLPRADVDHAIEKAFQLWSNVTPLTFTKVSEGQADIMISFVRGDHRDNSPFDGPGGNLAHAFQPGPGIGGDAHFDEDERWTENFREYNLHRVAAHELGHSLGLSHSTDIGALMYPSYTFSGDVQLAQDDIDGIQAIYGRSQNPVQPIGPQTPKACDSKLTFDAITTIRGEVMFFKDRFYMRTNPFYPEVELNFISVFWPQLPNGLEAAYEFADRDEVRFFKGNKYWAVQGQNVLHGYPKDIYSSFGFPRTVKHIDAALSEENTGKTYFFVANKYWRYDEYKRSMDPGYPKMIAHDFPGIGHKVDAVFMKDGFFYFFHGTRQYKFDPKTKRILTLQKANSWFNCRKN

SEQ ID NO: 2454 - protein, 450 aa, Artificial Sequence
  MMP-1 variant N186H
FPATLETQEQDVDLVQKYLEKYYNLKNDGRQVEKRRNSGPVVEKLKQMQEFFGLKVTGKPDAETLKVMKQPRCGVPDVAQFVLTEGNPRWEQTHLTYRIENYTPDLPRADVDHAIEKAFQLWSNVTPLTFTKVSEGQADIMISFVRGDHRDNSPFDGPGGNLAHAFQPGPGIGGDAHFDEDERWTHNFREYNLHRVAAHELGHSLGLSHSTDIGALMYPSYTFSGDVQLAQDDIDGIQAIYGRSQNPVQPIGPQTPKACDSKLTFDAITTIRGEVMFFKDRFYMRTNPFYPEVELNFISVFWPQLPNGLEAAYEFADRDEVRFFKGNKYWAVQGQNVLHGYPKDIYSSFGFPRTVKHIDAALSEENTGKTYFFVANKYWRYDEYKRSMDPGYPKMIAHDFPGIGHKVDAVFMKDGFFYFFHGTRQYKFDPKTKRILTLQKANSWFNCRKN

SEQ ID NO: 2455 - protein, 450 aa, Artificial Sequence
  MMP-1 variant N186K
FPATLETQEQDVDLVQKYLEKYYNLKNDGRQVEKRRNSGPVVEKLKQMQEFFGLKVTGKPDAETLKVMKQPRCGVPDVAQFVLTEGNPRWEQTHLTYRIENYTPDLPRADVDHAIEKAFQLWSNVTPLTFTKVSEGQADIMISFVRGDHRDNSPFDGPGGNLAHAFQPGPGIGGDAHFDEDERWTKNFREYNLHRVAAHELGHSLGLSHSTDIGALMYPSYTFSGDVQLAQDDIDGIQAIYGRSQNPVQPIGPQTPKACDSKLTFDAITTIRGEVMFFKDRFYMRTNPFYPEVELNFISVFWPQLPNGLEAAYEFADRDEVRFFKGNKYWAVQGQNVLHGYPKDIYSSFGFPRTVKHIDAALSEENTGKTYFFVANKYWRYDEYKRSMDPGYPKMIAHDFPGIGHKVDAVFMKDGFFYFFHGTRQYKFDPKTKRILTLQKANSWFNCRKN

SEQ ID NO: 2456 - protein, 450 aa, Artificial Sequence
  MMP-1 variant N186R
FPATLETQEQDVDLVQKYLEKYYNLKNDGRQVEKRRNSGPVVEKLKQMQEFFGLKVTGKPDAETLKVMKQPRCGVPDVAQFVLTEGNPRWEQTHLTYRIENYTPDLPRADVDHAIEKAFQLWSNVTPLTFTKVSEGQADIMISFVRGDHRDNSPFDGPGGNLAHAFQPGPGIGGDAHFDEDERWTRNFREYNLHRVAAHELGHSLGLSHSTDIGALMYPSYTFSGDVQLAQDDIDGIQAIYGRSQNPVQPIGPQTPKACDSKLTFDAITTIRGEVMFFKDRFYMRTNPFYPEVELNFISVFWPQLPNGLEAAYEFADRDEVRFFKGNKYWAVQGQNVLHGYPKDIYSSFGFPRTVKHIDAALSEENTGKTYFFVANKYWRYDEYKRSMDPGYPKMIAHDFPGIGHKVDAVFMKDGFFYFFHGTRQYKFDPKTKRILTLQKANSWFNCRKN

SEQ ID NO: 2457 - protein, 450 aa, Artificial Sequence
  MMP-1 variant N186C
FPATLETQEQDVDLVQKYLEKYYNLKNDGRQVEKRRNSGPVVEKLKQMQEFFGLKVTGKPDAETLKVMKQPRCGVPDVAQFVLTEGNPRWEQTHLTYRIENYTPDLPRADVDHAIEKAFQLWSNVTPLTFTKVSEGQADIMISFVRGDHRDNSPFDGPGGNLAHAFQPGPGIGGDAHFDEDERWTCNFREYNLHRVAAHELGHSLGLSHSTDIGALMYPSYTFSGDVQLAQDDIDGIQAIYGRSQNPVQPIGPQTPKACDSKLTFDAITTIRGEVMFFKDRFYMRTNPFYPEVELNFISVFWPQLPNGLEAAYEFADRDEVRFFKGNKYWAVQGQNVLHGYPKDIYSSFGFPRTVKHIDAALSEENTGKTYFFVANKYWRYDEYKRSMDPGYPKMIAHDFPGIGHKVDAVFMKDGFFYFFHGTRQYKFDPKTKRILTLQKANSWFNCRKN

SEQ ID NO: 2458 - protein, 450 aa, Artificial Sequence
  MMP-1 variant N186Q
FPATLETQEQDVDLVQKYLEKYYNLKNDGRQVEKRRNSGPVVEKLKQMQEFFGLKVTGKPDAETLKVMKQPRCGVPDVAQFVLTEGNPRWEQTHLTYRIENYTPDLPRADVDHAIEKAFQLWSNVTPLTFTKVSEGQADIMISFVRGDHRDNSPFDGPGGNLAHAFQPGPGIGGDAHFDEDERWTQNFREYNLHRVAAHELGHSLGLSHSTDIGALMYPSYTFSGDVQLAQDDIDGIQAIYGRSQNPVQPIGPQTPKACDSKLTFDAITTIRGEVMFFKDRFYMRTNPFYPEVELNFISVFWPQLPNGLEAAYEFADRDEVRFFKGNKYWAVQGQNVLHGYPKDIYSSFGFPRTVKHIDAALSEENTGKTYFFVANKYWRYDEYKRSMDPGYPKMIAHDFPGIGHKVDAVFMKDGFFYFFHGTRQYKFDPKTKRILTLQKANSWFNCRKN

SEQ ID NO: 2459 - protein, 450 aa, Artificial Sequence
  MMP-1 variant N186T
FPATLETQEQDVDLVQKYLEKYYNLKNDGRQVEKRRNSGPVVEKLKQMQEFFGLKVTGKPDAETLKVMKQPRCGVPDVAQFVLTEGNPRWEQTHLTYRIENYTPDLPRADVDHAIEKAFQLWSNVTPLTFTKVSEGQADIMISFVRGDHRDNSPFDGPGGNLAHAFQPGPGIGGDAHFDEDERWTTNFREYNLHRVAAHELGHSLGLSHSTDIGALMYPSYTFSGDVQLAQDDIDGIQAIYGRSQNPVQPIGPQTPKACDSKLTFDAITTIRGEVMFFKDRFYMRTNPFYPEVELNFISVFWPQLPNGLEAAYEFADRDEVRFFKGNKYWAVQGQNVLHGYPKDIYSSFGFPRTVKHIDAALSEENTGKTYFFVANKYWRYDEYKRSMDPGYPKMIAHDFPGIGHKVDAVFMKDGFFYFFHGTRQYKFDPKTKRILTLQKANSWFNCRKN

SEQ ID NO: 2460 - protein, 450 aa, Artificial Sequence
  MMP-1 variant N186Y
FPATLETQEQDVDLVQKYLEKYYNLKNDGRQVEKRRNSGPVVEKLKQMQEFFGLKVTGKPDAETLKVMKQPRCGVPDVAQFVLTEGNPRWEQTHLTYRIENYTPDLPRADVDHAIEKAFQLWSNVTPLTFTKVSEGQADIMISFVRGDHRDNSPFDGPGGNLAHAFQPGPGIGGDAHFDEDERWTYNFREYNLHRVAAHELGHSLGLSHSTDIGALMYPSYTFSGDVQLAQDDIDGIQAIYGRSQNPVQPIGPQTPKACDSKLTFDAITTIRGEVMFFKDRFYMRTNPFYPEVELNFISVFWPQLPNGLEAAYEFADRDEVRFFKGNKYWAVQGQNVLHGYPKDIYSSFGFPRTVKHIDAALSEENTGKTYFFVANKYWRYDEYKRSMDPGYPKMIAHDFPGIGHKVDAVFMKDGFFYFFHGTRQYKFDPKTKRILTLQKANSWFNCRKN

SEQ ID NO: 2461 - protein, 450 aa, Artificial Sequence
  MMP-1 variant N186S
FPATLETQEQDVDLVQKYLEKYYNLKNDGRQVEKRRNSGPVVEKLKQMQEFFGLKVTGKPDAETLKVMKQPRCGVPDVAQFVLTEGNPRWEQTHLTYRIENYTPDLPRADVDHAIEKAFQLWSNVTPLTFTKVSEGQADIMISFVRGDHRDNSPFDGPGGNLAHAFQPGPGIGGDAHFDEDERWTSNFREYNLHRVAAHELGHSLGLSHSTDIGALMYPSYTFSGDVQLAQDDIDGIQAIYGRSQNPVQPIGPQTPKACDSKLTFDAITTIRGEVMFFKDRFYMRTNPFYPEVELNFISVFWPQLPNGLEAAYEFADRDEVRFFKGNKYWAVQGQNVLHGYPKDIYSSFGFPRTVKHIDAALSEENTGKTYFFVANKYWRYDEYKRSMDPGYPKMIAHDFPGIGHKVDAVFMKDGFFYFFHGTRQYKFDPKTKRILTLQKANSWFNCRKN

SEQ ID NO: 2462 - protein, 450 aa, Artificial Sequence
  MMP-1 variant N186G
FPATLETQEQDVDLVQKYLEKYYNLKNDGRQVEKRRNSGPVVEKLKQMQEFFGLKVTGKPDAETLKVMKQPRCGVPDVAQFVLTEGNPRWEQTHLTYRIENYTPDLPRADVDHAIEKAFQLWSNVTPLTFTKVSEGQADIMISFVRGDHRDNSPFDGPGGNLAHAFQPGPGIGGDAHFDEDERWTGNFREYNLHRVAAHELGHSLGLSHSTDIGALMYPSYTFSGDVQLAQDDIDGIQAIYGRSQNPVQPIGPQTPKACDSKLTFDAITTIRGEVMFFKDRFYMRTNPFYPEVELNFISVFWPQLPNGLEAAYEFADRDEVRFFKGNKYWAVQGQNVLHGYPKDIYSSFGFPRTVKHIDAALSEENTGKTYFFVANKYWRYDEYKRSMDPGYPKMIAHDFPGIGHKVDAVFMKDGFFYFFHGTRQYKFDPKTKRILTLQKANSWFNCRKN

SEQ ID NO: 2463 - protein, 450 aa, Artificial Sequence
  MMP-1 variant N186F
FPATLETQEQDVDLVQKYLEKYYNLKNDGRQVEKRRNSGPVVEKLKQMQEFFGLKVTGKPDAETLKVMKQPRCGVPDVAQFVLTEGNPRWEQTHLTYRIENYTPDLPRADVDHAIEKAFQLWSNVTPLTFTKVSEGQADIMISFVRGDHRDNSPFDGPGGNLAHAFQPGPGIGGDAHFDEDERWTFNFREYNLHRVAAHELGHSLGLSHSTDIGALMYPSYTFSGDVQLAQDDIDGIQAIYGRSQNPVQPIGPQTPKACDSKLTFDAITTIRGEVMFFKDRFYMRTNPFYPEVELNFISVFWPQLPNGLEAAYEFADRDEVRFFKGNKYWAVQGQNVLHGYPKDIYSSFGFPRTVKHIDAALSEENTGKTYFFVANKYWRYDEYKRSMDPGYPKMIAHDFPGIGHKVDAVFMKDGFFYFFHGTRQYKFDPKTKRILTLQKANSWFNCRKN

SEQ ID NO: 2464 - protein, 450 aa, Artificial Sequence
  MMP-1 variant N186M
FPATLETQEQDVDLVQKYLEKYYNLKNDGRQVEKRRNSGPVVEKLKQMQEFFGLKVTGKPDAETLKVMKQPRCGVPDVAQFVLTEGNPRWEQTHLTYRIENYTPDLPRADVDHAIEKAFQLWSNVTPLTFTKVSEGQADIMISFVRGDHRDNSPFDGPGGNLAHAFQPGPGIGGDAHFDEDERWTMNFREYNLHRVAAHELGHSLGLSHSTDIGALMYPSYTFSGDVQLAQDDIDGIQAIYGRSQNPVQPIGPQTPKACDSKLTFDAITTIRGEVMFFKDRFYMRTNPFYPEVELNFISVFWPQLPNGLEAAYEFADRDEVRFFKGNKYWAVQGQNVLHGYPKDIYSSFGFPRTVKHIDAALSEENTGKTYFFVANKYWRYDEYKRSMDPGYPKMIAHDFPGIGHKVDAVFMKDGFFYFFHGTRQYKFDPKTKRILTLQKANSWFNCRKN

SEQ ID NO: 2465 - protein, 450 aa, Artificial Sequence
  MMP-1 variant N186W
FPATLETQEQDVDLVQKYLEKYYNLKNDGRQVEKRRNSGPVVEKLKQMQEFFGLKVTGKPDAETLKVMKQPRCGVPDVAQFVLTEGNPRWEQTHLTYRIENYTPDLPRADVDHAIEKAFQLWSNVTPLTFTKVSEGQADIMISFVRGDHRDNSPFDGPGGNLAHAFQPGPGIGGDAHFDEDERWTWNFREYNLHRVAAHELGHSLGLSHSTDIGALMYPSYTFSGDVQLAQDDIDGIQAIYGRSQNPVQPIGPQTPKACDSKLTFDAITTIRGEVMFFKDRFYMRTNPFYPEVELNFISVFWPQLPNGLEAAYEFADRDEVRFFKGNKYWAVQGQNVLHGYPKDIYSSFGFPRTVKHIDAALSEENTGKTYFFVANKYWRYDEYKRSMDPGYPKMIAHDFPGIGHKVDAVFMKDGFFYFFHGTRQYKFDPKTKRILTLQKANSWFNCRKN

SEQ ID NO: 2466 - protein, 450 aa, Artificial Sequence
  MMP-1 variant N186I
FPATLETQEQDVDLVQKYLEKYYNLKNDGRQVEKRRNSGPVVEKLKQMQEFFGLKVTGKPDAETLKVMKQPRCGVPDVAQFVLTEGNPRWEQTHLTYRIENYTPDLPRADVDHAIEKAFQLWSNVTPLTFTKVSEGQADIMISFVRGDHRDNSPFDGPGGNLAHAFQPGPGIGGDAHFDEDERWTINFREYNLHRVAAHELGHSLGLSHSTDIGALMYPSYTFSGDVQLAQDDIDGIQAIYGRSQNPVQPIGPQTPKACDSKLTFDAITTIRGEVMFFKDRFYMRTNPFYPEVELNFISVFWPQLPNGLEAAYEFADRDEVRFFKGNKYWAVQGQNVLHGYPKDIYSSFGFPRTVKHIDAALSEENTGKTYFFVANKYWRYDEYKRSMDPGYPKMIAHDFPGIGHKVDAVFMKDGFFYFFHGTRQYKFDPKTKRILTLQKANSWFNCRKN

SEQ ID NO: 2467 - protein, 450 aa, Artificial Sequence
  MMP-1 variant N186V
FPATLETQEQDVDLVQKYLEKYYNLKNDGRQVEKRRNSGPVVEKLKQMQEFFGLKVTGKPDAETLKVMKQPRCGVPDVAQFVLTEGNPRWEQTHLTYRIENYTPDLPRADVDHAIEKAFQLWSNVTPLTFTKVSEGQADIMISFVRGDHRDNSPFDGPGGNLAHAFQPGPGIGGDAHFDEDERWTVNFREYNLHRVAAHELGHSLGLSHSTDIGALMYPSYTFSGDVQLAQDDIDGIQAIYGRSQNPVQPIGPQTPKACDSKLTFDAITTIRGEVMFFKDRFYMRTNPFYPEVELNFISVFWPQLPNGLEAAYEFADRDEVRFFKGNKYWAVQGQNVLHGYPKDIYSSFGFPRTVKHIDAALSEENTGKTYFFVANKYWRYDEYKRSMDPGYPKMIAHDFPGIGHKVDAVFMKDGFFYFFHGTRQYKFDPKTKRILTLQKANSWFNCRKN

SEQ ID NO: 2468 - protein, 450 aa, Artificial Sequence
  MMP-1 variant N186L
FPATLETQEQDVDLVQKYLEKYYNLKNDGRQVEKRRNSGPVVEKLKQMQEFFGLKVTGKPDAETLKVMKQPRCGVPDVAQFVLTEGNPRWEQTHLTYRIENYTPDLPRADVDHAIEKAFQLWSNVTPLTFTKVSEGQADIMISFVRGDHRDNSPFDGPGGNLAHAFQPGPGIGGDAHFDEDERWTLNFREYNLHRVAAHELGHSLGLSHSTDIGALMYPSYTFSGDVQLAQDDIDGIQAIYGRSQNPVQPIGPQTPKACDSKLTFDAITTIRGEVMFFKDRFYMRTNPFYPEVELNFISVFWPQLPNGLEAAYEFADRDEVRFFKGNKYWAVQGQNVLHGYPKDIYSSFGFPRTVKHIDAALSEENTGKTYFFVANKYWRYDEYKRSMDPGYPKMIAHDFPGIGHKVDAVFMKDGFFYFFHGTRQYKFDPKTKRILTLQKANSWFNCRKN

SEQ ID NO: 2469 - protein, 450 aa, Artificial Sequence
  MMP-1 variant N186A
FPATLETQEQDVDLVQKYLEKYYNLKNDGRQVEKRRNSGPVVEKLKQMQEFFGLKVTGKPDAETLKVMKQPRCGVPDVAQFVLTEGNPRWEQTHLTYRIENYTPDLPRADVDHAIEKAFQLWSNVTPLTFTKVSEGQADIMISFVRGDHRDNSPFDGPGGNLAHAFQPGPGIGGDAHFDEDERWTANFREYNLHRVAAHELGHSLGLSHSTDIGALMYPSYTFSGDVQLAQDDIDGIQAIYGRSQNPVQPIGPQTPKACDSKLTFDAITTIRGEVMFFKDRFYMRTNPFYPEVELNFISVFWPQLPNGLEAAYEFADRDEVRFFKGNKYWAVQGQNVLHGYPKDIYSSFGFPRTVKHIDAALSEENTGKTYFFVANKYWRYDEYKRSMDPGYPKMIAHDFPGIGHKVDAVFMKDGFFYFFHGTRQYKFDPKTKRILTLQKANSWFNCRKN

SEQ ID NO: 2470 - protein, 450 aa, Artificial Sequence
  MMP-1 variant N186P
FPATLETQEQDVDLVQKYLEKYYNLKNDGRQVEKRRNSGPVVEKLKQMQEFFGLKVTGKPDAETLKVMKQPRCGVPDVAQFVLTEGNPRWEQTHLTYRIENYTPDLPRADVDHAIEKAFQLWSNVTPLTFTKVSEGQADIMISFVRGDHRDNSPFDGPGGNLAHAFQPGPGIGGDAHFDEDERWTPNFREYNLHRVAAHELGHSLGLSHSTDIGALMYPSYTFSGDVQLAQDDIDGIQAIYGRSQNPVQPIGPQTPKACDSKLTFDAITTIRGEVMFFKDRFYMRTNPFYPEVELNFISVFWPQLPNGLEAAYEFADRDEVRFFKGNKYWAVQGQNVLHGYPKDIYSSFGFPRTVKHIDAALSEENTGKTYFFVANKYWRYDEYKRSMDPGYPKMIAHDFPGIGHKVDAVFMKDGFFYFFHGTRQYKFDPKTKRILTLQKANSWFNCRKN

SEQ ID NO: 2471 - protein, 450 aa, Artificial Sequence
  MMP-1 variant F188D
FPATLETQEQDVDLVQKYLEKYYNLKNDGRQVEKRRNSGPVVEKLKQMQEFFGLKVTGKPDAETLKVMKQPRCGVPDVAQFVLTEGNPRWEQTHLTYRIENYTPDLPRADVDHAIEKAFQLWSNVTPLTFTKVSEGQADIMISFVRGDHRDNSPFDGPGGNLAHAFQPGPGIGGDAHFDEDERWTNNDREYNLHRVAAHELGHSLGLSHSTDIGALMYPSYTFSGDVQLAQDDIDGIQAIYGRSQNPVQPIGPQTPKACDSKLTFDAITTIRGEVMFFKDRFYMRTNPFYPEVELNFISVFWPQLPNGLEAAYEFADRDEVRFFKGNKYWAVQGQNVLHGYPKDIYSSFGFPRTVKHIDAALSEENTGKTYFFVANKYWRYDEYKRSMDPGYPKMIAHDFPGIGHKVDAVFMKDGFFYFFHGTRQYKFDPKTKRILTLQKANSWFNCRKN

SEQ ID NO: 2472 - protein, 450 aa, Artificial Sequence
  MMP-1 variant F188E
FPATLETQEQDVDLVQKYLEKYYNLKNDGRQVEKRRNSGPVVEKLKQMQEFFGLKVTGKPDAETLKVMKQPRCGVPDVAQFVLTEGNPRWEQTHLTYRIENYTPDLPRADVDHAIEKAFQLWSNVTPLTFTKVSEGQADIMISFVRGDHRDNSPFDGPGGNLAHAFQPGPGIGGDAHFDEDERWTNNEREYNLHRVAAHELGHSLGLSHSTDIGALMYPSYTFSGDVQLAQDDIDGIQAIYGRSQNPVQPIGPQTPKACDSKLTFDAITTIRGEVMFFKDRFYMRTNPFYPEVELNFISVFWPQLPNGLEAAYEFADRDEVRFFKGNKYWAVQGQNVLHGYPKDIYSSFGFPRTVKHIDAALSEENTGKTYFFVANKYWRYDEYKRSMDPGYPKMIAHDFPGIGHKVDAVFMKDGFFYFFHGTRQYKFDPKTKRILTLQKANSWFNCRKN

SEQ ID NO: 2473 - protein, 450 aa, Artificial Sequence
  MMP-1 variant F188H
FPATLETQEQDVDLVQKYLEKYYNLKNDGRQVEKRRNSGPVVEKLKQMQEFFGLKVTGKPDAETLKVMKQPRCGVPDVAQFVLTEGNPRWEQTHLTYRIENYTPDLPRADVDHAIEKAFQLWSNVTPLTFTKVSEGQADIMISFVRGDHRDNSPFDGPGGNLAHAFQPGPGIGGDAHFDEDERWTNNHREYNLHRVAAHELGHSLGLSHSTDIGALMYPSYTFSGDVQLAQDDIDGIQAIYGRSQNPVQPIGPQTPKACDSKLTFDAITTIRGEVMFFKDRFYMRTNPFYPEVELNFISVFWPQLPNGLEAAYEFADRDEVRFFKGNKYWAVQGQNVLHGYPKDIYSSFGFPRTVKHIDAALSEENTGKTYFFVANKYWRYDEYKRSMDPGYPKMIAHDFPGIGHKVDAVFMKDGFFYFFHGTRQYKFDPKTKRILTLQKANSWFNCRKN

SEQ ID NO: 2474 - protein, 450 aa, Artificial Sequence
  MMP-1 variant F188K
FPATLETQEQDVDLVQKYLEKYYNLKNDGRQVEKRRNSGPVVEKLKQMQEFFGLKVTGKPDAETLKVMKQPRCGVPDVAQFVLTEGNPRWEQTHLTYRIENYTPDLPRADVDHAIEKAFQLWSNVTPLTFTKVSEGQADIMISFVRGDHRDNSPFDGPGGNLAHAFQPGPGIGGDAHFDEDERWTNNKREYNLHRVAAHELGHSLGLSHSTDIGALMYPSYTFSGDVQLAQDDIDGIQAIYGRSQNPVQPIGPQTPKACDSKLTFDAITTIRGEVMFFKDRFYMRTNPFYPEVELNFISVFWPQLPNGLEAAYEFADRDEVRFFKGNKYWAVQGQNVLHGYPKDIYSSFGFPRTVKHIDAALSEENTGKTYFFVANKYWRYDEYKRSMDPGYPKMIAHDFPGIGHKVDAVFMKDGFFYFFHGTRQYKFDPKTKRILTLQKANSWFNCRKN

SEQ ID NO: 2475 - protein, 450 aa, Artificial Sequence
  MMP-1 variant F188R
FPATLETQEQDVDLVQKYLEKYYNLKNDGRQVEKRRNSGPVVEKLKQMQEFFGLKVTGKPDAETLKVMKQPRCGVPDVAQFVLTEGNPRWEQTHLTYRIENYTPDLPRADVDHAIEKAFQLWSNVTPLTFTKVSEGQADIMISFVRGDHRDNSPFDGPGGNLAHAFQPGPGIGGDAHFDEDERWTNNRREYNLHRVAAHELGHSLGLSHSTDIGALMYPSYTFSGDVQLAQDDIDGIQAIYGRSQNPVQPIGPQTPKACDSKLTFDAITTIRGEVMFFKDRFYMRTNPFYPEVELNFISVFWPQLPNGLEAAYEFADRDEVRFFKGNKYWAVQGQNVLHGYPKDIYSSFGFPRTVKHIDAALSEENTGKTYFFVANKYWRYDEYKRSMDPGYPKMIAHDFPGIGHKVDAVFMKDGFFYFFHGTRQYKFDPKTKRILTLQKANSWFNCRKN

SEQ ID NO: 2476 - protein, 450 aa, Artificial Sequence
  MMP-1 variant F188C
FPATLETQEQDVDLVQKYLEKYYNLKNDGRQVEKRRNSGPVVEKLKQMQEFFGLKVTGKPDAETLKVMKQPRCGVPDVAQFVLTEGNPRWEQTHLTYRIENYTPDLPRADVDHAIEKAFQLWSNVTPLTFTKVSEGQADIMISFVRGDHRDNSPFDGPGGNLAHAFQPGPGIGGDAHFDEDERWTNNCREYNLHRVAAHELGHSLGLSHSTDIGALMYPSYTFSGDVQLAQDDIDGIQAIYGRSQNPVQPIGPQTPKACDSKLTFDAITTIRGEVMFFKDRFYMRTNPFYPEVELNFISVFWPQLPNGLEAAYEFADRDEVRFFKGNKYWAVQGQNVLHGYPKDIYSSFGFPRTVKHIDAALSEENTGKTYFFVANKYWRYDEYKRSMDPGYPKMIAHDFPGIGHKVDAVFMKDGFFYFFHGTRQYKFDPKTKRILTLQKANSWFNCRKN

SEQ ID NO: 2477 - protein, 450 aa, Artificial Sequence
  MMP-1 variant F188N
FPATLETQEQDVDLVQKYLEKYYNLKNDGRQVEKRRNSGPVVEKLKQMQEFFGLKVTGKPDAETLKVMKQPRCGVPDVAQFVLTEGNPRWEQTHLTYRIENYTPDLPRADVDHAIEKAFQLWSNVTPLTFTKVSEGQADIMISFVRGDHRDNSPFDGPGGNLAHAFQPGPGIGGDAHFDEDERWTNNNREYNLHRVAAHELGHSLGLSHSTDIGALMYPSYTFSGDVQLAQDDIDGIQAIYGRSQNPVQPIGPQTPKACDSKLTFDAITTIRGEVMFFKDRFYMRTNPFYPEVELNFISVFWPQLPNGLEAAYEFADRDEVRFFKGNKYWAVQGQNVLHGYPKDIYSSFGFPRTVKHIDAALSEENTGKTYFFVANKYWRYDEYKRSMDPGYPKMIAHDFPGIGHKVDAVFMKDGFFYFFHGTRQYKFDPKTKRILTLQKANSWFNCRKN

SEQ ID NO: 2478 - protein, 450 aa, Artificial Sequence
  MMP-1 variant F188Q
FPATLETQEQDVDLVQKYLEKYYNLKNDGRQVEKRRNSGPVVEKLKQMQEFFGLKVTGKPDAETLKVMKQPRCGVPDVAQFVLTEGNPRWEQTHLTYRIENYTPDLPRADVDHAIEKAFQLWSNVTPLTFTKVSEGQADIMISFVRGDHRDNSPFDGPGGNLAHAFQPGPGIGGDAHFDEDERWTNNQREYNLHRVAAHELGHSLGLSHSTDIGALMYPSYTFSGDVQLAQDDIDGIQAIYGRSQNPVQPIGPQTPKACDSKLTFDAITTIRGEVMFFKDRFYMRTNPFYPEVELNFISVFWPQLPNGLEAAYEFADRDEVRFFKGNKYWAVQGQNVLHGYPKDIYSSFGFPRTVKHIDAALSEENTGKTYFFVANKYWRYDEYKRSMDPGYPKMIAHDFPGIGHKVDAVFMKDGFFYFFHGTRQYKFDPKTKRILTLQKANSWFNCRKN

SEQ ID NO: 2479 - protein, 450 aa, Artificial Sequence
  MMP-1 variant F188T
FPATLETQEQDVDLVQKYLEKYYNLKNDGRQVEKRRNSGPVVEKLKQMQEFFGLKVTGKPDAETLKVMKQPRCGVPDVAQFVLTEGNPRWEQTHLTYRIENYTPDLPRADVDHAIEKAFQLWSNVTPLTFTKVSEGQADIMISFVRGDHRDNSPFDGPGGNLAHAFQPGPGIGGDAHFDEDERWTNNTREYNLHRVAAHELGHSLGLSHSTDIGALMYPSYTFSGDVQLAQDDIDGIQAIYGRSQNPVQPIGPQTPKACDSKLTFDAITTIRGEVMFFKDRFYMRTNPFYPEVELNFISVFWPQLPNGLEAAYEFADRDEVRFFKGNKYWAVQGQNVLHGYPKDIYSSFGFPRTVKHIDAALSEENTGKTYFFVANKYWRYDEYKRSMDPGYPKMIAHDFPGIGHKVDAVFMKDGFFYFFHGTRQYKFDPKTKRILTLQKANSWFNCRKN

SEQ ID NO: 2480 - protein, 450 aa, Artificial Sequence
  MMP-1 variant F188Y
FPATLETQEQDVDLVQKYLEKYYNLKNDGRQVEKRRNSGPVVEKLKQMQEFFGLKVTGKPDAETLKVMKQPRCGVPDVAQFVLTEGNPRWEQTHLTYRIENYTPDLPRADVDHAIEKAFQLWSNVTPLTFTKVSEGQADIMISFVRGDHRDNSPFDGPGGNLAHAFQPGPGIGGDAHFDEDERWTNNYREYNLHRVAAHELGHSLGLSHSTDIGALMYPSYTFSGDVQLAQDDIDGIQAIYGRSQNPVQPIGPQTPKACDSKLTFDAITTIRGEVMFFKDRFYMRTNPFYPEVELNFISVFWPQLPNGLEAAYEFADRDEVRFFKGNKYWAVQGQNVLHGYPKDIYSSFGFPRTVKHIDAALSEENTGKTYFFVANKYWRYDEYKRSMDPGYPKMIAHDFPGIGHKVDAVFMKDGFFYFFHGTRQYKFDPKTKRILTLQKANSWFNCRKN

SEQ ID NO: 2481 - protein, 450 aa, Artificial Sequence
  MMP-1 variant F188S
FPATLETQEQDVDLVQKYLEKYYNLKNDGRQVEKRRNSGPVVEKLKQMQEFFGLKVTGKPDAETLKVMKQPRCGVPDVAQFVLTEGNPRWEQTHLTYRIENYTPDLPRADVDHAIEKAFQLWSNVTPLTFTKVSEGQADIMISFVRGDHRDNSPFDGPGGNLAHAFQPGPGIGGDAHFDEDERWTNNSREYNLHRVAAHELGHSLGLSHSTDIGALMYPSYTFSGDVQLAQDDIDGIQAIYGRSQNPVQPIGPQTPKACDSKLTFDAITTIRGEVMFFKDRFYMRTNPFYPEVELNFISVFWPQLPNGLEAAYEFADRDEVRFFKGNKYWAVQGQNVLHGYPKDIYSSFGFPRTVKHIDAALSEENTGKTYFFVANKYWRYDEYKRSMDPGYPKMIAHDFPGIGHKVDAVFMKDGFFYFFHGTRQYKFDPKTKRILTLQKANSWFNCRKN

SEQ ID NO: 2482 - protein, 450 aa, Artificial Sequence
  MMP-1 variant F188G
FPATLETQEQDVDLVQKYLEKYYNLKNDGRQVEKRRNSGPVVEKLKQMQEFFGLKVTGKPDAETLKVMKQPRCGVPDVAQFVLTEGNPRWEQTHLTYRIENYTPDLPRADVDHAIEKAFQLWSNVTPLTFTKVSEGQADIMISFVRGDHRDNSPFDGPGGNLAHAFQPGPGIGGDAHFDEDERWTNNGREYNLHRVAAHELGHSLGLSHSTDIGALMYPSYTFSGDVQLAQDDIDGIQAIYGRSQNPVQPIGPQTPKACDSKLTFDAITTIRGEVMFFKDRFYMRTNPFYPEVELNFISVFWPQLPNGLEAAYEFADRDEVRFFKGNKYWAVQGQNVLHGYPKDIYSSFGFPRTVKHIDAALSEENTGKTYFFVANKYWRYDEYKRSMDPGYPKMIAHDFPGIGHKVDAVFMKDGFFYFFHGTRQYKFDPKTKRILTLQKANSWFNCRKN

SEQ ID NO: 2483 - protein, 450 aa, Artificial Sequence
  MMP-1 variant F188M
FPATLETQEQDVDLVQKYLEKYYNLKNDGRQVEKRRNSGPVVEKLKQMQEFFGLKVTGKPDAETLKVMKQPRCGVPDVAQFVLTEGNPRWEQTHLTYRIENYTPDLPRADVDHAIEKAFQLWSNVTPLTFTKVSEGQADIMISFVRGDHRDNSPFDGPGGNLAHAFQPGPGIGGDAHFDEDERWTNNMREYNLHRVAAHELGHSLGLSHSTDIGALMYPSYTFSGDVQLAQDDIDGIQAIYGRSQNPVQPIGPQTPKACDSKLTFDAITTIRGEVMFFKDRFYMRTNPFYPEVELNFISVFWPQLPNGLEAAYEFADRDEVRFFKGNKYWAVQGQNVLHGYPKDIYSSFGFPRTVKHIDAALSEENTGKTYFFVANKYWRYDEYKRSMDPGYPKMIAHDFPGIGHKVDAVFMKDGFFYFFHGTRQYKFDPKTKRILTLQKANSWFNCRKN

SEQ ID NO: 2484 - protein, 450 aa, Artificial Sequence
  MMP-1 variant F188W
FPATLETQEQDVDLVQKYLEKYYNLKNDGRQVEKRRNSGPVVEKLKQMQEFFGLKVTGKPDAETLKVMKQPRCGVPDVAQFVLTEGNPRWEQTHLTYRIENYTPDLPRADVDHAIEKAFQLWSNVTPLTFTKVSEGQADIMISFVRGDHRDNSPFDGPGGNLAHAFQPGPGIGGDAHFDEDERWTNNWREYNLHRVAAHELGHSLGLSHSTDIGALMYPSYTFSGDVQLAQDDIDGIQAIYGRSQNPVQPIGPQTPKACDSKLTFDAITTIRGEVMFFKDRFYMRTNPFYPEVELNFISVFWPQLPNGLEAAYEFADRDEVRFFKGNKYWAVQGQNVLHGYPKDIYSSFGFPRTVKHIDAALSEENTGKTYFFVANKYWRYDEYKRSMDPGYPKMIAHDFPGIGHKVDAVFMKDGFFYFFHGTRQYKFDPKTKRILTLQKANSWFNCRKN

SEQ ID NO: 2485 - protein, 450 aa, Artificial Sequence
  MMP-1 variant F188I
FPATLETQEQDVDLVQKYLEKYYNLKNDGRQVEKRRNSGPVVEKLKQMQEFFGLKVTGKPDAETLKVMKQPRCGVPDVAQFVLTEGNPRWEQTHLTYRIENYTPDLPRADVDHAIEKAFQLWSNVTPLTFTKVSEGQADIMISFVRGDHRDNSPFDGPGGNLAHAFQPGPGIGGDAHFDEDERWTNNIREYNLHRVAAHELGHSLGLSHSTDIGALMYPSYTFSGDVQLAQDDIDGIQAIYGRSQNPVQPIGPQTPKACDSKLTFDAITTIRGEVMFFKDRFYMRTNPFYPEVELNFISVFWPQLPNGLEAAYEFADRDEVRFFKGNKYWAVQGQNVLHGYPKDIYSSFGFPRTVKHIDAALSEENTGKTYFFVANKYWRYDEYKRSMDPGYPKMIAHDFPGIGHKVDAVFMKDGFFYFFHGTRQYKFDPKTKRILTLQKANSWFNCRKN

SEQ ID NO: 2486 - protein, 450 aa, Artificial Sequence
  MMP-1 variant F188V
FPATLETQEQDVDLVQKYLEKYYNLKNDGRQVEKRRNSGPVVEKLKQMQEFFGLKVTGKPDAETLKVMKQPRCGVPDVAQFVLTEGNPRWEQTHLTYRIENYTPDLPRADVDHAIEKAFQLWSNVTPLTFTKVSEGQADIMISFVRGDHRDNSPFDGPGGNLAHAFQPGPGIGGDAHFDEDERWTNNVREYNLHRVAAHELGHSLGLSHSTDIGALMYPSYTFSGDVQLAQDDIDGIQAIYGRSQNPVQPIGPQTPKACDSKLTFDAITTIRGEVMFFKDRFYMRTNPFYPEVELNFISVFWPQLPNGLEAAYEFADRDEVRFFKGNKYWAVQGQNVLHGYPKDIYSSFGFPRTVKHIDAALSEENTGKTYFFVANKYWRYDEYKRSMDPGYPKMIAHDFPGIGHKVDAVFMKDGFFYFFHGTRQYKFDPKTKRILTLQKANSWFNCRKN

SEQ ID NO: 2487 - protein, 450 aa, Artificial Sequence
  MMP-1 variant F188L
FPATLETQEQDVDLVQKYLEKYYNLKNDGRQVEKRRNSGPVVEKLKQMQEFFGLKVTGKPDAETLKVMKQPRCGVPDVAQFVLTEGNPRWEQTHLTYRIENYTPDLPRADVDHAIEKAFQLWSNVTPLTFTKVSEGQADIMISFVRGDHRDNSPFDGPGGNLAHAFQPGPGIGGDAHFDEDERWTNNLREYNLHRVAAHELGHSLGLSHSTDIGALMYPSYTFSGDVQLAQDDIDGIQAIYGRSQNPVQPIGPQTPKACDSKLTFDAITTIRGEVMFFKDRFYMRTNPFYPEVELNFISVFWPQLPNGLEAAYEFADRDEVRFFKGNKYWAVQGQNVLHGYPKDIYSSFGFPRTVKHIDAALSEENTGKTYFFVANKYWRYDEYKRSMDPGYPKMIAHDFPGIGHKVDAVFMKDGFFYFFHGTRQYKFDPKTKRILTLQKANSWFNCRKN

SEQ ID NO: 2488 - protein, 450 aa, Artificial Sequence
  MMP-1 variant F188A
FPATLETQEQDVDLVQKYLEKYYNLKNDGRQVEKRRNSGPVVEKLKQMQEFFGLKVTGKPDAETLKVMKQPRCGVPDVAQFVLTEGNPRWEQTHLTYRIENYTPDLPRADVDHAIEKAFQLWSNVTPLTFTKVSEGQADIMISFVRGDHRDNSPFDGPGGNLAHAFQPGPGIGGDAHFDEDERWTNNAREYNLHRVAAHELGHSLGLSHSTDIGALMYPSYTFSGDVQLAQDDIDGIQAIYGRSQNPVQPIGPQTPKACDSKLTFDAITTIRGEVMFFKDRFYMRTNPFYPEVELNFISVFWPQLPNGLEAAYEFADRDEVRFFKGNKYWAVQGQNVLHGYPKDIYSSFGFPRTVKHIDAALSEENTGKTYFFVANKYWRYDEYKRSMDPGYPKMIAHDFPGIGHKVDAVFMKDGFFYFFHGTRQYKFDPKTKRILTLQKANSWFNCRKN

SEQ ID NO: 2489 - protein, 450 aa, Artificial Sequence
  MMP-1 variant F188P
FPATLETQEQDVDLVQKYLEKYYNLKNDGRQVEKRRNSGPVVEKLKQMQEFFGLKVTGKPDAETLKVMKQPRCGVPDVAQFVLTEGNPRWEQTHLTYRIENYTPDLPRADVDHAIEKAFQLWSNVTPLTFTKVSEGQADIMISFVRGDHRDNSPFDGPGGNLAHAFQPGPGIGGDAHFDEDERWTNNPREYNLHRVAAHELGHSLGLSHSTDIGALMYPSYTFSGDVQLAQDDIDGIQAIYGRSQNPVQPIGPQTPKACDSKLTFDAITTIRGEVMFFKDRFYMRTNPFYPEVELNFISVFWPQLPNGLEAAYEFADRDEVRFFKGNKYWAVQGQNVLHGYPKDIYSSFGFPRTVKHIDAALSEENTGKTYFFVANKYWRYDEYKRSMDPGYPKMIAHDFPGIGHKVDAVFMKDGFFYFFHGTRQYKFDPKTKRILTLQKANSWFNCRKN

SEQ ID NO: 2490 - protein, 450 aa, Artificial Sequence
  MMP-1 variant R189D
FPATLETQEQDVDLVQKYLEKYYNLKNDGRQVEKRRNSGPVVEKLKQMQEFFGLKVTGKPDAETLKVMKQPRCGVPDVAQFVLTEGNPRWEQTHLTYRIENYTPDLPRADVDHAIEKAFQLWSNVTPLTFTKVSEGQADIMISFVRGDHRDNSPFDGPGGNLAHAFQPGPGIGGDAHFDEDERWTNNFDEYNLHRVAAHELGHSLGLSHSTDIGALMYPSYTFSGDVQLAQDDIDGIQAIYGRSQNPVQPIGPQTPKACDSKLTFDAITTIRGEVMFFKDRFYMRTNPFYPEVELNFISVFWPQLPNGLEAAYEFADRDEVRFFKGNKYWAVQGQNVLHGYPKDIYSSFGFPRTVKHIDAALSEENTGKTYFFVANKYWRYDEYKRSMDPGYPKMIAHDFPGIGHKVDAVFMKDGFFYFFHGTRQYKFDPKTKRILTLQKANSWFNCRKN

SEQ ID NO: 2491 - protein, 450 aa, Artificial Sequence
  MMP-1 variant R189E
FPATLETQEQDVDLVQKYLEKYYNLKNDGRQVEKRRNSGPVVEKLKQMQEFFGLKVTGKPDAETLKVMKQPRCGVPDVAQFVLTEGNPRWEQTHLTYRIENYTPDLPRADVDHAIEKAFQLWSNVTPLTFTKVSEGQADIMISFVRGDHRDNSPFDGPGGNLAHAFQPGPGIGGDAHFDEDERWTNNFEEYNLHRVAAHELGHSLGLSHSTDIGALMYPSYTFSGDVQLAQDDIDGIQAIYGRSQNPVQPIGPQTPKACDSKLTFDAITTIRGEVMFFKDRFYMRTNPFYPEVELNFISVFWPQLPNGLEAAYEFADRDEVRFFKGNKYWAVQGQNVLHGYPKDIYSSFGFPRTVKHIDAALSEENTGKTYFFVANKYWRYDEYKRSMDPGYPKMIAHDFPGIGHKVDAVFMKDGFFYFFHGTRQYKFDPKTKRILTLQKANSWFNCRKN

SEQ ID NO: 2492 - protein, 450 aa, Artificial Sequence
  MMP-1 variant R189H
FPATLETQEQDVDLVQKYLEKYYNLKNDGRQVEKRRNSGPVVEKLKQMQEFFGLKVTGKPDAETLKVMKQPRCGVPDVAQFVLTEGNPRWEQTHLTYRIENYTPDLPRADVDHAIEKAFQLWSNVTPLTFTKVSEGQADIMISFVRGDHRDNSPFDGPGGNLAHAFQPGPGIGGDAHFDEDERWTNNFHEYNLHRVAAHELGHSLGLSHSTDIGALMYPSYTFSGDVQLAQDDIDGIQAIYGRSQNPVQPIGPQTPKACDSKLTFDAITTIRGEVMFFKDRFYMRTNPFYPEVELNFISVFWPQLPNGLEAAYEFADRDEVRFFKGNKYWAVQGQNVLHGYPKDIYSSFGFPRTVKHIDAALSEENTGKTYFFVANKYWRYDEYKRSMDPGYPKMIAHDFPGIGHKVDAVFMKDGFFYFFHGTRQYKFDPKTKRILTLQKANSWFNCRKN

SEQ ID NO: 2493 - protein, 450 aa, Artificial Sequence
  MMP-1 variant R189K
FPATLETQEQDVDLVQKYLEKYYNLKNDGRQVEKRRNSGPVVEKLKQMQEFFGLKVTGKPDAETLKVMKQPRCGVPDVAQFVLTEGNPRWEQTHLTYRIENYTPDLPRADVDHAIEKAFQLWSNVTPLTFTKVSEGQADIMISFVRGDHRDNSPFDGPGGNLAHAFQPGPGIGGDAHFDEDERWTNNFKEYNLHRVAAHELGHSLGLSHSTDIGALMYPSYTFSGDVQLAQDDIDGIQAIYGRSQNPVQPIGPQTPKACDSKLTFDAITTIRGEVMFFKDRFYMRTNPFYPEVELNFISVFWPQLPNGLEAAYEFADRDEVRFFKGNKYWAVQGQNVLHGYPKDIYSSFGFPRTVKHIDAALSEENTGKTYFFVANKYWRYDEYKRSMDPGYPKMIAHDFPGIGHKVDAVFMKDGFFYFFHGTRQYKFDPKTKRILTLQKANSWFNCRKN

SEQ ID NO: 2494 - protein, 450 aa, Artificial Sequence
  MMP-1 variant R189C
FPATLETQEQDVDLVQKYLEKYYNLKNDGRQVEKRRNSGPVVEKLKQMQEFFGLKVTGKPDAETLKVMKQPRCGVPDVAQFVLTEGNPRWEQTHLTYRIENYTPDLPRADVDHAIEKAFQLWSNVTPLTFTKVSEGQADIMISFVRGDHRDNSPFDGPGGNLAHAFQPGPGIGGDAHFDEDERWTNNFCEYNLHRVAAHELGHSLGLSHSTDIGALMYPSYTFSGDVQLAQDDIDGIQAIYGRSQNPVQPIGPQTPKACDSKLTFDAITTIRGEVMFFKDRFYMRTNPFYPEVELNFISVFWPQLPNGLEAAYEFADRDEVRFFKGNKYWAVQGQNVLHGYPKDIYSSFGFPRTVKHIDAALSEENTGKTYFFVANKYWRYDEYKRSMDPGYPKMIAHDFPGIGHKVDAVFMKDGFFYFFHGTRQYKFDPKTKRILTLQKANSWFNCRKN

SEQ ID NO: 2495 - protein, 450 aa, Artificial Sequence
  MMP-1 variant R189N
FPATLETQEQDVDLVQKYLEKYYNLKNDGRQVEKRRNSGPVVEKLKQMQEFFGLKVTGKPDAETLKVMKQPRCGVPDVAQFVLTEGNPRWEQTHLTYRIENYTPDLPRADVDHAIEKAFQLWSNVTPLTFTKVSEGQADIMISFVRGDHRDNSPFDGPGGNLAHAFQPGPGIGGDAHFDEDERWTNNFNEYNLHRVAAHELGHSLGLSHSTDIGALMYPSYTFSGDVQLAQDDIDGIQAIYGRSQNPVQPIGPQTPKACDSKLTFDAITTIRGEVMFFKDRFYMRTNPFYPEVELNFISVFWPQLPNGLEAAYEFADRDEVRFFKGNKYWAVQGQNVLHGYPKDIYSSFGFPRTVKHIDAALSEENTGKTYFFVANKYWRYDEYKRSMDPGYPKMIAHDFPGIGHKVDAVFMKDGFFYFFHGTRQYKFDPKTKRILTLQKANSWFNCRKN

SEQ ID NO: 2496 - protein, 450 aa, Artificial Sequence
  MMP-1 variant R189Q
FPATLETQEQDVDLVQKYLEKYYNLKNDGRQVEKRRNSGPVVEKLKQMQEFFGLKVTGKPDAETLKVMKQPRCGVPDVAQFVLTEGNPRWEQTHLTYRIENYTPDLPRADVDHAIEKAFQLWSNVTPLTFTKVSEGQADIMISFVRGDHRDNSPFDGPGGNLAHAFQPGPGIGGDAHFDEDERWTNNFQEYNLHRVAAHELGHSLGLSHSTDIGALMYPSYTFSGDVQLAQDDIDGIQAIYGRSQNPVQPIGPQTPKACDSKLTFDAITTIRGEVMFFKDRFYMRTNPFYPEVELNFISVFWPQLPNGLEAAYEFADRDEVRFFKGNKYWAVQGQNVLHGYPKDIYSSFGFPRTVKHIDAALSEENTGKTYFFVANKYWRYDEYKRSMDPGYPKMIAHDFPGIGHKVDAVFMKDGFFYFFHGTRQYKFDPKTKRILTLQKANSWFNCRKN

SEQ ID NO: 2497 - protein, 450 aa, Artificial Sequence
  MMP-1 variant R189T
FPATLETQEQDVDLVQKYLEKYYNLKNDGRQVEKRRNSGPVVEKLKQMQEFFGLKVTGKPDAETLKVMKQPRCGVPDVAQFVLTEGNPRWEQTHLTYRIENYTPDLPRADVDHAIEKAFQLWSNVTPLTFTKVSEGQADIMISFVRGDHRDNSPFDGPGGNLAHAFQPGPGIGGDAHFDEDERWTNNFTEYNLHRVAAHELGHSLGLSHSTDIGALMYPSYTFSGDVQLAQDDIDGIQAIYGRSQNPVQPIGPQTPKACDSKLTFDAITTIRGEVMFFKDRFYMRTNPFYPEVELNFISVFWPQLPNGLEAAYEFADRDEVRFFKGNKYWAVQGQNVLHGYPKDIYSSFGFPRTVKHIDAALSEENTGKTYFFVANKYWRYDEYKRSMDPGYPKMIAHDFPGIGHKVDAVFMKDGFFYFFHGTRQYKFDPKTKRILTLQKANSWFNCRKN

SEQ ID NO: 2498 - protein, 450 aa, Artificial Sequence
  MMP-1 variant R189Y
FPATLETQEQDVDLVQKYLEKYYNLKNDGRQVEKRRNSGPVVEKLKQMQEFFGLKVTGKPDAETLKVMKQPRCGVPDVAQFVLTEGNPRWEQTHLTYRIENYTPDLPRADVDHAIEKAFQLWSNVTPLTFTKVSEGQADIMISFVRGDHRDNSPFDGPGGNLAHAFQPGPGIGGDAHFDEDERWTNNFYEYNLHRVAAHELGHSLGLSHSTDIGALMYPSYTFSGDVQLAQDDIDGIQAIYGRSQNPVQPIGPQTPKACDSKLTFDAITTIRGEVMFFKDRFYMRTNPFYPEVELNFISVFWPQLPNGLEAAYEFADRDEVRFFKGNKYWAVQGQNVLHGYPKDIYSSFGFPRTVKHIDAALSEENTGKTYFFVANKYWRYDEYKRSMDPGYPKMIAHDFPGIGHKVDAVFMKDGFFYFFHGTRQYKFDPKTKRILTLQKANSWFNCRKN

SEQ ID NO: 2499 - protein, 450 aa, Artificial Sequence
  MMP-1 variant R189S
FPATLETQEQDVDLVQKYLEKYYNLKNDGRQVEKRRNSGPVVEKLKQMQEFFGLKVTGKPDAETLKVMKQPRCGVPDVAQFVLTEGNPRWEQTHLTYRIENYTPDLPRADVDHAIEKAFQLWSNVTPLTFTKVSEGQADIMISFVRGDHRDNSPFDGPGGNLAHAFQPGPGIGGDAHFDEDERWTNNFSEYNLHRVAAHELGHSLGLSHSTDIGALMYPSYTFSGDVQLAQDDIDGIQAIYGRSQNPVQPIGPQTPKACDSKLTFDAITTIRGEVMFFKDRFYMRTNPFYPEVELNFISVFWPQLPNGLEAAYEFADRDEVRFFKGNKYWAVQGQNVLHGYPKDIYSSFGFPRTVKHIDAALSEENTGKTYFFVANKYWRYDEYKRSMDPGYPKMIAHDFPGIGHKVDAVFMKDGFFYFFHGTRQYKFDPKTKRILTLQKANSWFNCRKN

SEQ ID NO: 2500 - protein, 450 aa, Artificial Sequence
  MMP-1 variant R189G
FPATLETQEQDVDLVQKYLEKYYNLKNDGRQVEKRRNSGPVVEKLKQMQEFFGLKVTGKPDAETLKVMKQPRCGVPDVAQFVLTEGNPRWEQTHLTYRIENYTPDLPRADVDHAIEKAFQLWSNVTPLTFTKVSEGQADIMISFVRGDHRDNSPFDGPGGNLAHAFQPGPGIGGDAHFDEDERWTNNFGEYNLHRVAAHELGHSLGLSHSTDIGALMYPSYTFSGDVQLAQDDIDGIQAIYGRSQNPVQPIGPQTPKACDSKLTFDAITTIRGEVMFFKDRFYMRTNPFYPEVELNFISVFWPQLPNGLEAAYEFADRDEVRFFKGNKYWAVQGQNVLHGYPKDIYSSFGFPRTVKHIDAALSEENTGKTYFFVANKYWRYDEYKRSMDPGYPKMIAHDFPGIGHKVDAVFMKDGFFYFFHGTRQYKFDPKTKRILTLQKANSWFNCRKN

SEQ ID NO: 2501 - protein, 450 aa, Artificial Sequence
  MMP-1 variant R189F
FPATLETQEQDVDLVQKYLEKYYNLKNDGRQVEKRRNSGPVVEKLKQMQEFFGLKVTGKPDAETLKVMKQPRCGVPDVAQFVLTEGNPRWEQTHLTYRIENYTPDLPRADVDHAIEKAFQLWSNVTPLTFTKVSEGQADIMISFVRGDHRDNSPFDGPGGNLAHAFQPGPGIGGDAHFDEDERWTNNFFEYNLHRVAAHELGHSLGLSHSTDIGALMYPSYTFSGDVQLAQDDIDGIQAIYGRSQNPVQPIGPQTPKACDSKLTFDAITTIRGEVMFFKDRFYMRTNPFYPEVELNFISVFWPQLPNGLEAAYEFADRDEVRFFKGNKYWAVQGQNVLHGYPKDIYSSFGFPRTVKHIDAALSEENTGKTYFFVANKYWRYDEYKRSMDPGYPKMIAHDFPGIGHKVDAVFMKDGFFYFFHGTRQYKFDPKTKRILTLQKANSWFNCRKN

SEQ ID NO: 2502 - protein, 450 aa, Artificial Sequence
  MMP-1 variant R189M
FPATLETQEQDVDLVQKYLEKYYNLKNDGRQVEKRRNSGPVVEKLKQMQEFFGLKVTGKPDAETLKVMKQPRCGVPDVAQFVLTEGNPRWEQTHLTYRIENYTPDLPRADVDHAIEKAFQLWSNVTPLTFTKVSEGQADIMISFVRGDHRDNSPFDGPGGNLAHAFQPGPGIGGDAHFDEDERWTNNFMEYNLHRVAAHELGHSLGLSHSTDIGALMYPSYTFSGDVQLAQDDIDGIQAIYGRSQNPVQPIGPQTPKACDSKLTFDAITTIRGEVMFFKDRFYMRTNPFYPEVELNFISVFWPQLPNGLEAAYEFADRDEVRFFKGNKYWAVQGQNVLHGYPKDIYSSFGFPRTVKHIDAALSEENTGKTYFFVANKYWRYDEYKRSMDPGYPKMIAHDFPGIGHKVDAVFMKDGFFYFFHGTRQYKFDPKTKRILTLQKANSWFNCRKN

SEQ ID NO: 2503 - protein, 450 aa, Artificial Sequence
  MMP-1 variant R189W
FPATLETQEQDVDLVQKYLEKYYNLKNDGRQVEKRRNSGPVVEKLKQMQEFFGLKVTGKPDAETLKVMKQPRCGVPDVAQFVLTEGNPRWEQTHLTYRIENYTPDLPRADVDHAIEKAFQLWSNVTPLTFTKVSEGQADIMISFVRGDHRDNSPFDGPGGNLAHAFQPGPGIGGDAHFDEDERWTNNFWEYNLHRVAAHELGHSLGLSHSTDIGALMYPSYTFSGDVQLAQDDIDGIQAIYGRSQNPVQPIGPQTPKACDSKLTFDAITTIRGEVMFFKDRFYMRTNPFYPEVELNFISVFWPQLPNGLEAAYEFADRDEVRFFKGNKYWAVQGQNVLHGYPKDIYSSFGFPRTVKHIDAALSEENTGKTYFFVANKYWRYDEYKRSMDPGYPKMIAHDFPGIGHKVDAVFMKDGFFYFFHGTRQYKFDPKTKRILTLQKANSWFNCRKN

SEQ ID NO: 2504 - protein, 450 aa, Artificial Sequence
  MMP-1 variant R189I
FPATLETQEQDVDLVQKYLEKYYNLKNDGRQVEKRRNSGPVVEKLKQMQEFFGLKVTGKPDAETLKVMKQPRCGVPDVAQFVLTEGNPRWEQTHLTYRIENYTPDLPRADVDHAIEKAFQLWSNVTPLTFTKVSEGQADIMISFVRGDHRDNSPFDGPGGNLAHAFQPGPGIGGDAHFDEDERWTNNFIEYNLHRVAAHELGHSLGLSHSTDIGALMYPSYTFSGDVQLAQDDIDGIQAIYGRSQNPVQPIGPQTPKACDSKLTFDAITTIRGEVMFFKDRFYMRTNPFYPEVELNFISVFWPQLPNGLEAAYEFADRDEVRFFKGNKYWAVQGQNVLHGYPKDIYSSFGFPRTVKHIDAALSEENTGKTYFFVANKYWRYDEYKRSMDPGYPKMIAHDFPGIGHKVDAVFMKDGFFYFFHGTRQYKFDPKTKRILTLQKANSWFNCRKN

SEQ ID NO: 2505 - protein, 450 aa, Artificial Sequence
  MMP-1 variant R189V
FPATLETQEQDVDLVQKYLEKYYNLKNDGRQVEKRRNSGPVVEKLKQMQEFFGLKVTGKPDAETLKVMKQPRCGVPDVAQFVLTEGNPRWEQTHLTYRIENYTPDLPRADVDHAIEKAFQLWSNVTPLTFTKVSEGQADIMISFVRGDHRDNSPFDGPGGNLAHAFQPGPGIGGDAHFDEDERWTNNFVEYNLHRVAAHELGHSLGLSHSTDIGALMYPSYTFSGDVQLAQDDIDGIQAIYGRSQNPVQPIGPQTPKACDSKLTFDAITTIRGEVMFFKDRFYMRTNPFYPEVELNFISVFWPQLPNGLEAAYEFADRDEVRFFKGNKYWAVQGQNVLHGYPKDIYSSFGFPRTVKHIDAALSEENTGKTYFFVANKYWRYDEYKRSMDPGYPKMIAHDFPGIGHKVDAVFMKDGFFYFFHGTRQYKFDPKTKRILTLQKANSWFNCRKN

SEQ ID NO: 2506 - protein, 450 aa, Artificial Sequence
  MMP-1 variant R189L
FPATLETQEQDVDLVQKYLEKYYNLKNDGRQVEKRRNSGPVVEKLKQMQEFFGLKVTGKPDAETLKVMKQPRCGVPDVAQFVLTEGNPRWEQTHLTYRIENYTPDLPRADVDHAIEKAFQLWSNVTPLTFTKVSEGQADIMISFVRGDHRDNSPFDGPGGNLAHAFQPGPGIGGDAHFDEDERWTNNFLEYNLHRVAAHELGHSLGLSHSTDIGALMYPSYTFSGDVQLAQDDIDGIQAIYGRSQNPVQPIGPQTPKACDSKLTFDAITTIRGEVMFFKDRFYMRTNPFYPEVELNFISVFWPQLPNGLEAAYEFADRDEVRFFKGNKYWAVQGQNVLHGYPKDIYSSFGFPRTVKHIDAALSEENTGKTYFFVANKYWRYDEYKRSMDPGYPKMIAHDFPGIGHKVDAVFMKDGFFYFFHGTRQYKFDPKTKRILTLQKANSWFNCRKN

SEQ ID NO: 2507 - protein, 450 aa, Artificial Sequence
  MMP-1 variant R189A
FPATLETQEQDVDLVQKYLEKYYNLKNDGRQVEKRRNSGPVVEKLKQMQEFFGLKVTGKPDAETLKVMKQPRCGVPDVAQFVLTEGNPRWEQTHLTYRIENYTPDLPRADVDHAIEKAFQLWSNVTPLTFTKVSEGQADIMISFVRGDHRDNSPFDGPGGNLAHAFQPGPGIGGDAHFDEDERWTNNFAEYNLHRVAAHELGHSLGLSHSTDIGALMYPSYTFSGDVQLAQDDIDGIQAIYGRSQNPVQPIGPQTPKACDSKLTFDAITTIRGEVMFFKDRFYMRTNPFYPEVELNFISVFWPQLPNGLEAAYEFADRDEVRFFKGNKYWAVQGQNVLHGYPKDIYSSFGFPRTVKHIDAALSEENTGKTYFFVANKYWRYDEYKRSMDPGYPKMIAHDFPGIGHKVDAVFMKDGFFYFFHGTRQYKFDPKTKRILTLQKANSWFNCRKN

SEQ ID NO: 2508 - protein, 450 aa, Artificial Sequence
  MMP-1 variant R189P
FPATLETQEQDVDLVQKYLEKYYNLKNDGRQVEKRRNSGPVVEKLKQMQEFFGLKVTGKPDAETLKVMKQPRCGVPDVAQFVLTEGNPRWEQTHLTYRIENYTPDLPRADVDHAIEKAFQLWSNVTPLTFTKVSEGQADIMISFVRGDHRDNSPFDGPGGNLAHAFQPGPGIGGDAHFDEDERWTNNFPEYNLHRVAAHELGHSLGLSHSTDIGALMYPSYTFSGDVQLAQDDIDGIQAIYGRSQNPVQPIGPQTPKACDSKLTFDAITTIRGEVMFFKDRFYMRTNPFYPEVELNFISVFWPQLPNGLEAAYEFADRDEVRFFKGNKYWAVQGQNVLHGYPKDIYSSFGFPRTVKHIDAALSEENTGKTYFFVANKYWRYDEYKRSMDPGYPKMIAHDFPGIGHKVDAVFMKDGFFYFFHGTRQYKFDPKTKRILTLQKANSWFNCRKN

SEQ ID NO: 2509 - protein, 450 aa, Artificial Sequence
  MMP-1 variant L193D
FPATLETQEQDVDLVQKYLEKYYNLKNDGRQVEKRRNSGPVVEKLKQMQEFFGLKVTGKPDAETLKVMKQPRCGVPDVAQFVLTEGNPRWEQTHLTYRIENYTPDLPRADVDHAIEKAFQLWSNVTPLTFTKVSEGQADIMISFVRGDHRDNSPFDGPGGNLAHAFQPGPGIGGDAHFDEDERWTNNFREYNDHRVAAHELGHSLGLSHSTDIGALMYPSYTFSGDVQLAQDDIDGIQAIYGRSQNPVQPIGPQTPKACDSKLTFDAITTIRGEVMFFKDRFYMRTNPFYPEVELNFISVFWPQLPNGLEAAYEFADRDEVRFFKGNKYWAVQGQNVLHGYPKDIYSSFGFPRTVKHIDAALSEENTGKTYFFVANKYWRYDEYKRSMDPGYPKMIAHDFPGIGHKVDAVFMKDGFFYFFHGTRQYKFDPKTKRILTLQKANSWFNCRKN

SEQ ID NO: 2510 - protein, 450 aa, Artificial Sequence
  MMP-1 variant L193E
FPATLETQEQDVDLVQKYLEKYYNLKNDGRQVEKRRNSGPVVEKLKQMQEFFGLKVTGKPDAETLKVMKQPRCGVPDVAQFVLTEGNPRWEQTHLTYRIENYTPDLPRADVDHAIEKAFQLWSNVTPLTFTKVSEGQADIMISFVRGDHRDNSPFDGPGGNLAHAFQPGPGIGGDAHFDEDERWTNNFREYNEHRVAAHELGHSLGLSHSTDIGALMYPSYTFSGDVQLAQDDIDGIQAIYGRSQNPVQPIGPQTPKACDSKLTFDAITTIRGEVMFFKDRFYMRTNPFYPEVELNFISVFWPQLPNGLEAAYEFADRDEVRFFKGNKYWAVQGQNVLHGYPKDIYSSFGFPRTVKHIDAALSEENTGKTYFFVANKYWRYDEYKRSMDPGYPKMIAHDFPGIGHKVDAVFMKDGFFYFFHGTRQYKFDPKTKRILTLQKANSWFNCRKN

SEQ ID NO: 2511 - protein, 450 aa, Artificial Sequence
  MMP-1 variant L193H
FPATLETQEQDVDLVQKYLEKYYNLKNDGRQVEKRRNSGPVVEKLKQMQEFFGLKVTGKPDAETLKVMKQPRCGVPDVAQFVLTEGNPRWEQTHLTYRIENYTPDLPRADVDHAIEKAFQLWSNVTPLTFTKVSEGQADIMISFVRGDHRDNSPFDGPGGNLAHAFQPGPGIGGDAHFDEDERWTNNFREYNHHRVAAHELGHSLGLSHSTDIGALMYPSYTFSGDVQLAQDDIDGIQAIYGRSQNPVQPIGPQTPKACDSKLTFDAITTIRGEVMFFKDRFYMRTNPFYPEVELNFISVFWPQLPNGLEAAYEFADRDEVRFFKGNKYWAVQGQNVLHGYPKDIYSSFGFPRTVKHIDAALSEENTGKTYFFVANKYWRYDEYKRSMDPGYPKMIAHDFPGIGHKVDAVFMKDGFFYFFHGTRQYKFDPKTKRILTLQKANSWFNCRKN

SEQ ID NO: 2512 - protein, 450 aa, Artificial Sequence
  MMP-1 variant L193K
FPATLETQEQDVDLVQKYLEKYYNLKNDGRQVEKRRNSGPVVEKLKQMQEFFGLKVTGKPDAETLKVMKQPRCGVPDVAQFVLTEGNPRWEQTHLTYRIENYTPDLPRADVDHAIEKAFQLWSNVTPLTFTKVSEGQADIMISFVRGDHRDNSPFDGPGGNLAHAFQPGPGIGGDAHFDEDERWTNNFREYNKHRVAAHELGHSLGLSHSTDIGALMYPSYTFSGDVQLAQDDIDGIQAIYGRSQNPVQPIGPQTPKACDSKLTFDAITTIRGEVMFFKDRFYMRTNPFYPEVELNFISVFWPQLPNGLEAAYEFADRDEVRFFKGNKYWAVQGQNVLHGYPKDIYSSFGFPRTVKHIDAALSEENTGKTYFFVANKYWRYDEYKRSMDPGYPKMIAHDFPGIGHKVDAVFMKDGFFYFFHGTRQYKFDPKTKRILTLQKANSWFNCRKN

SEQ ID NO: 2513 - protein, 450 aa, Artificial Sequence
  MMP-1 variant L193R
FPATLETQEQDVDLVQKYLEKYYNLKNDGRQVEKRRNSGPVVEKLKQMQEFFGLKVTGKPDAETLKVMKQPRCGVPDVAQFVLTEGNPRWEQTHLTYRIENYTPDLPRADVDHAIEKAFQLWSNVTPLTFTKVSEGQADIMISFVRGDHRDNSPFDGPGGNLAHAFQPGPGIGGDAHFDEDERWTNNFREYNRHRVAAHELGHSLGLSHSTDIGALMYPSYTFSGDVQLAQDDIDGIQAIYGRSQNPVQPIGPQTPKACDSKLTFDAITTIRGEVMFFKDRFYMRTNPFYPEVELNFISVFWPQLPNGLEAAYEFADRDEVRFFKGNKYWAVQGQNVLHGYPKDIYSSFGFPRTVKHIDAALSEENTGKTYFFVANKYWRYDEYKRSMDPGYPKMIAHDFPGIGHKVDAVFMKDGFFYFFHGTRQYKFDPKTKRILTLQKANSWFNCRKN

SEQ ID NO: 2514 - protein, 450 aa, Artificial Sequence
  MMP-1 variant L193C
FPATLETQEQDVDLVQKYLEKYYNLKNDGRQVEKRRNSGPVVEKLKQMQEFFGLKVTGKPDAETLKVMKQPRCGVPDVAQFVLTEGNPRWEQTHLTYRIENYTPDLPRADVDHAIEKAFQLWSNVTPLTFTKVSEGQADIMISFVRGDHRDNSPFDGPGGNLAHAFQPGPGIGGDAHFDEDERWTNNFREYNCHRVAAHELGHSLGLSHSTDIGALMYPSYTFSGDVQLAQDDIDGIQAIYGRSQNPVQPIGPQTPKACDSKLTFDAITTIRGEVMFFKDRFYMRTNPFYPEVELNFISVFWPQLPNGLEAAYEFADRDEVRFFKGNKYWAVQGQNVLHGYPKDIYSSFGFPRTVKHIDAALSEENTGKTYFFVANKYWRYDEYKRSMDPGYPKMIAHDFPGIGHKVDAVFMKDGFFYFFHGTRQYKFDPKTKRILTLQKANSWFNCRKN

SEQ ID NO: 2515 - protein, 450 aa, Artificial Sequence
  MMP-1 variant L193N
FPATLETQEQDVDLVQKYLEKYYNLKNDGRQVEKRRNSGPVVEKLKQMQEFFGLKVTGKPDAETLKVMKQPRCGVPDVAQFVLTEGNPRWEQTHLTYRIENYTPDLPRADVDHAIEKAFQLWSNVTPLTFTKVSEGQADIMISFVRGDHRDNSPFDGPGGNLAHAFQPGPGIGGDAHFDEDERWTNNFREYNNHRVAAHELGHSLGLSHSTDIGALMYPSYTFSGDVQLAQDDIDGIQAIYGRSQNPVQPIGPQTPKACDSKLTFDAITTIRGEVMFFKDRFYMRTNPFYPEVELNFISVFWPQLPNGLEAAYEFADRDEVRFFKGNKYWAVQGQNVLHGYPKDIYSSFGFPRTVKHIDAALSEENTGKTYFFVANKYWRYDEYKRSMDPGYPKMIAHDFPGIGHKVDAVFMKDGFFYFFHGTRQYKFDPKTKRILTLQKANSWFNCRKN

SEQ ID NO: 2516 - protein, 450 aa, Artificial Sequence
  MMP-1 variant L193Q
FPATLETQEQDVDLVQKYLEKYYNLKNDGRQVEKRRNSGPVVEKLKQMQEFFGLKVTGKPDAETLKVMKQPRCGVPDVAQFVLTEGNPRWEQTHLTYRIENYTPDLPRADVDHAIEKAFQLWSNVTPLTFTKVSEGQADIMISFVRGDHRDNSPFDGPGGNLAHAFQPGPGIGGDAHFDEDERWTNNFREYNQHRVAAHELGHSLGLSHSTDIGALMYPSYTFSGDVQLAQDDIDGIQAIYGRSQNPVQPIGPQTPKACDSKLTFDAITTIRGEVMFFKDRFYMRTNPFYPEVELNFISVFWPQLPNGLEAAYEFADRDEVRFFKGNKYWAVQGQNVLHGYPKDIYSSFGFPRTVKHIDAALSEENTGKTYFFVANKYWRYDEYKRSMDPGYPKMIAHDFPGIGHKVDAVFMKDGFFYFFHGTRQYKFDPKTKRILTLQKANSWFNCRKN

SEQ ID NO: 2517 - protein, 450 aa, Artificial Sequence
  MMP-1 variant L193T
FPATLETQEQDVDLVQKYLEKYYNLKNDGRQVEKRRNSGPVVEKLKQMQEFFGLKVTGKPDAETLKVMKQPRCGVPDVAQFVLTEGNPRWEQTHLTYRIENYTPDLPRADVDHAIEKAFQLWSNVTPLTFTKVSEGQADIMISFVRGDHRDNSPFDGPGGNLAHAFQPGPGIGGDAHFDEDERWTNNFREYNTHRVAAHELGHSLGLSHSTDIGALMYPSYTFSGDVQLAQDDIDGIQAIYGRSQNPVQPIGPQTPKACDSKLTFDAITTIRGEVMFFKDRFYMRTNPFYPEVELNFISVFWPQLPNGLEAAYEFADRDEVRFFKGNKYWAVQGQNVLHGYPKDIYSSFGFPRTVKHIDAALSEENTGKTYFFVANKYWRYDEYKRSMDPGYPKMIAHDFPGIGHKVDAVFMKDGFFYFFHGTRQYKFDPKTKRILTLQKANSWFNCRKN

SEQ ID NO: 2518 - protein, 450 aa, Artificial Sequence
  MMP-1 variant L193Y
FPATLETQEQDVDLVQKYLEKYYNLKNDGRQVEKRRNSGPVVEKLKQMQEFFGLKVTGKPDAETLKVMKQPRCGVPDVAQFVLTEGNPRWEQTHLTYRIENYTPDLPRADVDHAIEKAFQLWSNVTPLTFTKVSEGQADIMISFVRGDHRDNSPFDGPGGNLAHAFQPGPGIGGDAHFDEDERWTNNFREYNYHRVAAHELGHSLGLSHSTDIGALMYPSYTFSGDVQLAQDDIDGIQAIYGRSQNPVQPIGPQTPKACDSKLTFDAITTIRGEVMFFKDRFYMRTNPFYPEVELNFISVFWPQLPNGLEAAYEFADRDEVRFFKGNKYWAVQGQNVLHGYPKDIYSSFGFPRTVKHIDAALSEENTGKTYFFVANKYWRYDEYKRSMDPGYPKMIAHDFPGIGHKVDAVFMKDGFFYFFHGTRQYKFDPKTKRILTLQKANSWFNCRKN

SEQ ID NO: 2519 - protein, 450 aa, Artificial Sequence
  MMP-1 variant L193S
FPATLETQEQDVDLVQKYLEKYYNLKNDGRQVEKRRNSGPVVEKLKQMQEFFGLKVTGKPDAETLKVMKQPRCGVPDVAQFVLTEGNPRWEQTHLTYRIENYTPDLPRADVDHAIEKAFQLWSNVTPLTFTKVSEGQADIMISFVRGDHRDNSPFDGPGGNLAHAFQPGPGIGGDAHFDEDERWTNNFREYNSHRVAAHELGHSLGLSHSTDIGALMYPSYTFSGDVQLAQDDIDGIQAIYGRSQNPVQPIGPQTPKACDSKLTFDAITTIRGEVMFFKDRFYMRTNPFYPEVELNFISVFWPQLPNGLEAAYEFADRDEVRFFKGNKYWAVQGQNVLHGYPKDIYSSFGFPRTVKHIDAALSEENTGKTYFFVANKYWRYDEYKRSMDPGYPKMIAHDFPGIGHKVDAVFMKDGFFYFFHGTRQYKFDPKTKRILTLQKANSWFNCRKN

SEQ ID NO: 2520 - protein, 450 aa, Artificial Sequence
  MMP-1 variant L193G
FPATLETQEQDVDLVQKYLEKYYNLKNDGRQVEKRRNSGPVVEKLKQMQEFFGLKVTGKPDAETLKVMKQPRCGVPDVAQFVLTEGNPRWEQTHLTYRIENYTPDLPRADVDHAIEKAFQLWSNVTPLTFTKVSEGQADIMISFVRGDHRDNSPFDGPGGNLAHAFQPGPGIGGDAHFDEDERWTNNFREYNGHRVAAHELGHSLGLSHSTDIGALMYPSYTFSGDVQLAQDDIDGIQAIYGRSQNPVQPIGPQTPKACDSKLTFDAITTIRGEVMFFKDRFYMRTNPFYPEVELNFISVFWPQLPNGLEAAYEFADRDEVRFFKGNKYWAVQGQNVLHGYPKDIYSSFGFPRTVKHIDAALSEENTGKTYFFVANKYWRYDEYKRSMDPGYPKMIAHDFPGIGHKVDAVFMKDGFFYFFHGTRQYKFDPKTKRILTLQKANSWFNCRKN

SEQ ID NO: 2521 - protein, 450 aa, Artificial Sequence
  MMP-1 variant L193F
FPATLETQEQDVDLVQKYLEKYYNLKNDGRQVEKRRNSGPVVEKLKQMQEFFGLKVTGKPDAETLKVMKQPRCGVPDVAQFVLTEGNPRWEQTHLTYRIENYTPDLPRADVDHAIEKAFQLWSNVTPLTFTKVSEGQADIMISFVRGDHRDNSPFDGPGGNLAHAFQPGPGIGGDAHFDEDERWTNNFREYNFHRVAAHELGHSLGLSHSTDIGALMYPSYTFSGDVQLAQDDIDGIQAIYGRSQNPVQPIGPQTPKACDSKLTFDAITTIRGEVMFFKDRFYMRTNPFYPEVELNFISVFWPQLPNGLEAAYEFADRDEVRFFKGNKYWAVQGQNVLHGYPKDIYSSFGFPRTVKHIDAALSEENTGKTYFFVANKYWRYDEYKRSMDPGYPKMIAHDFPGIGHKVDAVFMKDGFFYFFHGTRQYKFDPKTKRILTLQKANSWFNCRKN

SEQ ID NO: 2522 - protein, 450 aa, Artificial Sequence
  MMP-1 variant L193M
FPATLETQEQDVDLVQKYLEKYYNLKNDGRQVEKRRNSGPVVEKLKQMQEFFGLKVTGKPDAETLKVMKQPRCGVPDVAQFVLTEGNPRWEQTHLTYRIENYTPDLPRADVDHAIEKAFQLWSNVTPLTFTKVSEGQADIMISFVRGDHRDNSPFDGPGGNLAHAFQPGPGIGGDAHFDEDERWTNNFREYNMHRVAAHELGHSLGLSHSTDIGALMYPSYTFSGDVQLAQDDIDGIQAIYGRSQNPVQPIGPQTPKACDSKLTFDAITTIRGEVMFFKDRFYMRTNPFYPEVELNFISVFWPQLPNGLEAAYEFADRDEVRFFKGNKYWAVQGQNVLHGYPKDIYSSFGFPRTVKHIDAALSEENTGKTYFFVANKYWRYDEYKRSMDPGYPKMIAHDFPGIGHKVDAVFMKDGFFYFFHGTRQYKFDPKTKRILTLQKANSWFNCRKN

SEQ ID NO: 2523 - protein, 450 aa, Artificial Sequence
  MMP-1 variant L193W
FPATLETQEQDVDLVQKYLEKYYNLKNDGRQVEKRRNSGPVVEKLKQMQEFFGLKVTGKPDAETLKVMKQPRCGVPDVAQFVLTEGNPRWEQTHLTYRIENYTPDLPRADVDHAIEKAFQLWSNVTPLTFTKVSEGQADIMISFVRGDHRDNSPFDGPGGNLAHAFQPGPGIGGDAHFDEDERWTNNFREYNWHRVAAHELGHSLGLSHSTDIGALMYPSYTFSGDVQLAQDDIDGIQAIYGRSQNPVQPIGPQTPKACDSKLTFDAITTIRGEVMFFKDRFYMRTNPFYPEVELNFISVFWPQLPNGLEAAYEFADRDEVRFFKGNKYWAVQGQNVLHGYPKDIYSSFGFPRTVKHIDAALSEENTGKTYFFVANKYWRYDEYKRSMDPGYPKMIAHDFPGIGHKVDAVFMKDGFFYFFHGTRQYKFDPKTKRILTLQKANSWFNCRKN

SEQ ID NO: 2524 - protein, 450 aa, Artificial Sequence
  MMP-1 variant L193I
FPATLETQEQDVDLVQKYLEKYYNLKNDGRQVEKRRNSGPVVEKLKQMQEFFGLKVTGKPDAETLKVMKQPRCGVPDVAQFVLTEGNPRWEQTHLTYRIENYTPDLPRADVDHAIEKAFQLWSNVTPLTFTKVSEGQADIMISFVRGDHRDNSPFDGPGGNLAHAFQPGPGIGGDAHFDEDERWTNNFREYNIHRVAAHELGHSLGLSHSTDIGALMYPSYTFSGDVQLAQDDIDGIQAIYGRSQNPVQPIGPQTPKACDSKLTFDAITTIRGEVMFFKDRFYMRTNPFYPEVELNFISVFWPQLPNGLEAAYEFADRDEVRFFKGNKYWAVQGQNVLHGYPKDIYSSFGFPRTVKHIDAALSEENTGKTYFFVANKYWRYDEYKRSMDPGYPKMIAHDFPGIGHKVDAVFMKDGFFYFFHGTRQYKFDPKTKRILTLQKANSWFNCRKN

SEQ ID NO: 2525 - protein, 450 aa, Artificial Sequence
  MMP-1 variant L193V
FPATLETQEQDVDLVQKYLEKYYNLKNDGRQVEKRRNSGPVVEKLKQMQEFFGLKVTGKPDAETLKVMKQPRCGVPDVAQFVLTEGNPRWEQTHLTYRIENYTPDLPRADVDHAIEKAFQLWSNVTPLTFTKVSEGQADIMISFVRGDHRDNSPFDGPGGNLAHAFQPGPGIGGDAHFDEDERWTNNFREYNVHRVAAHELGHSLGLSHSTDIGALMYPSYTFSGDVQLAQDDIDGIQAIYGRSQNPVQPIGPQTPKACDSKLTFDAITTIRGEVMFFKDRFYMRTNPFYPEVELNFISVFWPQLPNGLEAAYEFADRDEVRFFKGNKYWAVQGQNVLHGYPKDIYSSFGFPRTVKHIDAALSEENTGKTYFFVANKYWRYDEYKRSMDPGYPKMIAHDFPGIGHKVDAVFMKDGFFYFFHGTRQYKFDPKTKRILTLQKANSWFNCRKN

SEQ ID NO: 2526 - protein, 450 aa, Artificial Sequence
  MMP-1 variant L193A
FPATLETQEQDVDLVQKYLEKYYNLKNDGRQVEKRRNSGPVVEKLKQMQEFFGLKVTGKPDAETLKVMKQPRCGVPDVAQFVLTEGNPRWEQTHLTYRIENYTPDLPRADVDHAIEKAFQLWSNVTPLTFTKVSEGQADIMISFVRGDHRDNSPFDGPGGNLAHAFQPGPGIGGDAHFDEDERWTNNFREYNAHRVAAHELGHSLGLSHSTDIGALMYPSYTFSGDVQLAQDDIDGIQAIYGRSQNPVQPIGPQTPKACDSKLTFDAITTIRGEVMFFKDRFYMRTNPFYPEVELNFISVFWPQLPNGLEAAYEFADRDEVRFFKGNKYWAVQGQNVLHGYPKDIYSSFGFPRTVKHIDAALSEENTGKTYFFVANKYWRYDEYKRSMDPGYPKMIAHDFPGIGHKVDAVFMKDGFFYFFHGTRQYKFDPKTKRILTLQKANSWFNCRKN

SEQ ID NO: 2527 - protein, 450 aa, Artificial Sequence
  MMP-1 variant L193P
FPATLETQEQDVDLVQKYLEKYYNLKNDGRQVEKRRNSGPVVEKLKQMQEFFGLKVTGKPDAETLKVMKQPRCGVPDVAQFVLTEGNPRWEQTHLTYRIENYTPDLPRADVDHAIEKAFQLWSNVTPLTFTKVSEGQADIMISFVRGDHRDNSPFDGPGGNLAHAFQPGPGIGGDAHFDEDERWTNNFREYNPHRVAAHELGHSLGLSHSTDIGALMYPSYTFSGDVQLAQDDIDGIQAIYGRSQNPVQPIGPQTPKACDSKLTFDAITTIRGEVMFFKDRFYMRTNPFYPEVELNFISVFWPQLPNGLEAAYEFADRDEVRFFKGNKYWAVQGQNVLHGYPKDIYSSFGFPRTVKHIDAALSEENTGKTYFFVANKYWRYDEYKRSMDPGYPKMIAHDFPGIGHKVDAVFMKDGFFYFFHGTRQYKFDPKTKRILTLQKANSWFNCRKN

SEQ ID NO: 2528 - protein, 450 aa, Artificial Sequence
  MMP-1 variant V196D
FPATLETQEQDVDLVQKYLEKYYNLKNDGRQVEKRRNSGPVVEKLKQMQEFFGLKVTGKPDAETLKVMKQPRCGVPDVAQFVLTEGNPRWEQTHLTYRIENYTPDLPRADVDHAIEKAFQLWSNVTPLTFTKVSEGQADIMISFVRGDHRDNSPFDGPGGNLAHAFQPGPGIGGDAHFDEDERWTNNFREYNLHRDAAHELGHSLGLSHSTDIGALMYPSYTFSGDVQLAQDDIDGIQAIYGRSQNPVQPIGPQTPKACDSKLTFDAITTIRGEVMFFKDRFYMRTNPFYPEVELNFISVFWPQLPNGLEAAYEFADRDEVRFFKGNKYWAVQGQNVLHGYPKDIYSSFGFPRTVKHIDAALSEENTGKTYFFVANKYWRYDEYKRSMDPGYPKMIAHDFPGIGHKVDAVFMKDGFFYFFHGTRQYKFDPKTKRILTLQKANSWFNCRKN

SEQ ID NO: 2529 - protein, 450 aa, Artificial Sequence
  MMP-1 variant V196E
FPATLETQEQDVDLVQKYLEKYYNLKNDGRQVEKRRNSGPVVEKLKQMQEFFGLKVTGKPDAETLKVMKQPRCGVPDVAQFVLTEGNPRWEQTHLTYRIENYTPDLPRADVDHAIEKAFQLWSNVTPLTFTKVSEGQADIMISFVRGDHRDNSPFDGPGGNLAHAFQPGPGIGGDAHFDEDERWTNNFREYNLHREAAHELGHSLGLSHSTDIGALMYPSYTFSGDVQLAQDDIDGIQAIYGRSQNPVQPIGPQTPKACDSKLTFDAITTIRGEVMFFKDRFYMRTNPFYPEVELNFISVFWPQLPNGLEAAYEFADRDEVRFFKGNKYWAVQGQNVLHGYPKDIYSSFGFPRTVKHIDAALSEENTGKTYFFVANKYWRYDEYKRSMDPGYPKMIAHDFPGIGHKVDAVFMKDGFFYFFHGTRQYKFDPKTKRILTLQKANSWFNCRKN

SEQ ID NO: 2530 - protein, 450 aa, Artificial Sequence
  MMP-1 variant V196H
FPATLETQEQDVDLVQKYLEKYYNLKNDGRQVEKRRNSGPVVEKLKQMQEFFGLKVTGKPDAETLKVMKQPRCGVPDVAQFVLTEGNPRWEQTHLTYRIENYTPDLPRADVDHAIEKAFQLWSNVTPLTFTKVSEGQADIMISFVRGDHRDNSPFDGPGGNLAHAFQPGPGIGGDAHFDEDERWTNNFREYNLHRHAAHELGHSLGLSHSTDIGALMYPSYTFSGDVQLAQDDIDGIQAIYGRSQNPVQPIGPQTPKACDSKLTFDAITTIRGEVMFFKDRFYMRTNPFYPEVELNFISVFWPQLPNGLEAAYEFADRDEVRFFKGNKYWAVQGQNVLHGYPKDIYSSFGFPRTVKHIDAALSEENTGKTYFFVANKYWRYDEYKRSMDPGYPKMIAHDFPGIGHKVDAVFMKDGFFYFFHGTRQYKFDPKTKRILTLQKANSWFNCRKN

SEQ ID NO: 2531 - protein, 450 aa, Artificial Sequence
  MMP-1 variant V196K
FPATLETQEQDVDLVQKYLEKYYNLKNDGRQVEKRRNSGPVVEKLKQMQEFFGLKVTGKPDAETLKVMKQPRCGVPDVAQFVLTEGNPRWEQTHLTYRIENYTPDLPRADVDHAIEKAFQLWSNVTPLTFTKVSEGQADIMISFVRGDHRDNSPFDGPGGNLAHAFQPGPGIGGDAHFDEDERWTNNFREYNLHRKAAHELGHSLGLSHSTDIGALMYPSYTFSGDVQLAQDDIDGIQAIYGRSQNPVQPIGPQTPKACDSKLTFDAITTIRGEVMFFKDRFYMRTNPFYPEVELNFISVFWPQLPNGLEAAYEFADRDEVRFFKGNKYWAVQGQNVLHGYPKDIYSSFGFPRTVKHIDAALSEENTGKTYFFVANKYWRYDEYKRSMDPGYPKMIAHDFPGIGHKVDAVFMKDGFFYFFHGTRQYKFDPKTKRILTLQKANSWFNCRKN

SEQ ID NO: 2532 - protein, 450 aa, Artificial Sequence
  MMP-1 variant V196R
FPATLETQEQDVDLVQKYLEKYYNLKNDGRQVEKRRNSGPVVEKLKQMQEFFGLKVTGKPDAETLKVMKQPRCGVPDVAQFVLTEGNPRWEQTHLTYRIENYTPDLPRADVDHAIEKAFQLWSNVTPLTFTKVSEGQADIMISFVRGDHRDNSPFDGPGGNLAHAFQPGPGIGGDAHFDEDERWTNNFREYNLHRRAAHELGHSLGLSHSTDIGALMYPSYTFSGDVQLAQDDIDGIQAIYGRSQNPVQPIGPQTPKACDSKLTFDAITTIRGEVMFFKDRFYMRTNPFYPEVELNFISVFWPQLPNGLEAAYEFADRDEVRFFKGNKYWAVQGQNVLHGYPKDIYSSFGFPRTVKHIDAALSEENTGKTYFFVANKYWRYDEYKRSMDPGYPKMIAHDFPGIGHKVDAVFMKDGFFYFFHGTRQYKFDPKTKRILTLQKANSWFNCRKN

SEQ ID NO: 2533 - protein, 450 aa, Artificial Sequence
  MMP-1 variant V196C
FPATLETQEQDVDLVQKYLEKYYNLKNDGRQVEKRRNSGPVVEKLKQMQEFFGLKVTGKPDAETLKVMKQPRCGVPDVAQFVLTEGNPRWEQTHLTYRIENYTPDLPRADVDHAIEKAFQLWSNVTPLTFTKVSEGQADIMISFVRGDHRDNSPFDGPGGNLAHAFQPGPGIGGDAHFDEDERWTNNFREYNLHRCAAHELGHSLGLSHSTDIGALMYPSYTFSGDVQLAQDDIDGIQAIYGRSQNPVQPIGPQTPKACDSKLTFDAITTIRGEVMFFKDRFYMRTNPFYPEVELNFISVFWPQLPNGLEAAYEFADRDEVRFFKGNKYWAVQGQNVLHGYPKDIYSSFGFPRTVKHIDAALSEENTGKTYFFVANKYWRYDEYKRSMDPGYPKMIAHDFPGIGHKVDAVFMKDGFFYFFHGTRQYKFDPKTKRILTLQKANSWFNCRKN

SEQ ID NO: 2534 - protein, 450 aa, Artificial Sequence
  MMP-1 variant V196N
FPATLETQEQDVDLVQKYLEKYYNLKNDGRQVEKRRNSGPVVEKLKQMQEFFGLKVTGKPDAETLKVMKQPRCGVPDVAQFVLTEGNPRWEQTHLTYRIENYTPDLPRADVDHAIEKAFQLWSNVTPLTFTKVSEGQADIMISFVRGDHRDNSPFDGPGGNLAHAFQPGPGIGGDAHFDEDERWTNNFREYNLHRNAAHELGHSLGLSHSTDIGALMYPSYTFSGDVQLAQDDIDGIQAIYGRSQNPVQPIGPQTPKACDSKLTFDAITTIRGEVMFFKDRFYMRTNPFYPEVELNFISVFWPQLPNGLEAAYEFADRDEVRFFKGNKYWAVQGQNVLHGYPKDIYSSFGFPRTVKHIDAALSEENTGKTYFFVANKYWRYDEYKRSMDPGYPKMIAHDFPGIGHKVDAVFMKDGFFYFFHGTRQYKFDPKTKRILTLQKANSWFNCRKN

SEQ ID NO: 2535 - protein, 450 aa, Artificial Sequence
  MMP-1 variant V196Q
FPATLETQEQDVDLVQKYLEKYYNLKNDGRQVEKRRNSGPVVEKLKQMQEFFGLKVTGKPDAETLKVMKQPRCGVPDVAQFVLTEGNPRWEQTHLTYRIENYTPDLPRADVDHAIEKAFQLWSNVTPLTFTKVSEGQADIMISFVRGDHRDNSPFDGPGGNLAHAFQPGPGIGGDAHFDEDERWTNNFREYNLHRQAAHELGHSLGLSHSTDIGALMYPSYTFSGDVQLAQDDIDGIQAIYGRSQNPVQPIGPQTPKACDSKLTFDAITTIRGEVMFFKDRFYMRTNPFYPEVELNFISVFWPQLPNGLEAAYEFADRDEVRFFKGNKYWAVQGQNVLHGYPKDIYSSFGFPRTVKHIDAALSEENTGKTYFFVANKYWRYDEYKRSMDPGYPKMIAHDFPGIGHKVDAVFMKDGFFYFFHGTRQYKFDPKTKRILTLQKANSWFNCRKN

SEQ ID NO: 2536 - protein, 450 aa, Artificial Sequence
  MMP-1 variant V196T
FPATLETQEQDVDLVQKYLEKYYNLKNDGRQVEKRRNSGPVVEKLKQMQEFFGLKVTGKPDAETLKVMKQPRCGVPDVAQFVLTEGNPRWEQTHLTYRIENYTPDLPRADVDHAIEKAFQLWSNVTPLTFTKVSEGQADIMISFVRGDHRDNSPFDGPGGNLAHAFQPGPGIGGDAHFDEDERWTNNFREYNLHRTAAHELGHSLGLSHSTDIGALMYPSYTFSGDVQLAQDDIDGIQAIYGRSQNPVQPIGPQTPKACDSKLTFDAITTIRGEVMFFKDRFYMRTNPFYPEVELNFISVFWPQLPNGLEAAYEFADRDEVRFFKGNKYWAVQGQNVLHGYPKDIYSSFGFPRTVKHIDAALSEENTGKTYFFVANKYWRYDEYKRSMDPGYPKMIAHDFPGIGHKVDAVFMKDGFFYFFHGTRQYKFDPKTKRILTLQKANSWFNCRKN

SEQ ID NO: 2537 - protein, 450 aa, Artificial Sequence
  MMP-1 variant V196Y
FPATLETQEQDVDLVQKYLEKYYNLKNDGRQVEKRRNSGPVVEKLKQMQEFFGLKVTGKPDAETLKVMKQPRCGVPDVAQFVLTEGNPRWEQTHLTYRIENYTPDLPRADVDHAIEKAFQLWSNVTPLTFTKVSEGQADIMISFVRGDHRDNSPFDGPGGNLAHAFQPGPGIGGDAHFDEDERWTNNFREYNLHRYAAHELGHSLGLSHSTDIGALMYPSYTFSGDVQLAQDDIDGIQAIYGRSQNPVQPIGPQTPKACDSKLTFDAITTIRGEVMFFKDRFYMRTNPFYPEVELNFISVFWPQLPNGLEAAYEFADRDEVRFFKGNKYWAVQGQNVLHGYPKDIYSSFGFPRTVKHIDAALSEENTGKTYFFVANKYWRYDEYKRSMDPGYPKMIAHDFPGIGHKVDAVFMKDGFFYFFHGTRQYKFDPKTKRILTLQKANSWFNCRKN

SEQ ID NO: 2538 - protein, 450 aa, Artificial Sequence
  MMP-1 variant V196S
FPATLETQEQDVDLVQKYLEKYYNLKNDGRQVEKRRNSGPVVEKLKQMQEFFGLKVTGKPDAETLKVMKQPRCGVPDVAQFVLTEGNPRWEQTHLTYRIENYTPDLPRADVDHAIEKAFQLWSNVTPLTFTKVSEGQADIMISFVRGDHRDNSPFDGPGGNLAHAFQPGPGIGGDAHFDEDERWTNNFREYNLHRSAAHELGHSLGLSHSTDIGALMYPSYTFSGDVQLAQDDIDGIQAIYGRSQNPVQPIGPQTPKACDSKLTFDAITTIRGEVMFFKDRFYMRTNPFYPEVELNFISVFWPQLPNGLEAAYEFADRDEVRFFKGNKYWAVQGQNVLHGYPKDIYSSFGFPRTVKHIDAALSEENTGKTYFFVANKYWRYDEYKRSMDPGYPKMIAHDFPGIGHKVDAVFMKDGFFYFFHGTRQYKFDPKTKRILTLQKANSWFNCRKN

SEQ ID NO: 2539 - protein, 450 aa, Artificial Sequence
  MMP-1 variant V196G
FPATLETQEQDVDLVQKYLEKYYNLKNDGRQVEKRRNSGPVVEKLKQMQEFFGLKVTGKPDAETLKVMKQPRCGVPDVAQFVLTEGNPRWEQTHLTYRIENYTPDLPRADVDHAIEKAFQLWSNVTPLTFTKVSEGQADIMISFVRGDHRDNSPFDGPGGNLAHAFQPGPGIGGDAHFDEDERWTNNFREYNLHRGAAHELGHSLGLSHSTDIGALMYPSYTFSGDVQLAQDDIDGIQAIYGRSQNPVQPIGPQTPKACDSKLTFDAITTIRGEVMFFKDRFYMRTNPFYPEVELNFISVFWPQLPNGLEAAYEFADRDEVRFFKGNKYWAVQGQNVLHGYPKDIYSSFGFPRTVKHIDAALSEENTGKTYFFVANKYWRYDEYKRSMDPGYPKMIAHDFPGIGHKVDAVFMKDGFFYFFHGTRQYKFDPKTKRILTLQKANSWFNCRKN

SEQ ID NO: 2540 - protein, 450 aa, Artificial Sequence
  MMP-1 variant V196F
FPATLETQEQDVDLVQKYLEKYYNLKNDGRQVEKRRNSGPVVEKLKQMQEFFGLKVTGKPDAETLKVMKQPRCGVPDVAQFVLTEGNPRWEQTHLTYRIENYTPDLPRADVDHAIEKAFQLWSNVTPLTFTKVSEGQADIMISFVRGDHRDNSPFDGPGGNLAHAFQPGPGIGGDAHFDEDERWTNNFREYNLHRFAAHELGHSLGLSHSTDIGALMYPSYTFSGDVQLAQDDIDGIQAIYGRSQNPVQPIGPQTPKACDSKLTFDAITTIRGEVMFFKDRFYMRTNPFYPEVELNFISVFWPQLPNGLEAAYEFADRDEVRFFKGNKYWAVQGQNVLHGYPKDIYSSFGFPRTVKHIDAALSEENTGKTYFFVANKYWRYDEYKRSMDPGYPKMIAHDFPGIGHKVDAVFMKDGFFYFFHGTRQYKFDPKTKRILTLQKANSWFNCRKN

SEQ ID NO: 2541 - protein, 450 aa, Artificial Sequence
  MMP-1 variant V196M
FPATLETQEQDVDLVQKYLEKYYNLKNDGRQVEKRRNSGPVVEKLKQMQEFFGLKVTGKPDAETLKVMKQPRCGVPDVAQFVLTEGNPRWEQTHLTYRIENYTPDLPRADVDHAIEKAFQLWSNVTPLTFTKVSEGQADIMISFVRGDHRDNSPFDGPGGNLAHAFQPGPGIGGDAHFDEDERWTNNFREYNLHRMAAHELGHSLGLSHSTDIGALMYPSYTFSGDVQLAQDDIDGIQAIYGRSQNPVQPIGPQTPKACDSKLTFDAITTIRGEVMFFKDRFYMRTNPFYPEVELNFISVFWPQLPNGLEAAYEFADRDEVRFFKGNKYWAVQGQNVLHGYPKDIYSSFGFPRTVKHIDAALSEENTGKTYFFVANKYWRYDEYKRSMDPGYPKMIAHDFPGIGHKVDAVFMKDGFFYFFHGTRQYKFDPKTKRILTLQKANSWFNCRKN

SEQ ID NO: 2542 - protein, 450 aa, Artificial Sequence
  MMP-1 variant V196W
FPATLETQEQDVDLVQKYLEKYYNLKNDGRQVEKRRNSGPVVEKLKQMQEFFGLKVTGKPDAETLKVMKQPRCGVPDVAQFVLTEGNPRWEQTHLTYRIENYTPDLPRADVDHAIEKAFQLWSNVTPLTFTKVSEGQADIMISFVRGDHRDNSPFDGPGGNLAHAFQPGPGIGGDAHFDEDERWTNNFREYNLHRWAAHELGHSLGLSHSTDIGALMYPSYTFSGDVQLAQDDIDGIQAIYGRSQNPVQPIGPQTPKACDSKLTFDAITTIRGEVMFFKDRFYMRTNPFYPEVELNFISVFWPQLPNGLEAAYEFADRDEVRFFKGNKYWAVQGQNVLHGYPKDIYSSFGFPRTVKHIDAALSEENTGKTYFFVANKYWRYDEYKRSMDPGYPKMIAHDFPGIGHKVDAVFMKDGFFYFFHGTRQYKFDPKTKRILTLQKANSWFNCRKN

SEQ ID NO: 2543 - protein, 450 aa, Artificial Sequence
  MMP-1 variant V196I
FPATLETQEQDVDLVQKYLEKYYNLKNDGRQVEKRRNSGPVVEKLKQMQEFFGLKVTGKPDAETLKVMKQPRCGVPDVAQFVLTEGNPRWEQTHLTYRIENYTPDLPRADVDHAIEKAFQLWSNVTPLTFTKVSEGQADIMISFVRGDHRDNSPFDGPGGNLAHAFQPGPGIGGDAHFDEDERWTNNFREYNLHRIAAHELGHSLGLSHSTDIGALMYPSYTFSGDVQLAQDDIDGIQAIYGRSQNPVQPIGPQTPKACDSKLTFDAITTIRGEVMFFKDRFYMRTNPFYPEVELNFISVFWPQLPNGLEAAYEFADRDEVRFFKGNKYWAVQGQNVLHGYPKDIYSSFGFPRTVKHIDAALSEENTGKTYFFVANKYWRYDEYKRSMDPGYPKMIAHDFPGIGHKVDAVFMKDGFFYFFHGTRQYKFDPKTKRILTLQKANSWFNCRKN

SEQ ID NO: 2544 - protein, 450 aa, Artificial Sequence
  MMP-1 variant V196L
FPATLETQEQDVDLVQKYLEKYYNLKNDGRQVEKRRNSGPVVEKLKQMQEFFGLKVTGKPDAETLKVMKQPRCGVPDVAQFVLTEGNPRWEQTHLTYRIENYTPDLPRADVDHAIEKAFQLWSNVTPLTFTKVSEGQADIMISFVRGDHRDNSPFDGPGGNLAHAFQPGPGIGGDAHFDEDERWTNNFREYNLHRLAAHELGHSLGLSHSTDIGALMYPSYTFSGDVQLAQDDIDGIQAIYGRSQNPVQPIGPQTPKACDSKLTFDAITTIRGEVMFFKDRFYMRTNPFYPEVELNFISVFWPQLPNGLEAAYEFADRDEVRFFKGNKYWAVQGQNVLHGYPKDIYSSFGFPRTVKHIDAALSEENTGKTYFFVANKYWRYDEYKRSMDPGYPKMIAHDFPGIGHKVDAVFMKDGFFYFFHGTRQYKFDPKTKRILTLQKANSWFNCRKN

SEQ ID NO: 2545 - protein, 450 aa, Artificial Sequence
  MMP-1 variant V196A
FPATLETQEQDVDLVQKYLEKYYNLKNDGRQVEKRRNSGPVVEKLKQMQEFFGLKVTGKPDAETLKVMKQPRCGVPDVAQFVLTEGNPRWEQTHLTYRIENYTPDLPRADVDHAIEKAFQLWSNVTPLTFTKVSEGQADIMISFVRGDHRDNSPFDGPGGNLAHAFQPGPGIGGDAHFDEDERWTNNFREYNLHRAAAHELGHSLGLSHSTDIGALMYPSYTFSGDVQLAQDDIDGIQAIYGRSQNPVQPIGPQTPKACDSKLTFDAITTIRGEVMFFKDRFYMRTNPFYPEVELNFISVFWPQLPNGLEAAYEFADRDEVRFFKGNKYWAVQGQNVLHGYPKDIYSSFGFPRTVKHIDAALSEENTGKTYFFVANKYWRYDEYKRSMDPGYPKMIAHDFPGIGHKVDAVFMKDGFFYFFHGTRQYKFDPKTKRILTLQKANSWFNCRKN

SEQ ID NO: 2546 - protein, 450 aa, Artificial Sequence
  MMP-1 variant V196P
FPATLETQEQDVDLVQKYLEKYYNLKNDGRQVEKRRNSGPVVEKLKQMQEFFGLKVTGKPDAETLKVMKQPRCGVPDVAQFVLTEGNPRWEQTHLTYRIENYTPDLPRADVDHAIEKAFQLWSNVTPLTFTKVSEGQADIMISFVRGDHRDNSPFDGPGGNLAHAFQPGPGIGGDAHFDEDERWTNNFREYNLHRPAAHELGHSLGLSHSTDIGALMYPSYTFSGDVQLAQDDIDGIQAIYGRSQNPVQPIGPQTPKACDSKLTFDAITTIRGEVMFFKDRFYMRTNPFYPEVELNFISVFWPQLPNGLEAAYEFADRDEVRFFKGNKYWAVQGQNVLHGYPKDIYSSFGFPRTVKHIDAALSEENTGKTYFFVANKYWRYDEYKRSMDPGYPKMIAHDFPGIGHKVDAVFMKDGFFYFFHGTRQYKFDPKTKRILTLQKANSWFNCRKN

SEQ ID NO: 2547 - protein, 450 aa, Artificial Sequence
  MMP-1 variant A197D
FPATLETQEQDVDLVQKYLEKYYNLKNDGRQVEKRRNSGPVVEKLKQMQEFFGLKVTGKPDAETLKVMKQPRCGVPDVAQFVLTEGNPRWEQTHLTYRIENYTPDLPRADVDHAIEKAFQLWSNVTPLTFTKVSEGQADIMISFVRGDHRDNSPFDGPGGNLAHAFQPGPGIGGDAHFDEDERWTNNFREYNLHRVDAHELGHSLGLSHSTDIGALMYPSYTFSGDVQLAQDDIDGIQAIYGRSQNPVQPIGPQTPKACDSKLTFDAITTIRGEVMFFKDRFYMRTNPFYPEVELNFISVFWPQLPNGLEAAYEFADRDEVRFFKGNKYWAVQGQNVLHGYPKDIYSSFGFPRTVKHIDAALSEENTGKTYFFVANKYWRYDEYKRSMDPGYPKMIAHDFPGIGHKVDAVFMKDGFFYFFHGTRQYKFDPKTKRILTLQKANSWFNCRKN

SEQ ID NO: 2548 - protein, 450 aa, Artificial Sequence
  MMP-1 variant A197E
FPATLETQEQDVDLVQKYLEKYYNLKNDGRQVEKRRNSGPVVEKLKQMQEFFGLKVTGKPDAETLKVMKQPRCGVPDVAQFVLTEGNPRWEQTHLTYRIENYTPDLPRADVDHAIEKAFQLWSNVTPLTFTKVSEGQADIMISFVRGDHRDNSPFDGPGGNLAHAFQPGPGIGGDAHFDEDERWTNNFREYNLHRVEAHELGHSLGLSHSTDIGALMYPSYTFSGDVQLAQDDIDGIQAIYGRSQNPVQPIGPQTPKACDSKLTFDAITTIRGEVMFFKDRFYMRTNPFYPEVELNFISVFWPQLPNGLEAAYEFADRDEVRFFKGNKYWAVQGQNVLHGYPKDIYSSFGFPRTVKHIDAALSEENTGKTYFFVANKYWRYDEYKRSMDPGYPKMIAHDFPGIGHKVDAVFMKDGFFYFFHGTRQYKFDPKTKRILTLQKANSWFNCRKN

SEQ ID NO: 2549 - protein, 450 aa, Artificial Sequence
  MMP-1 variant A197H
FPATLETQEQDVDLVQKYLEKYYNLKNDGRQVEKRRNSGPVVEKLKQMQEFFGLKVTGKPDAETLKVMKQPRCGVPDVAQFVLTEGNPRWEQTHLTYRIENYTPDLPRADVDHAIEKAFQLWSNVTPLTFTKVSEGQADIMISFVRGDHRDNSPFDGPGGNLAHAFQPGPGIGGDAHFDEDERWTNNFREYNLHRVHAHELGHSLGLSHSTDIGALMYPSYTFSGDVQLAQDDIDGIQAIYGRSQNPVQPIGPQTPKACDSKLTFDAITTIRGEVMFFKDRFYMRTNPFYPEVELNFISVFWPQLPNGLEAAYEFADRDEVRFFKGNKYWAVQGQNVLHGYPKDIYSSFGFPRTVKHIDAALSEENTGKTYFFVANKYWRYDEYKRSMDPGYPKMIAHDFPGIGHKVDAVFMKDGFFYFFHGTRQYKFDPKTKRILTLQKANSWFNCRKN

SEQ ID NO: 2550 - protein, 450 aa, Artificial Sequence
  MMP-1 variant A197K
FPATLETQEQDVDLVQKYLEKYYNLKNDGRQVEKRRNSGPVVEKLKQMQEFFGLKVTGKPDAETLKVMKQPRCGVPDVAQFVLTEGNPRWEQTHLTYRIENYTPDLPRADVDHAIEKAFQLWSNVTPLTFTKVSEGQADIMISFVRGDHRDNSPFDGPGGNLAHAFQPGPGIGGDAHFDEDERWTNNFREYNLHRVKAHELGHSLGLSHSTDIGALMYPSYTFSGDVQLAQDDIDGIQAIYGRSQNPVQPIGPQTPKACDSKLTFDAITTIRGEVMFFKDRFYMRTNPFYPEVELNFISVFWPQLPNGLEAAYEFADRDEVRFFKGNKYWAVQGQNVLHGYPKDIYSSFGFPRTVKHIDAALSEENTGKTYFFVANKYWRYDEYKRSMDPGYPKMIAHDFPGIGHKVDAVFMKDGFFYFFHGTRQYKFDPKTKRILTLQKANSWFNCRKN

SEQ ID NO: 2551 - protein, 450 aa, Artificial Sequence
  MMP-1 variant A197R
FPATLETQEQDVDLVQKYLEKYYNLKNDGRQVEKRRNSGPVVEKLKQMQEFFGLKVTGKPDAETLKVMKQPRCGVPDVAQFVLTEGNPRWEQTHLTYRIENYTPDLPRADVDHAIEKAFQLWSNVTPLTFTKVSEGQADIMISFVRGDHRDNSPFDGPGGNLAHAFQPGPGIGGDAHFDEDERWTNNFREYNLHRVRAHELGHSLGLSHSTDIGALMYPSYTFSGDVQLAQDDIDGIQAIYGRSQNPVQPIGPQTPKACDSKLTFDAITTIRGEVMFFKDRFYMRTNPFYPEVELNFISVFWPQLPNGLEAAYEFADRDEVRFFKGNKYWAVQGQNVLHGYPKDIYSSFGFPRTVKHIDAALSEENTGKTYFFVANKYWRYDEYKRSMDPGYPKMIAHDFPGIGHKVDAVFMKDGFFYFFHGTRQYKFDPKTKRILTLQKANSWFNCRKN

SEQ ID NO: 2552 - protein, 450 aa, Artificial Sequence
  MMP-1 variant A197C
FPATLETQEQDVDLVQKYLEKYYNLKNDGRQVEKRRNSGPVVEKLKQMQEFFGLKVTGKPDAETLKVMKQPRCGVPDVAQFVLTEGNPRWEQTHLTYRIENYTPDLPRADVDHAIEKAFQLWSNVTPLTFTKVSEGQADIMISFVRGDHRDNSPFDGPGGNLAHAFQPGPGIGGDAHFDEDERWTNNFREYNLHRVCAHELGHSLGLSHSTDIGALMYPSYTFSGDVQLAQDDIDGIQAIYGRSQNPVQPIGPQTPKACDSKLTFDAITTIRGEVMFFKDRFYMRTNPFYPEVELNFISVFWPQLPNGLEAAYEFADRDEVRFFKGNKYWAVQGQNVLHGYPKDIYSSFGFPRTVKHIDAALSEENTGKTYFFVANKYWRYDEYKRSMDPGYPKMIAHDFPGIGHKVDAVFMKDGFFYFFHGTRQYKFDPKTKRILTLQKANSWFNCRKN

SEQ ID NO: 2553 - protein, 450 aa, Artificial Sequence
  MMP-1 variant A197N
FPATLETQEQDVDLVQKYLEKYYNLKNDGRQVEKRRNSGPVVEKLKQMQEFFGLKVTGKPDAETLKVMKQPRCGVPDVAQFVLTEGNPRWEQTHLTYRIENYTPDLPRADVDHAIEKAFQLWSNVTPLTFTKVSEGQADIMISFVRGDHRDNSPFDGPGGNLAHAFQPGPGIGGDAHFDEDERWTNNFREYNLHRVNAHELGHSLGLSHSTDIGALMYPSYTFSGDVQLAQDDIDGIQAIYGRSQNPVQPIGPQTPKACDSKLTFDAITTIRGEVMFFKDRFYMRTNPFYPEVELNFISVFWPQLPNGLEAAYEFADRDEVRFFKGNKYWAVQGQNVLHGYPKDIYSSFGFPRTVKHIDAALSEENTGKTYFFVANKYWRYDEYKRSMDPGYPKMIAHDFPGIGHKVDAVFMKDGFFYFFHGTRQYKFDPKTKRILTLQKANSWFNCRKN

SEQ ID NO: 2554 - protein, 450 aa, Artificial Sequence
  MMP-1 variant A197Q
FPATLETQEQDVDLVQKYLEKYYNLKNDGRQVEKRRNSGPVVEKLKQMQEFFGLKVTGKPDAETLKVMKQPRCGVPDVAQFVLTEGNPRWEQTHLTYRIENYTPDLPRADVDHAIEKAFQLWSNVTPLTFTKVSEGQADIMISFVRGDHRDNSPFDGPGGNLAHAFQPGPGIGGDAHFDEDERWTNNFREYNLHRVQAHELGHSLGLSHSTDIGALMYPSYTFSGDVQLAQDDIDGIQAIYGRSQNPVQPIGPQTPKACDSKLTFDAITTIRGEVMFFKDRFYMRTNPFYPEVELNFISVFWPQLPNGLEAAYEFADRDEVRFFKGNKYWAVQGQNVLHGYPKDIYSSFGFPRTVKHIDAALSEENTGKTYFFVANKYWRYDEYKRSMDPGYPKMIAHDFPGIGHKVDAVFMKDGFFYFFHGTRQYKFDPKTKRILTLQKANSWFNCRKN

SEQ ID NO: 2555 - protein, 450 aa, Artificial Sequence
  MMP-1 variant A197T
FPATLETQEQDVDLVQKYLEKYYNLKNDGRQVEKRRNSGPVVEKLKQMQEFFGLKVTGKPDAETLKVMKQPRCGVPDVAQFVLTEGNPRWEQTHLTYRIENYTPDLPRADVDHAIEKAFQLWSNVTPLTFTKVSEGQADIMISFVRGDHRDNSPFDGPGGNLAHAFQPGPGIGGDAHFDEDERWTNNFREYNLHRVTAHELGHSLGLSHSTDIGALMYPSYTFSGDVQLAQDDIDGIQAIYGRSQNPVQPIGPQTPKACDSKLTFDAITTIRGEVMFFKDRFYMRTNPFYPEVELNFISVFWPQLPNGLEAAYEFADRDEVRFFKGNKYWAVQGQNVLHGYPKDIYSSFGFPRTVKHIDAALSEENTGKTYFFVANKYWRYDEYKRSMDPGYPKMIAHDFPGIGHKVDAVFMKDGFFYFFHGTRQYKFDPKTKRILTLQKANSWFNCRKN

SEQ ID NO: 2556 - protein, 450 aa, Artificial Sequence
  MMP-1 variant A197Y
FPATLETQEQDVDLVQKYLEKYYNLKNDGRQVEKRRNSGPVVEKLKQMQEFFGLKVTGKPDAETLKVMKQPRCGVPDVAQFVLTEGNPRWEQTHLTYRIENYTPDLPRADVDHAIEKAFQLWSNVTPLTFTKVSEGQADIMISFVRGDHRDNSPFDGPGGNLAHAFQPGPGIGGDAHFDEDERWTNNFREYNLHRVYAHELGHSLGLSHSTDIGALMYPSYTFSGDVQLAQDDIDGIQAIYGRSQNPVQPIGPQTPKACDSKLTFDAITTIRGEVMFFKDRFYMRTNPFYPEVELNFISVFWPQLPNGLEAAYEFADRDEVRFFKGNKYWAVQGQNVLHGYPKDIYSSFGFPRTVKHIDAALSEENTGKTYFFVANKYWRYDEYKRSMDPGYPKMIAHDFPGIGHKVDAVFMKDGFFYFFHGTRQYKFDPKTKRILTLQKANSWFNCRKN

SEQ ID NO: 2557 - protein, 450 aa, Artificial Sequence
  MMP-1 variant A197S
FPATLETQEQDVDLVQKYLEKYYNLKNDGRQVEKRRNSGPVVEKLKQMQEFFGLKVTGKPDAETLKVMKQPRCGVPDVAQFVLTEGNPRWEQTHLTYRIENYTPDLPRADVDHAIEKAFQLWSNVTPLTFTKVSEGQADIMISFVRGDHRDNSPFDGPGGNLAHAFQPGPGIGGDAHFDEDERWTNNFREYNLHRVSAHELGHSLGLSHSTDIGALMYPSYTFSGDVQLAQDDIDGIQAIYGRSQNPVQPIGPQTPKACDSKLTFDAITTIRGEVMFFKDRFYMRTNPFYPEVELNFISVFWPQLPNGLEAAYEFADRDEVRFFKGNKYWAVQGQNVLHGYPKDIYSSFGFPRTVKHIDAALSEENTGKTYFFVANKYWRYDEYKRSMDPGYPKMIAHDFPGIGHKVDAVFMKDGFFYFFHGTRQYKFDPKTKRILTLQKANSWFNCRKN

SEQ ID NO: 2558 - protein, 450 aa, Artificial Sequence
  MMP-1 variant A197G
FPATLETQEQDVDLVQKYLEKYYNLKNDGRQVEKRRNSGPVVEKLKQMQEFFGLKVTGKPDAETLKVMKQPRCGVPDVAQFVLTEGNPRWEQTHLTYRIENYTPDLPRADVDHAIEKAFQLWSNVTPLTFTKVSEGQADIMISFVRGDHRDNSPFDGPGGNLAHAFQPGPGIGGDAHFDEDERWTNNFREYNLHRVGAHELGHSLGLSHSTDIGALMYPSYTFSGDVQLAQDDIDGIQAIYGRSQNPVQPIGPQTPKACDSKLTFDAITTIRGEVMFFKDRFYMRTNPFYPEVELNFISVFWPQLPNGLEAAYEFADRDEVRFFKGNKYWAVQGQNVLHGYPKDIYSSFGFPRTVKHIDAALSEENTGKTYFFVANKYWRYDEYKRSMDPGYPKMIAHDFPGIGHKVDAVFMKDGFFYFFHGTRQYKFDPKTKRILTLQKANSWFNCRKN

SEQ ID NO: 2559 - protein, 450 aa, Artificial Sequence
  MMP-1 variant A197F
FPATLETQEQDVDLVQKYLEKYYNLKNDGRQVEKRRNSGPVVEKLKQMQEFFGLKVTGKPDAETLKVMKQPRCGVPDVAQFVLTEGNPRWEQTHLTYRIENYTPDLPRADVDHAIEKAFQLWSNVTPLTFTKVSEGQADIMISFVRGDHRDNSPFDGPGGNLAHAFQPGPGIGGDAHFDEDERWTNNFREYNLHRVFAHELGHSLGLSHSTDIGALMYPSYTFSGDVQLAQDDIDGIQAIYGRSQNPVQPIGPQTPKACDSKLTFDAITTIRGEVMFFKDRFYMRTNPFYPEVELNFISVFWPQLPNGLEAAYEFADRDEVRFFKGNKYWAVQGQNVLHGYPKDIYSSFGFPRTVKHIDAALSEENTGKTYFFVANKYWRYDEYKRSMDPGYPKMIAHDFPGIGHKVDAVFMKDGFFYFFHGTRQYKFDPKTKRILTLQKANSWFNCRKN

SEQ ID NO: 2560 - protein, 450 aa, Artificial Sequence
  MMP-1 variant A197M
FPATLETQEQDVDLVQKYLEKYYNLKNDGRQVEKRRNSGPVVEKLKQMQEFFGLKVTGKPDAETLKVMKQPRCGVPDVAQFVLTEGNPRWEQTHLTYRIENYTPDLPRADVDHAIEKAFQLWSNVTPLTFTKVSEGQADIMISFVRGDHRDNSPFDGPGGNLAHAFQPGPGIGGDAHFDEDERWTNNFREYNLHRVMAHELGHSLGLSHSTDIGALMYPSYTFSGDVQLAQDDIDGIQAIYGRSQNPVQPIGPQTPKACDSKLTFDAITTIRGEVMFFKDRFYMRTNPFYPEVELNFISVFWPQLPNGLEAAYEFADRDEVRFFKGNKYWAVQGQNVLHGYPKDIYSSFGFPRTVKHIDAALSEENTGKTYFFVANKYWRYDEYKRSMDPGYPKMIAHDFPGIGHKVDAVFMKDGFFYFFHGTRQYKFDPKTKRILTLQKANSWFNCRKN

SEQ ID NO: 2561 - protein, 450 aa, Artificial Sequence
  MMP-1 variant A197W
FPATLETQEQDVDLVQKYLEKYYNLKNDGRQVEKRRNSGPVVEKLKQMQEFFGLKVTGKPDAETLKVMKQPRCGVPDVAQFVLTEGNPRWEQTHLTYRIENYTPDLPRADVDHAIEKAFQLWSNVTPLTFTKVSEGQADIMISFVRGDHRDNSPFDGPGGNLAHAFQPGPGIGGDAHFDEDERWTNNFREYNLHRVWAHELGHSLGLSHSTDIGALMYPSYTFSGDVQLAQDDIDGIQAIYGRSQNPVQPIGPQTPKACDSKLTFDAITTIRGEVMFFKDRFYMRTNPFYPEVELNFISVFWPQLPNGLEAAYEFADRDEVRFFKGNKYWAVQGQNVLHGYPKDIYSSFGFPRTVKHIDAALSEENTGKTYFFVANKYWRYDEYKRSMDPGYPKMIAHDFPGIGHKVDAVFMKDGFFYFFHGTRQYKFDPKTKRILTLQKANSWFNCRKN

SEQ ID NO: 2562 - protein, 450 aa, Artificial Sequence
  MMP-1 variant A197I
FPATLETQEQDVDLVQKYLEKYYNLKNDGRQVEKRRNSGPVVEKLKQMQEFFGLKVTGKPDAETLKVMKQPRCGVPDVAQFVLTEGNPRWEQTHLTYRIENYTPDLPRADVDHAIEKAFQLWSNVTPLTFTKVSEGQADIMISFVRGDHRDNSPFDGPGGNLAHAFQPGPGIGGDAHFDEDERWTNNFREYNLHRVIAHELGHSLGLSHSTDIGALMYPSYTFSGDVQLAQDDIDGIQAIYGRSQNPVQPIGPQTPKACDSKLTFDAITTIRGEVMFFKDRFYMRTNPFYPEVELNFISVFWPQLPNGLEAAYEFADRDEVRFFKGNKYWAVQGQNVLHGYPKDIYSSFGFPRTVKHIDAALSEENTGKTYFFVANKYWRYDEYKRSMDPGYPKMIAHDFPGIGHKVDAVFMKDGFFYFFHGTRQYKFDPKTKRILTLQKANSWFNCRKN

SEQ ID NO: 2563 - protein, 450 aa, Artificial Sequence
  MMP-1 variant A197V
FPATLETQEQDVDLVQKYLEKYYNLKNDGRQVEKRRNSGPVVEKLKQMQEFFGLKVTGKPDAETLKVMKQPRCGVPDVAQFVLTEGNPRWEQTHLTYRIENYTPDLPRADVDHAIEKAFQLWSNVTPLTFTKVSEGQADIMISFVRGDHRDNSPFDGPGGNLAHAFQPGPGIGGDAHFDEDERWTNNFREYNLHRVVAHELGHSLGLSHSTDIGALMYPSYTFSGDVQLAQDDIDGIQAIYGRSQNPVQPIGPQTPKACDSKLTFDAITTIRGEVMFFKDRFYMRTNPFYPEVELNFISVFWPQLPNGLEAAYEFADRDEVRFFKGNKYWAVQGQNVLHGYPKDIYSSFGFPRTVKHIDAALSEENTGKTYFFVANKYWRYDEYKRSMDPGYPKMIAHDFPGIGHKVDAVFMKDGFFYFFHGTRQYKFDPKTKRILTLQKANSWFNCRKN

SEQ ID NO: 2564 - protein, 450 aa, Artificial Sequence
  MMP-1 variant A197L
FPATLETQEQDVDLVQKYLEKYYNLKNDGRQVEKRRNSGPVVEKLKQMQEFFGLKVTGKPDAETLKVMKQPRCGVPDVAQFVLTEGNPRWEQTHLTYRIENYTPDLPRADVDHAIEKAFQLWSNVTPLTFTKVSEGQADIMISFVRGDHRDNSPFDGPGGNLAHAFQPGPGIGGDAHFDEDERWTNNFREYNLHRVLAHELGHSLGLSHSTDIGALMYPSYTFSGDVQLAQDDIDGIQAIYGRSQNPVQPIGPQTPKACDSKLTFDAITTIRGEVMFFKDRFYMRTNPFYPEVELNFISVFWPQLPNGLEAAYEFADRDEVRFFKGNKYWAVQGQNVLHGYPKDIYSSFGFPRTVKHIDAALSEENTGKTYFFVANKYWRYDEYKRSMDPGYPKMIAHDFPGIGHKVDAVFMKDGFFYFFHGTRQYKFDPKTKRILTLQKANSWFNCRKN

SEQ ID NO: 2565 - protein, 450 aa, Artificial Sequence
  MMP-1 variant A197P
FPATLETQEQDVDLVQKYLEKYYNLKNDGRQVEKRRNSGPVVEKLKQMQEFFGLKVTGKPDAETLKVMKQPRCGVPDVAQFVLTEGNPRWEQTHLTYRIENYTPDLPRADVDHAIEKAFQLWSNVTPLTFTKVSEGQADIMISFVRGDHRDNSPFDGPGGNLAHAFQPGPGIGGDAHFDEDERWTNNFREYNLHRVPAHELGHSLGLSHSTDIGALMYPSYTFSGDVQLAQDDIDGIQAIYGRSQNPVQPIGPQTPKACDSKLTFDAITTIRGEVMFFKDRFYMRTNPFYPEVELNFISVFWPQLPNGLEAAYEFADRDEVRFFKGNKYWAVQGQNVLHGYPKDIYSSFGFPRTVKHIDAALSEENTGKTYFFVANKYWRYDEYKRSMDPGYPKMIAHDFPGIGHKVDAVFMKDGFFYFFHGTRQYKFDPKTKRILTLQKANSWFNCRKN

SEQ ID NO: 2566 - protein, 450 aa, Artificial Sequence
  MMP-1 variant H199D
FPATLETQEQDVDLVQKYLEKYYNLKNDGRQVEKRRNSGPVVEKLKQMQEFFGLKVTGKPDAETLKVMKQPRCGVPDVAQFVLTEGNPRWEQTHLTYRIENYTPDLPRADVDHAIEKAFQLWSNVTPLTFTKVSEGQADIMISFVRGDHRDNSPFDGPGGNLAHAFQPGPGIGGDAHFDEDERWTNNFREYNLHRVAADELGHSLGLSHSTDIGALMYPSYTFSGDVQLAQDDIDGIQAIYGRSQNPVQPIGPQTPKACDSKLTFDAITTIRGEVMFFKDRFYMRTNPFYPEVELNFISVFWPQLPNGLEAAYEFADRDEVRFFKGNKYWAVQGQNVLHGYPKDIYSSFGFPRTVKHIDAALSEENTGKTYFFVANKYWRYDEYKRSMDPGYPKMIAHDFPGIGHKVDAVFMKDGFFYFFHGTRQYKFDPKTKRILTLQKANSWFNCRKN

SEQ ID NO: 2567 - protein, 450 aa, Artificial Sequence
  MMP-1 variant H199E
FPATLETQEQDVDLVQKYLEKYYNLKNDGRQVEKRRNSGPVVEKLKQMQEFFGLKVTGKPDAETLKVMKQPRCGVPDVAQFVLTEGNPRWEQTHLTYRIENYTPDLPRADVDHAIEKAFQLWSNVTPLTFTKVSEGQADIMISFVRGDHRDNSPFDGPGGNLAHAFQPGPGIGGDAHFDEDERWTNNFREYNLHRVAAEELGHSLGLSHSTDIGALMYPSYTFSGDVQLAQDDIDGIQAIYGRSQNPVQPIGPQTPKACDSKLTFDAITTIRGEVMFFKDRFYMRTNPFYPEVELNFISVFWPQLPNGLEAAYEFADRDEVRFFKGNKYWAVQGQNVLHGYPKDIYSSFGFPRTVKHIDAALSEENTGKTYFFVANKYWRYDEYKRSMDPGYPKMIAHDFPGIGHKVDAVFMKDGFFYFFHGTRQYKFDPKTKRILTLQKANSWFNCRKN

SEQ ID NO: 2568 - protein, 450 aa, Artificial Sequence
  MMP-1 variant H199K
FPATLETQEQDVDLVQKYLEKYYNLKNDGRQVEKRRNSGPVVEKLKQMQEFFGLKVTGKPDAETLKVMKQPRCGVPDVAQFVLTEGNPRWEQTHLTYRIENYTPDLPRADVDHAIEKAFQLWSNVTPLTFTKVSEGQADIMISFVRGDHRDNSPFDGPGGNLAHAFQPGPGIGGDAHFDEDERWTNNFREYNLHRVAAKELGHSLGLSHSTDIGALMYPSYTFSGDVQLAQDDIDGIQAIYGRSQNPVQPIGPQTPKACDSKLTFDAITTIRGEVMFFKDRFYMRTNPFYPEVELNFISVFWPQLPNGLEAAYEFADRDEVRFFKGNKYWAVQGQNVLHGYPKDIYSSFGFPRTVKHIDAALSEENTGKTYFFVANKYWRYDEYKRSMDPGYPKMIAHDFPGIGHKVDAVFMKDGFFYFFHGTRQYKFDPKTKRILTLQKANSWFNCRKN

SEQ ID NO: 2569 - protein, 450 aa, Artificial Sequence
  MMP-1 variant H199R
FPATLETQEQDVDLVQKYLEKYYNLKNDGRQVEKRRNSGPVVEKLKQMQEFFGLKVTGKPDAETLKVMKQPRCGVPDVAQFVLTEGNPRWEQTHLTYRIENYTPDLPRADVDHAIEKAFQLWSNVTPLTFTKVSEGQADIMISFVRGDHRDNSPFDGPGGNLAHAFQPGPGIGGDAHFDEDERWTNNFREYNLHRVAARELGHSLGLSHSTDIGALMYPSYTFSGDVQLAQDDIDGIQAIYGRSQNPVQPIGPQTPKACDSKLTFDAITTIRGEVMFFKDRFYMRTNPFYPEVELNFISVFWPQLPNGLEAAYEFADRDEVRFFKGNKYWAVQGQNVLHGYPKDIYSSFGFPRTVKHIDAALSEENTGKTYFFVANKYWRYDEYKRSMDPGYPKMIAHDFPGIGHKVDAVFMKDGFFYFFHGTRQYKFDPKTKRILTLQKANSWFNCRKN

SEQ ID NO: 2570 - protein, 450 aa, Artificial Sequence
  MMP-1 variant H199C
FPATLETQEQDVDLVQKYLEKYYNLKNDGRQVEKRRNSGPVVEKLKQMQEFFGLKVTGKPDAETLKVMKQPRCGVPDVAQFVLTEGNPRWEQTHLTYRIENYTPDLPRADVDHAIEKAFQLWSNVTPLTFTKVSEGQADIMISFVRGDHRDNSPFDGPGGNLAHAFQPGPGIGGDAHFDEDERWTNNFREYNLHRVAACELGHSLGLSHSTDIGALMYPSYTFSGDVQLAQDDIDGIQAIYGRSQNPVQPIGPQTPKACDSKLTFDAITTIRGEVMFFKDRFYMRTNPFYPEVELNFISVFWPQLPNGLEAAYEFADRDEVRFFKGNKYWAVQGQNVLHGYPKDIYSSFGFPRTVKHIDAALSEENTGKTYFFVANKYWRYDEYKRSMDPGYPKMIAHDFPGIGHKVDAVFMKDGFFYFFHGTRQYKFDPKTKRILTLQKANSWFNCRKN

SEQ ID NO: 2571 - protein, 450 aa, Artificial Sequence
  MMP-1 variant H199N
FPATLETQEQDVDLVQKYLEKYYNLKNDGRQVEKRRNSGPVVEKLKQMQEFFGLKVTGKPDAETLKVMKQPRCGVPDVAQFVLTEGNPRWEQTHLTYRIENYTPDLPRADVDHAIEKAFQLWSNVTPLTFTKVSEGQADIMISFVRGDHRDNSPFDGPGGNLAHAFQPGPGIGGDAHFDEDERWTNNFREYNLHRVAANELGHSLGLSHSTDIGALMYPSYTFSGDVQLAQDDIDGIQAIYGRSQNPVQPIGPQTPKACDSKLTFDAITTIRGEVMFFKDRFYMRTNPFYPEVELNFISVFWPQLPNGLEAAYEFADRDEVRFFKGNKYWAVQGQNVLHGYPKDIYSSFGFPRTVKHIDAALSEENTGKTYFFVANKYWRYDEYKRSMDPGYPKMIAHDFPGIGHKVDAVFMKDGFFYFFHGTRQYKFDPKTKRILTLQKANSWFNCRKN

SEQ ID NO: 2572 - protein, 450 aa, Artificial Sequence
  MMP-1 variant H199Q
FPATLETQEQDVDLVQKYLEKYYNLKNDGRQVEKRRNSGPVVEKLKQMQEFFGLKVTGKPDAETLKVMKQPRCGVPDVAQFVLTEGNPRWEQTHLTYRIENYTPDLPRADVDHAIEKAFQLWSNVTPLTFTKVSEGQADIMISFVRGDHRDNSPFDGPGGNLAHAFQPGPGIGGDAHFDEDERWTNNFREYNLHRVAAQELGHSLGLSHSTDIGALMYPSYTFSGDVQLAQDDIDGIQAIYGRSQNPVQPIGPQTPKACDSKLTFDAITTIRGEVMFFKDRFYMRTNPFYPEVELNFISVFWPQLPNGLEAAYEFADRDEVRFFKGNKYWAVQGQNVLHGYPKDIYSSFGFPRTVKHIDAALSEENTGKTYFFVANKYWRYDEYKRSMDPGYPKMIAHDFPGIGHKVDAVFMKDGFFYFFHGTRQYKFDPKTKRILTLQKANSWFNCRKN

SEQ ID NO: 2573 - protein, 450 aa, Artificial Sequence
  MMP-1 variant H199T
FPATLETQEQDVDLVQKYLEKYYNLKNDGRQVEKRRNSGPVVEKLKQMQEFFGLKVTGKPDAETLKVMKQPRCGVPDVAQFVLTEGNPRWEQTHLTYRIENYTPDLPRADVDHAIEKAFQLWSNVTPLTFTKVSEGQADIMISFVRGDHRDNSPFDGPGGNLAHAFQPGPGIGGDAHFDEDERWTNNFREYNLHRVAATELGHSLGLSHSTDIGALMYPSYTFSGDVQLAQDDIDGIQAIYGRSQNPVQPIGPQTPKACDSKLTFDAITTIRGEVMFFKDRFYMRTNPFYPEVELNFISVFWPQLPNGLEAAYEFADRDEVRFFKGNKYWAVQGQNVLHGYPKDIYSSFGFPRTVKHIDAALSEENTGKTYFFVANKYWRYDEYKRSMDPGYPKMIAHDFPGIGHKVDAVFMKDGFFYFFHGTRQYKFDPKTKRILTLQKANSWFNCRKN

SEQ ID NO: 2574 - protein, 450 aa, Artificial Sequence
  MMP-1 variant H199Y
FPATLETQEQDVDLVQKYLEKYYNLKNDGRQVEKRRNSGPVVEKLKQMQEFFGLKVTGKPDAETLKVMKQPRCGVPDVAQFVLTEGNPRWEQTHLTYRIENYTPDLPRADVDHAIEKAFQLWSNVTPLTFTKVSEGQADIMISFVRGDHRDNSPFDGPGGNLAHAFQPGPGIGGDAHFDEDERWTNNFREYNLHRVAAYELGHSLGLSHSTDIGALMYPSYTFSGDVQLAQDDIDGIQAIYGRSQNPVQPIGPQTPKACDSKLTFDAITTIRGEVMFFKDRFYMRTNPFYPEVELNFISVFWPQLPNGLEAAYEFADRDEVRFFKGNKYWAVQGQNVLHGYPKDIYSSFGFPRTVKHIDAALSEENTGKTYFFVANKYWRYDEYKRSMDPGYPKMIAHDFPGIGHKVDAVFMKDGFFYFFHGTRQYKFDPKTKRILTLQKANSWFNCRKN

SEQ ID NO: 2575 - protein, 450 aa, Artificial Sequence
  MMP-1 variant H199S
FPATLETQEQDVDLVQKYLEKYYNLKNDGRQVEKRRNSGPVVEKLKQMQEFFGLKVTGKPDAETLKVMKQPRCGVPDVAQFVLTEGNPRWEQTHLTYRIENYTPDLPRADVDHAIEKAFQLWSNVTPLTFTKVSEGQADIMISFVRGDHRDNSPFDGPGGNLAHAFQPGPGIGGDAHFDEDERWTNNFREYNLHRVAASELGHSLGLSHSTDIGALMYPSYTFSGDVQLAQDDIDGIQAIYGRSQNPVQPIGPQTPKACDSKLTFDAITTIRGEVMFFKDRFYMRTNPFYPEVELNFISVFWPQLPNGLEAAYEFADRDEVRFFKGNKYWAVQGQNVLHGYPKDIYSSFGFPRTVKHIDAALSEENTGKTYFFVANKYWRYDEYKRSMDPGYPKMIAHDFPGIGHKVDAVFMKDGFFYFFHGTRQYKFDPKTKRILTLQKANSWFNCRKN

SEQ ID NO: 2576 - protein, 450 aa, Artificial Sequence
  MMP-1 variant H199G
FPATLETQEQDVDLVQKYLEKYYNLKNDGRQVEKRRNSGPVVEKLKQMQEFFGLKVTGKPDAETLKVMKQPRCGVPDVAQFVLTEGNPRWEQTHLTYRIENYTPDLPRADVDHAIEKAFQLWSNVTPLTFTKVSEGQADIMISFVRGDHRDNSPFDGPGGNLAHAFQPGPGIGGDAHFDEDERWTNNFREYNLHRVAAGELGHSLGLSHSTDIGALMYPSYTFSGDVQLAQDDIDGIQAIYGRSQNPVQPIGPQTPKACDSKLTFDAITTIRGEVMFFKDRFYMRTNPFYPEVELNFISVFWPQLPNGLEAAYEFADRDEVRFFKGNKYWAVQGQNVLHGYPKDIYSSFGFPRTVKHIDAALSEENTGKTYFFVANKYWRYDEYKRSMDPGYPKMIAHDFPGIGHKVDAVFMKDGFFYFFHGTRQYKFDPKTKRILTLQKANSWFNCRKN

SEQ ID NO: 2577 - protein, 450 aa, Artificial Sequence
  MMP-1 variant H199F
FPATLETQEQDVDLVQKYLEKYYNLKNDGRQVEKRRNSGPVVEKLKQMQEFFGLKVTGKPDAETLKVMKQPRCGVPDVAQFVLTEGNPRWEQTHLTYRIENYTPDLPRADVDHAIEKAFQLWSNVTPLTFTKVSEGQADIMISFVRGDHRDNSPFDGPGGNLAHAFQPGPGIGGDAHFDEDERWTNNFREYNLHRVAAFELGHSLGLSHSTDIGALMYPSYTFSGDVQLAQDDIDGIQAIYGRSQNPVQPIGPQTPKACDSKLTFDAITTIRGEVMFFKDRFYMRTNPFYPEVELNFISVFWPQLPNGLEAAYEFADRDEVRFFKGNKYWAVQGQNVLHGYPKDIYSSFGFPRTVKHIDAALSEENTGKTYFFVANKYWRYDEYKRSMDPGYPKMIAHDFPGIGHKVDAVFMKDGFFYFFHGTRQYKFDPKTKRILTLQKANSWFNCRKN

SEQ ID NO: 2578 - protein, 450 aa, Artificial Sequence
  MMP-1 variant H199M
FPATLETQEQDVDLVQKYLEKYYNLKNDGRQVEKRRNSGPVVEKLKQMQEFFGLKVTGKPDAETLKVMKQPRCGVPDVAQFVLTEGNPRWEQTHLTYRIENYTPDLPRADVDHAIEKAFQLWSNVTPLTFTKVSEGQADIMISFVRGDHRDNSPFDGPGGNLAHAFQPGPGIGGDAHFDEDERWTNNFREYNLHRVAAMELGHSLGLSHSTDIGALMYPSYTFSGDVQLAQDDIDGIQAIYGRSQNPVQPIGPQTPKACDSKLTFDAITTIRGEVMFFKDRFYMRTNPFYPEVELNFISVFWPQLPNGLEAAYEFADRDEVRFFKGNKYWAVQGQNVLHGYPKDIYSSFGFPRTVKHIDAALSEENTGKTYFFVANKYWRYDEYKRSMDPGYPKMIAHDFPGIGHKVDAVFMKDGFFYFFHGTRQYKFDPKTKRILTLQKANSWFNCRKN

SEQ ID NO: 2579 - protein, 450 aa, Artificial Sequence
  MMP-1 variant H199W
FPATLETQEQDVDLVQKYLEKYYNLKNDGRQVEKRRNSGPVVEKLKQMQEFFGLKVTGKPDAETLKVMKQPRCGVPDVAQFVLTEGNPRWEQTHLTYRIENYTPDLPRADVDHAIEKAFQLWSNVTPLTFTKVSEGQADIMISFVRGDHRDNSPFDGPGGNLAHAFQPGPGIGGDAHFDEDERWTNNFREYNLHRVAAWELGHSLGLSHSTDIGALMYPSYTFSGDVQLAQDDIDGIQAIYGRSQNPVQPIGPQTPKACDSKLTFDAITTIRGEVMFFKDRFYMRTNPFYPEVELNFISVFWPQLPNGLEAAYEFADRDEVRFFKGNKYWAVQGQNVLHGYPKDIYSSFGFPRTVKHIDAALSEENTGKTYFFVANKYWRYDEYKRSMDPGYPKMIAHDFPGIGHKVDAVFMKDGFFYFFHGTRQYKFDPKTKRILTLQKANSWFNCRKN

SEQ ID NO: 2580 - protein, 450 aa, Artificial Sequence
  MMP-1 variant H199I
FPATLETQEQDVDLVQKYLEKYYNLKNDGRQVEKRRNSGPVVEKLKQMQEFFGLKVTGKPDAETLKVMKQPRCGVPDVAQFVLTEGNPRWEQTHLTYRIENYTPDLPRADVDHAIEKAFQLWSNVTPLTFTKVSEGQADIMISFVRGDHRDNSPFDGPGGNLAHAFQPGPGIGGDAHFDEDERWTNNFREYNLHRVAAIELGHSLGLSHSTDIGALMYPSYTFSGDVQLAQDDIDGIQAIYGRSQNPVQPIGPQTPKACDSKLTFDAITTIRGEVMFFKDRFYMRTNPFYPEVELNFISVFWPQLPNGLEAAYEFADRDEVRFFKGNKYWAVQGQNVLHGYPKDIYSSFGFPRTVKHIDAALSEENTGKTYFFVANKYWRYDEYKRSMDPGYPKMIAHDFPGIGHKVDAVFMKDGFFYFFHGTRQYKFDPKTKRILTLQKANSWFNCRKN

SEQ ID NO: 2581 - protein, 450 aa, Artificial Sequence
  MMP-1 variant H199V
FPATLETQEQDVDLVQKYLEKYYNLKNDGRQVEKRRNSGPVVEKLKQMQEFFGLKVTGKPDAETLKVMKQPRCGVPDVAQFVLTEGNPRWEQTHLTYRIENYTPDLPRADVDHAIEKAFQLWSNVTPLTFTKVSEGQADIMISFVRGDHRDNSPFDGPGGNLAHAFQPGPGIGGDAHFDEDERWTNNFREYNLHRVAAVELGHSLGLSHSTDIGALMYPSYTFSGDVQLAQDDIDGIQAIYGRSQNPVQPIGPQTPKACDSKLTFDAITTIRGEVMFFKDRFYMRTNPFYPEVELNFISVFWPQLPNGLEAAYEFADRDEVRFFKGNKYWAVQGQNVLHGYPKDIYSSFGFPRTVKHIDAALSEENTGKTYFFVANKYWRYDEYKRSMDPGYPKMIAHDFPGIGHKVDAVFMKDGFFYFFHGTRQYKFDPKTKRILTLQKANSWFNCRKN

SEQ ID NO: 2582 - protein, 450 aa, Artificial Sequence
  MMP-1 variant H199L
FPATLETQEQDVDLVQKYLEKYYNLKNDGRQVEKRRNSGPVVEKLKQMQEFFGLKVTGKPDAETLKVMKQPRCGVPDVAQFVLTEGNPRWEQTHLTYRIENYTPDLPRADVDHAIEKAFQLWSNVTPLTFTKVSEGQADIMISFVRGDHRDNSPFDGPGGNLAHAFQPGPGIGGDAHFDEDERWTNNFREYNLHRVAALELGHSLGLSHSTDIGALMYPSYTFSGDVQLAQDDIDGIQAIYGRSQNPVQPIGPQTPKACDSKLTFDAITTIRGEVMFFKDRFYMRTNPFYPEVELNFISVFWPQLPNGLEAAYEFADRDEVRFFKGNKYWAVQGQNVLHGYPKDIYSSFGFPRTVKHIDAALSEENTGKTYFFVANKYWRYDEYKRSMDPGYPKMIAHDFPGIGHKVDAVFMKDGFFYFFHGTRQYKFDPKTKRILTLQKANSWFNCRKN

SEQ ID NO: 2583 - protein, 450 aa, Artificial Sequence
  MMP-1 variant H199A
FPATLETQEQDVDLVQKYLEKYYNLKNDGRQVEKRRNSGPVVEKLKQMQEFFGLKVTGKPDAETLKVMKQPRCGVPDVAQFVLTEGNPRWEQTHLTYRIENYTPDLPRADVDHAIEKAFQLWSNVTPLTFTKVSEGQADIMISFVRGDHRDNSPFDGPGGNLAHAFQPGPGIGGDAHFDEDERWTNNFREYNLHRVAAAELGHSLGLSHSTDIGALMYPSYTFSGDVQLAQDDIDGIQAIYGRSQNPVQPIGPQTPKACDSKLTFDAITTIRGEVMFFKDRFYMRTNPFYPEVELNFISVFWPQLPNGLEAAYEFADRDEVRFFKGNKYWAVQGQNVLHGYPKDIYSSFGFPRTVKHIDAALSEENTGKTYFFVANKYWRYDEYKRSMDPGYPKMIAHDFPGIGHKVDAVFMKDGFFYFFHGTRQYKFDPKTKRILTLQKANSWFNCRKN

SEQ ID NO: 2584 - protein, 450 aa, Artificial Sequence
  MMP-1 variant H199P
FPATLETQEQDVDLVQKYLEKYYNLKNDGRQVEKRRNSGPVVEKLKQMQEFFGLKVTGKPDAETLKVMKQPRCGVPDVAQFVLTEGNPRWEQTHLTYRIENYTPDLPRADVDHAIEKAFQLWSNVTPLTFTKVSEGQADIMISFVRGDHRDNSPFDGPGGNLAHAFQPGPGIGGDAHFDEDERWTNNFREYNLHRVAAPELGHSLGLSHSTDIGALMYPSYTFSGDVQLAQDDIDGIQAIYGRSQNPVQPIGPQTPKACDSKLTFDAITTIRGEVMFFKDRFYMRTNPFYPEVELNFISVFWPQLPNGLEAAYEFADRDEVRFFKGNKYWAVQGQNVLHGYPKDIYSSFGFPRTVKHIDAALSEENTGKTYFFVANKYWRYDEYKRSMDPGYPKMIAHDFPGIGHKVDAVFMKDGFFYFFHGTRQYKFDPKTKRILTLQKANSWFNCRKN

SEQ ID NO: 2585 - protein, 450 aa, Artificial Sequence
  MMP-1 variant E200D
FPATLETQEQDVDLVQKYLEKYYNLKNDGRQVEKRRNSGPVVEKLKQMQEFFGLKVTGKPDAETLKVMKQPRCGVPDVAQFVLTEGNPRWEQTHLTYRIENYTPDLPRADVDHAIEKAFQLWSNVTPLTFTKVSEGQADIMISFVRGDHRDNSPFDGPGGNLAHAFQPGPGIGGDAHFDEDERWTNNFREYNLHRVAAHDLGHSLGLSHSTDIGALMYPSYTFSGDVQLAQDDIDGIQAIYGRSQNPVQPIGPQTPKACDSKLTFDAITTIRGEVMFFKDRFYMRTNPFYPEVELNFISVFWPQLPNGLEAAYEFADRDEVRFFKGNKYWAVQGQNVLHGYPKDIYSSFGFPRTVKHIDAALSEENTGKTYFFVANKYWRYDEYKRSMDPGYPKMIAHDFPGIGHKVDAVFMKDGFFYFFHGTRQYKFDPKTKRILTLQKANSWFNCRKN

SEQ ID NO: 2586 - protein, 450 aa, Artificial Sequence
  MMP-1 variant E200H
FPATLETQEQDVDLVQKYLEKYYNLKNDGRQVEKRRNSGPVVEKLKQMQEFFGLKVTGKPDAETLKVMKQPRCGVPDVAQFVLTEGNPRWEQTHLTYRIENYTPDLPRADVDHAIEKAFQLWSNVTPLTFTKVSEGQADIMISFVRGDHRDNSPFDGPGGNLAHAFQPGPGIGGDAHFDEDERWTNNFREYNLHRVAAHHLGHSLGLSHSTDIGALMYPSYTFSGDVQLAQDDIDGIQAIYGRSQNPVQPIGPQTPKACDSKLTFDAITTIRGEVMFFKDRFYMRTNPFYPEVELNFISVFWPQLPNGLEAAYEFADRDEVRFFKGNKYWAVQGQNVLHGYPKDIYSSFGFPRTVKHIDAALSEENTGKTYFFVANKYWRYDEYKRSMDPGYPKMIAHDFPGIGHKVDAVFMKDGFFYFFHGTRQYKFDPKTKRILTLQKANSWFNCRKN

SEQ ID NO: 2587 - protein, 450 aa, Artificial Sequence
  MMP-1 variant E200K
FPATLETQEQDVDLVQKYLEKYYNLKNDGRQVEKRRNSGPVVEKLKQMQEFFGLKVTGKPDAETLKVMKQPRCGVPDVAQFVLTEGNPRWEQTHLTYRIENYTPDLPRADVDHAIEKAFQLWSNVTPLTFTKVSEGQADIMISFVRGDHRDNSPFDGPGGNLAHAFQPGPGIGGDAHFDEDERWTNNFREYNLHRVAAHKLGHSLGLSHSTDIGALMYPSYTFSGDVQLAQDDIDGIQAIYGRSQNPVQPIGPQTPKACDSKLTFDAITTIRGEVMFFKDRFYMRTNPFYPEVELNFISVFWPQLPNGLEAAYEFADRDEVRFFKGNKYWAVQGQNVLHGYPKDIYSSFGFPRTVKHIDAALSEENTGKTYFFVANKYWRYDEYKRSMDPGYPKMIAHDFPGIGHKVDAVFMKDGFFYFFHGTRQYKFDPKTKRILTLQKANSWFNCRKN

SEQ ID NO: 2588 - protein, 450 aa, Artificial Sequence
  MMP-1 variant E200R
FPATLETQEQDVDLVQKYLEKYYNLKNDGRQVEKRRNSGPVVEKLKQMQEFFGLKVTGKPDAETLKVMKQPRCGVPDVAQFVLTEGNPRWEQTHLTYRIENYTPDLPRADVDHAIEKAFQLWSNVTPLTFTKVSEGQADIMISFVRGDHRDNSPFDGPGGNLAHAFQPGPGIGGDAHFDEDERWTNNFREYNLHRVAAHRLGHSLGLSHSTDIGALMYPSYTFSGDVQLAQDDIDGIQAIYGRSQNPVQPIGPQTPKACDSKLTFDAITTIRGEVMFFKDRFYMRTNPFYPEVELNFISVFWPQLPNGLEAAYEFADRDEVRFFKGNKYWAVQGQNVLHGYPKDIYSSFGFPRTVKHIDAALSEENTGKTYFFVANKYWRYDEYKRSMDPGYPKMIAHDFPGIGHKVDAVFMKDGFFYFFHGTRQYKFDPKTKRILTLQKANSWFNCRKN

SEQ ID NO: 2589 - protein, 450 aa, Artificial Sequence
  MMP-1 variant E200C
FPATLETQEQDVDLVQKYLEKYYNLKNDGRQVEKRRNSGPVVEKLKQMQEFFGLKVTGKPDAETLKVMKQPRCGVPDVAQFVLTEGNPRWEQTHLTYRIENYTPDLPRADVDHAIEKAFQLWSNVTPLTFTKVSEGQADIMISFVRGDHRDNSPFDGPGGNLAHAFQPGPGIGGDAHFDEDERWTNNFREYNLHRVAAHCLGHSLGLSHSTDIGALMYPSYTFSGDVQLAQDDIDGIQAIYGRSQNPVQPIGPQTPKACDSKLTFDAITTIRGEVMFFKDRFYMRTNPFYPEVELNFISVFWPQLPNGLEAAYEFADRDEVRFFKGNKYWAVQGQNVLHGYPKDIYSSFGFPRTVKHIDAALSEENTGKTYFFVANKYWRYDEYKRSMDPGYPKMIAHDFPGIGHKVDAVFMKDGFFYFFHGTRQYKFDPKTKRILTLQKANSWFNCRKN

SEQ ID NO: 2590 - protein, 450 aa, Artificial Sequence
  MMP-1 variant E200N
FPATLETQEQDVDLVQKYLEKYYNLKNDGRQVEKRRNSGPVVEKLKQMQEFFGLKVTGKPDAETLKVMKQPRCGVPDVAQFVLTEGNPRWEQTHLTYRIENYTPDLPRADVDHAIEKAFQLWSNVTPLTFTKVSEGQADIMISFVRGDHRDNSPFDGPGGNLAHAFQPGPGIGGDAHFDEDERWTNNFREYNLHRVAAHNLGHSLGLSHSTDIGALMYPSYTFSGDVQLAQDDIDGIQAIYGRSQNPVQPIGPQTPKACDSKLTFDAITTIRGEVMFFKDRFYMRTNPFYPEVELNFISVFWPQLPNGLEAAYEFADRDEVRFFKGNKYWAVQGQNVLHGYPKDIYSSFGFPRTVKHIDAALSEENTGKTYFFVANKYWRYDEYKRSMDPGYPKMIAHDFPGIGHKVDAVFMKDGFFYFFHGTRQYKFDPKTKRILTLQKANSWFNCRKN

SEQ ID NO: 2591 - protein, 450 aa, Artificial Sequence
  MMP-1 variant E200Q
FPATLETQEQDVDLVQKYLEKYYNLKNDGRQVEKRRNSGPVVEKLKQMQEFFGLKVTGKPDAETLKVMKQPRCGVPDVAQFVLTEGNPRWEQTHLTYRIENYTPDLPRADVDHAIEKAFQLWSNVTPLTFTKVSEGQADIMISFVRGDHRDNSPFDGPGGNLAHAFQPGPGIGGDAHFDEDERWTNNFREYNLHRVAAHQLGHSLGLSHSTDIGALMYPSYTFSGDVQLAQDDIDGIQAIYGRSQNPVQPIGPQTPKACDSKLTFDAITTIRGEVMFFKDRFYMRTNPFYPEVELNFISVFWPQLPNGLEAAYEFADRDEVRFFKGNKYWAVQGQNVLHGYPKDIYSSFGFPRTVKHIDAALSEENTGKTYFFVANKYWRYDEYKRSMDPGYPKMIAHDFPGIGHKVDAVFMKDGFFYFFHGTRQYKFDPKTKRILTLQKANSWFNCRKN

SEQ ID NO: 2592 - protein, 450 aa, Artificial Sequence
  MMP-1 variant E200T
FPATLETQEQDVDLVQKYLEKYYNLKNDGRQVEKRRNSGPVVEKLKQMQEFFGLKVTGKPDAETLKVMKQPRCGVPDVAQFVLTEGNPRWEQTHLTYRIENYTPDLPRADVDHAIEKAFQLWSNVTPLTFTKVSEGQADIMISFVRGDHRDNSPFDGPGGNLAHAFQPGPGIGGDAHFDEDERWTNNFREYNLHRVAAHTLGHSLGLSHSTDIGALMYPSYTFSGDVQLAQDDIDGIQAIYGRSQNPVQPIGPQTPKACDSKLTFDAITTIRGEVMFFKDRFYMRTNPFYPEVELNFISVFWPQLPNGLEAAYEFADRDEVRFFKGNKYWAVQGQNVLHGYPKDIYSSFGFPRTVKHIDAALSEENTGKTYFFVANKYWRYDEYKRSMDPGYPKMIAHDFPGIGHKVDAVFMKDGFFYFFHGTRQYKFDPKTKRILTLQKANSWFNCRKN

SEQ ID NO: 2593 - protein, 450 aa, Artificial Sequence
  MMP-1 variant E200Y
FPATLETQEQDVDLVQKYLEKYYNLKNDGRQVEKRRNSGPVVEKLKQMQEFFGLKVTGKPDAETLKVMKQPRCGVPDVAQFVLTEGNPRWEQTHLTYRIENYTPDLPRADVDHAIEKAFQLWSNVTPLTFTKVSEGQADIMISFVRGDHRDNSPFDGPGGNLAHAFQPGPGIGGDAHFDEDERWTNNFREYNLHRVAAHYLGHSLGLSHSTDIGALMYPSYTFSGDVQLAQDDIDGIQAIYGRSQNPVQPIGPQTPKACDSKLTFDAITTIRGEVMFFKDRFYMRTNPFYPEVELNFISVFWPQLPNGLEAAYEFADRDEVRFFKGNKYWAVQGQNVLHGYPKDIYSSFGFPRTVKHIDAALSEENTGKTYFFVANKYWRYDEYKRSMDPGYPKMIAHDFPGIGHKVDAVFMKDGFFYFFHGTRQYKFDPKTKRILTLQKANSWFNCRKN

SEQ ID NO: 2594 - protein, 450 aa, Artificial Sequence
  MMP-1 variant E200S
FPATLETQEQDVDLVQKYLEKYYNLKNDGRQVEKRRNSGPVVEKLKQMQEFFGLKVTGKPDAETLKVMKQPRCGVPDVAQFVLTEGNPRWEQTHLTYRIENYTPDLPRADVDHAIEKAFQLWSNVTPLTFTKVSEGQADIMISFVRGDHRDNSPFDGPGGNLAHAFQPGPGIGGDAHFDEDERWTNNFREYNLHRVAAHSLGHSLGLSHSTDIGALMYPSYTFSGDVQLAQDDIDGIQAIYGRSQNPVQPIGPQTPKACDSKLTFDAITTIRGEVMFFKDRFYMRTNPFYPEVELNFISVFWPQLPNGLEAAYEFADRDEVRFFKGNKYWAVQGQNVLHGYPKDIYSSFGFPRTVKHIDAALSEENTGKTYFFVANKYWRYDEYKRSMDPGYPKMIAHDFPGIGHKVDAVFMKDGFFYFFHGTRQYKFDPKTKRILTLQKANSWFNCRKN

SEQ ID NO: 2595 - protein, 450 aa, Artificial Sequence
  MMP-1 variant E200G
FPATLETQEQDVDLVQKYLEKYYNLKNDGRQVEKRRNSGPVVEKLKQMQEFFGLKVTGKPDAETLKVMKQPRCGVPDVAQFVLTEGNPRWEQTHLTYRIENYTPDLPRADVDHAIEKAFQLWSNVTPLTFTKVSEGQADIMISFVRGDHRDNSPFDGPGGNLAHAFQPGPGIGGDAHFDEDERWTNNFREYNLHRVAAHGLGHSLGLSHSTDIGALMYPSYTFSGDVQLAQDDIDGIQAIYGRSQNPVQPIGPQTPKACDSKLTFDAITTIRGEVMFFKDRFYMRTNPFYPEVELNFISVFWPQLPNGLEAAYEFADRDEVRFFKGNKYWAVQGQNVLHGYPKDIYSSFGFPRTVKHIDAALSEENTGKTYFFVANKYWRYDEYKRSMDPGYPKMIAHDFPGIGHKVDAVFMKDGFFYFFHGTRQYKFDPKTKRILTLQKANSWFNCRKN

SEQ ID NO: 2596 - protein, 450 aa, Artificial Sequence
  MMP-1 variant E200F
FPATLETQEQDVDLVQKYLEKYYNLKNDGRQVEKRRNSGPVVEKLKQMQEFFGLKVTGKPDAETLKVMKQPRCGVPDVAQFVLTEGNPRWEQTHLTYRIENYTPDLPRADVDHAIEKAFQLWSNVTPLTFTKVSEGQADIMISFVRGDHRDNSPFDGPGGNLAHAFQPGPGIGGDAHFDEDERWTNNFREYNLHRVAAHFLGHSLGLSHSTDIGALMYPSYTFSGDVQLAQDDIDGIQAIYGRSQNPVQPIGPQTPKACDSKLTFDAITTIRGEVMFFKDRFYMRTNPFYPEVELNFISVFWPQLPNGLEAAYEFADRDEVRFFKGNKYWAVQGQNVLHGYPKDIYSSFGFPRTVKHIDAALSEENTGKTYFFVANKYWRYDEYKRSMDPGYPKMIAHDFPGIGHKVDAVFMKDGFFYFFHGTRQYKFDPKTKRILTLQKANSWFNCRKN

SEQ ID NO: 2597 - protein, 450 aa, Artificial Sequence
  MMP-1 variant E200M
FPATLETQEQDVDLVQKYLEKYYNLKNDGRQVEKRRNSGPVVEKLKQMQEFFGLKVTGKPDAETLKVMKQPRCGVPDVAQFVLTEGNPRWEQTHLTYRIENYTPDLPRADVDHAIEKAFQLWSNVTPLTFTKVSEGQADIMISFVRGDHRDNSPFDGPGGNLAHAFQPGPGIGGDAHFDEDERWTNNFREYNLHRVAAHMLGHSLGLSHSTDIGALMYPSYTFSGDVQLAQDDIDGIQAIYGRSQNPVQPIGPQTPKACDSKLTFDAITTIRGEVMFFKDRFYMRTNPFYPEVELNFISVFWPQLPNGLEAAYEFADRDEVRFFKGNKYWAVQGQNVLHGYPKDIYSSFGFPRTVKHIDAALSEENTGKTYFFVANKYWRYDEYKRSMDPGYPKMIAHDFPGIGHKVDAVFMKDGFFYFFHGTRQYKFDPKTKRILTLQKANSWFNCRKN

SEQ ID NO: 2598 - protein, 450 aa, Artificial Sequence
  MMP-1 variant E200W
FPATLETQEQDVDLVQKYLEKYYNLKNDGRQVEKRRNSGPVVEKLKQMQEFFGLKVTGKPDAETLKVMKQPRCGVPDVAQFVLTEGNPRWEQTHLTYRIENYTPDLPRADVDHAIEKAFQLWSNVTPLTFTKVSEGQADIMISFVRGDHRDNSPFDGPGGNLAHAFQPGPGIGGDAHFDEDERWTNNFREYNLHRVAAHWLGHSLGLSHSTDIGALMYPSYTFSGDVQLAQDDIDGIQAIYGRSQNPVQPIGPQTPKACDSKLTFDAITTIRGEVMFFKDRFYMRTNPFYPEVELNFISVFWPQLPNGLEAAYEFADRDEVRFFKGNKYWAVQGQNVLHGYPKDIYSSFGFPRTVKHIDAALSEENTGKTYFFVANKYWRYDEYKRSMDPGYPKMIAHDFPGIGHKVDAVFMKDGFFYFFHGTRQYKFDPKTKRILTLQKANSWFNCRKN

SEQ ID NO: 2599 - protein, 450 aa, Artificial Sequence
  MMP-1 variant E200I
FPATLETQEQDVDLVQKYLEKYYNLKNDGRQVEKRRNSGPVVEKLKQMQEFFGLKVTGKPDAETLKVMKQPRCGVPDVAQFVLTEGNPRWEQTHLTYRIENYTPDLPRADVDHAIEKAFQLWSNVTPLTFTKVSEGQADIMISFVRGDHRDNSPFDGPGGNLAHAFQPGPGIGGDAHFDEDERWTNNFREYNLHRVAAHILGHSLGLSHSTDIGALMYPSYTFSGDVQLAQDDIDGIQAIYGRSQNPVQPIGPQTPKACDSKLTFDAITTIRGEVMFFKDRFYMRTNPFYPEVELNFISVFWPQLPNGLEAAYEFADRDEVRFFKGNKYWAVQGQNVLHGYPKDIYSSFGFPRTVKHIDAALSEENTGKTYFFVANKYWRYDEYKRSMDPGYPKMIAHDFPGIGHKVDAVFMKDGFFYFFHGTRQYKFDPKTKRILTLQKANSWFNCRKN

SEQ ID NO: 2600 - protein, 450 aa, Artificial Sequence
  MMP-1 variant E200V
FPATLETQEQDVDLVQKYLEKYYNLKNDGRQVEKRRNSGPVVEKLKQMQEFFGLKVTGKPDAETLKVMKQPRCGVPDVAQFVLTEGNPRWEQTHLTYRIENYTPDLPRADVDHAIEKAFQLWSNVTPLTFTKVSEGQADIMISFVRGDHRDNSPFDGPGGNLAHAFQPGPGIGGDAHFDEDERWTNNFREYNLHRVAAHVLGHSLGLSHSTDIGALMYPSYTFSGDVQLAQDDIDGIQAIYGRSQNPVQPIGPQTPKACDSKLTFDAITTIRGEVMFFKDRFYMRTNPFYPEVELNFISVFWPQLPNGLEAAYEFADRDEVRFFKGNKYWAVQGQNVLHGYPKDIYSSFGFPRTVKHIDAALSEENTGKTYFFVANKYWRYDEYKRSMDPGYPKMIAHDFPGIGHKVDAVFMKDGFFYFFHGTRQYKFDPKTKRILTLQKANSWFNCRKN

SEQ ID NO: 2601 - protein, 450 aa, Artificial Sequence
  MMP-1 variant E200L
FPATLETQEQDVDLVQKYLEKYYNLKNDGRQVEKRRNSGPVVEKLKQMQEFFGLKVTGKPDAETLKVMKQPRCGVPDVAQFVLTEGNPRWEQTHLTYRIENYTPDLPRADVDHAIEKAFQLWSNVTPLTFTKVSEGQADIMISFVRGDHRDNSPFDGPGGNLAHAFQPGPGIGGDAHFDEDERWTNNFREYNLHRVAAHLLGHSLGLSHSTDIGALMYPSYTFSGDVQLAQDDIDGIQAIYGRSQNPVQPIGPQTPKACDSKLTFDAITTIRGEVMFFKDRFYMRTNPFYPEVELNFISVFWPQLPNGLEAAYEFADRDEVRFFKGNKYWAVQGQNVLHGYPKDIYSSFGFPRTVKHIDAALSEENTGKTYFFVANKYWRYDEYKRSMDPGYPKMIAHDFPGIGHKVDAVFMKDGFFYFFHGTRQYKFDPKTKRILTLQKANSWFNCRKN

SEQ ID NO: 2602 - protein, 450 aa, Artificial Sequence
  MMP-1 variant E200A
FPATLETQEQDVDLVQKYLEKYYNLKNDGRQVEKRRNSGPVVEKLKQMQEFFGLKVTGKPDAETLKVMKQPRCGVPDVAQFVLTEGNPRWEQTHLTYRIENYTPDLPRADVDHAIEKAFQLWSNVTPLTFTKVSEGQADIMISFVRGDHRDNSPFDGPGGNLAHAFQPGPGIGGDAHFDEDERWTNNFREYNLHRVAAHALGHSLGLSHSTDIGALMYPSYTFSGDVQLAQDDIDGIQAIYGRSQNPVQPIGPQTPKACDSKLTFDAITTIRGEVMFFKDRFYMRTNPFYPEVELNFISVFWPQLPNGLEAAYEFADRDEVRFFKGNKYWAVQGQNVLHGYPKDIYSSFGFPRTVKHIDAALSEENTGKTYFFVANKYWRYDEYKRSMDPGYPKMIAHDFPGIGHKVDAVFMKDGFFYFFHGTRQYKFDPKTKRILTLQKANSWFNCRKN

SEQ ID NO: 2603 - protein, 450 aa, Artificial Sequence
  MMP-1 variant E200P
FPATLETQEQDVDLVQKYLEKYYNLKNDGRQVEKRRNSGPVVEKLKQMQEFFGLKVTGKPDAETLKVMKQPRCGVPDVAQFVLTEGNPRWEQTHLTYRIENYTPDLPRADVDHAIEKAFQLWSNVTPLTFTKVSEGQADIMISFVRGDHRDNSPFDGPGGNLAHAFQPGPGIGGDAHFDEDERWTNNFREYNLHRVAAHPLGHSLGLSHSTDIGALMYPSYTFSGDVQLAQDDIDGIQAIYGRSQNPVQPIGPQTPKACDSKLTFDAITTIRGEVMFFKDRFYMRTNPFYPEVELNFISVFWPQLPNGLEAAYEFADRDEVRFFKGNKYWAVQGQNVLHGYPKDIYSSFGFPRTVKHIDAALSEENTGKTYFFVANKYWRYDEYKRSMDPGYPKMIAHDFPGIGHKVDAVFMKDGFFYFFHGTRQYKFDPKTKRILTLQKANSWFNCRKN

SEQ ID NO: 2604 - protein, 450 aa, Artificial Sequence
  MMP-1 variant L201D
FPATLETQEQDVDLVQKYLEKYYNLKNDGRQVEKRRNSGPVVEKLKQMQEFFGLKVTGKPDAETLKVMKQPRCGVPDVAQFVLTEGNPRWEQTHLTYRIENYTPDLPRADVDHAIEKAFQLWSNVTPLTFTKVSEGQADIMISFVRGDHRDNSPFDGPGGNLAHAFQPGPGIGGDAHFDEDERWTNNFREYNLHRVAAHEDGHSLGLSHSTDIGALMYPSYTFSGDVQLAQDDIDGIQAIYGRSQNPVQPIGPQTPKACDSKLTFDAITTIRGEVMFFKDRFYMRTNPFYPEVELNFISVFWPQLPNGLEAAYEFADRDEVRFFKGNKYWAVQGQNVLHGYPKDIYSSFGFPRTVKHIDAALSEENTGKTYFFVANKYWRYDEYKRSMDPGYPKMIAHDFPGIGHKVDAVFMKDGFFYFFHGTRQYKFDPKTKRILTLQKANSWFNCRKN

SEQ ID NO: 2605 - protein, 450 aa, Artificial Sequence
  MMP-1 variant L201E
FPATLETQEQDVDLVQKYLEKYYNLKNDGRQVEKRRNSGPVVEKLKQMQEFFGLKVTGKPDAETLKVMKQPRCGVPDVAQFVLTEGNPRWEQTHLTYRIENYTPDLPRADVDHAIEKAFQLWSNVTPLTFTKVSEGQADIMISFVRGDHRDNSPFDGPGGNLAHAFQPGPGIGGDAHFDEDERWTNNFREYNLHRVAAHEEGHSLGLSHSTDIGALMYPSYTFSGDVQLAQDDIDGIQAIYGRSQNPVQPIGPQTPKACDSKLTFDAITTIRGEVMFFKDRFYMRTNPFYPEVELNFISVFWPQLPNGLEAAYEFADRDEVRFFKGNKYWAVQGQNVLHGYPKDIYSSFGFPRTVKHIDAALSEENTGKTYFFVANKYWRYDEYKRSMDPGYPKMIAHDFPGIGHKVDAVFMKDGFFYFFHGTRQYKFDPKTKRILTLQKANSWFNCRKN

SEQ ID NO: 2606 - protein, 450 aa, Artificial Sequence
  MMP-1 variant L201H
FPATLETQEQDVDLVQKYLEKYYNLKNDGRQVEKRRNSGPVVEKLKQMQEFFGLKVTGKPDAETLKVMKQPRCGVPDVAQFVLTEGNPRWEQTHLTYRIENYTPDLPRADVDHAIEKAFQLWSNVTPLTFTKVSEGQADIMISFVRGDHRDNSPFDGPGGNLAHAFQPGPGIGGDAHFDEDERWTNNFREYNLHRVAAHEHGHSLGLSHSTDIGALMYPSYTFSGDVQLAQDDIDGIQAIYGRSQNPVQPIGPQTPKACDSKLTFDAITTIRGEVMFFKDRFYMRTNPFYPEVELNFISVFWPQLPNGLEAAYEFADRDEVRFFKGNKYWAVQGQNVLHGYPKDIYSSFGFPRTVKHIDAALSEENTGKTYFFVANKYWRYDEYKRSMDPGYPKMIAHDFPGIGHKVDAVFMKDGFFYFFHGTRQYKFDPKTKRILTLQKANSWFNCRKN

SEQ ID NO: 2607 - protein, 450 aa, Artificial Sequence
  MMP-1 variant L201K
FPATLETQEQDVDLVQKYLEKYYNLKNDGRQVEKRRNSGPVVEKLKQMQEFFGLKVTGKPDAETLKVMKQPRCGVPDVAQFVLTEGNPRWEQTHLTYRIENYTPDLPRADVDHAIEKAFQLWSNVTPLTFTKVSEGQADIMISFVRGDHRDNSPFDGPGGNLAHAFQPGPGIGGDAHFDEDERWTNNFREYNLHRVAAHEKGHSLGLSHSTDIGALMYPSYTFSGDVQLAQDDIDGIQAIYGRSQNPVQPIGPQTPKACDSKLTFDAITTIRGEVMFFKDRFYMRTNPFYPEVELNFISVFWPQLPNGLEAAYEFADRDEVRFFKGNKYWAVQGQNVLHGYPKDIYSSFGFPRTVKHIDAALSEENTGKTYFFVANKYWRYDEYKRSMDPGYPKMIAHDFPGIGHKVDAVFMKDGFFYFFHGTRQYKFDPKTKRILTLQKANSWFNCRKN

SEQ ID NO: 2608 - protein, 450 aa, Artificial Sequence
  MMP-1 variant L201R
FPATLETQEQDVDLVQKYLEKYYNLKNDGRQVEKRRNSGPVVEKLKQMQEFFGLKVTGKPDAETLKVMKQPRCGVPDVAQFVLTEGNPRWEQTHLTYRIENYTPDLPRADVDHAIEKAFQLWSNVTPLTFTKVSEGQADIMISFVRGDHRDNSPFDGPGGNLAHAFQPGPGIGGDAHFDEDERWTNNFREYNLHRVAAHERGHSLGLSHSTDIGALMYPSYTFSGDVQLAQDDIDGIQAIYGRSQNPVQPIGPQTPKACDSKLTFDAITTIRGEVMFFKDRFYMRTNPFYPEVELNFISVFWPQLPNGLEAAYEFADRDEVRFFKGNKYWAVQGQNVLHGYPKDIYSSFGFPRTVKHIDAALSEENTGKTYFFVANKYWRYDEYKRSMDPGYPKMIAHDFPGIGHKVDAVFMKDGFFYFFHGTRQYKFDPKTKRILTLQKANSWFNCRKN

SEQ ID NO: 2609 - protein, 450 aa, Artificial Sequence
  MMP-1 variant L201C
FPATLETQEQDVDLVQKYLEKYYNLKNDGRQVEKRRNSGPVVEKLKQMQEFFGLKVTGKPDAETLKVMKQPRCGVPDVAQFVLTEGNPRWEQTHLTYRIENYTPDLPRADVDHAIEKAFQLWSNVTPLTFTKVSEGQADIMISFVRGDHRDNSPFDGPGGNLAHAFQPGPGIGGDAHFDEDERWTNNFREYNLHRVAAHECGHSLGLSHSTDIGALMYPSYTFSGDVQLAQDDIDGIQAIYGRSQNPVQPIGPQTPKACDSKLTFDAITTIRGEVMFFKDRFYMRTNPFYPEVELNFISVFWPQLPNGLEAAYEFADRDEVRFFKGNKYWAVQGQNVLHGYPKDIYSSFGFPRTVKHIDAALSEENTGKTYFFVANKYWRYDEYKRSMDPGYPKMIAHDFPGIGHKVDAVFMKDGFFYFFHGTRQYKFDPKTKRILTLQKANSWFNCRKN

SEQ ID NO: 2610 - protein, 450 aa, Artificial Sequence
  MMP-1 variant L201N
FPATLETQEQDVDLVQKYLEKYYNLKNDGRQVEKRRNSGPVVEKLKQMQEFFGLKVTGKPDAETLKVMKQPRCGVPDVAQFVLTEGNPRWEQTHLTYRIENYTPDLPRADVDHAIEKAFQLWSNVTPLTFTKVSEGQADIMISFVRGDHRDNSPFDGPGGNLAHAFQPGPGIGGDAHFDEDERWTNNFREYNLHRVAAHENGHSLGLSHSTDIGALMYPSYTFSGDVQLAQDDIDGIQAIYGRSQNPVQPIGPQTPKACDSKLTFDAITTIRGEVMFFKDRFYMRTNPFYPEVELNFISVFWPQLPNGLEAAYEFADRDEVRFFKGNKYWAVQGQNVLHGYPKDIYSSFGFPRTVKHIDAALSEENTGKTYFFVANKYWRYDEYKRSMDPGYPKMIAHDFPGIGHKVDAVFMKDGFFYFFHGTRQYKFDPKTKRILTLQKANSWFNCRKN

SEQ ID NO: 2611 - protein, 450 aa, Artificial Sequence
  MMP-1 variant L201Q
FPATLETQEQDVDLVQKYLEKYYNLKNDGRQVEKRRNSGPVVEKLKQMQEFFGLKVTGKPDAETLKVMKQPRCGVPDVAQFVLTEGNPRWEQTHLTYRIENYTPDLPRADVDHAIEKAFQLWSNVTPLTFTKVSEGQADIMISFVRGDHRDNSPFDGPGGNLAHAFQPGPGIGGDAHFDEDERWTNNFREYNLHRVAAHEQGHSLGLSHSTDIGALMYPSYTFSGDVQLAQDDIDGIQAIYGRSQNPVQPIGPQTPKACDSKLTFDAITTIRGEVMFFKDRFYMRTNPFYPEVELNFISVFWPQLPNGLEAAYEFADRDEVRFFKGNKYWAVQGQNVLHGYPKDIYSSFGFPRTVKHIDAALSEENTGKTYFFVANKYWRYDEYKRSMDPGYPKMIAHDFPGIGHKVDAVFMKDGFFYFFHGTRQYKFDPKTKRILTLQKANSWFNCRKN

SEQ ID NO: 2612 - protein, 450 aa, Artificial Sequence
  MMP-1 variant L201T
FPATLETQEQDVDLVQKYLEKYYNLKNDGRQVEKRRNSGPVVEKLKQMQEFFGLKVTGKPDAETLKVMKQPRCGVPDVAQFVLTEGNPRWEQTHLTYRIENYTPDLPRADVDHAIEKAFQLWSNVTPLTFTKVSEGQADIMISFVRGDHRDNSPFDGPGGNLAHAFQPGPGIGGDAHFDEDERWTNNFREYNLHRVAAHETGHSLGLSHSTDIGALMYPSYTFSGDVQLAQDDIDGIQAIYGRSQNPVQPIGPQTPKACDSKLTFDAITTIRGEVMFFKDRFYMRTNPFYPEVELNFISVFWPQLPNGLEAAYEFADRDEVRFFKGNKYWAVQGQNVLHGYPKDIYSSFGFPRTVKHIDAALSEENTGKTYFFVANKYWRYDEYKRSMDPGYPKMIAHDFPGIGHKVDAVFMKDGFFYFFHGTRQYKFDPKTKRILTLQKANSWFNCRKN

SEQ ID NO: 2613 - protein, 450 aa, Artificial Sequence
  MMP-1 variant L201Y
FPATLETQEQDVDLVQKYLEKYYNLKNDGRQVEKRRNSGPVVEKLKQMQEFFGLKVTGKPDAETLKVMKQPRCGVPDVAQFVLTEGNPRWEQTHLTYRIENYTPDLPRADVDHAIEKAFQLWSNVTPLTFTKVSEGQADIMISFVRGDHRDNSPFDGPGGNLAHAFQPGPGIGGDAHFDEDERWTNNFREYNLHRVAAHEYGHSLGLSHSTDIGALMYPSYTFSGDVQLAQDDIDGIQAIYGRSQNPVQPIGPQTPKACDSKLTFDAITTIRGEVMFFKDRFYMRTNPFYPEVELNFISVFWPQLPNGLEAAYEFADRDEVRFFKGNKYWAVQGQNVLHGYPKDIYSSFGFPRTVKHIDAALSEENTGKTYFFVANKYWRYDEYKRSMDPGYPKMIAHDFPGIGHKVDAVFMKDGFFYFFHGTRQYKFDPKTKRILTLQKANSWFNCRKN

SEQ ID NO: 2614 - protein, 450 aa, Artificial Sequence
  MMP-1 variant L201S
FPATLETQEQDVDLVQKYLEKYYNLKNDGRQVEKRRNSGPVVEKLKQMQEFFGLKVTGKPDAETLKVMKQPRCGVPDVAQFVLTEGNPRWEQTHLTYRIENYTPDLPRADVDHAIEKAFQLWSNVTPLTFTKVSEGQADIMISFVRGDHRDNSPFDGPGGNLAHAFQPGPGIGGDAHFDEDERWTNNFREYNLHRVAAHESGHSLGLSHSTDIGALMYPSYTFSGDVQLAQDDIDGIQAIYGRSQNPVQPIGPQTPKACDSKLTFDAITTIRGEVMFFKDRFYMRTNPFYPEVELNFISVFWPQLPNGLEAAYEFADRDEVRFFKGNKYWAVQGQNVLHGYPKDIYSSFGFPRTVKHIDAALSEENTGKTYFFVANKYWRYDEYKRSMDPGYPKMIAHDFPGIGHKVDAVFMKDGFFYFFHGTRQYKFDPKTKRILTLQKANSWFNCRKN

SEQ ID NO: 2615 - protein, 450 aa, Artificial Sequence
  MMP-1 variant L201G
FPATLETQEQDVDLVQKYLEKYYNLKNDGRQVEKRRNSGPVVEKLKQMQEFFGLKVTGKPDAETLKVMKQPRCGVPDVAQFVLTEGNPRWEQTHLTYRIENYTPDLPRADVDHAIEKAFQLWSNVTPLTFTKVSEGQADIMISFVRGDHRDNSPFDGPGGNLAHAFQPGPGIGGDAHFDEDERWTNNFREYNLHRVAAHEGGHSLGLSHSTDIGALMYPSYTFSGDVQLAQDDIDGIQAIYGRSQNPVQPIGPQTPKACDSKLTFDAITTIRGEVMFFKDRFYMRTNPFYPEVELNFISVFWPQLPNGLEAAYEFADRDEVRFFKGNKYWAVQGQNVLHGYPKDIYSSFGFPRTVKHIDAALSEENTGKTYFFVANKYWRYDEYKRSMDPGYPKMIAHDFPGIGHKVDAVFMKDGFFYFFHGTRQYKFDPKTKRILTLQKANSWFNCRKN

SEQ ID NO: 2616 - protein, 450 aa, Artificial Sequence
  MMP-1 variant L201F
FPATLETQEQDVDLVQKYLEKYYNLKNDGRQVEKRRNSGPVVEKLKQMQEFFGLKVTGKPDAETLKVMKQPRCGVPDVAQFVLTEGNPRWEQTHLTYRIENYTPDLPRADVDHAIEKAFQLWSNVTPLTFTKVSEGQADIMISFVRGDHRDNSPFDGPGGNLAHAFQPGPGIGGDAHFDEDERWTNNFREYNLHRVAAHEFGHSLGLSHSTDIGALMYPSYTFSGDVQLAQDDIDGIQAIYGRSQNPVQPIGPQTPKACDSKLTFDAITTIRGEVMFFKDRFYMRTNPFYPEVELNFISVFWPQLPNGLEAAYEFADRDEVRFFKGNKYWAVQGQNVLHGYPKDIYSSFGFPRTVKHIDAALSEENTGKTYFFVANKYWRYDEYKRSMDPGYPKMIAHDFPGIGHKVDAVFMKDGFFYFFHGTRQYKFDPKTKRILTLQKANSWFNCRKN

SEQ ID NO: 2617 - protein, 450 aa, Artificial Sequence
  MMP-1 variant L201M
FPATLETQEQDVDLVQKYLEKYYNLKNDGRQVEKRRNSGPVVEKLKQMQEFFGLKVTGKPDAETLKVMKQPRCGVPDVAQFVLTEGNPRWEQTHLTYRIENYTPDLPRADVDHAIEKAFQLWSNVTPLTFTKVSEGQADIMISFVRGDHRDNSPFDGPGGNLAHAFQPGPGIGGDAHFDEDERWTNNFREYNLHRVAAHEMGHSLGLSHSTDIGALMYPSYTFSGDVQLAQDDIDGIQAIYGRSQNPVQPIGPQTPKACDSKLTFDAITTIRGEVMFFKDRFYMRTNPFYPEVELNFISVFWPQLPNGLEAAYEFADRDEVRFFKGNKYWAVQGQNVLHGYPKDIYSSFGFPRTVKHIDAALSEENTGKTYFFVANKYWRYDEYKRSMDPGYPKMIAHDFPGIGHKVDAVFMKDGFFYFFHGTRQYKFDPKTKRILTLQKANSWFNCRKN

SEQ ID NO: 2618 - protein, 450 aa, Artificial Sequence
  MMP-1 variant L201W
FPATLETQEQDVDLVQKYLEKYYNLKNDGRQVEKRRNSGPVVEKLKQMQEFFGLKVTGKPDAETLKVMKQPRCGVPDVAQFVLTEGNPRWEQTHLTYRIENYTPDLPRADVDHAIEKAFQLWSNVTPLTFTKVSEGQADIMISFVRGDHRDNSPFDGPGGNLAHAFQPGPGIGGDAHFDEDERWTNNFREYNLHRVAAHEWGHSLGLSHSTDIGALMYPSYTFSGDVQLAQDDIDGIQAIYGRSQNPVQPIGPQTPKACDSKLTFDAITTIRGEVMFFKDRFYMRTNPFYPEVELNFISVFWPQLPNGLEAAYEFADRDEVRFFKGNKYWAVQGQNVLHGYPKDIYSSFGFPRTVKHIDAALSEENTGKTYFFVANKYWRYDEYKRSMDPGYPKMIAHDFPGIGHKVDAVFMKDGFFYFFHGTRQYKFDPKTKRILTLQKANSWFNCRKN

SEQ ID NO: 2619 - protein, 450 aa, Artificial Sequence
  MMP-1 variant L201I
FPATLETQEQDVDLVQKYLEKYYNLKNDGRQVEKRRNSGPVVEKLKQMQEFFGLKVTGKPDAETLKVMKQPRCGVPDVAQFVLTEGNPRWEQTHLTYRIENYTPDLPRADVDHAIEKAFQLWSNVTPLTFTKVSEGQADIMISFVRGDHRDNSPFDGPGGNLAHAFQPGPGIGGDAHFDEDERWTNNFREYNLHRVAAHEIGHSLGLSHSTDIGALMYPSYTFSGDVQLAQDDIDGIQAIYGRSQNPVQPIGPQTPKACDSKLTFDAITTIRGEVMFFKDRFYMRTNPFYPEVELNFISVFWPQLPNGLEAAYEFADRDEVRFFKGNKYWAVQGQNVLHGYPKDIYSSFGFPRTVKHIDAALSEENTGKTYFFVANKYWRYDEYKRSMDPGYPKMIAHDFPGIGHKVDAVFMKDGFFYFFHGTRQYKFDPKTKRILTLQKANSWFNCRKN

SEQ ID NO: 2620 - protein, 450 aa, Artificial Sequence
  MMP-1 variant L201V
FPATLETQEQDVDLVQKYLEKYYNLKNDGRQVEKRRNSGPVVEKLKQMQEFFGLKVTGKPDAETLKVMKQPRCGVPDVAQFVLTEGNPRWEQTHLTYRIENYTPDLPRADVDHAIEKAFQLWSNVTPLTFTKVSEGQADIMISFVRGDHRDNSPFDGPGGNLAHAFQPGPGIGGDAHFDEDERWTNNFREYNLHRVAAHEVGHSLGLSHSTDIGALMYPSYTFSGDVQLAQDDIDGIQAIYGRSQNPVQPIGPQTPKACDSKLTFDAITTIRGEVMFFKDRFYMRTNPFYPEVELNFISVFWPQLPNGLEAAYEFADRDEVRFFKGNKYWAVQGQNVLHGYPKDIYSSFGFPRTVKHIDAALSEENTGKTYFFVANKYWRYDEYKRSMDPGYPKMIAHDFPGIGHKVDAVFMKDGFFYFFHGTRQYKFDPKTKRILTLQKANSWFNCRKN

SEQ ID NO: 2621 - protein, 450 aa, Artificial Sequence
  MMP-1 variant L201A
FPATLETQEQDVDLVQKYLEKYYNLKNDGRQVEKRRNSGPVVEKLKQMQEFFGLKVTGKPDAETLKVMKQPRCGVPDVAQFVLTEGNPRWEQTHLTYRIENYTPDLPRADVDHAIEKAFQLWSNVTPLTFTKVSEGQADIMISFVRGDHRDNSPFDGPGGNLAHAFQPGPGIGGDAHFDEDERWTNNFREYNLHRVAAHEAGHSLGLSHSTDIGALMYPSYTFSGDVQLAQDDIDGIQAIYGRSQNPVQPIGPQTPKACDSKLTFDAITTIRGEVMFFKDRFYMRTNPFYPEVELNFISVFWPQLPNGLEAAYEFADRDEVRFFKGNKYWAVQGQNVLHGYPKDIYSSFGFPRTVKHIDAALSEENTGKTYFFVANKYWRYDEYKRSMDPGYPKMIAHDFPGIGHKVDAVFMKDGFFYFFHGTRQYKFDPKTKRILTLQKANSWFNCRKN

SEQ ID NO: 2622 - protein, 450 aa, Artificial Sequence
  MMP-1 variant L201P
FPATLETQEQDVDLVQKYLEKYYNLKNDGRQVEKRRNSGPVVEKLKQMQEFFGLKVTGKPDAETLKVMKQPRCGVPDVAQFVLTEGNPRWEQTHLTYRIENYTPDLPRADVDHAIEKAFQLWSNVTPLTFTKVSEGQADIMISFVRGDHRDNSPFDGPGGNLAHAFQPGPGIGGDAHFDEDERWTNNFREYNLHRVAAHEPGHSLGLSHSTDIGALMYPSYTFSGDVQLAQDDIDGIQAIYGRSQNPVQPIGPQTPKACDSKLTFDAITTIRGEVMFFKDRFYMRTNPFYPEVELNFISVFWPQLPNGLEAAYEFADRDEVRFFKGNKYWAVQGQNVLHGYPKDIYSSFGFPRTVKHIDAALSEENTGKTYFFVANKYWRYDEYKRSMDPGYPKMIAHDFPGIGHKVDAVFMKDGFFYFFHGTRQYKFDPKTKRILTLQKANSWFNCRKN

SEQ ID NO: 2623 - protein, 450 aa, Artificial Sequence
  MMP-1 variant G202D
FPATLETQEQDVDLVQKYLEKYYNLKNDGRQVEKRRNSGPVVEKLKQMQEFFGLKVTGKPDAETLKVMKQPRCGVPDVAQFVLTEGNPRWEQTHLTYRIENYTPDLPRADVDHAIEKAFQLWSNVTPLTFTKVSEGQADIMISFVRGDHRDNSPFDGPGGNLAHAFQPGPGIGGDAHFDEDERWTNNFREYNLHRVAAHELDHSLGLSHSTDIGALMYPSYTFSGDVQLAQDDIDGIQAIYGRSQNPVQPIGPQTPKACDSKLTFDAITTIRGEVMFFKDRFYMRTNPFYPEVELNFISVFWPQLPNGLEAAYEFADRDEVRFFKGNKYWAVQGQNVLHGYPKDIYSSFGFPRTVKHIDAALSEENTGKTYFFVANKYWRYDEYKRSMDPGYPKMIAHDFPGIGHKVDAVFMKDGFFYFFHGTRQYKFDPKTKRILTLQKANSWFNCRKN

SEQ ID NO: 2624 - protein, 450 aa, Artificial Sequence
  MMP-1 variant G202E
FPATLETQEQDVDLVQKYLEKYYNLKNDGRQVEKRRNSGPVVEKLKQMQEFFGLKVTGKPDAETLKVMKQPRCGVPDVAQFVLTEGNPRWEQTHLTYRIENYTPDLPRADVDHAIEKAFQLWSNVTPLTFTKVSEGQADIMISFVRGDHRDNSPFDGPGGNLAHAFQPGPGIGGDAHFDEDERWTNNFREYNLHRVAAHELEHSLGLSHSTDIGALMYPSYTFSGDVQLAQDDIDGIQAIYGRSQNPVQPIGPQTPKACDSKLTFDAITTIRGEVMFFKDRFYMRTNPFYPEVELNFISVFWPQLPNGLEAAYEFADRDEVRFFKGNKYWAVQGQNVLHGYPKDIYSSFGFPRTVKHIDAALSEENTGKTYFFVANKYWRYDEYKRSMDPGYPKMIAHDFPGIGHKVDAVFMKDGFFYFFHGTRQYKFDPKTKRILTLQKANSWFNCRKN

SEQ ID NO: 2625 - protein, 450 aa, Artificial Sequence
  MMP-1 variant G202H
FPATLETQEQDVDLVQKYLEKYYNLKNDGRQVEKRRNSGPVVEKLKQMQEFFGLKVTGKPDAETLKVMKQPRCGVPDVAQFVLTEGNPRWEQTHLTYRIENYTPDLPRADVDHAIEKAFQLWSNVTPLTFTKVSEGQADIMISFVRGDHRDNSPFDGPGGNLAHAFQPGPGIGGDAHFDEDERWTNNFREYNLHRVAAHELHHSLGLSHSTDIGALMYPSYTFSGDVQLAQDDIDGIQAIYGRSQNPVQPIGPQTPKACDSKLTFDAITTIRGEVMFFKDRFYMRTNPFYPEVELNFISVFWPQLPNGLEAAYEFADRDEVRFFKGNKYWAVQGQNVLHGYPKDIYSSFGFPRTVKHIDAALSEENTGKTYFFVANKYWRYDEYKRSMDPGYPKMIAHDFPGIGHKVDAVFMKDGFFYFFHGTRQYKFDPKTKRILTLQKANSWFNCRKN

SEQ ID NO: 2626 - protein, 450 aa, Artificial Sequence
  MMP-1 variant G202K
FPATLETQEQDVDLVQKYLEKYYNLKNDGRQVEKRRNSGPVVEKLKQMQEFFGLKVTGKPDAETLKVMKQPRCGVPDVAQFVLTEGNPRWEQTHLTYRIENYTPDLPRADVDHAIEKAFQLWSNVTPLTFTKVSEGQADIMISFVRGDHRDNSPFDGPGGNLAHAFQPGPGIGGDAHFDEDERWTNNFREYNLHRVAAHELKHSLGLSHSTDIGALMYPSYTFSGDVQLAQDDIDGIQAIYGRSQNPVQPIGPQTPKACDSKLTFDAITTIRGEVMFFKDRFYMRTNPFYPEVELNFISVFWPQLPNGLEAAYEFADRDEVRFFKGNKYWAVQGQNVLHGYPKDIYSSFGFPRTVKHIDAALSEENTGKTYFFVANKYWRYDEYKRSMDPGYPKMIAHDFPGIGHKVDAVFMKDGFFYFFHGTRQYKFDPKTKRILTLQKANSWFNCRKN

SEQ ID NO: 2627 - protein, 450 aa, Artificial Sequence
  MMP-1 variant G202R
FPATLETQEQDVDLVQKYLEKYYNLKNDGRQVEKRRNSGPVVEKLKQMQEFFGLKVTGKPDAETLKVMKQPRCGVPDVAQFVLTEGNPRWEQTHLTYRIENYTPDLPRADVDHAIEKAFQLWSNVTPLTFTKVSEGQADIMISFVRGDHRDNSPFDGPGGNLAHAFQPGPGIGGDAHFDEDERWTNNFREYNLHRVAAHELRHSLGLSHSTDIGALMYPSYTFSGDVQLAQDDIDGIQAIYGRSQNPVQPIGPQTPKACDSKLTFDAITTIRGEVMFFKDRFYMRTNPFYPEVELNFISVFWPQLPNGLEAAYEFADRDEVRFFKGNKYWAVQGQNVLHGYPKDIYSSFGFPRTVKHIDAALSEENTGKTYFFVANKYWRYDEYKRSMDPGYPKMIAHDFPGIGHKVDAVFMKDGFFYFFHGTRQYKFDPKTKRILTLQKANSWFNCRKN

SEQ ID NO: 2628 - protein, 450 aa, Artificial Sequence
  MMP-1 variant G202C
FPATLETQEQDVDLVQKYLEKYYNLKNDGRQVEKRRNSGPVVEKLKQMQEFFGLKVTGKPDAETLKVMKQPRCGVPDVAQFVLTEGNPRWEQTHLTYRIENYTPDLPRADVDHAIEKAFQLWSNVTPLTFTKVSEGQADIMISFVRGDHRDNSPFDGPGGNLAHAFQPGPGIGGDAHFDEDERWTNNFREYNLHRVAAHELCHSLGLSHSTDIGALMYPSYTFSGDVQLAQDDIDGIQAIYGRSQNPVQPIGPQTPKACDSKLTFDAITTIRGEVMFFKDRFYMRTNPFYPEVELNFISVFWPQLPNGLEAAYEFADRDEVRFFKGNKYWAVQGQNVLHGYPKDIYSSFGFPRTVKHIDAALSEENTGKTYFFVANKYWRYDEYKRSMDPGYPKMIAHDFPGIGHKVDAVFMKDGFFYFFHGTRQYKFDPKTKRILTLQKANSWFNCRKN

SEQ ID NO: 2629 - protein, 450 aa, Artificial Sequence
  MMP-1 variant G202N
FPATLETQEQDVDLVQKYLEKYYNLKNDGRQVEKRRNSGPVVEKLKQMQEFFGLKVTGKPDAETLKVMKQPRCGVPDVAQFVLTEGNPRWEQTHLTYRIENYTPDLPRADVDHAIEKAFQLWSNVTPLTFTKVSEGQADIMISFVRGDHRDNSPFDGPGGNLAHAFQPGPGIGGDAHFDEDERWTNNFREYNLHRVAAHELNHSLGLSHSTDIGALMYPSYTFSGDVQLAQDDIDGIQAIYGRSQNPVQPIGPQTPKACDSKLTFDAITTIRGEVMFFKDRFYMRTNPFYPEVELNFISVFWPQLPNGLEAAYEFADRDEVRFFKGNKYWAVQGQNVLHGYPKDIYSSFGFPRTVKHIDAALSEENTGKTYFFVANKYWRYDEYKRSMDPGYPKMIAHDFPGIGHKVDAVFMKDGFFYFFHGTRQYKFDPKTKRILTLQKANSWFNCRKN

SEQ ID NO: 2630 - protein, 450 aa, Artificial Sequence
  MMP-1 variant G202Q
FPATLETQEQDVDLVQKYLEKYYNLKNDGRQVEKRRNSGPVVEKLKQMQEFFGLKVTGKPDAETLKVMKQPRCGVPDVAQFVLTEGNPRWEQTHLTYRIENYTPDLPRADVDHAIEKAFQLWSNVTPLTFTKVSEGQADIMISFVRGDHRDNSPFDGPGGNLAHAFQPGPGIGGDAHFDEDERWTNNFREYNLHRVAAHELQHSLGLSHSTDIGALMYPSYTFSGDVQLAQDDIDGIQAIYGRSQNPVQPIGPQTPKACDSKLTFDAITTIRGEVMFFKDRFYMRTNPFYPEVELNFISVFWPQLPNGLEAAYEFADRDEVRFFKGNKYWAVQGQNVLHGYPKDIYSSFGFPRTVKHIDAALSEENTGKTYFFVANKYWRYDEYKRSMDPGYPKMIAHDFPGIGHKVDAVFMKDGFFYFFHGTRQYKFDPKTKRILTLQKANSWFNCRKN

SEQ ID NO: 2631 - protein, 450 aa, Artificial Sequence
  MMP-1 variant G202T
FPATLETQEQDVDLVQKYLEKYYNLKNDGRQVEKRRNSGPVVEKLKQMQEFFGLKVTGKPDAETLKVMKQPRCGVPDVAQFVLTEGNPRWEQTHLTYRIENYTPDLPRADVDHAIEKAFQLWSNVTPLTFTKVSEGQADIMISFVRGDHRDNSPFDGPGGNLAHAFQPGPGIGGDAHFDEDERWTNNFREYNLHRVAAHELTHSLGLSHSTDIGALMYPSYTFSGDVQLAQDDIDGIQAIYGRSQNPVQPIGPQTPKACDSKLTFDAITTIRGEVMFFKDRFYMRTNPFYPEVELNFISVFWPQLPNGLEAAYEFADRDEVRFFKGNKYWAVQGQNVLHGYPKDIYSSFGFPRTVKHIDAALSEENTGKTYFFVANKYWRYDEYKRSMDPGYPKMIAHDFPGIGHKVDAVFMKDGFFYFFHGTRQYKFDPKTKRILTLQKANSWFNCRKN

SEQ ID NO: 2632 - protein, 450 aa, Artificial Sequence
  MMP-1 variant G202Y
FPATLETQEQDVDLVQKYLEKYYNLKNDGRQVEKRRNSGPVVEKLKQMQEFFGLKVTGKPDAETLKVMKQPRCGVPDVAQFVLTEGNPRWEQTHLTYRIENYTPDLPRADVDHAIEKAFQLWSNVTPLTFTKVSEGQADIMISFVRGDHRDNSPFDGPGGNLAHAFQPGPGIGGDAHFDEDERWTNNFREYNLHRVAAHELYHSLGLSHSTDIGALMYPSYTFSGDVQLAQDDIDGIQAIYGRSQNPVQPIGPQTPKACDSKLTFDAITTIRGEVMFFKDRFYMRTNPFYPEVELNFISVFWPQLPNGLEAAYEFADRDEVRFFKGNKYWAVQGQNVLHGYPKDIYSSFGFPRTVKHIDAALSEENTGKTYFFVANKYWRYDEYKRSMDPGYPKMIAHDFPGIGHKVDAVFMKDGFFYFFHGTRQYKFDPKTKRILTLQKANSWFNCRKN

SEQ ID NO: 2633 - protein, 450 aa, Artificial Sequence
  MMP-1 variant G202S
FPATLETQEQDVDLVQKYLEKYYNLKNDGRQVEKRRNSGPVVEKLKQMQEFFGLKVTGKPDAETLKVMKQPRCGVPDVAQFVLTEGNPRWEQTHLTYRIENYTPDLPRADVDHAIEKAFQLWSNVTPLTFTKVSEGQADIMISFVRGDHRDNSPFDGPGGNLAHAFQPGPGIGGDAHFDEDERWTNNFREYNLHRVAAHELSHSLGLSHSTDIGALMYPSYTFSGDVQLAQDDIDGIQAIYGRSQNPVQPIGPQTPKACDSKLTFDAITTIRGEVMFFKDRFYMRTNPFYPEVELNFISVFWPQLPNGLEAAYEFADRDEVRFFKGNKYWAVQGQNVLHGYPKDIYSSFGFPRTVKHIDAALSEENTGKTYFFVANKYWRYDEYKRSMDPGYPKMIAHDFPGIGHKVDAVFMKDGFFYFFHGTRQYKFDPKTKRILTLQKANSWFNCRKN

SEQ ID NO: 2634 - protein, 450 aa, Artificial Sequence
  MMP-1 variant G202F
FPATLETQEQDVDLVQKYLEKYYNLKNDGRQVEKRRNSGPVVEKLKQMQEFFGLKVTGKPDAETLKVMKQPRCGVPDVAQFVLTEGNPRWEQTHLTYRIENYTPDLPRADVDHAIEKAFQLWSNVTPLTFTKVSEGQADIMISFVRGDHRDNSPFDGPGGNLAHAFQPGPGIGGDAHFDEDERWTNNFREYNLHRVAAHELFHSLGLSHSTDIGALMYPSYTFSGDVQLAQDDIDGIQAIYGRSQNPVQPIGPQTPKACDSKLTFDAITTIRGEVMFFKDRFYMRTNPFYPEVELNFISVFWPQLPNGLEAAYEFADRDEVRFFKGNKYWAVQGQNVLHGYPKDIYSSFGFPRTVKHIDAALSEENTGKTYFFVANKYWRYDEYKRSMDPGYPKMIAHDFPGIGHKVDAVFMKDGFFYFFHGTRQYKFDPKTKRILTLQKANSWFNCRKN

SEQ ID NO: 2635 - protein, 450 aa, Artificial Sequence
  MMP-1 variant G202M
FPATLETQEQDVDLVQKYLEKYYNLKNDGRQVEKRRNSGPVVEKLKQMQEFFGLKVTGKPDAETLKVMKQPRCGVPDVAQFVLTEGNPRWEQTHLTYRIENYTPDLPRADVDHAIEKAFQLWSNVTPLTFTKVSEGQADIMISFVRGDHRDNSPFDGPGGNLAHAFQPGPGIGGDAHFDEDERWTNNFREYNLHRVAAHELMHSLGLSHSTDIGALMYPSYTFSGDVQLAQDDIDGIQAIYGRSQNPVQPIGPQTPKACDSKLTFDAITTIRGEVMFFKDRFYMRTNPFYPEVELNFISVFWPQLPNGLEAAYEFADRDEVRFFKGNKYWAVQGQNVLHGYPKDIYSSFGFPRTVKHIDAALSEENTGKTYFFVANKYWRYDEYKRSMDPGYPKMIAHDFPGIGHKVDAVFMKDGFFYFFHGTRQYKFDPKTKRILTLQKANSWFNCRKN

SEQ ID NO: 2636 - protein, 450 aa, Artificial Sequence
  MMP-1 variant G202W
FPATLETQEQDVDLVQKYLEKYYNLKNDGRQVEKRRNSGPVVEKLKQMQEFFGLKVTGKPDAETLKVMKQPRCGVPDVAQFVLTEGNPRWEQTHLTYRIENYTPDLPRADVDHAIEKAFQLWSNVTPLTFTKVSEGQADIMISFVRGDHRDNSPFDGPGGNLAHAFQPGPGIGGDAHFDEDERWTNNFREYNLHRVAAHELWHSLGLSHSTDIGALMYPSYTFSGDVQLAQDDIDGIQAIYGRSQNPVQPIGPQTPKACDSKLTFDAITTIRGEVMFFKDRFYMRTNPFYPEVELNFISVFWPQLPNGLEAAYEFADRDEVRFFKGNKYWAVQGQNVLHGYPKDIYSSFGFPRTVKHIDAALSEENTGKTYFFVANKYWRYDEYKRSMDPGYPKMIAHDFPGIGHKVDAVFMKDGFFYFFHGTRQYKFDPKTKRILTLQKANSWFNCRKN

SEQ ID NO: 2637 - protein, 450 aa, Artificial Sequence
  MMP-1 variant G202I
FPATLETQEQDVDLVQKYLEKYYNLKNDGRQVEKRRNSGPVVEKLKQMQEFFGLKVTGKPDAETLKVMKQPRCGVPDVAQFVLTEGNPRWEQTHLTYRIENYTPDLPRADVDHAIEKAFQLWSNVTPLTFTKVSEGQADIMISFVRGDHRDNSPFDGPGGNLAHAFQPGPGIGGDAHFDEDERWTNNFREYNLHRVAAHELIHSLGLSHSTDIGALMYPSYTFSGDVQLAQDDIDGIQAIYGRSQNPVQPIGPQTPKACDSKLTFDAITTIRGEVMFFKDRFYMRTNPFYPEVELNFISVFWPQLPNGLEAAYEFADRDEVRFFKGNKYWAVQGQNVLHGYPKDIYSSFGFPRTVKHIDAALSEENTGKTYFFVANKYWRYDEYKRSMDPGYPKMIAHDFPGIGHKVDAVFMKDGFFYFFHGTRQYKFDPKTKRILTLQKANSWFNCRKN

SEQ ID NO: 2638 - protein, 450 aa, Artificial Sequence
  MMP-1 variant G202V
FPATLETQEQDVDLVQKYLEKYYNLKNDGRQVEKRRNSGPVVEKLKQMQEFFGLKVTGKPDAETLKVMKQPRCGVPDVAQFVLTEGNPRWEQTHLTYRIENYTPDLPRADVDHAIEKAFQLWSNVTPLTFTKVSEGQADIMISFVRGDHRDNSPFDGPGGNLAHAFQPGPGIGGDAHFDEDERWTNNFREYNLHRVAAHELVHSLGLSHSTDIGALMYPSYTFSGDVQLAQDDIDGIQAIYGRSQNPVQPIGPQTPKACDSKLTFDAITTIRGEVMFFKDRFYMRTNPFYPEVELNFISVFWPQLPNGLEAAYEFADRDEVRFFKGNKYWAVQGQNVLHGYPKDIYSSFGFPRTVKHIDAALSEENTGKTYFFVANKYWRYDEYKRSMDPGYPKMIAHDFPGIGHKVDAVFMKDGFFYFFHGTRQYKFDPKTKRILTLQKANSWFNCRKN

SEQ ID NO: 2639 - protein, 450 aa, Artificial Sequence
  MMP-1 variant G202L
FPATLETQEQDVDLVQKYLEKYYNLKNDGRQVEKRRNSGPVVEKLKQMQEFFGLKVTGKPDAETLKVMKQPRCGVPDVAQFVLTEGNPRWEQTHLTYRIENYTPDLPRADVDHAIEKAFQLWSNVTPLTFTKVSEGQADIMISFVRGDHRDNSPFDGPGGNLAHAFQPGPGIGGDAHFDEDERWTNNFREYNLHRVAAHELLHSLGLSHSTDIGALMYPSYTFSGDVQLAQDDIDGIQAIYGRSQNPVQPIGPQTPKACDSKLTFDAITTIRGEVMFFKDRFYMRTNPFYPEVELNFISVFWPQLPNGLEAAYEFADRDEVRFFKGNKYWAVQGQNVLHGYPKDIYSSFGFPRTVKHIDAALSEENTGKTYFFVANKYWRYDEYKRSMDPGYPKMIAHDFPGIGHKVDAVFMKDGFFYFFHGTRQYKFDPKTKRILTLQKANSWFNCRKN

SEQ ID NO: 2640 - protein, 450 aa, Artificial Sequence
  MMP-1 variant G202A
FPATLETQEQDVDLVQKYLEKYYNLKNDGRQVEKRRNSGPVVEKLKQMQEFFGLKVTGKPDAETLKVMKQPRCGVPDVAQFVLTEGNPRWEQTHLTYRIENYTPDLPRADVDHAIEKAFQLWSNVTPLTFTKVSEGQADIMISFVRGDHRDNSPFDGPGGNLAHAFQPGPGIGGDAHFDEDERWTNNFREYNLHRVAAHELAHSLGLSHSTDIGALMYPSYTFSGDVQLAQDDIDGIQAIYGRSQNPVQPIGPQTPKACDSKLTFDAITTIRGEVMFFKDRFYMRTNPFYPEVELNFISVFWPQLPNGLEAAYEFADRDEVRFFKGNKYWAVQGQNVLHGYPKDIYSSFGFPRTVKHIDAALSEENTGKTYFFVANKYWRYDEYKRSMDPGYPKMIAHDFPGIGHKVDAVFMKDGFFYFFHGTRQYKFDPKTKRILTLQKANSWFNCRKN

SEQ ID NO: 2641 - protein, 450 aa, Artificial Sequence
  MMP-1 variant G202P
FPATLETQEQDVDLVQKYLEKYYNLKNDGRQVEKRRNSGPVVEKLKQMQEFFGLKVTGKPDAETLKVMKQPRCGVPDVAQFVLTEGNPRWEQTHLTYRIENYTPDLPRADVDHAIEKAFQLWSNVTPLTFTKVSEGQADIMISFVRGDHRDNSPFDGPGGNLAHAFQPGPGIGGDAHFDEDERWTNNFREYNLHRVAAHELPHSLGLSHSTDIGALMYPSYTFSGDVQLAQDDIDGIQAIYGRSQNPVQPIGPQTPKACDSKLTFDAITTIRGEVMFFKDRFYMRTNPFYPEVELNFISVFWPQLPNGLEAAYEFADRDEVRFFKGNKYWAVQGQNVLHGYPKDIYSSFGFPRTVKHIDAALSEENTGKTYFFVANKYWRYDEYKRSMDPGYPKMIAHDFPGIGHKVDAVFMKDGFFYFFHGTRQYKFDPKTKRILTLQKANSWFNCRKN

SEQ ID NO: 2642 - protein, 450 aa, Artificial Sequence
  MMP-1 variant H203D
FPATLETQEQDVDLVQKYLEKYYNLKNDGRQVEKRRNSGPVVEKLKQMQEFFGLKVTGKPDAETLKVMKQPRCGVPDVAQFVLTEGNPRWEQTHLTYRIENYTPDLPRADVDHAIEKAFQLWSNVTPLTFTKVSEGQADIMISFVRGDHRDNSPFDGPGGNLAHAFQPGPGIGGDAHFDEDERWTNNFREYNLHRVAAHELGDSLGLSHSTDIGALMYPSYTFSGDVQLAQDDIDGIQAIYGRSQNPVQPIGPQTPKACDSKLTFDAITTIRGEVMFFKDRFYMRTNPFYPEVELNFISVFWPQLPNGLEAAYEFADRDEVRFFKGNKYWAVQGQNVLHGYPKDIYSSFGFPRTVKHIDAALSEENTGKTYFFVANKYWRYDEYKRSMDPGYPKMIAHDFPGIGHKVDAVFMKDGFFYFFHGTRQYKFDPKTKRILTLQKANSWFNCRKN

SEQ ID NO: 2643 - protein, 450 aa, Artificial Sequence
  MMP-1 variant H203E
FPATLETQEQDVDLVQKYLEKYYNLKNDGRQVEKRRNSGPVVEKLKQMQEFFGLKVTGKPDAETLKVMKQPRCGVPDVAQFVLTEGNPRWEQTHLTYRIENYTPDLPRADVDHAIEKAFQLWSNVTPLTFTKVSEGQADIMISFVRGDHRDNSPFDGPGGNLAHAFQPGPGIGGDAHFDEDERWTNNFREYNLHRVAAHELGESLGLSHSTDIGALMYPSYTFSGDVQLAQDDIDGIQAIYGRSQNPVQPIGPQTPKACDSKLTFDAITTIRGEVMFFKDRFYMRTNPFYPEVELNFISVFWPQLPNGLEAAYEFADRDEVRFFKGNKYWAVQGQNVLHGYPKDIYSSFGFPRTVKHIDAALSEENTGKTYFFVANKYWRYDEYKRSMDPGYPKMIAHDFPGIGHKVDAVFMKDGFFYFFHGTRQYKFDPKTKRILTLQKANSWFNCRKN

SEQ ID NO: 2644 - protein, 450 aa, Artificial Sequence
  MMP-1 variant H203K
FPATLETQEQDVDLVQKYLEKYYNLKNDGRQVEKRRNSGPVVEKLKQMQEFFGLKVTGKPDAETLKVMKQPRCGVPDVAQFVLTEGNPRWEQTHLTYRIENYTPDLPRADVDHAIEKAFQLWSNVTPLTFTKVSEGQADIMISFVRGDHRDNSPFDGPGGNLAHAFQPGPGIGGDAHFDEDERWTNNFREYNLHRVAAHELGKSLGLSHSTDIGALMYPSYTFSGDVQLAQDDIDGIQAIYGRSQNPVQPIGPQTPKACDSKLTFDAITTIRGEVMFFKDRFYMRTNPFYPEVELNFISVFWPQLPNGLEAAYEFADRDEVRFFKGNKYWAVQGQNVLHGYPKDIYSSFGFPRTVKHIDAALSEENTGKTYFFVANKYWRYDEYKRSMDPGYPKMIAHDFPGIGHKVDAVFMKDGFFYFFHGTRQYKFDPKTKRILTLQKANSWFNCRKN

SEQ ID NO: 2645 - protein, 450 aa, Artificial Sequence
  MMP-1 variant H203R
FPATLETQEQDVDLVQKYLEKYYNLKNDGRQVEKRRNSGPVVEKLKQMQEFFGLKVTGKPDAETLKVMKQPRCGVPDVAQFVLTEGNPRWEQTHLTYRIENYTPDLPRADVDHAIEKAFQLWSNVTPLTFTKVSEGQADIMISFVRGDHRDNSPFDGPGGNLAHAFQPGPGIGGDAHFDEDERWTNNFREYNLHRVAAHELGRSLGLSHSTDIGALMYPSYTFSGDVQLAQDDIDGIQAIYGRSQNPVQPIGPQTPKACDSKLTFDAITTIRGEVMFFKDRFYMRTNPFYPEVELNFISVFWPQLPNGLEAAYEFADRDEVRFFKGNKYWAVQGQNVLHGYPKDIYSSFGFPRTVKHIDAALSEENTGKTYFFVANKYWRYDEYKRSMDPGYPKMIAHDFPGIGHKVDAVFMKDGFFYFFHGTRQYKFDPKTKRILTLQKANSWFNCRKN

SEQ ID NO: 2646 - protein, 450 aa, Artificial Sequence
  MMP-1 variant H203C
FPATLETQEQDVDLVQKYLEKYYNLKNDGRQVEKRRNSGPVVEKLKQMQEFFGLKVTGKPDAETLKVMKQPRCGVPDVAQFVLTEGNPRWEQTHLTYRIENYTPDLPRADVDHAIEKAFQLWSNVTPLTFTKVSEGQADIMISFVRGDHRDNSPFDGPGGNLAHAFQPGPGIGGDAHFDEDERWTNNFREYNLHRVAAHELGCSLGLSHSTDIGALMYPSYTFSGDVQLAQDDIDGIQAIYGRSQNPVQPIGPQTPKACDSKLTFDAITTIRGEVMFFKDRFYMRTNPFYPEVELNFISVFWPQLPNGLEAAYEFADRDEVRFFKGNKYWAVQGQNVLHGYPKDIYSSFGFPRTVKHIDAALSEENTGKTYFFVANKYWRYDEYKRSMDPGYPKMIAHDFPGIGHKVDAVFMKDGFFYFFHGTRQYKFDPKTKRILTLQKANSWFNCRKN

SEQ ID NO: 2647 - protein, 450 aa, Artificial Sequence
  MMP-1 variant H203N
FPATLETQEQDVDLVQKYLEKYYNLKNDGRQVEKRRNSGPVVEKLKQMQEFFGLKVTGKPDAETLKVMKQPRCGVPDVAQFVLTEGNPRWEQTHLTYRIENYTPDLPRADVDHAIEKAFQLWSNVTPLTFTKVSEGQADIMISFVRGDHRDNSPFDGPGGNLAHAFQPGPGIGGDAHFDEDERWTNNFREYNLHRVAAHELGNSLGLSHSTDIGALMYPSYTFSGDVQLAQDDIDGIQAIYGRSQNPVQPIGPQTPKACDSKLTFDAITTIRGEVMFFKDRFYMRTNPFYPEVELNFISVFWPQLPNGLEAAYEFADRDEVRFFKGNKYWAVQGQNVLHGYPKDIYSSFGFPRTVKHIDAALSEENTGKTYFFVANKYWRYDEYKRSMDPGYPKMIAHDFPGIGHKVDAVFMKDGFFYFFHGTRQYKFDPKTKRILTLQKANSWFNCRKN

SEQ ID NO: 2648 - protein, 450 aa, Artificial Sequence
  MMP-1 variant H203Q
FPATLETQEQDVDLVQKYLEKYYNLKNDGRQVEKRRNSGPVVEKLKQMQEFFGLKVTGKPDAETLKVMKQPRCGVPDVAQFVLTEGNPRWEQTHLTYRIENYTPDLPRADVDHAIEKAFQLWSNVTPLTFTKVSEGQADIMISFVRGDHRDNSPFDGPGGNLAHAFQPGPGIGGDAHFDEDERWTNNFREYNLHRVAAHELGQSLGLSHSTDIGALMYPSYTFSGDVQLAQDDIDGIQAIYGRSQNPVQPIGPQTPKACDSKLTFDAITTIRGEVMFFKDRFYMRTNPFYPEVELNFISVFWPQLPNGLEAAYEFADRDEVRFFKGNKYWAVQGQNVLHGYPKDIYSSFGFPRTVKHIDAALSEENTGKTYFFVANKYWRYDEYKRSMDPGYPKMIAHDFPGIGHKVDAVFMKDGFFYFFHGTRQYKFDPKTKRILTLQKANSWFNCRKN

SEQ ID NO: 2649 - protein, 450 aa, Artificial Sequence
  MMP-1 variant H203T
FPATLETQEQDVDLVQKYLEKYYNLKNDGRQVEKRRNSGPVVEKLKQMQEFFGLKVTGKPDAETLKVMKQPRCGVPDVAQFVLTEGNPRWEQTHLTYRIENYTPDLPRADVDHAIEKAFQLWSNVTPLTFTKVSEGQADIMISFVRGDHRDNSPFDGPGGNLAHAFQPGPGIGGDAHFDEDERWTNNFREYNLHRVAAHELGTSLGLSHSTDIGALMYPSYTFSGDVQLAQDDIDGIQAIYGRSQNPVQPIGPQTPKACDSKLTFDAITTIRGEVMFFKDRFYMRTNPFYPEVELNFISVFWPQLPNGLEAAYEFADRDEVRFFKGNKYWAVQGQNVLHGYPKDIYSSFGFPRTVKHIDAALSEENTGKTYFFVANKYWRYDEYKRSMDPGYPKMIAHDFPGIGHKVDAVFMKDGFFYFFHGTRQYKFDPKTKRILTLQKANSWFNCRKN

SEQ ID NO: 2650 - protein, 450 aa, Artificial Sequence
  MMP-1 variant H203Y
FPATLETQEQDVDLVQKYLEKYYNLKNDGRQVEKRRNSGPVVEKLKQMQEFFGLKVTGKPDAETLKVMKQPRCGVPDVAQFVLTEGNPRWEQTHLTYRIENYTPDLPRADVDHAIEKAFQLWSNVTPLTFTKVSEGQADIMISFVRGDHRDNSPFDGPGGNLAHAFQPGPGIGGDAHFDEDERWTNNFREYNLHRVAAHELGYSLGLSHSTDIGALMYPSYTFSGDVQLAQDDIDGIQAIYGRSQNPVQPIGPQTPKACDSKLTFDAITTIRGEVMFFKDRFYMRTNPFYPEVELNFISVFWPQLPNGLEAAYEFADRDEVRFFKGNKYWAVQGQNVLHGYPKDIYSSFGFPRTVKHIDAALSEENTGKTYFFVANKYWRYDEYKRSMDPGYPKMIAHDFPGIGHKVDAVFMKDGFFYFFHGTRQYKFDPKTKRILTLQKANSWFNCRKN

SEQ ID NO: 2651 - protein, 450 aa, Artificial Sequence
  MMP-1 variant H203S
FPATLETQEQDVDLVQKYLEKYYNLKNDGRQVEKRRNSGPVVEKLKQMQEFFGLKVTGKPDAETLKVMKQPRCGVPDVAQFVLTEGNPRWEQTHLTYRIENYTPDLPRADVDHAIEKAFQLWSNVTPLTFTKVSEGQADIMISFVRGDHRDNSPFDGPGGNLAHAFQPGPGIGGDAHFDEDERWTNNFREYNLHRVAAHELGSSLGLSHSTDIGALMYPSYTFSGDVQLAQDDIDGIQAIYGRSQNPVQPIGPQTPKACDSKLTFDAITTIRGEVMFFKDRFYMRTNPFYPEVELNFISVFWPQLPNGLEAAYEFADRDEVRFFKGNKYWAVQGQNVLHGYPKDIYSSFGFPRTVKHIDAALSEENTGKTYFFVANKYWRYDEYKRSMDPGYPKMIAHDFPGIGHKVDAVFMKDGFFYFFHGTRQYKFDPKTKRILTLQKANSWFNCRKN

SEQ ID NO: 2652 - protein, 450 aa, Artificial Sequence
  MMP-1 variant H203G
FPATLETQEQDVDLVQKYLEKYYNLKNDGRQVEKRRNSGPVVEKLKQMQEFFGLKVTGKPDAETLKVMKQPRCGVPDVAQFVLTEGNPRWEQTHLTYRIENYTPDLPRADVDHAIEKAFQLWSNVTPLTFTKVSEGQADIMISFVRGDHRDNSPFDGPGGNLAHAFQPGPGIGGDAHFDEDERWTNNFREYNLHRVAAHELGGSLGLSHSTDIGALMYPSYTFSGDVQLAQDDIDGIQAIYGRSQNPVQPIGPQTPKACDSKLTFDAITTIRGEVMFFKDRFYMRTNPFYPEVELNFISVFWPQLPNGLEAAYEFADRDEVRFFKGNKYWAVQGQNVLHGYPKDIYSSFGFPRTVKHIDAALSEENTGKTYFFVANKYWRYDEYKRSMDPGYPKMIAHDFPGIGHKVDAVFMKDGFFYFFHGTRQYKFDPKTKRILTLQKANSWFNCRKN

SEQ ID NO: 2653 - protein, 450 aa, Artificial Sequence
  MMP-1 variant H203F
FPATLETQEQDVDLVQKYLEKYYNLKNDGRQVEKRRNSGPVVEKLKQMQEFFGLKVTGKPDAETLKVMKQPRCGVPDVAQFVLTEGNPRWEQTHLTYRIENYTPDLPRADVDHAIEKAFQLWSNVTPLTFTKVSEGQADIMISFVRGDHRDNSPFDGPGGNLAHAFQPGPGIGGDAHFDEDERWTNNFREYNLHRVAAHELGFSLGLSHSTDIGALMYPSYTFSGDVQLAQDDIDGIQAIYGRSQNPVQPIGPQTPKACDSKLTFDAITTIRGEVMFFKDRFYMRTNPFYPEVELNFISVFWPQLPNGLEAAYEFADRDEVRFFKGNKYWAVQGQNVLHGYPKDIYSSFGFPRTVKHIDAALSEENTGKTYFFVANKYWRYDEYKRSMDPGYPKMIAHDFPGIGHKVDAVFMKDGFFYFFHGTRQYKFDPKTKRILTLQKANSWFNCRKN

SEQ ID NO: 2654 - protein, 450 aa, Artificial Sequence
  MMP-1 variant H203M
FPATLETQEQDVDLVQKYLEKYYNLKNDGRQVEKRRNSGPVVEKLKQMQEFFGLKVTGKPDAETLKVMKQPRCGVPDVAQFVLTEGNPRWEQTHLTYRIENYTPDLPRADVDHAIEKAFQLWSNVTPLTFTKVSEGQADIMISFVRGDHRDNSPFDGPGGNLAHAFQPGPGIGGDAHFDEDERWTNNFREYNLHRVAAHELGMSLGLSHSTDIGALMYPSYTFSGDVQLAQDDIDGIQAIYGRSQNPVQPIGPQTPKACDSKLTFDAITTIRGEVMFFKDRFYMRTNPFYPEVELNFISVFWPQLPNGLEAAYEFADRDEVRFFKGNKYWAVQGQNVLHGYPKDIYSSFGFPRTVKHIDAALSEENTGKTYFFVANKYWRYDEYKRSMDPGYPKMIAHDFPGIGHKVDAVFMKDGFFYFFHGTRQYKFDPKTKRILTLQKANSWFNCRKN

SEQ ID NO: 2655 - protein, 450 aa, Artificial Sequence
  MMP-1 variant H203W
FPATLETQEQDVDLVQKYLEKYYNLKNDGRQVEKRRNSGPVVEKLKQMQEFFGLKVTGKPDAETLKVMKQPRCGVPDVAQFVLTEGNPRWEQTHLTYRIENYTPDLPRADVDHAIEKAFQLWSNVTPLTFTKVSEGQADIMISFVRGDHRDNSPFDGPGGNLAHAFQPGPGIGGDAHFDEDERWTNNFREYNLHRVAAHELGWSLGLSHSTDIGALMYPSYTFSGDVQLAQDDIDGIQAIYGRSQNPVQPIGPQTPKACDSKLTFDAITTIRGEVMFFKDRFYMRTNPFYPEVELNFISVFWPQLPNGLEAAYEFADRDEVRFFKGNKYWAVQGQNVLHGYPKDIYSSFGFPRTVKHIDAALSEENTGKTYFFVANKYWRYDEYKRSMDPGYPKMIAHDFPGIGHKVDAVFMKDGFFYFFHGTRQYKFDPKTKRILTLQKANSWFNCRKN

SEQ ID NO: 2656 - protein, 450 aa, Artificial Sequence
  MMP-1 variant H203I
FPATLETQEQDVDLVQKYLEKYYNLKNDGRQVEKRRNSGPVVEKLKQMQEFFGLKVTGKPDAETLKVMKQPRCGVPDVAQFVLTEGNPRWEQTHLTYRIENYTPDLPRADVDHAIEKAFQLWSNVTPLTFTKVSEGQADIMISFVRGDHRDNSPFDGPGGNLAHAFQPGPGIGGDAHFDEDERWTNNFREYNLHRVAAHELGISLGLSHSTDIGALMYPSYTFSGDVQLAQDDIDGIQAIYGRSQNPVQPIGPQTPKACDSKLTFDAITTIRGEVMFFKDRFYMRTNPFYPEVELNFISVFWPQLPNGLEAAYEFADRDEVRFFKGNKYWAVQGQNVLHGYPKDIYSSFGFPRTVKHIDAALSEENTGKTYFFVANKYWRYDEYKRSMDPGYPKMIAHDFPGIGHKVDAVFMKDGFFYFFHGTRQYKFDPKTKRILTLQKANSWFNCRKN

SEQ ID NO: 2657 - protein, 450 aa, Artificial Sequence
  MMP-1 variant H203V
FPATLETQEQDVDLVQKYLEKYYNLKNDGRQVEKRRNSGPVVEKLKQMQEFFGLKVTGKPDAETLKVMKQPRCGVPDVAQFVLTEGNPRWEQTHLTYRIENYTPDLPRADVDHAIEKAFQLWSNVTPLTFTKVSEGQADIMISFVRGDHRDNSPFDGPGGNLAHAFQPGPGIGGDAHFDEDERWTNNFREYNLHRVAAHELGVSLGLSHSTDIGALMYPSYTFSGDVQLAQDDIDGIQAIYGRSQNPVQPIGPQTPKACDSKLTFDAITTIRGEVMFFKDRFYMRTNPFYPEVELNFISVFWPQLPNGLEAAYEFADRDEVRFFKGNKYWAVQGQNVLHGYPKDIYSSFGFPRTVKHIDAALSEENTGKTYFFVANKYWRYDEYKRSMDPGYPKMIAHDFPGIGHKVDAVFMKDGFFYFFHGTRQYKFDPKTKRILTLQKANSWFNCRKN

SEQ ID NO: 2658 - protein, 450 aa, Artificial Sequence
  MMP-1 variant H203L
FPATLETQEQDVDLVQKYLEKYYNLKNDGRQVEKRRNSGPVVEKLKQMQEFFGLKVTGKPDAETLKVMKQPRCGVPDVAQFVLTEGNPRWEQTHLTYRIENYTPDLPRADVDHAIEKAFQLWSNVTPLTFTKVSEGQADIMISFVRGDHRDNSPFDGPGGNLAHAFQPGPGIGGDAHFDEDERWTNNFREYNLHRVAAHELGLSLGLSHSTDIGALMYPSYTFSGDVQLAQDDIDGIQAIYGRSQNPVQPIGPQTPKACDSKLTFDAITTIRGEVMFFKDRFYMRTNPFYPEVELNFISVFWPQLPNGLEAAYEFADRDEVRFFKGNKYWAVQGQNVLHGYPKDIYSSFGFPRTVKHIDAALSEENTGKTYFFVANKYWRYDEYKRSMDPGYPKMIAHDFPGIGHKVDAVFMKDGFFYFFHGTRQYKFDPKTKRILTLQKANSWFNCRKN

SEQ ID NO: 2659 - protein, 450 aa, Artificial Sequence
  MMP-1 variant H203A
FPATLETQEQDVDLVQKYLEKYYNLKNDGRQVEKRRNSGPVVEKLKQMQEFFGLKVTGKPDAETLKVMKQPRCGVPDVAQFVLTEGNPRWEQTHLTYRIENYTPDLPRADVDHAIEKAFQLWSNVTPLTFTKVSEGQADIMISFVRGDHRDNSPFDGPGGNLAHAFQPGPGIGGDAHFDEDERWTNNFREYNLHRVAAHELGASLGLSHSTDIGALMYPSYTFSGDVQLAQDDIDGIQAIYGRSQNPVQPIGPQTPKACDSKLTFDAITTIRGEVMFFKDRFYMRTNPFYPEVELNFISVFWPQLPNGLEAAYEFADRDEVRFFKGNKYWAVQGQNVLHGYPKDIYSSFGFPRTVKHIDAALSEENTGKTYFFVANKYWRYDEYKRSMDPGYPKMIAHDFPGIGHKVDAVFMKDGFFYFFHGTRQYKFDPKTKRILTLQKANSWFNCRKN

SEQ ID NO: 2660 - protein, 450 aa, Artificial Sequence
  MMP-1 variant H203P
FPATLETQEQDVDLVQKYLEKYYNLKNDGRQVEKRRNSGPVVEKLKQMQEFFGLKVTGKPDAETLKVMKQPRCGVPDVAQFVLTEGNPRWEQTHLTYRIENYTPDLPRADVDHAIEKAFQLWSNVTPLTFTKVSEGQADIMISFVRGDHRDNSPFDGPGGNLAHAFQPGPGIGGDAHFDEDERWTNNFREYNLHRVAAHELGPSLGLSHSTDIGALMYPSYTFSGDVQLAQDDIDGIQAIYGRSQNPVQPIGPQTPKACDSKLTFDAITTIRGEVMFFKDRFYMRTNPFYPEVELNFISVFWPQLPNGLEAAYEFADRDEVRFFKGNKYWAVQGQNVLHGYPKDIYSSFGFPRTVKHIDAALSEENTGKTYFFVANKYWRYDEYKRSMDPGYPKMIAHDFPGIGHKVDAVFMKDGFFYFFHGTRQYKFDPKTKRILTLQKANSWFNCRKN

SEQ ID NO: 2661 - protein, 450 aa, Artificial Sequence
  MMP-1 variant S204D
FPATLETQEQDVDLVQKYLEKYYNLKNDGRQVEKRRNSGPVVEKLKQMQEFFGLKVTGKPDAETLKVMKQPRCGVPDVAQFVLTEGNPRWEQTHLTYRIENYTPDLPRADVDHAIEKAFQLWSNVTPLTFTKVSEGQADIMISFVRGDHRDNSPFDGPGGNLAHAFQPGPGIGGDAHFDEDERWTNNFREYNLHRVAAHELGHDLGLSHSTDIGALMYPSYTFSGDVQLAQDDIDGIQAIYGRSQNPVQPIGPQTPKACDSKLTFDAITTIRGEVMFFKDRFYMRTNPFYPEVELNFISVFWPQLPNGLEAAYEFADRDEVRFFKGNKYWAVQGQNVLHGYPKDIYSSFGFPRTVKHIDAALSEENTGKTYFFVANKYWRYDEYKRSMDPGYPKMIAHDFPGIGHKVDAVFMKDGFFYFFHGTRQYKFDPKTKRILTLQKANSWFNCRKN

SEQ ID NO: 2662 - protein, 450 aa, Artificial Sequence
  MMP-1 variant S204E
FPATLETQEQDVDLVQKYLEKYYNLKNDGRQVEKRRNSGPVVEKLKQMQEFFGLKVTGKPDAETLKVMKQPRCGVPDVAQFVLTEGNPRWEQTHLTYRIENYTPDLPRADVDHAIEKAFQLWSNVTPLTFTKVSEGQADIMISFVRGDHRDNSPFDGPGGNLAHAFQPGPGIGGDAHFDEDERWTNNFREYNLHRVAAHELGHELGLSHSTDIGALMYPSYTFSGDVQLAQDDIDGIQAIYGRSQNPVQPIGPQTPKACDSKLTFDAITTIRGEVMFFKDRFYMRTNPFYPEVELNFISVFWPQLPNGLEAAYEFADRDEVRFFKGNKYWAVQGQNVLHGYPKDIYSSFGFPRTVKHIDAALSEENTGKTYFFVANKYWRYDEYKRSMDPGYPKMIAHDFPGIGHKVDAVFMKDGFFYFFHGTRQYKFDPKTKRILTLQKANSWFNCRKN

SEQ ID NO: 2663 - protein, 450 aa, Artificial Sequence
  MMP-1 variant S204H
FPATLETQEQDVDLVQKYLEKYYNLKNDGRQVEKRRNSGPVVEKLKQMQEFFGLKVTGKPDAETLKVMKQPRCGVPDVAQFVLTEGNPRWEQTHLTYRIENYTPDLPRADVDHAIEKAFQLWSNVTPLTFTKVSEGQADIMISFVRGDHRDNSPFDGPGGNLAHAFQPGPGIGGDAHFDEDERWTNNFREYNLHRVAAHELGHHLGLSHSTDIGALMYPSYTFSGDVQLAQDDIDGIQAIYGRSQNPVQPIGPQTPKACDSKLTFDAITTIRGEVMFFKDRFYMRTNPFYPEVELNFISVFWPQLPNGLEAAYEFADRDEVRFFKGNKYWAVQGQNVLHGYPKDIYSSFGFPRTVKHIDAALSEENTGKTYFFVANKYWRYDEYKRSMDPGYPKMIAHDFPGIGHKVDAVFMKDGFFYFFHGTRQYKFDPKTKRILTLQKANSWFNCRKN

SEQ ID NO: 2664 - protein, 450 aa, Artificial Sequence
  MMP-1 variant S204K
FPATLETQEQDVDLVQKYLEKYYNLKNDGRQVEKRRNSGPVVEKLKQMQEFFGLKVTGKPDAETLKVMKQPRCGVPDVAQFVLTEGNPRWEQTHLTYRIENYTPDLPRADVDHAIEKAFQLWSNVTPLTFTKVSEGQADIMISFVRGDHRDNSPFDGPGGNLAHAFQPGPGIGGDAHFDEDERWTNNFREYNLHRVAAHELGHKLGLSHSTDIGALMYPSYTFSGDVQLAQDDIDGIQAIYGRSQNPVQPIGPQTPKACDSKLTFDAITTIRGEVMFFKDRFYMRTNPFYPEVELNFISVFWPQLPNGLEAAYEFADRDEVRFFKGNKYWAVQGQNVLHGYPKDIYSSFGFPRTVKHIDAALSEENTGKTYFFVANKYWRYDEYKRSMDPGYPKMIAHDFPGIGHKVDAVFMKDGFFYFFHGTRQYKFDPKTKRILTLQKANSWFNCRKN

SEQ ID NO: 2665 - protein, 450 aa, Artificial Sequence
  MMP-1 variant S204R
FPATLETQEQDVDLVQKYLEKYYNLKNDGRQVEKRRNSGPVVEKLKQMQEFFGLKVTGKPDAETLKVMKQPRCGVPDVAQFVLTEGNPRWEQTHLTYRIENYTPDLPRADVDHAIEKAFQLWSNVTPLTFTKVSEGQADIMISFVRGDHRDNSPFDGPGGNLAHAFQPGPGIGGDAHFDEDERWTNNFREYNLHRVAAHELGHRLGLSHSTDIGALMYPSYTFSGDVQLAQDDIDGIQAIYGRSQNPVQPIGPQTPKACDSKLTFDAITTIRGEVMFFKDRFYMRTNPFYPEVELNFISVFWPQLPNGLEAAYEFADRDEVRFFKGNKYWAVQGQNVLHGYPKDIYSSFGFPRTVKHIDAALSEENTGKTYFFVANKYWRYDEYKRSMDPGYPKMIAHDFPGIGHKVDAVFMKDGFFYFFHGTRQYKFDPKTKRILTLQKANSWFNCRKN

SEQ ID NO: 2666 - protein, 450 aa, Artificial Sequence
  MMP-1 variant S204C
FPATLETQEQDVDLVQKYLEKYYNLKNDGRQVEKRRNSGPVVEKLKQMQEFFGLKVTGKPDAETLKVMKQPRCGVPDVAQFVLTEGNPRWEQTHLTYRIENYTPDLPRADVDHAIEKAFQLWSNVTPLTFTKVSEGQADIMISFVRGDHRDNSPFDGPGGNLAHAFQPGPGIGGDAHFDEDERWTNNFREYNLHRVAAHELGHCLGLSHSTDIGALMYPSYTFSGDVQLAQDDIDGIQAIYGRSQNPVQPIGPQTPKACDSKLTFDAITTIRGEVMFFKDRFYMRTNPFYPEVELNFISVFWPQLPNGLEAAYEFADRDEVRFFKGNKYWAVQGQNVLHGYPKDIYSSFGFPRTVKHIDAALSEENTGKTYFFVANKYWRYDEYKRSMDPGYPKMIAHDFPGIGHKVDAVFMKDGFFYFFHGTRQYKFDPKTKRILTLQKANSWFNCRKN

SEQ ID NO: 2667 - protein, 450 aa, Artificial Sequence
  MMP-1 variant S204N
FPATLETQEQDVDLVQKYLEKYYNLKNDGRQVEKRRNSGPVVEKLKQMQEFFGLKVTGKPDAETLKVMKQPRCGVPDVAQFVLTEGNPRWEQTHLTYRIENYTPDLPRADVDHAIEKAFQLWSNVTPLTFTKVSEGQADIMISFVRGDHRDNSPFDGPGGNLAHAFQPGPGIGGDAHFDEDERWTNNFREYNLHRVAAHELGHNLGLSHSTDIGALMYPSYTFSGDVQLAQDDIDGIQAIYGRSQNPVQPIGPQTPKACDSKLTFDAITTIRGEVMFFKDRFYMRTNPFYPEVELNFISVFWPQLPNGLEAAYEFADRDEVRFFKGNKYWAVQGQNVLHGYPKDIYSSFGFPRTVKHIDAALSEENTGKTYFFVANKYWRYDEYKRSMDPGYPKMIAHDFPGIGHKVDAVFMKDGFFYFFHGTRQYKFDPKTKRILTLQKANSWFNCRKN

SEQ ID NO: 2668 - protein, 450 aa, Artificial Sequence
  MMP-1 variant S204Q
FPATLETQEQDVDLVQKYLEKYYNLKNDGRQVEKRRNSGPVVEKLKQMQEFFGLKVTGKPDAETLKVMKQPRCGVPDVAQFVLTEGNPRWEQTHLTYRIENYTPDLPRADVDHAIEKAFQLWSNVTPLTFTKVSEGQADIMISFVRGDHRDNSPFDGPGGNLAHAFQPGPGIGGDAHFDEDERWTNNFREYNLHRVAAHELGHQLGLSHSTDIGALMYPSYTFSGDVQLAQDDIDGIQAIYGRSQNPVQPIGPQTPKACDSKLTFDAITTIRGEVMFFKDRFYMRTNPFYPEVELNFISVFWPQLPNGLEAAYEFADRDEVRFFKGNKYWAVQGQNVLHGYPKDIYSSFGFPRTVKHIDAALSEENTGKTYFFVANKYWRYDEYKRSMDPGYPKMIAHDFPGIGHKVDAVFMKDGFFYFFHGTRQYKFDPKTKRILTLQKANSWFNCRKN

SEQ ID NO: 2669 - protein, 450 aa, Artificial Sequence
  MMP-1 variant S204T
FPATLETQEQDVDLVQKYLEKYYNLKNDGRQVEKRRNSGPVVEKLKQMQEFFGLKVTGKPDAETLKVMKQPRCGVPDVAQFVLTEGNPRWEQTHLTYRIENYTPDLPRADVDHAIEKAFQLWSNVTPLTFTKVSEGQADIMISFVRGDHRDNSPFDGPGGNLAHAFQPGPGIGGDAHFDEDERWTNNFREYNLHRVAAHELGHTLGLSHSTDIGALMYPSYTFSGDVQLAQDDIDGIQAIYGRSQNPVQPIGPQTPKACDSKLTFDAITTIRGEVMFFKDRFYMRTNPFYPEVELNFISVFWPQLPNGLEAAYEFADRDEVRFFKGNKYWAVQGQNVLHGYPKDIYSSFGFPRTVKHIDAALSEENTGKTYFFVANKYWRYDEYKRSMDPGYPKMIAHDFPGIGHKVDAVFMKDGFFYFFHGTRQYKFDPKTKRILTLQKANSWFNCRKN

SEQ ID NO: 2670 - protein, 450 aa, Artificial Sequence
  MMP-1 variant S204Y
FPATLETQEQDVDLVQKYLEKYYNLKNDGRQVEKRRNSGPVVEKLKQMQEFFGLKVTGKPDAETLKVMKQPRCGVPDVAQFVLTEGNPRWEQTHLTYRIENYTPDLPRADVDHAIEKAFQLWSNVTPLTFTKVSEGQADIMISFVRGDHRDNSPFDGPGGNLAHAFQPGPGIGGDAHFDEDERWTNNFREYNLHRVAAHELGHYLGLSHSTDIGALMYPSYTFSGDVQLAQDDIDGIQAIYGRSQNPVQPIGPQTPKACDSKLTFDAITTIRGEVMFFKDRFYMRTNPFYPEVELNFISVFWPQLPNGLEAAYEFADRDEVRFFKGNKYWAVQGQNVLHGYPKDIYSSFGFPRTVKHIDAALSEENTGKTYFFVANKYWRYDEYKRSMDPGYPKMIAHDFPGIGHKVDAVFMKDGFFYFFHGTRQYKFDPKTKRILTLQKANSWFNCRKN

SEQ ID NO: 2671 - protein, 450 aa, Artificial Sequence
  MMP-1 variant S204G
FPATLETQEQDVDLVQKYLEKYYNLKNDGRQVEKRRNSGPVVEKLKQMQEFFGLKVTGKPDAETLKVMKQPRCGVPDVAQFVLTEGNPRWEQTHLTYRIENYTPDLPRADVDHAIEKAFQLWSNVTPLTFTKVSEGQADIMISFVRGDHRDNSPFDGPGGNLAHAFQPGPGIGGDAHFDEDERWTNNFREYNLHRVAAHELGHGLGLSHSTDIGALMYPSYTFSGDVQLAQDDIDGIQAIYGRSQNPVQPIGPQTPKACDSKLTFDAITTIRGEVMFFKDRFYMRTNPFYPEVELNFISVFWPQLPNGLEAAYEFADRDEVRFFKGNKYWAVQGQNVLHGYPKDIYSSFGFPRTVKHIDAALSEENTGKTYFFVANKYWRYDEYKRSMDPGYPKMIAHDFPGIGHKVDAVFMKDGFFYFFHGTRQYKFDPKTKRILTLQKANSWFNCRKN

SEQ ID NO: 2672 - protein, 450 aa, Artificial Sequence
  MMP-1 variant S204F
FPATLETQEQDVDLVQKYLEKYYNLKNDGRQVEKRRNSGPVVEKLKQMQEFFGLKVTGKPDAETLKVMKQPRCGVPDVAQFVLTEGNPRWEQTHLTYRIENYTPDLPRADVDHAIEKAFQLWSNVTPLTFTKVSEGQADIMISFVRGDHRDNSPFDGPGGNLAHAFQPGPGIGGDAHFDEDERWTNNFREYNLHRVAAHELGHFLGLSHSTDIGALMYPSYTFSGDVQLAQDDIDGIQAIYGRSQNPVQPIGPQTPKACDSKLTFDAITTIRGEVMFFKDRFYMRTNPFYPEVELNFISVFWPQLPNGLEAAYEFADRDEVRFFKGNKYWAVQGQNVLHGYPKDIYSSFGFPRTVKHIDAALSEENTGKTYFFVANKYWRYDEYKRSMDPGYPKMIAHDFPGIGHKVDAVFMKDGFFYFFHGTRQYKFDPKTKRILTLQKANSWFNCRKN

SEQ ID NO: 2673 - protein, 450 aa, Artificial Sequence
  MMP-1 variant S204M
FPATLETQEQDVDLVQKYLEKYYNLKNDGRQVEKRRNSGPVVEKLKQMQEFFGLKVTGKPDAETLKVMKQPRCGVPDVAQFVLTEGNPRWEQTHLTYRIENYTPDLPRADVDHAIEKAFQLWSNVTPLTFTKVSEGQADIMISFVRGDHRDNSPFDGPGGNLAHAFQPGPGIGGDAHFDEDERWTNNFREYNLHRVAAHELGHMLGLSHSTDIGALMYPSYTFSGDVQLAQDDIDGIQAIYGRSQNPVQPIGPQTPKACDSKLTFDAITTIRGEVMFFKDRFYMRTNPFYPEVELNFISVFWPQLPNGLEAAYEFADRDEVRFFKGNKYWAVQGQNVLHGYPKDIYSSFGFPRTVKHIDAALSEENTGKTYFFVANKYWRYDEYKRSMDPGYPKMIAHDFPGIGHKVDAVFMKDGFFYFFHGTRQYKFDPKTKRILTLQKANSWFNCRKN

SEQ ID NO: 2674 - protein, 450 aa, Artificial Sequence
  MMP-1 variant S204W
FPATLETQEQDVDLVQKYLEKYYNLKNDGRQVEKRRNSGPVVEKLKQMQEFFGLKVTGKPDAETLKVMKQPRCGVPDVAQFVLTEGNPRWEQTHLTYRIENYTPDLPRADVDHAIEKAFQLWSNVTPLTFTKVSEGQADIMISFVRGDHRDNSPFDGPGGNLAHAFQPGPGIGGDAHFDEDERWTNNFREYNLHRVAAHELGHWLGLSHSTDIGALMYPSYTFSGDVQLAQDDIDGIQAIYGRSQNPVQPIGPQTPKACDSKLTFDAITTIRGEVMFFKDRFYMRTNPFYPEVELNFISVFWPQLPNGLEAAYEFADRDEVRFFKGNKYWAVQGQNVLHGYPKDIYSSFGFPRTVKHIDAALSEENTGKTYFFVANKYWRYDEYKRSMDPGYPKMIAHDFPGIGHKVDAVFMKDGFFYFFHGTRQYKFDPKTKRILTLQKANSWFNCRKN

SEQ ID NO: 2675 - protein, 450 aa, Artificial Sequence
  MMP-1 variant S204I
FPATLETQEQDVDLVQKYLEKYYNLKNDGRQVEKRRNSGPVVEKLKQMQEFFGLKVTGKPDAETLKVMKQPRCGVPDVAQFVLTEGNPRWEQTHLTYRIENYTPDLPRADVDHAIEKAFQLWSNVTPLTFTKVSEGQADIMISFVRGDHRDNSPFDGPGGNLAHAFQPGPGIGGDAHFDEDERWTNNFREYNLHRVAAHELGHILGLSHSTDIGALMYPSYTFSGDVQLAQDDIDGIQAIYGRSQNPVQPIGPQTPKACDSKLTFDAITTIRGEVMFFKDRFYMRTNPFYPEVELNFISVFWPQLPNGLEAAYEFADRDEVRFFKGNKYWAVQGQNVLHGYPKDIYSSFGFPRTVKHIDAALSEENTGKTYFFVANKYWRYDEYKRSMDPGYPKMIAHDFPGIGHKVDAVFMKDGFFYFFHGTRQYKFDPKTKRILTLQKANSWFNCRKN

SEQ ID NO: 2676 - protein, 450 aa, Artificial Sequence; identical to SEQ ID NO: 2505
  MMP-1 variant S204V

SEQ ID NO: 2677 - protein, 450 aa, Artificial Sequence
  MMP-1 variant S204L
FPATLETQEQDVDLVQKYLEKYYNLKNDGRQVEKRRNSGPVVEKLKQMQEFFGLKVTGKPDAETLKVMKQPRCGVPDVAQFVLTEGNPRWEQTHLTYRIENYTPDLPRADVDHAIEKAFQLWSNVTPLTFTKVSEGQADIMISFVRGDHRDNSPFDGPGGNLAHAFQPGPGIGGDAHFDEDERWTNNFREYNLHRVAAHELGHLLGLSHSTDIGALMYPSYTFSGDVQLAQDDIDGIQAIYGRSQNPVQPIGPQTPKACDSKLTFDAITTIRGEVMFFKDRFYMRTNPFYPEVELNFISVFWPQLPNGLEAAYEFADRDEVRFFKGNKYWAVQGQNVLHGYPKDIYSSFGFPRTVKHIDAALSEENTGKTYFFVANKYWRYDEYKRSMDPGYPKMIAHDFPGIGHKVDAVFMKDGFFYFFHGTRQYKFDPKTKRILTLQKANSWFNCRKN

SEQ ID NO: 2678 - protein, 450 aa, Artificial Sequence
  MMP-1 variant S204A
FPATLETQEQDVDLVQKYLEKYYNLKNDGRQVEKRRNSGPVVEKLKQMQEFFGLKVTGKPDAETLKVMKQPRCGVPDVAQFVLTEGNPRWEQTHLTYRIENYTPDLPRADVDHAIEKAFQLWSNVTPLTFTKVSEGQADIMISFVRGDHRDNSPFDGPGGNLAHAFQPGPGIGGDAHFDEDERWTNNFREYNLHRVAAHELGHALGLSHSTDIGALMYPSYTFSGDVQLAQDDIDGIQAIYGRSQNPVQPIGPQTPKACDSKLTFDAITTIRGEVMFFKDRFYMRTNPFYPEVELNFISVFWPQLPNGLEAAYEFADRDEVRFFKGNKYWAVQGQNVLHGYPKDIYSSFGFPRTVKHIDAALSEENTGKTYFFVANKYWRYDEYKRSMDPGYPKMIAHDFPGIGHKVDAVFMKDGFFYFFHGTRQYKFDPKTKRILTLQKANSWFNCRKN

SEQ ID NO: 2679 - protein, 450 aa, Artificial Sequence
  MMP-1 variant S204P
FPATLETQEQDVDLVQKYLEKYYNLKNDGRQVEKRRNSGPVVEKLKQMQEFFGLKVTGKPDAETLKVMKQPRCGVPDVAQFVLTEGNPRWEQTHLTYRIENYTPDLPRADVDHAIEKAFQLWSNVTPLTFTKVSEGQADIMISFVRGDHRDNSPFDGPGGNLAHAFQPGPGIGGDAHFDEDERWTNNFREYNLHRVAAHELGHPLGLSHSTDIGALMYPSYTFSGDVQLAQDDIDGIQAIYGRSQNPVQPIGPQTPKACDSKLTFDAITTIRGEVMFFKDRFYMRTNPFYPEVELNFISVFWPQLPNGLEAAYEFADRDEVRFFKGNKYWAVQGQNVLHGYPKDIYSSFGFPRTVKHIDAALSEENTGKTYFFVANKYWRYDEYKRSMDPGYPKMIAHDFPGIGHKVDAVFMKDGFFYFFHGTRQYKFDPKTKRILTLQKANSWFNCRKN

SEQ ID NO: 2680 - protein, 450 aa, Artificial Sequence
  MMP-1 variant L205D
FPATLETQEQDVDLVQKYLEKYYNLKNDGRQVEKRRNSGPVVEKLKQMQEFFGLKVTGKPDAETLKVMKQPRCGVPDVAQFVLTEGNPRWEQTHLTYRIENYTPDLPRADVDHAIEKAFQLWSNVTPLTFTKVSEGQADIMISFVRGDHRDNSPFDGPGGNLAHAFQPGPGIGGDAHFDEDERWTNNFREYNLHRVAAHELGHSDGLSHSTDIGALMYPSYTFSGDVQLAQDDIDGIQAIYGRSQNPVQPIGPQTPKACDSKLTFDAITTIRGEVMFFKDRFYMRTNPFYPEVELNFISVFWPQLPNGLEAAYEFADRDEVRFFKGNKYWAVQGQNVLHGYPKDIYSSFGFPRTVKHIDAALSEENTGKTYFFVANKYWRYDEYKRSMDPGYPKMIAHDFPGIGHKVDAVFMKDGFFYFFHGTRQYKFDPKTKRILTLQKANSWFNCRKN

SEQ ID NO: 2681 - protein, 450 aa, Artificial Sequence
  MMP-1 variant L205E
FPATLETQEQDVDLVQKYLEKYYNLKNDGRQVEKRRNSGPVVEKLKQMQEFFGLKVTGKPDAETLKVMKQPRCGVPDVAQFVLTEGNPRWEQTHLTYRIENYTPDLPRADVDHAIEKAFQLWSNVTPLTFTKVSEGQADIMISFVRGDHRDNSPFDGPGGNLAHAFQPGPGIGGDAHFDEDERWTNNFREYNLHRVAAHELGHSEGLSHSTDIGALMYPSYTFSGDVQLAQDDIDGIQAIYGRSQNPVQPIGPQTPKACDSKLTFDAITTIRGEVMFFKDRFYMRTNPFYPEVELNFISVFWPQLPNGLEAAYEFADRDEVRFFKGNKYWAVQGQNVLHGYPKDIYSSFGFPRTVKHIDAALSEENTGKTYFFVANKYWRYDEYKRSMDPGYPKMIAHDFPGIGHKVDAVFMKDGFFYFFHGTRQYKFDPKTKRILTLQKANSWFNCRKN

SEQ ID NO: 2682 - protein, 450 aa, Artificial Sequence
  MMP-1 variant L205H
FPATLETQEQDVDLVQKYLEKYYNLKNDGRQVEKRRNSGPVVEKLKQMQEFFGLKVTGKPDAETLKVMKQPRCGVPDVAQFVLTEGNPRWEQTHLTYRIENYTPDLPRADVDHAIEKAFQLWSNVTPLTFTKVSEGQADIMISFVRGDHRDNSPFDGPGGNLAHAFQPGPGIGGDAHFDEDERWTNNFREYNLHRVAAHELGHSHGLSHSTDIGALMYPSYTFSGDVQLAQDDIDGIQAIYGRSQNPVQPIGPQTPKACDSKLTFDAITTIRGEVMFFKDRFYMRTNPFYPEVELNFISVFWPQLPNGLEAAYEFADRDEVRFFKGNKYWAVQGQNVLHGYPKDIYSSFGFPRTVKHIDAALSEENTGKTYFFVANKYWRYDEYKRSMDPGYPKMIAHDFPGIGHKVDAVFMKDGFFYFFHGTRQYKFDPKTKRILTLQKANSWFNCRKN

SEQ ID NO: 2683 - protein, 450 aa, Artificial Sequence
  MMP-1 variant L205K
FPATLETQEQDVDLVQKYLEKYYNLKNDGRQVEKRRNSGPVVEKLKQMQEFFGLKVTGKPDAETLKVMKQPRCGVPDVAQFVLTEGNPRWEQTHLTYRIENYTPDLPRADVDHAIEKAFQLWSNVTPLTFTKVSEGQADIMISFVRGDHRDNSPFDGPGGNLAHAFQPGPGIGGDAHFDEDERWTNNFREYNLHRVAAHELGHSKGLSHSTDIGALMYPSYTFSGDVQLAQDDIDGIQAIYGRSQNPVQPIGPQTPKACDSKLTFDAITTIRGEVMFFKDRFYMRTNPFYPEVELNFISVFWPQLPNGLEAAYEFADRDEVRFFKGNKYWAVQGQNVLHGYPKDIYSSFGFPRTVKHIDAALSEENTGKTYFFVANKYWRYDEYKRSMDPGYPKMIAHDFPGIGHKVDAVFMKDGFFYFFHGTRQYKFDPKTKRILTLQKANSWFNCRKN

SEQ ID NO: 2684 - protein, 450 aa, Artificial Sequence
  MMP-1 variant L205R
FPATLETQEQDVDLVQKYLEKYYNLKNDGRQVEKRRNSGPVVEKLKQMQEFFGLKVTGKPDAETLKVMKQPRCGVPDVAQFVLTEGNPRWEQTHLTYRIENYTPDLPRADVDHAIEKAFQLWSNVTPLTFTKVSEGQADIMISFVRGDHRDNSPFDGPGGNLAHAFQPGPGIGGDAHFDEDERWTNNFREYNLHRVAAHELGHSRGLSHSTDIGALMYPSYTFSGDVQLAQDDIDGIQAIYGRSQNPVQPIGPQTPKACDSKLTFDAITTIRGEVMFFKDRFYMRTNPFYPEVELNFISVFWPQLPNGLEAAYEFADRDEVRFFKGNKYWAVQGQNVLHGYPKDIYSSFGFPRTVKHIDAALSEENTGKTYFFVANKYWRYDEYKRSMDPGYPKMIAHDFPGIGHKVDAVFMKDGFFYFFHGTRQYKFDPKTKRILTLQKANSWFNCRKN

SEQ ID NO: 2685 - protein, 450 aa, Artificial Sequence
  MMP-1 variant L205C
FPATLETQEQDVDLVQKYLEKYYNLKNDGRQVEKRRNSGPVVEKLKQMQEFFGLKVTGKPDAETLKVMKQPRCGVPDVAQFVLTEGNPRWEQTHLTYRIENYTPDLPRADVDHAIEKAFQLWSNVTPLTFTKVSEGQADIMISFVRGDHRDNSPFDGPGGNLAHAFQPGPGIGGDAHFDEDERWTNNFREYNLHRVAAHELGHSCGLSHSTDIGALMYPSYTFSGDVQLAQDDIDGIQAIYGRSQNPVQPIGPQTPKACDSKLTFDAITTIRGEVMFFKDRFYMRTNPFYPEVELNFISVFWPQLPNGLEAAYEFADRDEVRFFKGNKYWAVQGQNVLHGYPKDIYSSFGFPRTVKHIDAALSEENTGKTYFFVANKYWRYDEYKRSMDPGYPKMIAHDFPGIGHKVDAVFMKDGFFYFFHGTRQYKFDPKTKRILTLQKANSWFNCRKN

SEQ ID NO: 2686 - protein, 450 aa, Artificial Sequence
  MMP-1 variant L205N
FPATLETQEQDVDLVQKYLEKYYNLKNDGRQVEKRRNSGPVVEKLKQMQEFFGLKVTGKPDAETLKVMKQPRCGVPDVAQFVLTEGNPRWEQTHLTYRIENYTPDLPRADVDHAIEKAFQLWSNVTPLTFTKVSEGQADIMISFVRGDHRDNSPFDGPGGNLAHAFQPGPGIGGDAHFDEDERWTNNFREYNLHRVAAHELGHSNGLSHSTDIGALMYPSYTFSGDVQLAQDDIDGIQAIYGRSQNPVQPIGPQTPKACDSKLTFDAITTIRGEVMFFKDRFYMRTNPFYPEVELNFISVFWPQLPNGLEAAYEFADRDEVRFFKGNKYWAVQGQNVLHGYPKDIYSSFGFPRTVKHIDAALSEENTGKTYFFVANKYWRYDEYKRSMDPGYPKMIAHDFPGIGHKVDAVFMKDGFFYFFHGTRQYKFDPKTKRILTLQKANSWFNCRKN

SEQ ID NO: 2687 - protein, 450 aa, Artificial Sequence
  MMP-1 variant L205Q
FPATLETQEQDVDLVQKYLEKYYNLKNDGRQVEKRRNSGPVVEKLKQMQEFFGLKVTGKPDAETLKVMKQPRCGVPDVAQFVLTEGNPRWEQTHLTYRIENYTPDLPRADVDHAIEKAFQLWSNVTPLTFTKVSEGQADIMISFVRGDHRDNSPFDGPGGNLAHAFQPGPGIGGDAHFDEDERWTNNFREYNLHRVAAHELGHSQGLSHSTDIGALMYPSYTFSGDVQLAQDDIDGIQAIYGRSQNPVQPIGPQTPKACDSKLTFDAITTIRGEVMFFKDRFYMRTNPFYPEVELNFISVFWPQLPNGLEAAYEFADRDEVRFFKGNKYWAVQGQNVLHGYPKDIYSSFGFPRTVKHIDAALSEENTGKTYFFVANKYWRYDEYKRSMDPGYPKMIAHDFPGIGHKVDAVFMKDGFFYFFHGTRQYKFDPKTKRILTLQKANSWFNCRKN

SEQ ID NO: 2688 - protein, 450 aa, Artificial Sequence
  MMP-1 variant L205T
FPATLETQEQDVDLVQKYLEKYYNLKNDGRQVEKRRNSGPVVEKLKQMQEFFGLKVTGKPDAETLKVMKQPRCGVPDVAQFVLTEGNPRWEQTHLTYRIENYTPDLPRADVDHAIEKAFQLWSNVTPLTFTKVSEGQADIMISFVRGDHRDNSPFDGPGGNLAHAFQPGPGIGGDAHFDEDERWTNNFREYNLHRVAAHELGHSTGLSHSTDIGALMYPSYTFSGDVQLAQDDIDGIQAIYGRSQNPVQPIGPQTPKACDSKLTFDAITTIRGEVMFFKDRFYMRTNPFYPEVELNFISVFWPQLPNGLEAAYEFADRDEVRFFKGNKYWAVQGQNVLHGYPKDIYSSFGFPRTVKHIDAALSEENTGKTYFFVANKYWRYDEYKRSMDPGYPKMIAHDFPGIGHKVDAVFMKDGFFYFFHGTRQYKFDPKTKRILTLQKANSWFNCRKN

SEQ ID NO: 2689 - protein, 450 aa, Artificial Sequence
  MMP-1 variant L205Y
FPATLETQEQDVDLVQKYLEKYYNLKNDGRQVEKRRNSGPVVEKLKQMQEFFGLKVTGKPDAETLKVMKQPRCGVPDVAQFVLTEGNPRWEQTHLTYRIENYTPDLPRADVDHAIEKAFQLWSNVTPLTFTKVSEGQADIMISFVRGDHRDNSPFDGPGGNLAHAFQPGPGIGGDAHFDEDERWTNNFREYNLHRVAAHELGHSYGLSHSTDIGALMYPSYTFSGDVQLAQDDIDGIQAIYGRSQNPVQPIGPQTPKACDSKLTFDAITTIRGEVMFFKDRFYMRTNPFYPEVELNFISVFWPQLPNGLEAAYEFADRDEVRFFKGNKYWAVQGQNVLHGYPKDIYSSFGFPRTVKHIDAALSEENTGKTYFFVANKYWRYDEYKRSMDPGYPKMIAHDFPGIGHKVDAVFMKDGFFYFFHGTRQYKFDPKTKRILTLQKANSWFNCRKN

SEQ ID NO: 2690 - protein, 450 aa, Artificial Sequence
  MMP-1 variant L205S
FPATLETQEQDVDLVQKYLEKYYNLKNDGRQVEKRRNSGPVVEKLKQMQEFFGLKVTGKPDAETLKVMKQPRCGVPDVAQFVLTEGNPRWEQTHLTYRIENYTPDLPRADVDHAIEKAFQLWSNVTPLTFTKVSEGQADIMISFVRGDHRDNSPFDGPGGNLAHAFQPGPGIGGDAHFDEDERWTNNFREYNLHRVAAHELGHSSGLSHSTDIGALMYPSYTFSGDVQLAQDDIDGIQAIYGRSQNPVQPIGPQTPKACDSKLTFDAITTIRGEVMFFKDRFYMRTNPFYPEVELNFISVFWPQLPNGLEAAYEFADRDEVRFFKGNKYWAVQGQNVLHGYPKDIYSSFGFPRTVKHIDAALSEENTGKTYFFVANKYWRYDEYKRSMDPGYPKMIAHDFPGIGHKVDAVFMKDGFFYFFHGTRQYKFDPKTKRILTLQKANSWFNCRKN

SEQ ID NO: 2691 - protein, 450 aa, Artificial Sequence
  MMP-1 variant L205G
FPATLETQEQDVDLVQKYLEKYYNLKNDGRQVEKRRNSGPVVEKLKQMQEFFGLKVTGKPDAETLKVMKQPRCGVPDVAQFVLTEGNPRWEQTHLTYRIENYTPDLPRADVDHAIEKAFQLWSNVTPLTFTKVSEGQADIMISFVRGDHRDNSPFDGPGGNLAHAFQPGPGIGGDAHFDEDERWTNNFREYNLHRVAAHELGHSGGLSHSTDIGALMYPSYTFSGDVQLAQDDIDGIQAIYGRSQNPVQPIGPQTPKACDSKLTFDAITTIRGEVMFFKDRFYMRTNPFYPEVELNFISVFWPQLPNGLEAAYEFADRDEVRFFKGNKYWAVQGQNVLHGYPKDIYSSFGFPRTVKHIDAALSEENTGKTYFFVANKYWRYDEYKRSMDPGYPKMIAHDFPGIGHKVDAVFMKDGFFYFFHGTRQYKFDPKTKRILTLQKANSWFNCRKN

SEQ ID NO: 2692 - protein, 450 aa, Artificial Sequence
  MMP-1 variant L205F
FPATLETQEQDVDLVQKYLEKYYNLKNDGRQVEKRRNSGPVVEKLKQMQEFFGLKVTGKPDAETLKVMKQPRCGVPDVAQFVLTEGNPRWEQTHLTYRIENYTPDLPRADVDHAIEKAFQLWSNVTPLTFTKVSEGQADIMISFVRGDHRDNSPFDGPGGNLAHAFQPGPGIGGDAHFDEDERWTNNFREYNLHRVAAHELGHSFGLSHSTDIGALMYPSYTFSGDVQLAQDDIDGIQAIYGRSQNPVQPIGPQTPKACDSKLTFDAITTIRGEVMFFKDRFYMRTNPFYPEVELNFISVFWPQLPNGLEAAYEFADRDEVRFFKGNKYWAVQGQNVLHGYPKDIYSSFGFPRTVKHIDAALSEENTGKTYFFVANKYWRYDEYKRSMDPGYPKMIAHDFPGIGHKVDAVFMKDGFFYFFHGTRQYKFDPKTKRILTLQKANSWFNCRKN

SEQ ID NO: 2693 - protein, 450 aa, Artificial Sequence
  MMP-1 variant L205M
FPATLETQEQDVDLVQKYLEKYYNLKNDGRQVEKRRNSGPVVEKLKQMQEFFGLKVTGKPDAETLKVMKQPRCGVPDVAQFVLTEGNPRWEQTHLTYRIENYTPDLPRADVDHAIEKAFQLWSNVTPLTFTKVSEGQADIMISFVRGDHRDNSPFDGPGGNLAHAFQPGPGIGGDAHFDEDERWTNNFREYNLHRVAAHELGHSMGLSHSTDIGALMYPSYTFSGDVQLAQDDIDGIQAIYGRSQNPVQPIGPQTPKACDSKLTFDAITTIRGEVMFFKDRFYMRTNPFYPEVELNFISVFWPQLPNGLEAAYEFADRDEVRFFKGNKYWAVQGQNVLHGYPKDIYSSFGFPRTVKHIDAALSEENTGKTYFFVANKYWRYDEYKRSMDPGYPKMIAHDFPGIGHKVDAVFMKDGFFYFFHGTRQYKFDPKTKRILTLQKANSWFNCRKN

SEQ ID NO: 2694 - protein, 450 aa, Artificial Sequence
  MMP-1 variant L205W
FPATLETQEQDVDLVQKYLEKYYNLKNDGRQVEKRRNSGPVVEKLKQMQEFFGLKVTGKPDAETLKVMKQPRCGVPDVAQFVLTEGNPRWEQTHLTYRIENYTPDLPRADVDHAIEKAFQLWSNVTPLTFTKVSEGQADIMISFVRGDHRDNSPFDGPGGNLAHAFQPGPGIGGDAHFDEDERWTNNFREYNLHRVAAHELGHSWGLSHSTDIGALMYPSYTFSGDVQLAQDDIDGIQAIYGRSQNPVQPIGPQTPKACDSKLTFDAITTIRGEVMFFKDRFYMRTNPFYPEVELNFISVFWPQLPNGLEAAYEFADRDEVRFFKGNKYWAVQGQNVLHGYPKDIYSSFGFPRTVKHIDAALSEENTGKTYFFVANKYWRYDEYKRSMDPGYPKMIAHDFPGIGHKVDAVFMKDGFFYFFHGTRQYKFDPKTKRILTLQKANSWFNCRKN

SEQ ID NO: 2695 - protein, 450 aa, Artificial Sequence
  MMP-1 variant L205I
FPATLETQEQDVDLVQKYLEKYYNLKNDGRQVEKRRNSGPVVEKLKQMQEFFGLKVTGKPDAETLKVMKQPRCGVPDVAQFVLTEGNPRWEQTHLTYRIENYTPDLPRADVDHAIEKAFQLWSNVTPLTFTKVSEGQADIMISFVRGDHRDNSPFDGPGGNLAHAFQPGPGIGGDAHFDEDERWTNNFREYNLHRVAAHELGHSIGLSHSTDIGALMYPSYTFSGDVQLAQDDIDGIQAIYGRSQNPVQPIGPQTPKACDSKLTFDAITTIRGEVMFFKDRFYMRTNPFYPEVELNFISVFWPQLPNGLEAAYEFADRDEVRFFKGNKYWAVQGQNVLHGYPKDIYSSFGFPRTVKHIDAALSEENTGKTYFFVANKYWRYDEYKRSMDPGYPKMIAHDFPGIGHKVDAVFMKDGFFYFFHGTRQYKFDPKTKRILTLQKANSWFNCRKN

SEQ ID NO: 2696 - protein, 450 aa, Artificial Sequence
  MMP-1 variant L205V
FPATLETQEQDVDLVQKYLEKYYNLKNDGRQVEKRRNSGPVVEKLKQMQEFFGLKVTGKPDAETLKVMKQPRCGVPDVAQFVLTEGNPRWEQTHLTYRIENYTPDLPRADVDHAIEKAFQLWSNVTPLTFTKVSEGQADIMISFVRGDHRDNSPFDGPGGNLAHAFQPGPGIGGDAHFDEDERWTNNFREYNLHRVAAHELGHSVGLSHSTDIGALMYPSYTFSGDVQLAQDDIDGIQAIYGRSQNPVQPIGPQTPKACDSKLTFDAITTIRGEVMFFKDRFYMRTNPFYPEVELNFISVFWPQLPNGLEAAYEFADRDEVRFFKGNKYWAVQGQNVLHGYPKDIYSSFGFPRTVKHIDAALSEENTGKTYFFVANKYWRYDEYKRSMDPGYPKMIAHDFPGIGHKVDAVFMKDGFFYFFHGTRQYKFDPKTKRILTLQKANSWFNCRKN

SEQ ID NO: 2697 - protein, 450 aa, Artificial Sequence
  MMP-1 variant L205A
FPATLETQEQDVDLVQKYLEKYYNLKNDGRQVEKRRNSGPVVEKLKQMQEFFGLKVTGKPDAETLKVMKQPRCGVPDVAQFVLTEGNPRWEQTHLTYRIENYTPDLPRADVDHAIEKAFQLWSNVTPLTFTKVSEGQADIMISFVRGDHRDNSPFDGPGGNLAHAFQPGPGIGGDAHFDEDERWTNNFREYNLHRVAAHELGHSAGLSHSTDIGALMYPSYTFSGDVQLAQDDIDGIQAIYGRSQNPVQPIGPQTPKACDSKLTFDAITTIRGEVMFFKDRFYMRTNPFYPEVELNFISVFWPQLPNGLEAAYEFADRDEVRFFKGNKYWAVQGQNVLHGYPKDIYSSFGFPRTVKHIDAALSEENTGKTYFFVANKYWRYDEYKRSMDPGYPKMIAHDFPGIGHKVDAVFMKDGFFYFFHGTRQYKFDPKTKRILTLQKANSWFNCRKN

SEQ ID NO: 2698 - protein, 450 aa, Artificial Sequence
  MMP-1 variant L205P
FPATLETQEQDVDLVQKYLEKYYNLKNDGRQVEKRRNSGPVVEKLKQMQEFFGLKVTGKPDAETLKVMKQPRCGVPDVAQFVLTEGNPRWEQTHLTYRIENYTPDLPRADVDHAIEKAFQLWSNVTPLTFTKVSEGQADIMISFVRGDHRDNSPFDGPGGNLAHAFQPGPGIGGDAHFDEDERWTNNFREYNLHRVAAHELGHSPGLSHSTDIGALMYPSYTFSGDVQLAQDDIDGIQAIYGRSQNPVQPIGPQTPKACDSKLTFDAITTIRGEVMFFKDRFYMRTNPFYPEVELNFISVFWPQLPNGLEAAYEFADRDEVRFFKGNKYWAVQGQNVLHGYPKDIYSSFGFPRTVKHIDAALSEENTGKTYFFVANKYWRYDEYKRSMDPGYPKMIAHDFPGIGHKVDAVFMKDGFFYFFHGTRQYKFDPKTKRILTLQKANSWFNCRKN

SEQ ID NO: 2699 - protein, 450 aa, Artificial Sequence
  MMP-1 variant S208D
FPATLETQEQDVDLVQKYLEKYYNLKNDGRQVEKRRNSGPVVEKLKQMQEFFGLKVTGKPDAETLKVMKQPRCGVPDVAQFVLTEGNPRWEQTHLTYRIENYTPDLPRADVDHAIEKAFQLWSNVTPLTFTKVSEGQADIMISFVRGDHRDNSPFDGPGGNLAHAFQPGPGIGGDAHFDEDERWTNNFREYNLHRVAAHELGHSLGLDHSTDIGALMYPSYTFSGDVQLAQDDIDGIQAIYGRSQNPVQPIGPQTPKACDSKLTFDAITTIRGEVMFFKDRFYMRTNPFYPEVELNFISVFWPQLPNGLEAAYEFADRDEVRFFKGNKYWAVQGQNVLHGYPKDIYSSFGFPRTVKHIDAALSEENTGKTYFFVANKYWRYDEYKRSMDPGYPKMIAHDFPGIGHKVDAVFMKDGFFYFFHGTRQYKFDPKTKRILTLQKANSWFNCRKN

SEQ ID NO: 2700 - protein, 450 aa, Artificial Sequence
  MMP-1 variant S208E
FPATLETQEQDVDLVQKYLEKYYNLKNDGRQVEKRRNSGPVVEKLKQMQEFFGLKVTGKPDAETLKVMKQPRCGVPDVAQFVLTEGNPRWEQTHLTYRIENYTPDLPRADVDHAIEKAFQLWSNVTPLTFTKVSEGQADIMISFVRGDHRDNSPFDGPGGNLAHAFQPGPGIGGDAHFDEDERWTNNFREYNLHRVAAHELGHSLGLEHSTDIGALMYPSYTFSGDVQLAQDDIDGIQAIYGRSQNPVQPIGPQTPKACDSKLTFDAITTIRGEVMFFKDRFYMRTNPFYPEVELNFISVFWPQLPNGLEAAYEFADRDEVRFFKGNKYWAVQGQNVLHGYPKDIYSSFGFPRTVKHIDAALSEENTGKTYFFVANKYWRYDEYKRSMDPGYPKMIAHDFPGIGHKVDAVFMKDGFFYFFHGTRQYKFDPKTKRILTLQKANSWFNCRKN

SEQ ID NO: 2701 - protein, 450 aa, Artificial Sequence
  MMP-1 variant S208H
FPATLETQEQDVDLVQKYLEKYYNLKNDGRQVEKRRNSGPVVEKLKQMQEFFGLKVTGKPDAETLKVMKQPRCGVPDVAQFVLTEGNPRWEQTHLTYRIENYTPDLPRADVDHAIEKAFQLWSNVTPLTFTKVSEGQADIMISFVRGDHRDNSPFDGPGGNLAHAFQPGPGIGGDAHFDEDERWTNNFREYNLHRVAAHELGHSLGLHHSTDIGALMYPSYTFSGDVQLAQDDIDGIQAIYGRSQNPVQPIGPQTPKACDSKLTFDAITTIRGEVMFFKDRFYMRTNPFYPEVELNFISVFWPQLPNGLEAAYEFADRDEVRFFKGNKYWAVQGQNVLHGYPKDIYSSFGFPRTVKHIDAALSEENTGKTYFFVANKYWRYDEYKRSMDPGYPKMIAHDFPGIGHKVDAVFMKDGFFYFFHGTRQYKFDPKTKRILTLQKANSWFNCRKN

SEQ ID NO: 2702 - protein, 450 aa, Artificial Sequence
  MMP-1 variant S208K
FPATLETQEQDVDLVQKYLEKYYNLKNDGRQVEKRRNSGPVVEKLKQMQEFFGLKVTGKPDAETLKVMKQPRCGVPDVAQFVLTEGNPRWEQTHLTYRIENYTPDLPRADVDHAIEKAFQLWSNVTPLTFTKVSEGQADIMISFVRGDHRDNSPFDGPGGNLAHAFQPGPGIGGDAHFDEDERWTNNFREYNLHRVAAHELGHSLGLKHSTDIGALMYPSYTFSGDVQLAQDDIDGIQAIYGRSQNPVQPIGPQTPKACDSKLTFDAITTIRGEVMFFKDRFYMRTNPFYPEVELNFISVFWPQLPNGLEAAYEFADRDEVRFFKGNKYWAVQGQNVLHGYPKDIYSSFGFPRTVKHIDAALSEENTGKTYFFVANKYWRYDEYKRSMDPGYPKMIAHDFPGIGHKVDAVFMKDGFFYFFHGTRQYKFDPKTKRILTLQKANSWFNCRKN

SEQ ID NO: 2703 - protein, 450 aa, Artificial Sequence
  MMP-1 variant S208R
FPATLETQEQDVDLVQKYLEKYYNLKNDGRQVEKRRNSGPVVEKLKQMQEFFGLKVTGKPDAETLKVMKQPRCGVPDVAQFVLTEGNPRWEQTHLTYRIENYTPDLPRADVDHAIEKAFQLWSNVTPLTFTKVSEGQADIMISFVRGDHRDNSPFDGPGGNLAHAFQPGPGIGGDAHFDEDERWTNNFREYNLHRVAAHELGHSLGLRHSTDIGALMYPSYTFSGDVQLAQDDIDGIQAIYGRSQNPVQPIGPQTPKACDSKLTFDAITTIRGEVMFFKDRFYMRTNPFYPEVELNFISVFWPQLPNGLEAAYEFADRDEVRFFKGNKYWAVQGQNVLHGYPKDIYSSFGFPRTVKHIDAALSEENTGKTYFFVANKYWRYDEYKRSMDPGYPKMIAHDFPGIGHKVDAVFMKDGFFYFFHGTRQYKFDPKTKRILTLQKANSWFNCRKN

SEQ ID NO: 2704 - protein, 450 aa, Artificial Sequence
  MMP-1 variant S208C
FPATLETQEQDVDLVQKYLEKYYNLKNDGRQVEKRRNSGPVVEKLKQMQEFFGLKVTGKPDAETLKVMKQPRCGVPDVAQFVLTEGNPRWEQTHLTYRIENYTPDLPRADVDHAIEKAFQLWSNVTPLTFTKVSEGQADIMISFVRGDHRDNSPFDGPGGNLAHAFQPGPGIGGDAHFDEDERWTNNFREYNLHRVAAHELGHSLGLCHSTDIGALMYPSYTFSGDVQLAQDDIDGIQAIYGRSQNPVQPIGPQTPKACDSKLTFDAITTIRGEVMFFKDRFYMRTNPFYPEVELNFISVFWPQLPNGLEAAYEFADRDEVRFFKGNKYWAVQGQNVLHGYPKDIYSSFGFPRTVKHIDAALSEENTGKTYFFVANKYWRYDEYKRSMDPGYPKMIAHDFPGIGHKVDAVFMKDGFFYFFHGTRQYKFDPKTKRILTLQKANSWFNCRKN

SEQ ID NO: 2705 - protein, 450 aa, Artificial Sequence
  MMP-1 variant S208N
FPATLETQEQDVDLVQKYLEKYYNLKNDGRQVEKRRNSGPVVEKLKQMQEFFGLKVTGKPDAETLKVMKQPRCGVPDVAQFVLTEGNPRWEQTHLTYRIENYTPDLPRADVDHAIEKAFQLWSNVTPLTFTKVSEGQADIMISFVRGDHRDNSPFDGPGGNLAHAFQPGPGIGGDAHFDEDERWTNNFREYNLHRVAAHELGHSLGLNHSTDIGALMYPSYTFSGDVQLAQDDIDGIQAIYGRSQNPVQPIGPQTPKACDSKLTFDAITTIRGEVMFFKDRFYMRTNPFYPEVELNFISVFWPQLPNGLEAAYEFADRDEVRFFKGNKYWAVQGQNVLHGYPKDIYSSFGFPRTVKHIDAALSEENTGKTYFFVANKYWRYDEYKRSMDPGYPKMIAHDFPGIGHKVDAVFMKDGFFYFFHGTRQYKFDPKTKRILTLQKANSWFNCRKN

SEQ ID NO: 2706 - protein, 450 aa, Artificial Sequence
  MMP-1 variant S208Q
FPATLETQEQDVDLVQKYLEKYYNLKNDGRQVEKRRNSGPVVEKLKQMQEFFGLKVTGKPDAETLKVMKQPRCGVPDVAQFVLTEGNPRWEQTHLTYRIENYTPDLPRADVDHAIEKAFQLWSNVTPLTFTKVSEGQADIMISFVRGDHRDNSPFDGPGGNLAHAFQPGPGIGGDAHFDEDERWTNNFREYNLHRVAAHELGHSLGLQHSTDIGALMYPSYTFSGDVQLAQDDIDGIQAIYGRSQNPVQPIGPQTPKACDSKLTFDAITTIRGEVMFFKDRFYMRTNPFYPEVELNFISVFWPQLPNGLEAAYEFADRDEVRFFKGNKYWAVQGQNVLHGYPKDIYSSFGFPRTVKHIDAALSEENTGKTYFFVANKYWRYDEYKRSMDPGYPKMIAHDFPGIGHKVDAVFMKDGFFYFFHGTRQYKFDPKTKRILTLQKANSWFNCRKN

SEQ ID NO: 2707 - protein, 450 aa, Artificial Sequence
  MMP-1 variant S208T
FPATLETQEQDVDLVQKYLEKYYNLKNDGRQVEKRRNSGPVVEKLKQMQEFFGLKVTGKPDAETLKVMKQPRCGVPDVAQFVLTEGNPRWEQTHLTYRIENYTPDLPRADVDHAIEKAFQLWSNVTPLTFTKVSEGQADIMISFVRGDHRDNSPFDGPGGNLAHAFQPGPGIGGDAHFDEDERWTNNFREYNLHRVAAHELGHSLGLTHSTDIGALMYPSYTFSGDVQLAQDDIDGIQAIYGRSQNPVQPIGPQTPKACDSKLTFDAITTIRGEVMFFKDRFYMRTNPFYPEVELNFISVFWPQLPNGLEAAYEFADRDEVRFFKGNKYWAVQGQNVLHGYPKDIYSSFGFPRTVKHIDAALSEENTGKTYFFVANKYWRYDEYKRSMDPGYPKMIAHDFPGIGHKVDAVFMKDGFFYFFHGTRQYKFDPKTKRILTLQKANSWFNCRKN

SEQ ID NO: 2708 - protein, 450 aa, Artificial Sequence
  MMP-1 variant S208Y
FPATLETQEQDVDLVQKYLEKYYNLKNDGRQVEKRRNSGPVVEKLKQMQEFFGLKVTGKPDAETLKVMKQPRCGVPDVAQFVLTEGNPRWEQTHLTYRIENYTPDLPRADVDHAIEKAFQLWSNVTPLTFTKVSEGQADIMISFVRGDHRDNSPFDGPGGNLAHAFQPGPGIGGDAHFDEDERWTNNFREYNLHRVAAHELGHSLGLYHSTDIGALMYPSYTFSGDVQLAQDDIDGIQAIYGRSQNPVQPIGPQTPKACDSKLTFDAITTIRGEVMFFKDRFYMRTNPFYPEVELNFISVFWPQLPNGLEAAYEFADRDEVRFFKGNKYWAVQGQNVLHGYPKDIYSSFGFPRTVKHIDAALSEENTGKTYFFVANKYWRYDEYKRSMDPGYPKMIAHDFPGIGHKVDAVFMKDGFFYFFHGTRQYKFDPKTKRILTLQKANSWFNCRKN

SEQ ID NO: 2709 - protein, 450 aa, Artificial Sequence
  MMP-1 variant S208G
FPATLETQEQDVDLVQKYLEKYYNLKNDGRQVEKRRNSGPVVEKLKQMQEFFGLKVTGKPDAETLKVMKQPRCGVPDVAQFVLTEGNPRWEQTHLTYRIENYTPDLPRADVDHAIEKAFQLWSNVTPLTFTKVSEGQADIMISFVRGDHRDNSPFDGPGGNLAHAFQPGPGIGGDAHFDEDERWTNNFREYNLHRVAAHELGHSLGLGHSTDIGALMYPSYTFSGDVQLAQDDIDGIQAIYGRSQNPVQPIGPQTPKACDSKLTFDAITTIRGEVMFFKDRFYMRTNPFYPEVELNFISVFWPQLPNGLEAAYEFADRDEVRFFKGNKYWAVQGQNVLHGYPKDIYSSFGFPRTVKHIDAALSEENTGKTYFFVANKYWRYDEYKRSMDPGYPKMIAHDFPGIGHKVDAVFMKDGFFYFFHGTRQYKFDPKTKRILTLQKANSWFNCRKN

SEQ ID NO: 2710 - protein, 450 aa, Artificial Sequence
  MMP-1 variant S208F
FPATLETQEQDVDLVQKYLEKYYNLKNDGRQVEKRRNSGPVVEKLKQMQEFFGLKVTGKPDAETLKVMKQPRCGVPDVAQFVLTEGNPRWEQTHLTYRIENYTPDLPRADVDHAIEKAFQLWSNVTPLTFTKVSEGQADIMISFVRGDHRDNSPFDGPGGNLAHAFQPGPGIGGDAHFDEDERWTNNFREYNLHRVAAHELGHSLGLFHSTDIGALMYPSYTFSGDVQLAQDDIDGIQAIYGRSQNPVQPIGPQTPKACDSKLTFDAITTIRGEVMFFKDRFYMRTNPFYPEVELNFISVFWPQLPNGLEAAYEFADRDEVRFFKGNKYWAVQGQNVLHGYPKDIYSSFGFPRTVKHIDAALSEENTGKTYFFVANKYWRYDEYKRSMDPGYPKMIAHDFPGIGHKVDAVFMKDGFFYFFHGTRQYKFDPKTKRILTLQKANSWFNCRKN

SEQ ID NO: 2711 - protein, 450 aa, Artificial Sequence
  MMP-1 variant S208M
FPATLETQEQDVDLVQKYLEKYYNLKNDGRQVEKRRNSGPVVEKLKQMQEFFGLKVTGKPDAETLKVMKQPRCGVPDVAQFVLTEGNPRWEQTHLTYRIENYTPDLPRADVDHAIEKAFQLWSNVTPLTFTKVSEGQADIMISFVRGDHRDNSPFDGPGGNLAHAFQPGPGIGGDAHFDEDERWTNNFREYNLHRVAAHELGHSLGLMHSTDIGALMYPSYTFSGDVQLAQDDIDGIQAIYGRSQNPVQPIGPQTPKACDSKLTFDAITTIRGEVMFFKDRFYMRTNPFYPEVELNFISVFWPQLPNGLEAAYEFADRDEVRFFKGNKYWAVQGQNVLHGYPKDIYSSFGFPRTVKHIDAALSEENTGKTYFFVANKYWRYDEYKRSMDPGYPKMIAHDFPGIGHKVDAVFMKDGFFYFFHGTRQYKFDPKTKRILTLQKANSWFNCRKN

SEQ ID NO: 2712 - protein, 450 aa, Artificial Sequence
  MMP-1 variant S208W
FPATLETQEQDVDLVQKYLEKYYNLKNDGRQVEKRRNSGPVVEKLKQMQEFFGLKVTGKPDAETLKVMKQPRCGVPDVAQFVLTEGNPRWEQTHLTYRIENYTPDLPRADVDHAIEKAFQLWSNVTPLTFTKVSEGQADIMISFVRGDHRDNSPFDGPGGNLAHAFQPGPGIGGDAHFDEDERWTNNFREYNLHRVAAHELGHSLGLWHSTDIGALMYPSYTFSGDVQLAQDDIDGIQAIYGRSQNPVQPIGPQTPKACDSKLTFDAITTIRGEVMFFKDRFYMRTNPFYPEVELNFISVFWPQLPNGLEAAYEFADRDEVRFFKGNKYWAVQGQNVLHGYPKDIYSSFGFPRTVKHIDAALSEENTGKTYFFVANKYWRYDEYKRSMDPGYPKMIAHDFPGIGHKVDAVFMKDGFFYFFHGTRQYKFDPKTKRILTLQKANSWFNCRKN

SEQ ID NO: 2713 - protein, 450 aa, Artificial Sequence
  MMP-1 variant S208I
FPATLETQEQDVDLVQKYLEKYYNLKNDGRQVEKRRNSGPVVEKLKQMQEFFGLKVTGKPDAETLKVMKQPRCGVPDVAQFVLTEGNPRWEQTHLTYRIENYTPDLPRADVDHAIEKAFQLWSNVTPLTFTKVSEGQADIMISFVRGDHRDNSPFDGPGGNLAHAFQPGPGIGGDAHFDEDERWTNNFREYNLHRVAAHELGHSLGLIHSTDIGALMYPSYTFSGDVQLAQDDIDGIQAIYGRSQNPVQPIGPQTPKACDSKLTFDAITTIRGEVMFFKDRFYMRTNPFYPEVELNFISVFWPQLPNGLEAAYEFADRDEVRFFKGNKYWAVQGQNVLHGYPKDIYSSFGFPRTVKHIDAALSEENTGKTYFFVANKYWRYDEYKRSMDPGYPKMIAHDFPGIGHKVDAVFMKDGFFYFFHGTRQYKFDPKTKRILTLQKANSWFNCRKN

SEQ ID NO: 2714 - protein, 450 aa, Artificial Sequence
  MMP-1 variant S208V
FPATLETQEQDVDLVQKYLEKYYNLKNDGRQVEKRRNSGPVVEKLKQMQEFFGLKVTGKPDAETLKVMKQPRCGVPDVAQFVLTEGNPRWEQTHLTYRIENYTPDLPRADVDHAIEKAFQLWSNVTPLTFTKVSEGQADIMISFVRGDHRDNSPFDGPGGNLAHAFQPGPGIGGDAHFDEDERWTNNFREYNLHRVAAHELGHSLGLVHSTDIGALMYPSYTFSGDVQLAQDDIDGIQAIYGRSQNPVQPIGPQTPKACDSKLTFDAITTIRGEVMFFKDRFYMRTNPFYPEVELNFISVFWPQLPNGLEAAYEFADRDEVRFFKGNKYWAVQGQNVLHGYPKDIYSSFGFPRTVKHIDAALSEENTGKTYFFVANKYWRYDEYKRSMDPGYPKMIAHDFPGIGHKVDAVFMKDGFFYFFHGTRQYKFDPKTKRILTLQKANSWFNCRKN

SEQ ID NO: 2715 - protein, 450 aa, Artificial Sequence
  MMP-1 variant S208L
FPATLETQEQDVDLVQKYLEKYYNLKNDGRQVEKRRNSGPVVEKLKQMQEFFGLKVTGKPDAETLKVMKQPRCGVPDVAQFVLTEGNPRWEQTHLTYRIENYTPDLPRADVDHAIEKAFQLWSNVTPLTFTKVSEGQADIMISFVRGDHRDNSPFDGPGGNLAHAFQPGPGIGGDAHFDEDERWTNNFREYNLHRVAAHELGHSLGLLHSTDIGALMYPSYTFSGDVQLAQDDIDGIQAIYGRSQNPVQPIGPQTPKACDSKLTFDAITTIRGEVMFFKDRFYMRTNPFYPEVELNFISVFWPQLPNGLEAAYEFADRDEVRFFKGNKYWAVQGQNVLHGYPKDIYSSFGFPRTVKHIDAALSEENTGKTYFFVANKYWRYDEYKRSMDPGYPKMIAHDFPGIGHKVDAVFMKDGFFYFFHGTRQYKFDPKTKRILTLQKANSWFNCRKN

SEQ ID NO: 2716 - protein, 450 aa, Artificial Sequence
  MMP-1 variant S208A
FPATLETQEQDVDLVQKYLEKYYNLKNDGRQVEKRRNSGPVVEKLKQMQEFFGLKVTGKPDAETLKVMKQPRCGVPDVAQFVLTEGNPRWEQTHLTYRIENYTPDLPRADVDHAIEKAFQLWSNVTPLTFTKVSEGQADIMISFVRGDHRDNSPFDGPGGNLAHAFQPGPGIGGDAHFDEDERWTNNFREYNLHRVAAHELGHSLGLAHSTDIGALMYPSYTFSGDVQLAQDDIDGIQAIYGRSQNPVQPIGPQTPKACDSKLTFDAITTIRGEVMFFKDRFYMRTNPFYPEVELNFISVFWPQLPNGLEAAYEFADRDEVRFFKGNKYWAVQGQNVLHGYPKDIYSSFGFPRTVKHIDAALSEENTGKTYFFVANKYWRYDEYKRSMDPGYPKMIAHDFPGIGHKVDAVFMKDGFFYFFHGTRQYKFDPKTKRILTLQKANSWFNCRKN

SEQ ID NO: 2717 - protein, 450 aa, Artificial Sequence
  MMP-1 variant S208P
FPATLETQEQDVDLVQKYLEKYYNLKNDGRQVEKRRNSGPVVEKLKQMQEFFGLKVTGKPDAETLKVMKQPRCGVPDVAQFVLTEGNPRWEQTHLTYRIENYTPDLPRADVDHAIEKAFQLWSNVTPLTFTKVSEGQADIMISFVRGDHRDNSPFDGPGGNLAHAFQPGPGIGGDAHFDEDERWTNNFREYNLHRVAAHELGHSLGLPHSTDIGALMYPSYTFSGDVQLAQDDIDGIQAIYGRSQNPVQPIGPQTPKACDSKLTFDAITTIRGEVMFFKDRFYMRTNPFYPEVELNFISVFWPQLPNGLEAAYEFADRDEVRFFKGNKYWAVQGQNVLHGYPKDIYSSFGFPRTVKHIDAALSEENTGKTYFFVANKYWRYDEYKRSMDPGYPKMIAHDFPGIGHKVDAVFMKDGFFYFFHGTRQYKFDPKTKRILTLQKANSWFNCRKN

SEQ ID NO: 2718 - protein, 450 aa, Artificial Sequence
  MMP-1 variant H209D
FPATLETQEQDVDLVQKYLEKYYNLKNDGRQVEKRRNSGPVVEKLKQMQEFFGLKVTGKPDAETLKVMKQPRCGVPDVAQFVLTEGNPRWEQTHLTYRIENYTPDLPRADVDHAIEKAFQLWSNVTPLTFTKVSEGQADIMISFVRGDHRDNSPFDGPGGNLAHAFQPGPGIGGDAHFDEDERWTNNFREYNLHRVAAHELGHSLGLSDSTDIGALMYPSYTFSGDVQLAQDDIDGIQAIYGRSQNPVQPIGPQTPKACDSKLTFDAITTIRGEVMFFKDRFYMRTNPFYPEVELNFISVFWPQLPNGLEAAYEFADRDEVRFFKGNKYWAVQGQNVLHGYPKDIYSSFGFPRTVKHIDAALSEENTGKTYFFVANKYWRYDEYKRSMDPGYPKMIAHDFPGIGHKVDAVFMKDGFFYFFHGTRQYKFDPKTKRILTLQKANSWFNCRKN

SEQ ID NO: 2719 - protein, 450 aa, Artificial Sequence
  MMP-1 variant H209E
FPATLETQEQDVDLVQKYLEKYYNLKNDGRQVEKRRNSGPVVEKLKQMQEFFGLKVTGKPDAETLKVMKQPRCGVPDVAQFVLTEGNPRWEQTHLTYRIENYTPDLPRADVDHAIEKAFQLWSNVTPLTFTKVSEGQADIMISFVRGDHRDNSPFDGPGGNLAHAFQPGPGIGGDAHFDEDERWTNNFREYNLHRVAAHELGHSLGLSESTDIGALMYPSYTFSGDVQLAQDDIDGIQAIYGRSQNPVQPIGPQTPKACDSKLTFDAITTIRGEVMFFKDRFYMRTNPFYPEVELNFISVFWPQLPNGLEAAYEFADRDEVRFFKGNKYWAVQGQNVLHGYPKDIYSSFGFPRTVKHIDAALSEENTGKTYFFVANKYWRYDEYKRSMDPGYPKMIAHDFPGIGHKVDAVFMKDGFFYFFHGTRQYKFDPKTKRILTLQKANSWFNCRKN

SEQ ID NO: 2720 - protein, 450 aa, Artificial Sequence
  MMP-1 variant H209K
FPATLETQEQDVDLVQKYLEKYYNLKNDGRQVEKRRNSGPVVEKLKQMQEFFGLKVTGKPDAETLKVMKQPRCGVPDVAQFVLTEGNPRWEQTHLTYRIENYTPDLPRADVDHAIEKAFQLWSNVTPLTFTKVSEGQADIMISFVRGDHRDNSPFDGPGGNLAHAFQPGPGIGGDAHFDEDERWTNNFREYNLHRVAAHELGHSLGLSKSTDIGALMYPSYTFSGDVQLAQDDIDGIQAIYGRSQNPVQPIGPQTPKACDSKLTFDAITTIRGEVMFFKDRFYMRTNPFYPEVELNFISVFWPQLPNGLEAAYEFADRDEVRFFKGNKYWAVQGQNVLHGYPKDIYSSFGFPRTVKHIDAALSEENTGKTYFFVANKYWRYDEYKRSMDPGYPKMIAHDFPGIGHKVDAVFMKDGFFYFFHGTRQYKFDPKTKRILTLQKANSWFNCRKN

SEQ ID NO: 2721 - protein, 450 aa, Artificial Sequence
  MMP-1 variant H209R
FPATLETQEQDVDLVQKYLEKYYNLKNDGRQVEKRRNSGPVVEKLKQMQEFFGLKVTGKPDAETLKVMKQPRCGVPDVAQFVLTEGNPRWEQTHLTYRIENYTPDLPRADVDHAIEKAFQLWSNVTPLTFTKVSEGQADIMISFVRGDHRDNSPFDGPGGNLAHAFQPGPGIGGDAHFDEDERWTNNFREYNLHRVAAHELGHSLGLSRSTDIGALMYPSYTFSGDVQLAQDDIDGIQAIYGRSQNPVQPIGPQTPKACDSKLTFDAITTIRGEVMFFKDRFYMRTNPFYPEVELNFISVFWPQLPNGLEAAYEFADRDEVRFFKGNKYWAVQGQNVLHGYPKDIYSSFGFPRTVKHIDAALSEENTGKTYFFVANKYWRYDEYKRSMDPGYPKMIAHDFPGIGHKVDAVFMKDGFFYFFHGTRQYKFDPKTKRILTLQKANSWFNCRKN

SEQ ID NO: 2722 - protein, 450 aa, Artificial Sequence
  MMP-1 variant H209C
FPATLETQEQDVDLVQKYLEKYYNLKNDGRQVEKRRNSGPVVEKLKQMQEFFGLKVTGKPDAETLKVMKQPRCGVPDVAQFVLTEGNPRWEQTHLTYRIENYTPDLPRADVDHAIEKAFQLWSNVTPLTFTKVSEGQADIMISFVRGDHRDNSPFDGPGGNLAHAFQPGPGIGGDAHFDEDERWTNNFREYNLHRVAAHELGHSLGLSCSTDIGALMYPSYTFSGDVQLAQDDIDGIQAIYGRSQNPVQPIGPQTPKACDSKLTFDAITTIRGEVMFFKDRFYMRTNPFYPEVELNFISVFWPQLPNGLEAAYEFADRDEVRFFKGNKYWAVQGQNVLHGYPKDIYSSFGFPRTVKHIDAALSEENTGKTYFFVANKYWRYDEYKRSMDPGYPKMIAHDFPGIGHKVDAVFMKDGFFYFFHGTRQYKFDPKTKRILTLQKANSWFNCRKN

SEQ ID NO: 2723 - protein, 450 aa, Artificial Sequence
  MMP-1 variant H209N
FPATLETQEQDVDLVQKYLEKYYNLKNDGRQVEKRRNSGPVVEKLKQMQEFFGLKVTGKPDAETLKVMKQPRCGVPDVAQFVLTEGNPRWEQTHLTYRIENYTPDLPRADVDHAIEKAFQLWSNVTPLTFTKVSEGQADIMISFVRGDHRDNSPFDGPGGNLAHAFQPGPGIGGDAHFDEDERWTNNFREYNLHRVAAHELGHSLGLSNSTDIGALMYPSYTFSGDVQLAQDDIDGIQAIYGRSQNPVQPIGPQTPKACDSKLTFDAITTIRGEVMFFKDRFYMRTNPFYPEVELNFISVFWPQLPNGLEAAYEFADRDEVRFFKGNKYWAVQGQNVLHGYPKDIYSSFGFPRTVKHIDAALSEENTGKTYFFVANKYWRYDEYKRSMDPGYPKMIAHDFPGIGHKVDAVFMKDGFFYFFHGTRQYKFDPKTKRILTLQKANSWFNCRKN

SEQ ID NO: 2724 - protein, 450 aa, Artificial Sequence
  MMP-1 variant H209Q
FPATLETQEQDVDLVQKYLEKYYNLKNDGRQVEKRRNSGPVVEKLKQMQEFFGLKVTGKPDAETLKVMKQPRCGVPDVAQFVLTEGNPRWEQTHLTYRIENYTPDLPRADVDHAIEKAFQLWSNVTPLTFTKVSEGQADIMISFVRGDHRDNSPFDGPGGNLAHAFQPGPGIGGDAHFDEDERWTNNFREYNLHRVAAHELGHSLGLSQSTDIGALMYPSYTFSGDVQLAQDDIDGIQAIYGRSQNPVQPIGPQTPKACDSKLTFDAITTIRGEVMFFKDRFYMRTNPFYPEVELNFISVFWPQLPNGLEAAYEFADRDEVRFFKGNKYWAVQGQNVLHGYPKDIYSSFGFPRTVKHIDAALSEENTGKTYFFVANKYWRYDEYKRSMDPGYPKMIAHDFPGIGHKVDAVFMKDGFFYFFHGTRQYKFDPKTKRILTLQKANSWFNCRKN

SEQ ID NO: 2725 - protein, 450 aa, Artificial Sequence
  MMP-1 variant H209T
FPATLETQEQDVDLVQKYLEKYYNLKNDGRQVEKRRNSGPVVEKLKQMQEFFGLKVTGKPDAETLKVMKQPRCGVPDVAQFVLTEGNPRWEQTHLTYRIENYTPDLPRADVDHAIEKAFQLWSNVTPLTFTKVSEGQADIMISFVRGDHRDNSPFDGPGGNLAHAFQPGPGIGGDAHFDEDERWTNNFREYNLHRVAAHELGHSLGLSTSTDIGALMYPSYTFSGDVQLAQDDIDGIQAIYGRSQNPVQPIGPQTPKACDSKLTFDAITTIRGEVMFFKDRFYMRTNPFYPEVELNFISVFWPQLPNGLEAAYEFADRDEVRFFKGNKYWAVQGQNVLHGYPKDIYSSFGFPRTVKHIDAALSEENTGKTYFFVANKYWRYDEYKRSMDPGYPKMIAHDFPGIGHKVDAVFMKDGFFYFFHGTRQYKFDPKTKRILTLQKANSWFNCRKN

SEQ ID NO: 2726 - protein, 450 aa, Artificial Sequence
  MMP-1 variant H209Y
FPATLETQEQDVDLVQKYLEKYYNLKNDGRQVEKRRNSGPVVEKLKQMQEFFGLKVTGKPDAETLKVMKQPRCGVPDVAQFVLTEGNPRWEQTHLTYRIENYTPDLPRADVDHAIEKAFQLWSNVTPLTFTKVSEGQADIMISFVRGDHRDNSPFDGPGGNLAHAFQPGPGIGGDAHFDEDERWTNNFREYNLHRVAAHELGHSLGLSYSTDIGALMYPSYTFSGDVQLAQDDIDGIQAIYGRSQNPVQPIGPQTPKACDSKLTFDAITTIRGEVMFFKDRFYMRTNPFYPEVELNFISVFWPQLPNGLEAAYEFADRDEVRFFKGNKYWAVQGQNVLHGYPKDIYSSFGFPRTVKHIDAALSEENTGKTYFFVANKYWRYDEYKRSMDPGYPKMIAHDFPGIGHKVDAVFMKDGFFYFFHGTRQYKFDPKTKRILTLQKANSWFNCRKN

SEQ ID NO: 2727 - protein, 450 aa, Artificial Sequence
  MMP-1 variant H209S
FPATLETQEQDVDLVQKYLEKYYNLKNDGRQVEKRRNSGPVVEKLKQMQEFFGLKVTGKPDAETLKVMKQPRCGVPDVAQFVLTEGNPRWEQTHLTYRIENYTPDLPRADVDHAIEKAFQLWSNVTPLTFTKVSEGQADIMISFVRGDHRDNSPFDGPGGNLAHAFQPGPGIGGDAHFDEDERWTNNFREYNLHRVAAHELGHSLGLSSSTDIGALMYPSYTFSGDVQLAQDDIDGIQAIYGRSQNPVQPIGPQTPKACDSKLTFDAITTIRGEVMFFKDRFYMRTNPFYPEVELNFISVFWPQLPNGLEAAYEFADRDEVRFFKGNKYWAVQGQNVLHGYPKDIYSSFGFPRTVKHIDAALSEENTGKTYFFVANKYWRYDEYKRSMDPGYPKMIAHDFPGIGHKVDAVFMKDGFFYFFHGTRQYKFDPKTKRILTLQKANSWFNCRKN

SEQ ID NO: 2728 - protein, 450 aa, Artificial Sequence
  MMP-1 variant H209G
FPATLETQEQDVDLVQKYLEKYYNLKNDGRQVEKRRNSGPVVEKLKQMQEFFGLKVTGKPDAETLKVMKQPRCGVPDVAQFVLTEGNPRWEQTHLTYRIENYTPDLPRADVDHAIEKAFQLWSNVTPLTFTKVSEGQADIMISFVRGDHRDNSPFDGPGGNLAHAFQPGPGIGGDAHFDEDERWTNNFREYNLHRVAAHELGHSLGLSGSTDIGALMYPSYTFSGDVQLAQDDIDGIQAIYGRSQNPVQPIGPQTPKACDSKLTFDAITTIRGEVMFFKDRFYMRTNPFYPEVELNFISVFWPQLPNGLEAAYEFADRDEVRFFKGNKYWAVQGQNVLHGYPKDIYSSFGFPRTVKHIDAALSEENTGKTYFFVANKYWRYDEYKRSMDPGYPKMIAHDFPGIGHKVDAVFMKDGFFYFFHGTRQYKFDPKTKRILTLQKANSWFNCRKN

SEQ ID NO: 2729 - protein, 450 aa, Artificial Sequence
  MMP-1 variant H209F
FPATLETQEQDVDLVQKYLEKYYNLKNDGRQVEKRRNSGPVVEKLKQMQEFFGLKVTGKPDAETLKVMKQPRCGVPDVAQFVLTEGNPRWEQTHLTYRIENYTPDLPRADVDHAIEKAFQLWSNVTPLTFTKVSEGQADIMISFVRGDHRDNSPFDGPGGNLAHAFQPGPGIGGDAHFDEDERWTNNFREYNLHRVAAHELGHSLGLSFSTDIGALMYPSYTFSGDVQLAQDDIDGIQAIYGRSQNPVQPIGPQTPKACDSKLTFDAITTIRGEVMFFKDRFYMRTNPFYPEVELNFISVFWPQLPNGLEAAYEFADRDEVRFFKGNKYWAVQGQNVLHGYPKDIYSSFGFPRTVKHIDAALSEENTGKTYFFVANKYWRYDEYKRSMDPGYPKMIAHDFPGIGHKVDAVFMKDGFFYFFHGTRQYKFDPKTKRILTLQKANSWFNCRKN

SEQ ID NO: 2730 - protein, 450 aa, Artificial Sequence
  MMP-1 variant H209M
FPATLETQEQDVDLVQKYLEKYYNLKNDGRQVEKRRNSGPVVEKLKQMQEFFGLKVTGKPDAETLKVMKQPRCGVPDVAQFVLTEGNPRWEQTHLTYRIENYTPDLPRADVDHAIEKAFQLWSNVTPLTFTKVSEGQADIMISFVRGDHRDNSPFDGPGGNLAHAFQPGPGIGGDAHFDEDERWTNNFREYNLHRVAAHELGHSLGLSMSTDIGALMYPSYTFSGDVQLAQDDIDGIQAIYGRSQNPVQPIGPQTPKACDSKLTFDAITTIRGEVMFFKDRFYMRTNPFYPEVELNFISVFWPQLPNGLEAAYEFADRDEVRFFKGNKYWAVQGQNVLHGYPKDIYSSFGFPRTVKHIDAALSEENTGKTYFFVANKYWRYDEYKRSMDPGYPKMIAHDFPGIGHKVDAVFMKDGFFYFFHGTRQYKFDPKTKRILTLQKANSWFNCRKN

SEQ ID NO: 2731 - protein, 450 aa, Artificial Sequence
  MMP-1 variant H209W
FPATLETQEQDVDLVQKYLEKYYNLKNDGRQVEKRRNSGPVVEKLKQMQEFFGLKVTGKPDAETLKVMKQPRCGVPDVAQFVLTEGNPRWEQTHLTYRIENYTPDLPRADVDHAIEKAFQLWSNVTPLTFTKVSEGQADIMISFVRGDHRDNSPFDGPGGNLAHAFQPGPGIGGDAHFDEDERWTNNFREYNLHRVAAHELGHSLGLSWSTDIGALMYPSYTFSGDVQLAQDDIDGIQAIYGRSQNPVQPIGPQTPKACDSKLTFDAITTIRGEVMFFKDRFYMRTNPFYPEVELNFISVFWPQLPNGLEAAYEFADRDEVRFFKGNKYWAVQGQNVLHGYPKDIYSSFGFPRTVKHIDAALSEENTGKTYFFVANKYWRYDEYKRSMDPGYPKMIAHDFPGIGHKVDAVFMKDGFFYFFHGTRQYKFDPKTKRILTLQKANSWFNCRKN

SEQ ID NO: 2732 - protein, 450 aa, Artificial Sequence
  MMP-1 variant H209I
FPATLETQEQDVDLVQKYLEKYYNLKNDGRQVEKRRNSGPVVEKLKQMQEFFGLKVTGKPDAETLKVMKQPRCGVPDVAQFVLTEGNPRWEQTHLTYRIENYTPDLPRADVDHAIEKAFQLWSNVTPLTFTKVSEGQADIMISFVRGDHRDNSPFDGPGGNLAHAFQPGPGIGGDAHFDEDERWTNNFREYNLHRVAAHELGHSLGLSISTDIGALMYPSYTFSGDVQLAQDDIDGIQAIYGRSQNPVQPIGPQTPKACDSKLTFDAITTIRGEVMFFKDRFYMRTNPFYPEVELNFISVFWPQLPNGLEAAYEFADRDEVRFFKGNKYWAVQGQNVLHGYPKDIYSSFGFPRTVKHIDAALSEENTGKTYFFVANKYWRYDEYKRSMDPGYPKMIAHDFPGIGHKVDAVFMKDGFFYFFHGTRQYKFDPKTKRILTLQKANSWFNCRKN

SEQ ID NO: 2733 - protein, 450 aa, Artificial Sequence
  MMP-1 variant H209V
FPATLETQEQDVDLVQKYLEKYYNLKNDGRQVEKRRNSGPVVEKLKQMQEFFGLKVTGKPDAETLKVMKQPRCGVPDVAQFVLTEGNPRWEQTHLTYRIENYTPDLPRADVDHAIEKAFQLWSNVTPLTFTKVSEGQADIMISFVRGDHRDNSPFDGPGGNLAHAFQPGPGIGGDAHFDEDERWTNNFREYNLHRVAAHELGHSLGLSVSTDIGALMYPSYTFSGDVQLAQDDIDGIQAIYGRSQNPVQPIGPQTPKACDSKLTFDAITTIRGEVMFFKDRFYMRTNPFYPEVELNFISVFWPQLPNGLEAAYEFADRDEVRFFKGNKYWAVQGQNVLHGYPKDIYSSFGFPRTVKHIDAALSEENTGKTYFFVANKYWRYDEYKRSMDPGYPKMIAHDFPGIGHKVDAVFMKDGFFYFFHGTRQYKFDPKTKRILTLQKANSWFNCRKN

SEQ ID NO: 2734 - protein, 450 aa, Artificial Sequence
  MMP-1 variant H209L
FPATLETQEQDVDLVQKYLEKYYNLKNDGRQVEKRRNSGPVVEKLKQMQEFFGLKVTGKPDAETLKVMKQPRCGVPDVAQFVLTEGNPRWEQTHLTYRIENYTPDLPRADVDHAIEKAFQLWSNVTPLTFTKVSEGQADIMISFVRGDHRDNSPFDGPGGNLAHAFQPGPGIGGDAHFDEDERWTNNFREYNLHRVAAHELGHSLGLSLSTDIGALMYPSYTFSGDVQLAQDDIDGIQAIYGRSQNPVQPIGPQTPKACDSKLTFDAITTIRGEVMFFKDRFYMRTNPFYPEVELNFISVFWPQLPNGLEAAYEFADRDEVRFFKGNKYWAVQGQNVLHGYPKDIYSSFGFPRTVKHIDAALSEENTGKTYFFVANKYWRYDEYKRSMDPGYPKMIAHDFPGIGHKVDAVFMKDGFFYFFHGTRQYKFDPKTKRILTLQKANSWFNCRKN

SEQ ID NO: 2735 - protein, 450 aa, Artificial Sequence
  MMP-1 variant H209A
FPATLETQEQDVDLVQKYLEKYYNLKNDGRQVEKRRNSGPVVEKLKQMQEFFGLKVTGKPDAETLKVMKQPRCGVPDVAQFVLTEGNPRWEQTHLTYRIENYTPDLPRADVDHAIEKAFQLWSNVTPLTFTKVSEGQADIMISFVRGDHRDNSPFDGPGGNLAHAFQPGPGIGGDAHFDEDERWTNNFREYNLHRVAAHELGHSLGLSASTDIGALMYPSYTFSGDVQLAQDDIDGIQAIYGRSQNPVQPIGPQTPKACDSKLTFDAITTIRGEVMFFKDRFYMRTNPFYPEVELNFISVFWPQLPNGLEAAYEFADRDEVRFFKGNKYWAVQGQNVLHGYPKDIYSSFGFPRTVKHIDAALSEENTGKTYFFVANKYWRYDEYKRSMDPGYPKMIAHDFPGIGHKVDAVFMKDGFFYFFHGTRQYKFDPKTKRILTLQKANSWFNCRKN

SEQ ID NO: 2736 - protein, 450 aa, Artificial Sequence
  MMP-1 variant H209P
FPATLETQEQDVDLVQKYLEKYYNLKNDGRQVEKRRNSGPVVEKLKQMQEFFGLKVTGKPDAETLKVMKQPRCGVPDVAQFVLTEGNPRWEQTHLTYRIENYTPDLPRADVDHAIEKAFQLWSNVTPLTFTKVSEGQADIMISFVRGDHRDNSPFDGPGGNLAHAFQPGPGIGGDAHFDEDERWTNNFREYNLHRVAAHELGHSLGLSPSTDIGALMYPSYTFSGDVQLAQDDIDGIQAIYGRSQNPVQPIGPQTPKACDSKLTFDAITTIRGEVMFFKDRFYMRTNPFYPEVELNFISVFWPQLPNGLEAAYEFADRDEVRFFKGNKYWAVQGQNVLHGYPKDIYSSFGFPRTVKHIDAALSEENTGKTYFFVANKYWRYDEYKRSMDPGYPKMIAHDFPGIGHKVDAVFMKDGFFYFFHGTRQYKFDPKTKRILTLQKANSWFNCRKN

SEQ ID NO: 2737 - protein, 450 aa, Artificial Sequence
  MMP-1 variant T211D
FPATLETQEQDVDLVQKYLEKYYNLKNDGRQVEKRRNSGPVVEKLKQMQEFFGLKVTGKPDAETLKVMKQPRCGVPDVAQFVLTEGNPRWEQTHLTYRIENYTPDLPRADVDHAIEKAFQLWSNVTPLTFTKVSEGQADIMISFVRGDHRDNSPFDGPGGNLAHAFQPGPGIGGDAHFDEDERWTNNFREYNLHRVAAHELGHSLGLSHSDDIGALMYPSYTFSGDVQLAQDDIDGIQAIYGRSQNPVQPIGPQTPKACDSKLTFDAITTIRGEVMFFKDRFYMRTNPFYPEVELNFISVFWPQLPNGLEAAYEFADRDEVRFFKGNKYWAVQGQNVLHGYPKDIYSSFGFPRTVKHIDAALSEENTGKTYFFVANKYWRYDEYKRSMDPGYPKMIAHDFPGIGHKVDAVFMKDGFFYFFHGTRQYKFDPKTKRILTLQKANSWFNCRKN

SEQ ID NO: 2738 - protein, 450 aa, Artificial Sequence
  MMP-1 variant T211E
FPATLETQEQDVDLVQKYLEKYYNLKNDGRQVEKRRNSGPVVEKLKQMQEFFGLKVTGKPDAETLKVMKQPRCGVPDVAQFVLTEGNPRWEQTHLTYRIENYTPDLPRADVDHAIEKAFQLWSNVTPLTFTKVSEGQADIMISFVRGDHRDNSPFDGPGGNLAHAFQPGPGIGGDAHFDEDERWTNNFREYNLHRVAAHELGHSLGLSHSEDIGALMYPSYTFSGDVQLAQDDIDGIQAIYGRSQNPVQPIGPQTPKACDSKLTFDAITTIRGEVMFFKDRFYMRTNPFYPEVELNFISVFWPQLPNGLEAAYEFADRDEVRFFKGNKYWAVQGQNVLHGYPKDIYSSFGFPRTVKHIDAALSEENTGKTYFFVANKYWRYDEYKRSMDPGYPKMIAHDFPGIGHKVDAVFMKDGFFYFFHGTRQYKFDPKTKRILTLQKANSWFNCRKN

SEQ ID NO: 2739 - protein, 450 aa, Artificial Sequence
  MMP-1 variant T211H
FPATLETQEQDVDLVQKYLEKYYNLKNDGRQVEKRRNSGPVVEKLKQMQEFFGLKVTGKPDAETLKVMKQPRCGVPDVAQFVLTEGNPRWEQTHLTYRIENYTPDLPRADVDHAIEKAFQLWSNVTPLTFTKVSEGQADIMISFVRGDHRDNSPFDGPGGNLAHAFQPGPGIGGDAHFDEDERWTNNFREYNLHRVAAHELGHSLGLSHSHDIGALMYPSYTFSGDVQLAQDDIDGIQAIYGRSQNPVQPIGPQTPKACDSKLTFDAITTIRGEVMFFKDRFYMRTNPFYPEVELNFISVFWPQLPNGLEAAYEFADRDEVRFFKGNKYWAVQGQNVLHGYPKDIYSSFGFPRTVKHIDAALSEENTGKTYFFVANKYWRYDEYKRSMDPGYPKMIAHDFPGIGHKVDAVFMKDGFFYFFHGTRQYKFDPKTKRILTLQKANSWFNCRKN

SEQ ID NO: 2740 - protein, 450 aa, Artificial Sequence
  MMP-1 variant T211K
FPATLETQEQDVDLVQKYLEKYYNLKNDGRQVEKRRNSGPVVEKLKQMQEFFGLKVTGKPDAETLKVMKQPRCGVPDVAQFVLTEGNPRWEQTHLTYRIENYTPDLPRADVDHAIEKAFQLWSNVTPLTFTKVSEGQADIMISFVRGDHRDNSPFDGPGGNLAHAFQPGPGIGGDAHFDEDERWTNNFREYNLHRVAAHELGHSLGLSHSKDIGALMYPSYTFSGDVQLAQDDIDGIQAIYGRSQNPVQPIGPQTPKACDSKLTFDAITTIRGEVMFFKDRFYMRTNPFYPEVELNFISVFWPQLPNGLEAAYEFADRDEVRFFKGNKYWAVQGQNVLHGYPKDIYSSFGFPRTVKHIDAALSEENTGKTYFFVANKYWRYDEYKRSMDPGYPKMIAHDFPGIGHKVDAVFMKDGFFYFFHGTRQYKFDPKTKRILTLQKANSWFNCRKN

SEQ ID NO: 2741 - protein, 450 aa, Artificial Sequence
  MMP-1 variant T211R
FPATLETQEQDVDLVQKYLEKYYNLKNDGRQVEKRRNSGPVVEKLKQMQEFFGLKVTGKPDAETLKVMKQPRCGVPDVAQFVLTEGNPRWEQTHLTYRIENYTPDLPRADVDHAIEKAFQLWSNVTPLTFTKVSEGQADIMISFVRGDHRDNSPFDGPGGNLAHAFQPGPGIGGDAHFDEDERWTNNFREYNLHRVAAHELGHSLGLSHSRDIGALMYPSYTFSGDVQLAQDDIDGIQAIYGRSQNPVQPIGPQTPKACDSKLTFDAITTIRGEVMFFKDRFYMRTNPFYPEVELNFISVFWPQLPNGLEAAYEFADRDEVRFFKGNKYWAVQGQNVLHGYPKDIYSSFGFPRTVKHIDAALSEENTGKTYFFVANKYWRYDEYKRSMDPGYPKMIAHDFPGIGHKVDAVFMKDGFFYFFHGTRQYKFDPKTKRILTLQKANSWFNCRKN

SEQ ID NO: 2742 - protein, 450 aa, Artificial Sequence
  MMP-1 variant T211C
FPATLETQEQDVDLVQKYLEKYYNLKNDGRQVEKRRNSGPVVEKLKQMQEFFGLKVTGKPDAETLKVMKQPRCGVPDVAQFVLTEGNPRWEQTHLTYRIENYTPDLPRADVDHAIEKAFQLWSNVTPLTFTKVSEGQADIMISFVRGDHRDNSPFDGPGGNLAHAFQPGPGIGGDAHFDEDERWTNNFREYNLHRVAAHELGHSLGLSHSCDIGALMYPSYTFSGDVQLAQDDIDGIQAIYGRSQNPVQPIGPQTPKACDSKLTFDAITTIRGEVMFFKDRFYMRTNPFYPEVELNFISVFWPQLPNGLEAAYEFADRDEVRFFKGNKYWAVQGQNVLHGYPKDIYSSFGFPRTVKHIDAALSEENTGKTYFFVANKYWRYDEYKRSMDPGYPKMIAHDFPGIGHKVDAVFMKDGFFYFFHGTRQYKFDPKTKRILTLQKANSWFNCRKN

SEQ ID NO: 2743 - protein, 450 aa, Artificial Sequence
  MMP-1 variant T211N
FPATLETQEQDVDLVQKYLEKYYNLKNDGRQVEKRRNSGPVVEKLKQMQEFFGLKVTGKPDAETLKVMKQPRCGVPDVAQFVLTEGNPRWEQTHLTYRIENYTPDLPRADVDHAIEKAFQLWSNVTPLTFTKVSEGQADIMISFVRGDHRDNSPFDGPGGNLAHAFQPGPGIGGDAHFDEDERWTNNFREYNLHRVAAHELGHSLGLSHSNDIGALMYPSYTFSGDVQLAQDDIDGIQAIYGRSQNPVQPIGPQTPKACDSKLTFDAITTIRGEVMFFKDRFYMRTNPFYPEVELNFISVFWPQLPNGLEAAYEFADRDEVRFFKGNKYWAVQGQNVLHGYPKDIYSSFGFPRTVKHIDAALSEENTGKTYFFVANKYWRYDEYKRSMDPGYPKMIAHDFPGIGHKVDAVFMKDGFFYFFHGTRQYKFDPKTKRILTLQKANSWFNCRKN

SEQ ID NO: 2744 - protein, 450 aa, Artificial Sequence
  MMP-1 variant T211Q
FPATLETQEQDVDLVQKYLEKYYNLKNDGRQVEKRRNSGPVVEKLKQMQEFFGLKVTGKPDAETLKVMKQPRCGVPDVAQFVLTEGNPRWEQTHLTYRIENYTPDLPRADVDHAIEKAFQLWSNVTPLTFTKVSEGQADIMISFVRGDHRDNSPFDGPGGNLAHAFQPGPGIGGDAHFDEDERWTNNFREYNLHRVAAHELGHSLGLSHSQDIGALMYPSYTFSGDVQLAQDDIDGIQAIYGRSQNPVQPIGPQTPKACDSKLTFDAITTIRGEVMFFKDRFYMRTNPFYPEVELNFISVFWPQLPNGLEAAYEFADRDEVRFFKGNKYWAVQGQNVLHGYPKDIYSSFGFPRTVKHIDAALSEENTGKTYFFVANKYWRYDEYKRSMDPGYPKMIAHDFPGIGHKVDAVFMKDGFFYFFHGTRQYKFDPKTKRILTLQKANSWFNCRKN

SEQ ID NO: 2745 - protein, 450 aa, Artificial Sequence
  MMP-1 variant T211Y
FPATLETQEQDVDLVQKYLEKYYNLKNDGRQVEKRRNSGPVVEKLKQMQEFFGLKVTGKPDAETLKVMKQPRCGVPDVAQFVLTEGNPRWEQTHLTYRIENYTPDLPRADVDHAIEKAFQLWSNVTPLTFTKVSEGQADIMISFVRGDHRDNSPFDGPGGNLAHAFQPGPGIGGDAHFDEDERWTNNFREYNLHRVAAHELGHSLGLSHSYDIGALMYPSYTFSGDVQLAQDDIDGIQAIYGRSQNPVQPIGPQTPKACDSKLTFDAITTIRGEVMFFKDRFYMRTNPFYPEVELNFISVFWPQLPNGLEAAYEFADRDEVRFFKGNKYWAVQGQNVLHGYPKDIYSSFGFPRTVKHIDAALSEENTGKTYFFVANKYWRYDEYKRSMDPGYPKMIAHDFPGIGHKVDAVFMKDGFFYFFHGTRQYKFDPKTKRILTLQKANSWFNCRKN

SEQ ID NO: 2746 - protein, 450 aa, Artificial Sequence
  MMP-1 variant T211S
FPATLETQEQDVDLVQKYLEKYYNLKNDGRQVEKRRNSGPVVEKLKQMQEFFGLKVTGKPDAETLKVMKQPRCGVPDVAQFVLTEGNPRWEQTHLTYRIENYTPDLPRADVDHAIEKAFQLWSNVTPLTFTKVSEGQADIMISFVRGDHRDNSPFDGPGGNLAHAFQPGPGIGGDAHFDEDERWTNNFREYNLHRVAAHELGHSLGLSHSSDIGALMYPSYTFSGDVQLAQDDIDGIQAIYGRSQNPVQPIGPQTPKACDSKLTFDAITTIRGEVMFFKDRFYMRTNPFYPEVELNFISVFWPQLPNGLEAAYEFADRDEVRFFKGNKYWAVQGQNVLHGYPKDIYSSFGFPRTVKHIDAALSEENTGKTYFFVANKYWRYDEYKRSMDPGYPKMIAHDFPGIGHKVDAVFMKDGFFYFFHGTRQYKFDPKTKRILTLQKANSWFNCRKN

SEQ ID NO: 2747 - protein, 450 aa, Artificial Sequence
  MMP-1 variant T211G
FPATLETQEQDVDLVQKYLEKYYNLKNDGRQVEKRRNSGPVVEKLKQMQEFFGLKVTGKPDAETLKVMKQPRCGVPDVAQFVLTEGNPRWEQTHLTYRIENYTPDLPRADVDHAIEKAFQLWSNVTPLTFTKVSEGQADIMISFVRGDHRDNSPFDGPGGNLAHAFQPGPGIGGDAHFDEDERWTNNFREYNLHRVAAHELGHSLGLSHSGDIGALMYPSYTFSGDVQLAQDDIDGIQAIYGRSQNPVQPIGPQTPKACDSKLTFDAITTIRGEVMFFKDRFYMRTNPFYPEVELNFISVFWPQLPNGLEAAYEFADRDEVRFFKGNKYWAVQGQNVLHGYPKDIYSSFGFPRTVKHIDAALSEENTGKTYFFVANKYWRYDEYKRSMDPGYPKMIAHDFPGIGHKVDAVFMKDGFFYFFHGTRQYKFDPKTKRILTLQKANSWFNCRKN

SEQ ID NO: 2748 - protein, 450 aa, Artificial Sequence
  MMP-1 variant T211F
FPATLETQEQDVDLVQKYLEKYYNLKNDGRQVEKRRNSGPVVEKLKQMQEFFGLKVTGKPDAETLKVMKQPRCGVPDVAQFVLTEGNPRWEQTHLTYRIENYTPDLPRADVDHAIEKAFQLWSNVTPLTFTKVSEGQADIMISFVRGDHRDNSPFDGPGGNLAHAFQPGPGIGGDAHFDEDERWTNNFREYNLHRVAAHELGHSLGLSHSFDIGALMYPSYTFSGDVQLAQDDIDGIQAIYGRSQNPVQPIGPQTPKACDSKLTFDAITTIRGEVMFFKDRFYMRTNPFYPEVELNFISVFWPQLPNGLEAAYEFADRDEVRFFKGNKYWAVQGQNVLHGYPKDIYSSFGFPRTVKHIDAALSEENTGKTYFFVANKYWRYDEYKRSMDPGYPKMIAHDFPGIGHKVDAVFMKDGFFYFFHGTRQYKFDPKTKRILTLQKANSWFNCRKN

SEQ ID NO: 2749 - protein, 450 aa, Artificial Sequence
  MMP-1 variant T211M
FPATLETQEQDVDLVQKYLEKYYNLKNDGRQVEKRRNSGPVVEKLKQMQEFFGLKVTGKPDAETLKVMKQPRCGVPDVAQFVLTEGNPRWEQTHLTYRIENYTPDLPRADVDHAIEKAFQLWSNVTPLTFTKVSEGQADIMISFVRGDHRDNSPFDGPGGNLAHAFQPGPGIGGDAHFDEDERWTNNFREYNLHRVAAHELGHSLGLSHSMDIGALMYPSYTFSGDVQLAQDDIDGIQAIYGRSQNPVQPIGPQTPKACDSKLTFDAITTIRGEVMFFKDRFYMRTNPFYPEVELNFISVFWPQLPNGLEAAYEFADRDEVRFFKGNKYWAVQGQNVLHGYPKDIYSSFGFPRTVKHIDAALSEENTGKTYFFVANKYWRYDEYKRSMDPGYPKMIAHDFPGIGHKVDAVFMKDGFFYFFHGTRQYKFDPKTKRILTLQKANSWFNCRKN

SEQ ID NO: 2750 - protein, 450 aa, Artificial Sequence
  MMP-1 variant T211W
FPATLETQEQDVDLVQKYLEKYYNLKNDGRQVEKRRNSGPVVEKLKQMQEFFGLKVTGKPDAETLKVMKQPRCGVPDVAQFVLTEGNPRWEQTHLTYRIENYTPDLPRADVDHAIEKAFQLWSNVTPLTFTKVSEGQADIMISFVRGDHRDNSPFDGPGGNLAHAFQPGPGIGGDAHFDEDERWTNNFREYNLHRVAAHELGHSLGLSHSWDIGALMYPSYTFSGDVQLAQDDIDGIQAIYGRSQNPVQPIGPQTPKACDSKLTFDAITTIRGEVMFFKDRFYMRTNPFYPEVELNFISVFWPQLPNGLEAAYEFADRDEVRFFKGNKYWAVQGQNVLHGYPKDIYSSFGFPRTVKHIDAALSEENTGKTYFFVANKYWRYDEYKRSMDPGYPKMIAHDFPGIGHKVDAVFMKDGFFYFFHGTRQYKFDPKTKRILTLQKANSWFNCRKN

SEQ ID NO: 2751 - protein, 450 aa, Artificial Sequence
  MMP-1 variant T211I
FPATLETQEQDVDLVQKYLEKYYNLKNDGRQVEKRRNSGPVVEKLKQMQEFFGLKVTGKPDAETLKVMKQPRCGVPDVAQFVLTEGNPRWEQTHLTYRIENYTPDLPRADVDHAIEKAFQLWSNVTPLTFTKVSEGQADIMISFVRGDHRDNSPFDGPGGNLAHAFQPGPGIGGDAHFDEDERWTNNFREYNLHRVAAHELGHSLGLSHSIDIGALMYPSYTFSGDVQLAQDDIDGIQAIYGRSQNPVQPIGPQTPKACDSKLTFDAITTIRGEVMFFKDRFYMRTNPFYPEVELNFISVFWPQLPNGLEAAYEFADRDEVRFFKGNKYWAVQGQNVLHGYPKDIYSSFGFPRTVKHIDAALSEENTGKTYFFVANKYWRYDEYKRSMDPGYPKMIAHDFPGIGHKVDAVFMKDGFFYFFHGTRQYKFDPKTKRILTLQKANSWFNCRKN

SEQ ID NO: 2752 - protein, 450 aa, Artificial Sequence
  MMP-1 variant T211V
FPATLETQEQDVDLVQKYLEKYYNLKNDGRQVEKRRNSGPVVEKLKQMQEFFGLKVTGKPDAETLKVMKQPRCGVPDVAQFVLTEGNPRWEQTHLTYRIENYTPDLPRADVDHAIEKAFQLWSNVTPLTFTKVSEGQADIMISFVRGDHRDNSPFDGPGGNLAHAFQPGPGIGGDAHFDEDERWTNNFREYNLHRVAAHELGHSLGLSHSVDIGALMYPSYTFSGDVQLAQDDIDGIQAIYGRSQNPVQPIGPQTPKACDSKLTFDAITTIRGEVMFFKDRFYMRTNPFYPEVELNFISVFWPQLPNGLEAAYEFADRDEVRFFKGNKYWAVQGQNVLHGYPKDIYSSFGFPRTVKHIDAALSEENTGKTYFFVANKYWRYDEYKRSMDPGYPKMIAHDFPGIGHKVDAVFMKDGFFYFFHGTRQYKFDPKTKRILTLQKANSWFNCRKN

SEQ ID NO: 2753 - protein, 450 aa, Artificial Sequence
  MMP-1 variant T211L
FPATLETQEQDVDLVQKYLEKYYNLKNDGRQVEKRRNSGPVVEKLKQMQEFFGLKVTGKPDAETLKVMKQPRCGVPDVAQFVLTEGNPRWEQTHLTYRIENYTPDLPRADVDHAIEKAFQLWSNVTPLTFTKVSEGQADIMISFVRGDHRDNSPFDGPGGNLAHAFQPGPGIGGDAHFDEDERWTNNFREYNLHRVAAHELGHSLGLSHSLDIGALMYPSYTFSGDVQLAQDDIDGIQAIYGRSQNPVQPIGPQTPKACDSKLTFDAITTIRGEVMFFKDRFYMRTNPFYPEVELNFISVFWPQLPNGLEAAYEFADRDEVRFFKGNKYWAVQGQNVLHGYPKDIYSSFGFPRTVKHIDAALSEENTGKTYFFVANKYWRYDEYKRSMDPGYPKMIAHDFPGIGHKVDAVFMKDGFFYFFHGTRQYKFDPKTKRILTLQKANSWFNCRKN

SEQ ID NO: 2754 - protein, 450 aa, Artificial Sequence
  MMP-1 variant T211A
FPATLETQEQDVDLVQKYLEKYYNLKNDGRQVEKRRNSGPVVEKLKQMQEFFGLKVTGKPDAETLKVMKQPRCGVPDVAQFVLTEGNPRWEQTHLTYRIENYTPDLPRADVDHAIEKAFQLWSNVTPLTFTKVSEGQADIMISFVRGDHRDNSPFDGPGGNLAHAFQPGPGIGGDAHFDEDERWTNNFREYNLHRVAAHELGHSLGLSHSADIGALMYPSYTFSGDVQLAQDDIDGIQAIYGRSQNPVQPIGPQTPKACDSKLTFDAITTIRGEVMFFKDRFYMRTNPFYPEVELNFISVFWPQLPNGLEAAYEFADRDEVRFFKGNKYWAVQGQNVLHGYPKDIYSSFGFPRTVKHIDAALSEENTGKTYFFVANKYWRYDEYKRSMDPGYPKMIAHDFPGIGHKVDAVFMKDGFFYFFHGTRQYKFDPKTKRILTLQKANSWFNCRKN

SEQ ID NO: 2755 - protein, 450 aa, Artificial Sequence
  MMP-1 variant T211P
FPATLETQEQDVDLVQKYLEKYYNLKNDGRQVEKRRNSGPVVEKLKQMQEFFGLKVTGKPDAETLKVMKQPRCGVPDVAQFVLTEGNPRWEQTHLTYRIENYTPDLPRADVDHAIEKAFQLWSNVTPLTFTKVSEGQADIMISFVRGDHRDNSPFDGPGGNLAHAFQPGPGIGGDAHFDEDERWTNNFREYNLHRVAAHELGHSLGLSHSPDIGALMYPSYTFSGDVQLAQDDIDGIQAIYGRSQNPVQPIGPQTPKACDSKLTFDAITTIRGEVMFFKDRFYMRTNPFYPEVELNFISVFWPQLPNGLEAAYEFADRDEVRFFKGNKYWAVQGQNVLHGYPKDIYSSFGFPRTVKHIDAALSEENTGKTYFFVANKYWRYDEYKRSMDPGYPKMIAHDFPGIGHKVDAVFMKDGFFYFFHGTRQYKFDPKTKRILTLQKANSWFNCRKN

SEQ ID NO: 2756 - protein, 450 aa, Artificial Sequence
  MMP-1 variant I213D
FPATLETQEQDVDLVQKYLEKYYNLKNDGRQVEKRRNSGPVVEKLKQMQEFFGLKVTGKPDAETLKVMKQPRCGVPDVAQFVLTEGNPRWEQTHLTYRIENYTPDLPRADVDHAIEKAFQLWSNVTPLTFTKVSEGQADIMISFVRGDHRDNSPFDGPGGNLAHAFQPGPGIGGDAHFDEDERWTNNFREYNLHRVAAHELGHSLGLSHSTDDGALMYPSYTFSGDVQLAQDDIDGIQAIYGRSQNPVQPIGPQTPKACDSKLTFDAITTIRGEVMFFKDRFYMRTNPFYPEVELNFISVFWPQLPNGLEAAYEFADRDEVRFFKGNKYWAVQGQNVLHGYPKDIYSSFGFPRTVKHIDAALSEENTGKTYFFVANKYWRYDEYKRSMDPGYPKMIAHDFPGIGHKVDAVFMKDGFFYFFHGTRQYKFDPKTKRILTLQKANSWFNCRKN

SEQ ID NO: 2757 - protein, 450 aa, Artificial Sequence
  MMP-1 variant I213E
FPATLETQEQDVDLVQKYLEKYYNLKNDGRQVEKRRNSGPVVEKLKQMQEFFGLKVTGKPDAETLKVMKQPRCGVPDVAQFVLTEGNPRWEQTHLTYRIENYTPDLPRADVDHAIEKAFQLWSNVTPLTFTKVSEGQADIMISFVRGDHRDNSPFDGPGGNLAHAFQPGPGIGGDAHFDEDERWTNNFREYNLHRVAAHELGHSLGLSHSTDEGALMYPSYTFSGDVQLAQDDIDGIQAIYGRSQNPVQPIGPQTPKACDSKLTFDAITTIRGEVMFFKDRFYMRTNPFYPEVELNFISVFWPQLPNGLEAAYEFADRDEVRFFKGNKYWAVQGQNVLHGYPKDIYSSFGFPRTVKHIDAALSEENTGKTYFFVANKYWRYDEYKRSMDPGYPKMIAHDFPGIGHKVDAVFMKDGFFYFFHGTRQYKFDPKTKRILTLQKANSWFNCRKN

SEQ ID NO: 2758 - protein, 450 aa, Artificial Sequence
  MMP-1 variant I213H
FPATLETQEQDVDLVQKYLEKYYNLKNDGRQVEKRRNSGPVVEKLKQMQEFFGLKVTGKPDAETLKVMKQPRCGVPDVAQFVLTEGNPRWEQTHLTYRIENYTPDLPRADVDHAIEKAFQLWSNVTPLTFTKVSEGQADIMISFVRGDHRDNSPFDGPGGNLAHAFQPGPGIGGDAHFDEDERWTNNFREYNLHRVAAHELGHSLGLSHSTDHGALMYPSYTFSGDVQLAQDDIDGIQAIYGRSQNPVQPIGPQTPKACDSKLTFDAITTIRGEVMFFKDRFYMRTNPFYPEVELNFISVFWPQLPNGLEAAYEFADRDEVRFFKGNKYWAVQGQNVLHGYPKDIYSSFGFPRTVKHIDAALSEENTGKTYFFVANKYWRYDEYKRSMDPGYPKMIAHDFPGIGHKVDAVFMKDGFFYFFHGTRQYKFDPKTKRILTLQKANSWFNCRKN

SEQ ID NO: 2759 - protein, 450 aa, Artificial Sequence
  MMP-1 variant I213K
FPATLETQEQDVDLVQKYLEKYYNLKNDGRQVEKRRNSGPVVEKLKQMQEFFGLKVTGKPDAETLKVMKQPRCGVPDVAQFVLTEGNPRWEQTHLTYRIENYTPDLPRADVDHAIEKAFQLWSNVTPLTFTKVSEGQADIMISFVRGDHRDNSPFDGPGGNLAHAFQPGPGIGGDAHFDEDERWTNNFREYNLHRVAAHELGHSLGLSHSTDKGALMYPSYTFSGDVQLAQDDIDGIQAIYGRSQNPVQPIGPQTPKACDSKLTFDAITTIRGEVMFFKDRFYMRTNPFYPEVELNFISVFWPQLPNGLEAAYEFADRDEVRFFKGNKYWAVQGQNVLHGYPKDIYSSFGFPRTVKHIDAALSEENTGKTYFFVANKYWRYDEYKRSMDPGYPKMIAHDFPGIGHKVDAVFMKDGFFYFFHGTRQYKFDPKTKRILTLQKANSWFNCRKN

SEQ ID NO: 2760 - protein, 450 aa, Artificial Sequence
  MMP-1 variant I213R
FPATLETQEQDVDLVQKYLEKYYNLKNDGRQVEKRRNSGPVVEKLKQMQEFFGLKVTGKPDAETLKVMKQPRCGVPDVAQFVLTEGNPRWEQTHLTYRIENYTPDLPRADVDHAIEKAFQLWSNVTPLTFTKVSEGQADIMISFVRGDHRDNSPFDGPGGNLAHAFQPGPGIGGDAHFDEDERWTNNFREYNLHRVAAHELGHSLGLSHSTDRGALMYPSYTFSGDVQLAQDDIDGIQAIYGRSQNPVQPIGPQTPKACDSKLTFDAITTIRGEVMFFKDRFYMRTNPFYPEVELNFISVFWPQLPNGLEAAYEFADRDEVRFFKGNKYWAVQGQNVLHGYPKDIYSSFGFPRTVKHIDAALSEENTGKTYFFVANKYWRYDEYKRSMDPGYPKMIAHDFPGIGHKVDAVFMKDGFFYFFHGTRQYKFDPKTKRILTLQKANSWFNCRKN

SEQ ID NO: 2761 - protein, 450 aa, Artificial Sequence
  MMP-1 variant I213C
FPATLETQEQDVDLVQKYLEKYYNLKNDGRQVEKRRNSGPVVEKLKQMQEFFGLKVTGKPDAETLKVMKQPRCGVPDVAQFVLTEGNPRWEQTHLTYRIENYTPDLPRADVDHAIEKAFQLWSNVTPLTFTKVSEGQADIMISFVRGDHRDNSPFDGPGGNLAHAFQPGPGIGGDAHFDEDERWTNNFREYNLHRVAAHELGHSLGLSHSTDCGALMYPSYTFSGDVQLAQDDIDGIQAIYGRSQNPVQPIGPQTPKACDSKLTFDAITTIRGEVMFFKDRFYMRTNPFYPEVELNFISVFWPQLPNGLEAAYEFADRDEVRFFKGNKYWAVQGQNVLHGYPKDIYSSFGFPRTVKHIDAALSEENTGKTYFFVANKYWRYDEYKRSMDPGYPKMIAHDFPGIGHKVDAVFMKDGFFYFFHGTRQYKFDPKTKRILTLQKANSWFNCRKN

SEQ ID NO: 2762 - protein, 450 aa, Artificial Sequence
  MMP-1 variant I213N
FPATLETQEQDVDLVQKYLEKYYNLKNDGRQVEKRRNSGPVVEKLKQMQEFFGLKVTGKPDAETLKVMKQPRCGVPDVAQFVLTEGNPRWEQTHLTYRIENYTPDLPRADVDHAIEKAFQLWSNVTPLTFTKVSEGQADIMISFVRGDHRDNSPFDGPGGNLAHAFQPGPGIGGDAHFDEDERWTNNFREYNLHRVAAHELGHSLGLSHSTDNGALMYPSYTFSGDVQLAQDDIDGIQAIYGRSQNPVQPIGPQTPKACDSKLTFDAITTIRGEVMFFKDRFYMRTNPFYPEVELNFISVFWPQLPNGLEAAYEFADRDEVRFFKGNKYWAVQGQNVLHGYPKDIYSSFGFPRTVKHIDAALSEENTGKTYFFVANKYWRYDEYKRSMDPGYPKMIAHDFPGIGHKVDAVFMKDGFFYFFHGTRQYKFDPKTKRILTLQKANSWFNCRKN

SEQ ID NO: 2763 - protein, 450 aa, Artificial Sequence
  MMP-1 variant I213Q
FPATLETQEQDVDLVQKYLEKYYNLKNDGRQVEKRRNSGPVVEKLKQMQEFFGLKVTGKPDAETLKVMKQPRCGVPDVAQFVLTEGNPRWEQTHLTYRIENYTPDLPRADVDHAIEKAFQLWSNVTPLTFTKVSEGQADIMISFVRGDHRDNSPFDGPGGNLAHAFQPGPGIGGDAHFDEDERWTNNFREYNLHRVAAHELGHSLGLSHSTDQGALMYPSYTFSGDVQLAQDDIDGIQAIYGRSQNPVQPIGPQTPKACDSKLTFDAITTIRGEVMFFKDRFYMRTNPFYPEVELNFISVFWPQLPNGLEAAYEFADRDEVRFFKGNKYWAVQGQNVLHGYPKDIYSSFGFPRTVKHIDAALSEENTGKTYFFVANKYWRYDEYKRSMDPGYPKMIAHDFPGIGHKVDAVFMKDGFFYFFHGTRQYKFDPKTKRILTLQKANSWFNCRKN

SEQ ID NO: 2764 - protein, 450 aa, Artificial Sequence
  MMP-1 variant I213T
FPATLETQEQDVDLVQKYLEKYYNLKNDGRQVEKRRNSGPVVEKLKQMQEFFGLKVTGKPDAETLKVMKQPRCGVPDVAQFVLTEGNPRWEQTHLTYRIENYTPDLPRADVDHAIEKAFQLWSNVTPLTFTKVSEGQADIMISFVRGDHRDNSPFDGPGGNLAHAFQPGPGIGGDAHFDEDERWTNNFREYNLHRVAAHELGHSLGLSHSTDTGALMYPSYTFSGDVQLAQDDIDGIQAIYGRSQNPVQPIGPQTPKACDSKLTFDAITTIRGEVMFFKDRFYMRTNPFYPEVELNFISVFWPQLPNGLEAAYEFADRDEVRFFKGNKYWAVQGQNVLHGYPKDIYSSFGFPRTVKHIDAALSEENTGKTYFFVANKYWRYDEYKRSMDPGYPKMIAHDFPGIGHKVDAVFMKDGFFYFFHGTRQYKFDPKTKRILTLQKANSWFNCRKN

SEQ ID NO: 2765 - protein, 450 aa, Artificial Sequence
  MMP-1 variant I213Y
FPATLETQEQDVDLVQKYLEKYYNLKNDGRQVEKRRNSGPVVEKLKQMQEFFGLKVTGKPDAETLKVMKQPRCGVPDVAQFVLTEGNPRWEQTHLTYRIENYTPDLPRADVDHAIEKAFQLWSNVTPLTFTKVSEGQADIMISFVRGDHRDNSPFDGPGGNLAHAFQPGPGIGGDAHFDEDERWTNNFREYNLHRVAAHELGHSLGLSHSTDYGALMYPSYTFSGDVQLAQDDIDGIQAIYGRSQNPVQPIGPQTPKACDSKLTFDAITTIRGEVMFFKDRFYMRTNPFYPEVELNFISVFWPQLPNGLEAAYEFADRDEVRFFKGNKYWAVQGQNVLHGYPKDIYSSFGFPRTVKHIDAALSEENTGKTYFFVANKYWRYDEYKRSMDPGYPKMIAHDFPGIGHKVDAVFMKDGFFYFFHGTRQYKFDPKTKRILTLQKANSWFNCRKN

SEQ ID NO: 2766 - protein, 450 aa, Artificial Sequence
  MMP-1 variant I213S
FPATLETQEQDVDLVQKYLEKYYNLKNDGRQVEKRRNSGPVVEKLKQMQEFFGLKVTGKPDAETLKVMKQPRCGVPDVAQFVLTEGNPRWEQTHLTYRIENYTPDLPRADVDHAIEKAFQLWSNVTPLTFTKVSEGQADIMISFVRGDHRDNSPFDGPGGNLAHAFQPGPGIGGDAHFDEDERWTNNFREYNLHRVAAHELGHSLGLSHSTDSGALMYPSYTFSGDVQLAQDDIDGIQAIYGRSQNPVQPIGPQTPKACDSKLTFDAITTIRGEVMFFKDRFYMRTNPFYPEVELNFISVFWPQLPNGLEAAYEFADRDEVRFFKGNKYWAVQGQNVLHGYPKDIYSSFGFPRTVKHIDAALSEENTGKTYFFVANKYWRYDEYKRSMDPGYPKMIAHDFPGIGHKVDAVFMKDGFFYFFHGTRQYKFDPKTKRILTLQKANSWFNCRKN

SEQ ID NO: 2767 - protein, 450 aa, Artificial Sequence
  MMP-1 variant I213G
FPATLETQEQDVDLVQKYLEKYYNLKNDGRQVEKRRNSGPVVEKLKQMQEFFGLKVTGKPDAETLKVMKQPRCGVPDVAQFVLTEGNPRWEQTHLTYRIENYTPDLPRADVDHAIEKAFQLWSNVTPLTFTKVSEGQADIMISFVRGDHRDNSPFDGPGGNLAHAFQPGPGIGGDAHFDEDERWTNNFREYNLHRVAAHELGHSLGLSHSTDGGALMYPSYTFSGDVQLAQDDIDGIQAIYGRSQNPVQPIGPQTPKACDSKLTFDAITTIRGEVMFFKDRFYMRTNPFYPEVELNFISVFWPQLPNGLEAAYEFADRDEVRFFKGNKYWAVQGQNVLHGYPKDIYSSFGFPRTVKHIDAALSEENTGKTYFFVANKYWRYDEYKRSMDPGYPKMIAHDFPGIGHKVDAVFMKDGFFYFFHGTRQYKFDPKTKRILTLQKANSWFNCRKN

SEQ ID NO: 2768 - protein, 450 aa, Artificial Sequence
  MMP-1 variant I213F
FPATLETQEQDVDLVQKYLEKYYNLKNDGRQVEKRRNSGPVVEKLKQMQEFFGLKVTGKPDAETLKVMKQPRCGVPDVAQFVLTEGNPRWEQTHLTYRIENYTPDLPRADVDHAIEKAFQLWSNVTPLTFTKVSEGQADIMISFVRGDHRDNSPFDGPGGNLAHAFQPGPGIGGDAHFDEDERWTNNFREYNLHRVAAHELGHSLGLSHSTDFGALMYPSYTFSGDVQLAQDDIDGIQAIYGRSQNPVQPIGPQTPKACDSKLTFDAITTIRGEVMFFKDRFYMRTNPFYPEVELNFISVFWPQLPNGLEAAYEFADRDEVRFFKGNKYWAVQGQNVLHGYPKDIYSSFGFPRTVKHIDAALSEENTGKTYFFVANKYWRYDEYKRSMDPGYPKMIAHDFPGIGHKVDAVFMKDGFFYFFHGTRQYKFDPKTKRILTLQKANSWFNCRKN

SEQ ID NO: 2769 - protein, 450 aa, Artificial Sequence
  MMP-1 variant I213M
FPATLETQEQDVDLVQKYLEKYYNLKNDGRQVEKRRNSGPVVEKLKQMQEFFGLKVTGKPDAETLKVMKQPRCGVPDVAQFVLTEGNPRWEQTHLTYRIENYTPDLPRADVDHAIEKAFQLWSNVTPLTFTKVSEGQADIMISFVRGDHRDNSPFDGPGGNLAHAFQPGPGIGGDAHFDEDERWTNNFREYNLHRVAAHELGHSLGLSHSTDMGALMYPSYTFSGDVQLAQDDIDGIQAIYGRSQNPVQPIGPQTPKACDSKLTFDAITTIRGEVMFFKDRFYMRTNPFYPEVELNFISVFWPQLPNGLEAAYEFADRDEVRFFKGNKYWAVQGQNVLHGYPKDIYSSFGFPRTVKHIDAALSEENTGKTYFFVANKYWRYDEYKRSMDPGYPKMIAHDFPGIGHKVDAVFMKDGFFYFFHGTRQYKFDPKTKRILTLQKANSWFNCRKN

SEQ ID NO: 2770 - protein, 450 aa, Artificial Sequence
  MMP-1 variant I213W
FPATLETQEQDVDLVQKYLEKYYNLKNDGRQVEKRRNSGPVVEKLKQMQEFFGLKVTGKPDAETLKVMKQPRCGVPDVAQFVLTEGNPRWEQTHLTYRIENYTPDLPRADVDHAIEKAFQLWSNVTPLTFTKVSEGQADIMISFVRGDHRDNSPFDGPGGNLAHAFQPGPGIGGDAHFDEDERWTNNFREYNLHRVAAHELGHSLGLSHSTDWGALMYPSYTFSGDVQLAQDDIDGIQAIYGRSQNPVQPIGPQTPKACDSKLTFDAITTIRGEVMFFKDRFYMRTNPFYPEVELNFISVFWPQLPNGLEAAYEFADRDEVRFFKGNKYWAVQGQNVLHGYPKDIYSSFGFPRTVKHIDAALSEENTGKTYFFVANKYWRYDEYKRSMDPGYPKMIAHDFPGIGHKVDAVFMKDGFFYFFHGTRQYKFDPKTKRILTLQKANSWFNCRKN

SEQ ID NO: 2771 - protein, 450 aa, Artificial Sequence
  MMP-1 variant I213V
FPATLETQEQDVDLVQKYLEKYYNLKNDGRQVEKRRNSGPVVEKLKQMQEFFGLKVTGKPDAETLKVMKQPRCGVPDVAQFVLTEGNPRWEQTHLTYRIENYTPDLPRADVDHAIEKAFQLWSNVTPLTFTKVSEGQADIMISFVRGDHRDNSPFDGPGGNLAHAFQPGPGIGGDAHFDEDERWTNNFREYNLHRVAAHELGHSLGLSHSTDVGALMYPSYTFSGDVQLAQDDIDGIQAIYGRSQNPVQPIGPQTPKACDSKLTFDAITTIRGEVMFFKDRFYMRTNPFYPEVELNFISVFWPQLPNGLEAAYEFADRDEVRFFKGNKYWAVQGQNVLHGYPKDIYSSFGFPRTVKHIDAALSEENTGKTYFFVANKYWRYDEYKRSMDPGYPKMIAHDFPGIGHKVDAVFMKDGFFYFFHGTRQYKFDPKTKRILTLQKANSWFNCRKN

SEQ ID NO: 2772 - protein, 450 aa, Artificial Sequence
  MMP-1 variant I213L
FPATLETQEQDVDLVQKYLEKYYNLKNDGRQVEKRRNSGPVVEKLKQMQEFFGLKVTGKPDAETLKVMKQPRCGVPDVAQFVLTEGNPRWEQTHLTYRIENYTPDLPRADVDHAIEKAFQLWSNVTPLTFTKVSEGQADIMISFVRGDHRDNSPFDGPGGNLAHAFQPGPGIGGDAHFDEDERWTNNFREYNLHRVAAHELGHSLGLSHSTDLGALMYPSYTFSGDVQLAQDDIDGIQAIYGRSQNPVQPIGPQTPKACDSKLTFDAITTIRGEVMFFKDRFYMRTNPFYPEVELNFISVFWPQLPNGLEAAYEFADRDEVRFFKGNKYWAVQGQNVLHGYPKDIYSSFGFPRTVKHIDAALSEENTGKTYFFVANKYWRYDEYKRSMDPGYPKMIAHDFPGIGHKVDAVFMKDGFFYFFHGTRQYKFDPKTKRILTLQKANSWFNCRKN

SEQ ID NO: 2773 - protein, 450 aa, Artificial Sequence
  MMP-1 variant I213A
FPATLETQEQDVDLVQKYLEKYYNLKNDGRQVEKRRNSGPVVEKLKQMQEFFGLKVTGKPDAETLKVMKQPRCGVPDVAQFVLTEGNPRWEQTHLTYRIENYTPDLPRADVDHAIEKAFQLWSNVTPLTFTKVSEGQADIMISFVRGDHRDNSPFDGPGGNLAHAFQPGPGIGGDAHFDEDERWTNNFREYNLHRVAAHELGHSLGLSHSTDAGALMYPSYTFSGDVQLAQDDIDGIQAIYGRSQNPVQPIGPQTPKACDSKLTFDAITTIRGEVMFFKDRFYMRTNPFYPEVELNFISVFWPQLPNGLEAAYEFADRDEVRFFKGNKYWAVQGQNVLHGYPKDIYSSFGFPRTVKHIDAALSEENTGKTYFFVANKYWRYDEYKRSMDPGYPKMIAHDFPGIGHKVDAVFMKDGFFYFFHGTRQYKFDPKTKRILTLQKANSWFNCRKN

SEQ ID NO: 2774 - protein, 450 aa, Artificial Sequence
  MMP-1 variant I213P
FPATLETQEQDVDLVQKYLEKYYNLKNDGRQVEKRRNSGPVVEKLKQMQEFFGLKVTGKPDAETLKVMKQPRCGVPDVAQFVLTEGNPRWEQTHLTYRIENYTPDLPRADVDHAIEKAFQLWSNVTPLTFTKVSEGQADIMISFVRGDHRDNSPFDGPGGNLAHAFQPGPGIGGDAHFDEDERWTNNFREYNLHRVAAHELGHSLGLSHSTDPGALMYPSYTFSGDVQLAQDDIDGIQAIYGRSQNPVQPIGPQTPKACDSKLTFDAITTIRGEVMFFKDRFYMRTNPFYPEVELNFISVFWPQLPNGLEAAYEFADRDEVRFFKGNKYWAVQGQNVLHGYPKDIYSSFGFPRTVKHIDAALSEENTGKTYFFVANKYWRYDEYKRSMDPGYPKMIAHDFPGIGHKVDAVFMKDGFFYFFHGTRQYKFDPKTKRILTLQKANSWFNCRKN

SEQ ID NO: 2775 - protein, 450 aa, Artificial Sequence
  MMP-1 variant G214D
FPATLETQEQDVDLVQKYLEKYYNLKNDGRQVEKRRNSGPVVEKLKQMQEFFGLKVTGKPDAETLKVMKQPRCGVPDVAQFVLTEGNPRWEQTHLTYRIENYTPDLPRADVDHAIEKAFQLWSNVTPLTFTKVSEGQADIMISFVRGDHRDNSPFDGPGGNLAHAFQPGPGIGGDAHFDEDERWTNNFREYNLHRVAAHELGHSLGLSHSTDIDALMYPSYTFSGDVQLAQDDIDGIQAIYGRSQNPVQPIGPQTPKACDSKLTFDAITTIRGEVMFFKDRFYMRTNPFYPEVELNFISVFWPQLPNGLEAAYEFADRDEVRFFKGNKYWAVQGQNVLHGYPKDIYSSFGFPRTVKHIDAALSEENTGKTYFFVANKYWRYDEYKRSMDPGYPKMIAHDFPGIGHKVDAVFMKDGFFYFFHGTRQYKFDPKTKRILTLQKANSWFNCRKN

SEQ ID NO: 2776 - protein, 450 aa, Artificial Sequence
  MMP-1 variant G214E
FPATLETQEQDVDLVQKYLEKYYNLKNDGRQVEKRRNSGPVVEKLKQMQEFFGLKVTGKPDAETLKVMKQPRCGVPDVAQFVLTEGNPRWEQTHLTYRIENYTPDLPRADVDHAIEKAFQLWSNVTPLTFTKVSEGQADIMISFVRGDHRDNSPFDGPGGNLAHAFQPGPGIGGDAHFDEDERWTNNFREYNLHRVAAHELGHSLGLSHSTDIEALMYPSYTFSGDVQLAQDDIDGIQAIYGRSQNPVQPIGPQTPKACDSKLTFDAITTIRGEVMFFKDRFYMRTNPFYPEVELNFISVFWPQLPNGLEAAYEFADRDEVRFFKGNKYWAVQGQNVLHGYPKDIYSSFGFPRTVKHIDAALSEENTGKTYFFVANKYWRYDEYKRSMDPGYPKMIAHDFPGIGHKVDAVFMKDGFFYFFHGTRQYKFDPKTKRILTLQKANSWFNCRKN

SEQ ID NO: 2777 - protein, 450 aa, Artificial Sequence
  MMP-1 variant G214H
FPATLETQEQDVDLVQKYLEKYYNLKNDGRQVEKRRNSGPVVEKLKQMQEFFGLKVTGKPDAETLKVMKQPRCGVPDVAQFVLTEGNPRWEQTHLTYRIENYTPDLPRADVDHAIEKAFQLWSNVTPLTFTKVSEGQADIMISFVRGDHRDNSPFDGPGGNLAHAFQPGPGIGGDAHFDEDERWTNNFREYNLHRVAAHELGHSLGLSHSTDIHALMYPSYTFSGDVQLAQDDIDGIQAIYGRSQNPVQPIGPQTPKACDSKLTFDAITTIRGEVMFFKDRFYMRTNPFYPEVELNFISVFWPQLPNGLEAAYEFADRDEVRFFKGNKYWAVQGQNVLHGYPKDIYSSFGFPRTVKHIDAALSEENTGKTYFFVANKYWRYDEYKRSMDPGYPKMIAHDFPGIGHKVDAVFMKDGFFYFFHGTRQYKFDPKTKRILTLQKANSWFNCRKN

SEQ ID NO: 2778 - protein, 450 aa, Artificial Sequence
  MMP-1 variant G214K
FPATLETQEQDVDLVQKYLEKYYNLKNDGRQVEKRRNSGPVVEKLKQMQEFFGLKVTGKPDAETLKVMKQPRCGVPDVAQFVLTEGNPRWEQTHLTYRIENYTPDLPRADVDHAIEKAFQLWSNVTPLTFTKVSEGQADIMISFVRGDHRDNSPFDGPGGNLAHAFQPGPGIGGDAHFDEDERWTNNFREYNLHRVAAHELGHSLGLSHSTDIKALMYPSYTFSGDVQLAQDDIDGIQAIYGRSQNPVQPIGPQTPKACDSKLTFDAITTIRGEVMFFKDRFYMRTNPFYPEVELNFISVFWPQLPNGLEAAYEFADRDEVRFFKGNKYWAVQGQNVLHGYPKDIYSSFGFPRTVKHIDAALSEENTGKTYFFVANKYWRYDEYKRSMDPGYPKMIAHDFPGIGHKVDAVFMKDGFFYFFHGTRQYKFDPKTKRILTLQKANSWFNCRKN

SEQ ID NO: 2779 - protein, 450 aa, Artificial Sequence
  MMP-1 variant G214R
FPATLETQEQDVDLVQKYLEKYYNLKNDGRQVEKRRNSGPVVEKLKQMQEFFGLKVTGKPDAETLKVMKQPRCGVPDVAQFVLTEGNPRWEQTHLTYRIENYTPDLPRADVDHAIEKAFQLWSNVTPLTFTKVSEGQADIMISFVRGDHRDNSPFDGPGGNLAHAFQPGPGIGGDAHFDEDERWTNNFREYNLHRVAAHELGHSLGLSHSTDIRALMYPSYTFSGDVQLAQDDIDGIQAIYGRSQNPVQPIGPQTPKACDSKLTFDAITTIRGEVMFFKDRFYMRTNPFYPEVELNFISVFWPQLPNGLEAAYEFADRDEVRFFKGNKYWAVQGQNVLHGYPKDIYSSFGFPRTVKHIDAALSEENTGKTYFFVANKYWRYDEYKRSMDPGYPKMIAHDFPGIGHKVDAVFMKDGFFYFFHGTRQYKFDPKTKRILTLQKANSWFNCRKN

SEQ ID NO: 2780 - protein, 450 aa, Artificial Sequence
  MMP-1 variant G214C
FPATLETQEQDVDLVQKYLEKYYNLKNDGRQVEKRRNSGPVVEKLKQMQEFFGLKVTGKPDAETLKVMKQPRCGVPDVAQFVLTEGNPRWEQTHLTYRIENYTPDLPRADVDHAIEKAFQLWSNVTPLTFTKVSEGQADIMISFVRGDHRDNSPFDGPGGNLAHAFQPGPGIGGDAHFDEDERWTNNFREYNLHRVAAHELGHSLGLSHSTDICALMYPSYTFSGDVQLAQDDIDGIQAIYGRSQNPVQPIGPQTPKACDSKLTFDAITTIRGEVMFFKDRFYMRTNPFYPEVELNFISVFWPQLPNGLEAAYEFADRDEVRFFKGNKYWAVQGQNVLHGYPKDIYSSFGFPRTVKHIDAALSEENTGKTYFFVANKYWRYDEYKRSMDPGYPKMIAHDFPGIGHKVDAVFMKDGFFYFFHGTRQYKFDPKTKRILTLQKANSWFNCRKN

SEQ ID NO: 2781 - protein, 450 aa, Artificial Sequence
  MMP-1 variant G214N
FPATLETQEQDVDLVQKYLEKYYNLKNDGRQVEKRRNSGPVVEKLKQMQEFFGLKVTGKPDAETLKVMKQPRCGVPDVAQFVLTEGNPRWEQTHLTYRIENYTPDLPRADVDHAIEKAFQLWSNVTPLTFTKVSEGQADIMISFVRGDHRDNSPFDGPGGNLAHAFQPGPGIGGDAHFDEDERWTNNFREYNLHRVAAHELGHSLGLSHSTDINALMYPSYTFSGDVQLAQDDIDGIQAIYGRSQNPVQPIGPQTPKACDSKLTFDAITTIRGEVMFFKDRFYMRTNPFYPEVELNFISVFWPQLPNGLEAAYEFADRDEVRFFKGNKYWAVQGQNVLHGYPKDIYSSFGFPRTVKHIDAALSEENTGKTYFFVANKYWRYDEYKRSMDPGYPKMIAHDFPGIGHKVDAVFMKDGFFYFFHGTRQYKFDPKTKRILTLQKANSWFNCRKN

SEQ ID NO: 2782 - protein, 450 aa, Artificial Sequence
  MMP-1 variant G214Q
FPATLETQEQDVDLVQKYLEKYYNLKNDGRQVEKRRNSGPVVEKLKQMQEFFGLKVTGKPDAETLKVMKQPRCGVPDVAQFVLTEGNPRWEQTHLTYRIENYTPDLPRADVDHAIEKAFQLWSNVTPLTFTKVSEGQADIMISFVRGDHRDNSPFDGPGGNLAHAFQPGPGIGGDAHFDEDERWTNNFREYNLHRVAAHELGHSLGLSHSTDIQALMYPSYTFSGDVQLAQDDIDGIQAIYGRSQNPVQPIGPQTPKACDSKLTFDAITTIRGEVMFFKDRFYMRTNPFYPEVELNFISVFWPQLPNGLEAAYEFADRDEVRFFKGNKYWAVQGQNVLHGYPKDIYSSFGFPRTVKHIDAALSEENTGKTYFFVANKYWRYDEYKRSMDPGYPKMIAHDFPGIGHKVDAVFMKDGFFYFFHGTRQYKFDPKTKRILTLQKANSWFNCRKN

SEQ ID NO: 2783 - protein, 450 aa, Artificial Sequence
  MMP-1 variant G214T
FPATLETQEQDVDLVQKYLEKYYNLKNDGRQVEKRRNSGPVVEKLKQMQEFFGLKVTGKPDAETLKVMKQPRCGVPDVAQFVLTEGNPRWEQTHLTYRIENYTPDLPRADVDHAIEKAFQLWSNVTPLTFTKVSEGQADIMISFVRGDHRDNSPFDGPGGNLAHAFQPGPGIGGDAHFDEDERWTNNFREYNLHRVAAHELGHSLGLSHSTDITALMYPSYTFSGDVQLAQDDIDGIQAIYGRSQNPVQPIGPQTPKACDSKLTFDAITTIRGEVMFFKDRFYMRTNPFYPEVELNFISVFWPQLPNGLEAAYEFADRDEVRFFKGNKYWAVQGQNVLHGYPKDIYSSFGFPRTVKHIDAALSEENTGKTYFFVANKYWRYDEYKRSMDPGYPKMIAHDFPGIGHKVDAVFMKDGFFYFFHGTRQYKFDPKTKRILTLQKANSWFNCRKN

SEQ ID NO: 2784 - protein, 450 aa, Artificial Sequence
  MMP-1 variant G214Y
FPATLETQEQDVDLVQKYLEKYYNLKNDGRQVEKRRNSGPVVEKLKQMQEFFGLKVTGKPDAETLKVMKQPRCGVPDVAQFVLTEGNPRWEQTHLTYRIENYTPDLPRADVDHAIEKAFQLWSNVTPLTFTKVSEGQADIMISFVRGDHRDNSPFDGPGGNLAHAFQPGPGIGGDAHFDEDERWTNNFREYNLHRVAAHELGHSLGLSHSTDIYALMYPSYTFSGDVQLAQDDIDGIQAIYGRSQNPVQPIGPQTPKACDSKLTFDAITTIRGEVMFFKDRFYMRTNPFYPEVELNFISVFWPQLPNGLEAAYEFADRDEVRFFKGNKYWAVQGQNVLHGYPKDIYSSFGFPRTVKHIDAALSEENTGKTYFFVANKYWRYDEYKRSMDPGYPKMIAHDFPGIGHKVDAVFMKDGFFYFFHGTRQYKFDPKTKRILTLQKANSWFNCRKN

SEQ ID NO: 2785 - protein, 450 aa, Artificial Sequence
  MMP-1 variant G214S
FPATLETQEQDVDLVQKYLEKYYNLKNDGRQVEKRRNSGPVVEKLKQMQEFFGLKVTGKPDAETLKVMKQPRCGVPDVAQFVLTEGNPRWEQTHLTYRIENYTPDLPRADVDHAIEKAFQLWSNVTPLTFTKVSEGQADIMISFVRGDHRDNSPFDGPGGNLAHAFQPGPGIGGDAHFDEDERWTNNFREYNLHRVAAHELGHSLGLSHSTDISALMYPSYTFSGDVQLAQDDIDGIQAIYGRSQNPVQPIGPQTPKACDSKLTFDAITTIRGEVMFFKDRFYMRTNPFYPEVELNFISVFWPQLPNGLEAAYEFADRDEVRFFKGNKYWAVQGQNVLHGYPKDIYSSFGFPRTVKHIDAALSEENTGKTYFFVANKYWRYDEYKRSMDPGYPKMIAHDFPGIGHKVDAVFMKDGFFYFFHGTRQYKFDPKTKRILTLQKANSWFNCRKN

SEQ ID NO: 2786 - protein, 450 aa, Artificial Sequence
  MMP-1 variant G214F
FPATLETQEQDVDLVQKYLEKYYNLKNDGRQVEKRRNSGPVVEKLKQMQEFFGLKVTGKPDAETLKVMKQPRCGVPDVAQFVLTEGNPRWEQTHLTYRIENYTPDLPRADVDHAIEKAFQLWSNVTPLTFTKVSEGQADIMISFVRGDHRDNSPFDGPGGNLAHAFQPGPGIGGDAHFDEDERWTNNFREYNLHRVAAHELGHSLGLSHSTDIFALMYPSYTFSGDVQLAQDDIDGIQAIYGRSQNPVQPIGPQTPKACDSKLTFDAITTIRGEVMFFKDRFYMRTNPFYPEVELNFISVFWPQLPNGLEAAYEFADRDEVRFFKGNKYWAVQGQNVLHGYPKDIYSSFGFPRTVKHIDAALSEENTGKTYFFVANKYWRYDEYKRSMDPGYPKMIAHDFPGIGHKVDAVFMKDGFFYFFHGTRQYKFDPKTKRILTLQKANSWFNCRKN

SEQ ID NO: 2787 - protein, 450 aa, Artificial Sequence
  MMP-1 variant G214M
FPATLETQEQDVDLVQKYLEKYYNLKNDGRQVEKRRNSGPVVEKLKQMQEFFGLKVTGKPDAETLKVMKQPRCGVPDVAQFVLTEGNPRWEQTHLTYRIENYTPDLPRADVDHAIEKAFQLWSNVTPLTFTKVSEGQADIMISFVRGDHRDNSPFDGPGGNLAHAFQPGPGIGGDAHFDEDERWTNNFREYNLHRVAAHELGHSLGLSHSTDIMALMYPSYTFSGDVQLAQDDIDGIQAIYGRSQNPVQPIGPQTPKACDSKLTFDAITTIRGEVMFFKDRFYMRTNPFYPEVELNFISVFWPQLPNGLEAAYEFADRDEVRFFKGNKYWAVQGQNVLHGYPKDIYSSFGFPRTVKHIDAALSEENTGKTYFFVANKYWRYDEYKRSMDPGYPKMIAHDFPGIGHKVDAVFMKDGFFYFFHGTRQYKFDPKTKRILTLQKANSWFNCRKN

SEQ ID NO: 2788 - protein, 450 aa, Artificial Sequence
  MMP-1 variant G214W
FPATLETQEQDVDLVQKYLEKYYNLKNDGRQVEKRRNSGPVVEKLKQMQEFFGLKVTGKPDAETLKVMKQPRCGVPDVAQFVLTEGNPRWEQTHLTYRIENYTPDLPRADVDHAIEKAFQLWSNVTPLTFTKVSEGQADIMISFVRGDHRDNSPFDGPGGNLAHAFQPGPGIGGDAHFDEDERWTNNFREYNLHRVAAHELGHSLGLSHSTDIWALMYPSYTFSGDVQLAQDDIDGIQAIYGRSQNPVQPIGPQTPKACDSKLTFDAITTIRGEVMFFKDRFYMRTNPFYPEVELNFISVFWPQLPNGLEAAYEFADRDEVRFFKGNKYWAVQGQNVLHGYPKDIYSSFGFPRTVKHIDAALSEENTGKTYFFVANKYWRYDEYKRSMDPGYPKMIAHDFPGIGHKVDAVFMKDGFFYFFHGTRQYKFDPKTKRILTLQKANSWFNCRKN

SEQ ID NO: 2789 - protein, 450 aa, Artificial Sequence
  MMP-1 variant G214I
FPATLETQEQDVDLVQKYLEKYYNLKNDGRQVEKRRNSGPVVEKLKQMQEFFGLKVTGKPDAETLKVMKQPRCGVPDVAQFVLTEGNPRWEQTHLTYRIENYTPDLPRADVDHAIEKAFQLWSNVTPLTFTKVSEGQADIMISFVRGDHRDNSPFDGPGGNLAHAFQPGPGIGGDAHFDEDERWTNNFREYNLHRVAAHELGHSLGLSHSTDIIALMYPSYTFSGDVQLAQDDIDGIQAIYGRSQNPVQPIGPQTPKACDSKLTFDAITTIRGEVMFFKDRFYMRTNPFYPEVELNFISVFWPQLPNGLEAAYEFADRDEVRFFKGNKYWAVQGQNVLHGYPKDIYSSFGFPRTVKHIDAALSEENTGKTYFFVANKYWRYDEYKRSMDPGYPKMIAHDFPGIGHKVDAVFMKDGFFYFFHGTRQYKFDPKTKRILTLQKANSWFNCRKN

SEQ ID NO: 2790 - protein, 450 aa, Artificial Sequence
  MMP-1 variant G214V
FPATLETQEQDVDLVQKYLEKYYNLKNDGRQVEKRRNSGPVVEKLKQMQEFFGLKVTGKPDAETLKVMKQPRCGVPDVAQFVLTEGNPRWEQTHLTYRIENYTPDLPRADVDHAIEKAFQLWSNVTPLTFTKVSEGQADIMISFVRGDHRDNSPFDGPGGNLAHAFQPGPGIGGDAHFDEDERWTNNFREYNLHRVAAHELGHSLGLSHSTDIVALMYPSYTFSGDVQLAQDDIDGIQAIYGRSQNPVQPIGPQTPKACDSKLTFDAITTIRGEVMFFKDRFYMRTNPFYPEVELNFISVFWPQLPNGLEAAYEFADRDEVRFFKGNKYWAVQGQNVLHGYPKDIYSSFGFPRTVKHIDAALSEENTGKTYFFVANKYWRYDEYKRSMDPGYPKMIAHDFPGIGHKVDAVFMKDGFFYFFHGTRQYKFDPKTKRILTLQKANSWFNCRKN

SEQ ID NO: 2791 - protein, 450 aa, Artificial Sequence
  MMP-1 variant G214L
FPATLETQEQDVDLVQKYLEKYYNLKNDGRQVEKRRNSGPVVEKLKQMQEFFGLKVTGKPDAETLKVMKQPRCGVPDVAQFVLTEGNPRWEQTHLTYRIENYTPDLPRADVDHAIEKAFQLWSNVTPLTFTKVSEGQADIMISFVRGDHRDNSPFDGPGGNLAHAFQPGPGIGGDAHFDEDERWTNNFREYNLHRVAAHELGHSLGLSHSTDILALMYPSYTFSGDVQLAQDDIDGIQAIYGRSQNPVQPIGPQTPKACDSKLTFDAITTIRGEVMFFKDRFYMRTNPFYPEVELNFISVFWPQLPNGLEAAYEFADRDEVRFFKGNKYWAVQGQNVLHGYPKDIYSSFGFPRTVKHIDAALSEENTGKTYFFVANKYWRYDEYKRSMDPGYPKMIAHDFPGIGHKVDAVFMKDGFFYFFHGTRQYKFDPKTKRILTLQKANSWFNCRKN

SEQ ID NO: 2792 - protein, 450 aa, Artificial Sequence
  MMP-1 variant G214A
FPATLETQEQDVDLVQKYLEKYYNLKNDGRQVEKRRNSGPVVEKLKQMQEFFGLKVTGKPDAETLKVMKQPRCGVPDVAQFVLTEGNPRWEQTHLTYRIENYTPDLPRADVDHAIEKAFQLWSNVTPLTFTKVSEGQADIMISFVRGDHRDNSPFDGPGGNLAHAFQPGPGIGGDAHFDEDERWTNNFREYNLHRVAAHELGHSLGLSHSTDIAALMYPSYTFSGDVQLAQDDIDGIQAIYGRSQNPVQPIGPQTPKACDSKLTFDAITTIRGEVMFFKDRFYMRTNPFYPEVELNFISVFWPQLPNGLEAAYEFADRDEVRFFKGNKYWAVQGQNVLHGYPKDIYSSFGFPRTVKHIDAALSEENTGKTYFFVANKYWRYDEYKRSMDPGYPKMIAHDFPGIGHKVDAVFMKDGFFYFFHGTRQYKFDPKTKRILTLQKANSWFNCRKN

SEQ ID NO: 2793 - protein, 450 aa, Artificial Sequence
  MMP-1 variant G214P
FPATLETQEQDVDLVQKYLEKYYNLKNDGRQVEKRRNSGPVVEKLKQMQEFFGLKVTGKPDAETLKVMKQPRCGVPDVAQFVLTEGNPRWEQTHLTYRIENYTPDLPRADVDHAIEKAFQLWSNVTPLTFTKVSEGQADIMISFVRGDHRDNSPFDGPGGNLAHAFQPGPGIGGDAHFDEDERWTNNFREYNLHRVAAHELGHSLGLSHSTDIPALMYPSYTFSGDVQLAQDDIDGIQAIYGRSQNPVQPIGPQTPKACDSKLTFDAITTIRGEVMFFKDRFYMRTNPFYPEVELNFISVFWPQLPNGLEAAYEFADRDEVRFFKGNKYWAVQGQNVLHGYPKDIYSSFGFPRTVKHIDAALSEENTGKTYFFVANKYWRYDEYKRSMDPGYPKMIAHDFPGIGHKVDAVFMKDGFFYFFHGTRQYKFDPKTKRILTLQKANSWFNCRKN

SEQ ID NO: 2794 - protein, 450 aa, Artificial Sequence
  MMP-1 variant A215D
FPATLETQEQDVDLVQKYLEKYYNLKNDGRQVEKRRNSGPVVEKLKQMQEFFGLKVTGKPDAETLKVMKQPRCGVPDVAQFVLTEGNPRWEQTHLTYRIENYTPDLPRADVDHAIEKAFQLWSNVTPLTFTKVSEGQADIMISFVRGDHRDNSPFDGPGGNLAHAFQPGPGIGGDAHFDEDERWTNNFREYNLHRVAAHELGHSLGLSHSTDIGDLMYPSYTFSGDVQLAQDDIDGIQAIYGRSQNPVQPIGPQTPKACDSKLTFDAITTIRGEVMFFKDRFYMRTNPFYPEVELNFISVFWPQLPNGLEAAYEFADRDEVRFFKGNKYWAVQGQNVLHGYPKDIYSSFGFPRTVKHIDAALSEENTGKTYFFVANKYWRYDEYKRSMDPGYPKMIAHDFPGIGHKVDAVFMKDGFFYFFHGTRQYKFDPKTKRILTLQKANSWFNCRKN

SEQ ID NO: 2795 - protein, 450 aa, Artificial Sequence
  MMP-1 variant A215E
FPATLETQEQDVDLVQKYLEKYYNLKNDGRQVEKRRNSGPVVEKLKQMQEFFGLKVTGKPDAETLKVMKQPRCGVPDVAQFVLTEGNPRWEQTHLTYRIENYTPDLPRADVDHAIEKAFQLWSNVTPLTFTKVSEGQADIMISFVRGDHRDNSPFDGPGGNLAHAFQPGPGIGGDAHFDEDERWTNNFREYNLHRVAAHELGHSLGLSHSTDIGELMYPSYTFSGDVQLAQDDIDGIQAIYGRSQNPVQPIGPQTPKACDSKLTFDAITTIRGEVMFFKDRFYMRTNPFYPEVELNFISVFWPQLPNGLEAAYEFADRDEVRFFKGNKYWAVQGQNVLHGYPKDIYSSFGFPRTVKHIDAALSEENTGKTYFFVANKYWRYDEYKRSMDPGYPKMIAHDFPGIGHKVDAVFMKDGFFYFFHGTRQYKFDPKTKRILTLQKANSWFNCRKN

SEQ ID NO: 2796 - protein, 450 aa, Artificial Sequence
  MMP-1 variant A215H
FPATLETQEQDVDLVQKYLEKYYNLKNDGRQVEKRRNSGPVVEKLKQMQEFFGLKVTGKPDAETLKVMKQPRCGVPDVAQFVLTEGNPRWEQTHLTYRIENYTPDLPRADVDHAIEKAFQLWSNVTPLTFTKVSEGQADIMISFVRGDHRDNSPFDGPGGNLAHAFQPGPGIGGDAHFDEDERWTNNFREYNLHRVAAHELGHSLGLSHSTDIGHLMYPSYTFSGDVQLAQDDIDGIQAIYGRSQNPVQPIGPQTPKACDSKLTFDAITTIRGEVMFFKDRFYMRTNPFYPEVELNFISVFWPQLPNGLEAAYEFADRDEVRFFKGNKYWAVQGQNVLHGYPKDIYSSFGFPRTVKHIDAALSEENTGKTYFFVANKYWRYDEYKRSMDPGYPKMIAHDFPGIGHKVDAVFMKDGFFYFFHGTRQYKFDPKTKRILTLQKANSWFNCRKN

SEQ ID NO: 2797 - protein, 450 aa, Artificial Sequence
  MMP-1 variant A215K
FPATLETQEQDVDLVQKYLEKYYNLKNDGRQVEKRRNSGPVVEKLKQMQEFFGLKVTGKPDAETLKVMKQPRCGVPDVAQFVLTEGNPRWEQTHLTYRIENYTPDLPRADVDHAIEKAFQLWSNVTPLTFTKVSEGQADIMISFVRGDHRDNSPFDGPGGNLAHAFQPGPGIGGDAHFDEDERWTNNFREYNLHRVAAHELGHSLGLSHSTDIGKLMYPSYTFSGDVQLAQDDIDGIQAIYGRSQNPVQPIGPQTPKACDSKLTFDAITTIRGEVMFFKDRFYMRTNPFYPEVELNFISVFWPQLPNGLEAAYEFADRDEVRFFKGNKYWAVQGQNVLHGYPKDIYSSFGFPRTVKHIDAALSEENTGKTYFFVANKYWRYDEYKRSMDPGYPKMIAHDFPGIGHKVDAVFMKDGFFYFFHGTRQYKFDPKTKRILTLQKANSWFNCRKN

SEQ ID NO: 2798 - protein, 450 aa, Artificial Sequence
  MMP-1 variant A215R
FPATLETQEQDVDLVQKYLEKYYNLKNDGRQVEKRRNSGPVVEKLKQMQEFFGLKVTGKPDAETLKVMKQPRCGVPDVAQFVLTEGNPRWEQTHLTYRIENYTPDLPRADVDHAIEKAFQLWSNVTPLTFTKVSEGQADIMISFVRGDHRDNSPFDGPGGNLAHAFQPGPGIGGDAHFDEDERWTNNFREYNLHRVAAHELGHSLGLSHSTDIGRLMYPSYTFSGDVQLAQDDIDGIQAIYGRSQNPVQPIGPQTPKACDSKLTFDAITTIRGEVMFFKDRFYMRTNPFYPEVELNFISVFWPQLPNGLEAAYEFADRDEVRFFKGNKYWAVQGQNVLHGYPKDIYSSFGFPRTVKHIDAALSEENTGKTYFFVANKYWRYDEYKRSMDPGYPKMIAHDFPGIGHKVDAVFMKDGFFYFFHGTRQYKFDPKTKRILTLQKANSWFNCRKN

SEQ ID NO: 2799 - protein, 450 aa, Artificial Sequence
  MMP-1 variant A215C
FPATLETQEQDVDLVQKYLEKYYNLKNDGRQVEKRRNSGPVVEKLKQMQEFFGLKVTGKPDAETLKVMKQPRCGVPDVAQFVLTEGNPRWEQTHLTYRIENYTPDLPRADVDHAIEKAFQLWSNVTPLTFTKVSEGQADIMISFVRGDHRDNSPFDGPGGNLAHAFQPGPGIGGDAHFDEDERWTNNFREYNLHRVAAHELGHSLGLSHSTDIGCLMYPSYTFSGDVQLAQDDIDGIQAIYGRSQNPVQPIGPQTPKACDSKLTFDAITTIRGEVMFFKDRFYMRTNPFYPEVELNFISVFWPQLPNGLEAAYEFADRDEVRFFKGNKYWAVQGQNVLHGYPKDIYSSFGFPRTVKHIDAALSEENTGKTYFFVANKYWRYDEYKRSMDPGYPKMIAHDFPGIGHKVDAVFMKDGFFYFFHGTRQYKFDPKTKRILTLQKANSWFNCRKN

SEQ ID NO: 2800 - protein, 450 aa, Artificial Sequence
  MMP-1 variant A215N
FPATLETQEQDVDLVQKYLEKYYNLKNDGRQVEKRRNSGPVVEKLKQMQEFFGLKVTGKPDAETLKVMKQPRCGVPDVAQFVLTEGNPRWEQTHLTYRIENYTPDLPRADVDHAIEKAFQLWSNVTPLTFTKVSEGQADIMISFVRGDHRDNSPFDGPGGNLAHAFQPGPGIGGDAHFDEDERWTNNFREYNLHRVAAHELGHSLGLSHSTDIGNLMYPSYTFSGDVQLAQDDIDGIQAIYGRSQNPVQPIGPQTPKACDSKLTFDAITTIRGEVMFFKDRFYMRTNPFYPEVELNFISVFWPQLPNGLEAAYEFADRDEVRFFKGNKYWAVQGQNVLHGYPKDIYSSFGFPRTVKHIDAALSEENTGKTYFFVANKYWRYDEYKRSMDPGYPKMIAHDFPGIGHKVDAVFMKDGFFYFFHGTRQYKFDPKTKRILTLQKANSWFNCRKN

SEQ ID NO: 2801 - protein, 450 aa, Artificial Sequence
  MMP-1 variant A215Q
FPATLETQEQDVDLVQKYLEKYYNLKNDGRQVEKRRNSGPVVEKLKQMQEFFGLKVTGKPDAETLKVMKQPRCGVPDVAQFVLTEGNPRWEQTHLTYRIENYTPDLPRADVDHAIEKAFQLWSNVTPLTFTKVSEGQADIMISFVRGDHRDNSPFDGPGGNLAHAFQPGPGIGGDAHFDEDERWTNNFREYNLHRVAAHELGHSLGLSHSTDIGQLMYPSYTFSGDVQLAQDDIDGIQAIYGRSQNPVQPIGPQTPKACDSKLTFDAITTIRGEVMFFKDRFYMRTNPFYPEVELNFISVFWPQLPNGLEAAYEFADRDEVRFFKGNKYWAVQGQNVLHGYPKDIYSSFGFPRTVKHIDAALSEENTGKTYFFVANKYWRYDEYKRSMDPGYPKMIAHDFPGIGHKVDAVFMKDGFFYFFHGTRQYKFDPKTKRILTLQKANSWFNCRKN

SEQ ID NO: 2802 - protein, 450 aa, Artificial Sequence
  MMP-1 variant A215T
FPATLETQEQDVDLVQKYLEKYYNLKNDGRQVEKRRNSGPVVEKLKQMQEFFGLKVTGKPDAETLKVMKQPRCGVPDVAQFVLTEGNPRWEQTHLTYRIENYTPDLPRADVDHAIEKAFQLWSNVTPLTFTKVSEGQADIMISFVRGDHRDNSPFDGPGGNLAHAFQPGPGIGGDAHFDEDERWTNNFREYNLHRVAAHELGHSLGLSHSTDIGTLMYPSYTFSGDVQLAQDDIDGIQAIYGRSQNPVQPIGPQTPKACDSKLTFDAITTIRGEVMFFKDRFYMRTNPFYPEVELNFISVFWPQLPNGLEAAYEFADRDEVRFFKGNKYWAVQGQNVLHGYPKDIYSSFGFPRTVKHIDAALSEENTGKTYFFVANKYWRYDEYKRSMDPGYPKMIAHDFPGIGHKVDAVFMKDGFFYFFHGTRQYKFDPKTKRILTLQKANSWFNCRKN

SEQ ID NO: 2803 - protein, 450 aa, Artificial Sequence
  MMP-1 variant A215Y
FPATLETQEQDVDLVQKYLEKYYNLKNDGRQVEKRRNSGPVVEKLKQMQEFFGLKVTGKPDAETLKVMKQPRCGVPDVAQFVLTEGNPRWEQTHLTYRIENYTPDLPRADVDHAIEKAFQLWSNVTPLTFTKVSEGQADIMISFVRGDHRDNSPFDGPGGNLAHAFQPGPGIGGDAHFDEDERWTNNFREYNLHRVAAHELGHSLGLSHSTDIGYLMYPSYTFSGDVQLAQDDIDGIQAIYGRSQNPVQPIGPQTPKACDSKLTFDAITTIRGEVMFFKDRFYMRTNPFYPEVELNFISVFWPQLPNGLEAAYEFADRDEVRFFKGNKYWAVQGQNVLHGYPKDIYSSFGFPRTVKHIDAALSEENTGKTYFFVANKYWRYDEYKRSMDPGYPKMIAHDFPGIGHKVDAVFMKDGFFYFFHGTRQYKFDPKTKRILTLQKANSWFNCRKN

SEQ ID NO: 2804 - protein, 450 aa, Artificial Sequence
  MMP-1 variant A215S
FPATLETQEQDVDLVQKYLEKYYNLKNDGRQVEKRRNSGPVVEKLKQMQEFFGLKVTGKPDAETLKVMKQPRCGVPDVAQFVLTEGNPRWEQTHLTYRIENYTPDLPRADVDHAIEKAFQLWSNVTPLTFTKVSEGQADIMISFVRGDHRDNSPFDGPGGNLAHAFQPGPGIGGDAHFDEDERWTNNFREYNLHRVAAHELGHSLGLSHSTDIGSLMYPSYTFSGDVQLAQDDIDGIQAIYGRSQNPVQPIGPQTPKACDSKLTFDAITTIRGEVMFFKDRFYMRTNPFYPEVELNFISVFWPQLPNGLEAAYEFADRDEVRFFKGNKYWAVQGQNVLHGYPKDIYSSFGFPRTVKHIDAALSEENTGKTYFFVANKYWRYDEYKRSMDPGYPKMIAHDFPGIGHKVDAVFMKDGFFYFFHGTRQYKFDPKTKRILTLQKANSWFNCRKN

SEQ ID NO: 2805 - protein, 450 aa, Artificial Sequence
  MMP-1 variant A215G
FPATLETQEQDVDLVQKYLEKYYNLKNDGRQVEKRRNSGPVVEKLKQMQEFFGLKVTGKPDAETLKVMKQPRCGVPDVAQFVLTEGNPRWEQTHLTYRIENYTPDLPRADVDHAIEKAFQLWSNVTPLTFTKVSEGQADIMISFVRGDHRDNSPFDGPGGNLAHAFQPGPGIGGDAHFDEDERWTNNFREYNLHRVAAHELGHSLGLSHSTDIGGLMYPSYTFSGDVQLAQDDIDGIQAIYGRSQNPVQPIGPQTPKACDSKLTFDAITTIRGEVMFFKDRFYMRTNPFYPEVELNFISVFWPQLPNGLEAAYEFADRDEVRFFKGNKYWAVQGQNVLHGYPKDIYSSFGFPRTVKHIDAALSEENTGKTYFFVANKYWRYDEYKRSMDPGYPKMIAHDFPGIGHKVDAVFMKDGFFYFFHGTRQYKFDPKTKRILTLQKANSWFNCRKN

SEQ ID NO: 2806 - protein, 450 aa, Artificial Sequence
  MMP-1 variant A215F
FPATLETQEQDVDLVQKYLEKYYNLKNDGRQVEKRRNSGPVVEKLKQMQEFFGLKVTGKPDAETLKVMKQPRCGVPDVAQFVLTEGNPRWEQTHLTYRIENYTPDLPRADVDHAIEKAFQLWSNVTPLTFTKVSEGQADIMISFVRGDHRDNSPFDGPGGNLAHAFQPGPGIGGDAHFDEDERWTNNFREYNLHRVAAHELGHSLGLSHSTDIGFLMYPSYTFSGDVQLAQDDIDGIQAIYGRSQNPVQPIGPQTPKACDSKLTFDAITTIRGEVMFFKDRFYMRTNPFYPEVELNFISVFWPQLPNGLEAAYEFADRDEVRFFKGNKYWAVQGQNVLHGYPKDIYSSFGFPRTVKHIDAALSEENTGKTYFFVANKYWRYDEYKRSMDPGYPKMIAHDFPGIGHKVDAVFMKDGFFYFFHGTRQYKFDPKTKRILTLQKANSWFNCRKN

SEQ ID NO: 2807 - protein, 450 aa, Artificial Sequence
  MMP-1 variant A215M
FPATLETQEQDVDLVQKYLEKYYNLKNDGRQVEKRRNSGPVVEKLKQMQEFFGLKVTGKPDAETLKVMKQPRCGVPDVAQFVLTEGNPRWEQTHLTYRIENYTPDLPRADVDHAIEKAFQLWSNVTPLTFTKVSEGQADIMISFVRGDHRDNSPFDGPGGNLAHAFQPGPGIGGDAHFDEDERWTNNFREYNLHRVAAHELGHSLGLSHSTDIGMLMYPSYTFSGDVQLAQDDIDGIQAIYGRSQNPVQPIGPQTPKACDSKLTFDAITTIRGEVMFFKDRFYMRTNPFYPEVELNFISVFWPQLPNGLEAAYEFADRDEVRFFKGNKYWAVQGQNVLHGYPKDIYSSFGFPRTVKHIDAALSEENTGKTYFFVANKYWRYDEYKRSMDPGYPKMIAHDFPGIGHKVDAVFMKDGFFYFFHGTRQYKFDPKTKRILTLQKANSWFNCRKN

SEQ ID NO: 2808 - protein, 450 aa, Artificial Sequence
  MMP-1 variant A215W
FPATLETQEQDVDLVQKYLEKYYNLKNDGRQVEKRRNSGPVVEKLKQMQEFFGLKVTGKPDAETLKVMKQPRCGVPDVAQFVLTEGNPRWEQTHLTYRIENYTPDLPRADVDHAIEKAFQLWSNVTPLTFTKVSEGQADIMISFVRGDHRDNSPFDGPGGNLAHAFQPGPGIGGDAHFDEDERWTNNFREYNLHRVAAHELGHSLGLSHSTDIGWLMYPSYTFSGDVQLAQDDIDGIQAIYGRSQNPVQPIGPQTPKACDSKLTFDAITTIRGEVMFFKDRFYMRTNPFYPEVELNFISVFWPQLPNGLEAAYEFADRDEVRFFKGNKYWAVQGQNVLHGYPKDIYSSFGFPRTVKHIDAALSEENTGKTYFFVANKYWRYDEYKRSMDPGYPKMIAHDFPGIGHKVDAVFMKDGFFYFFHGTRQYKFDPKTKRILTLQKANSWFNCRKN

SEQ ID NO: 2809 - protein, 450 aa, Artificial Sequence
  MMP-1 variant A215I
FPATLETQEQDVDLVQKYLEKYYNLKNDGRQVEKRRNSGPVVEKLKQMQEFFGLKVTGKPDAETLKVMKQPRCGVPDVAQFVLTEGNPRWEQTHLTYRIENYTPDLPRADVDHAIEKAFQLWSNVTPLTFTKVSEGQADIMISFVRGDHRDNSPFDGPGGNLAHAFQPGPGIGGDAHFDEDERWTNNFREYNLHRVAAHELGHSLGLSHSTDIGILMYPSYTFSGDVQLAQDDIDGIQAIYGRSQNPVQPIGPQTPKACDSKLTFDAITTIRGEVMFFKDRFYMRTNPFYPEVELNFISVFWPQLPNGLEAAYEFADRDEVRFFKGNKYWAVQGQNVLHGYPKDIYSSFGFPRTVKHIDAALSEENTGKTYFFVANKYWRYDEYKRSMDPGYPKMIAHDFPGIGHKVDAVFMKDGFFYFFHGTRQYKFDPKTKRILTLQKANSWFNCRKN

SEQ ID NO: 2810 - protein, 450 aa, Artificial Sequence
  MMP-1 variant A215V
FPATLETQEQDVDLVQKYLEKYYNLKNDGRQVEKRRNSGPVVEKLKQMQEFFGLKVTGKPDAETLKVMKQPRCGVPDVAQFVLTEGNPRWEQTHLTYRIENYTPDLPRADVDHAIEKAFQLWSNVTPLTFTKVSEGQADIMISFVRGDHRDNSPFDGPGGNLAHAFQPGPGIGGDAHFDEDERWTNNFREYNLHRVAAHELGHSLGLSHSTDIGVLMYPSYTFSGDVQLAQDDIDGIQAIYGRSQNPVQPIGPQTPKACDSKLTFDAITTIRGEVMFFKDRFYMRTNPFYPEVELNFISVFWPQLPNGLEAAYEFADRDEVRFFKGNKYWAVQGQNVLHGYPKDIYSSFGFPRTVKHIDAALSEENTGKTYFFVANKYWRYDEYKRSMDPGYPKMIAHDFPGIGHKVDAVFMKDGFFYFFHGTRQYKFDPKTKRILTLQKANSWFNCRKN

SEQ ID NO: 2811 - protein, 450 aa, Artificial Sequence
  MMP-1 variant A215L
FPATLETQEQDVDLVQKYLEKYYNLKNDGRQVEKRRNSGPVVEKLKQMQEFFGLKVTGKPDAETLKVMKQPRCGVPDVAQFVLTEGNPRWEQTHLTYRIENYTPDLPRADVDHAIEKAFQLWSNVTPLTFTKVSEGQADIMISFVRGDHRDNSPFDGPGGNLAHAFQPGPGIGGDAHFDEDERWTNNFREYNLHRVAAHELGHSLGLSHSTDIGLLMYPSYTFSGDVQLAQDDIDGIQAIYGRSQNPVQPIGPQTPKACDSKLTFDAITTIRGEVMFFKDRFYMRTNPFYPEVELNFISVFWPQLPNGLEAAYEFADRDEVRFFKGNKYWAVQGQNVLHGYPKDIYSSFGFPRTVKHIDAALSEENTGKTYFFVANKYWRYDEYKRSMDPGYPKMIAHDFPGIGHKVDAVFMKDGFFYFFHGTRQYKFDPKTKRILTLQKANSWFNCRKN

SEQ ID NO: 2812 - protein, 450 aa, Artificial Sequence
  MMP-1 variant A215P
FPATLETQEQDVDLVQKYLEKYYNLKNDGRQVEKRRNSGPVVEKLKQMQEFFGLKVTGKPDAETLKVMKQPRCGVPDVAQFVLTEGNPRWEQTHLTYRIENYTPDLPRADVDHAIEKAFQLWSNVTPLTFTKVSEGQADIMISFVRGDHRDNSPFDGPGGNLAHAFQPGPGIGGDAHFDEDERWTNNFREYNLHRVAAHELGHSLGLSHSTDIGPLMYPSYTFSGDVQLAQDDIDGIQAIYGRSQNPVQPIGPQTPKACDSKLTFDAITTIRGEVMFFKDRFYMRTNPFYPEVELNFISVFWPQLPNGLEAAYEFADRDEVRFFKGNKYWAVQGQNVLHGYPKDIYSSFGFPRTVKHIDAALSEENTGKTYFFVANKYWRYDEYKRSMDPGYPKMIAHDFPGIGHKVDAVFMKDGFFYFFHGTRQYKFDPKTKRILTLQKANSWFNCRKN

SEQ ID NO: 2813 - protein, 450 aa, Artificial Sequence
  MMP-1 variant L216D
FPATLETQEQDVDLVQKYLEKYYNLKNDGRQVEKRRNSGPVVEKLKQMQEFFGLKVTGKPDAETLKVMKQPRCGVPDVAQFVLTEGNPRWEQTHLTYRIENYTPDLPRADVDHAIEKAFQLWSNVTPLTFTKVSEGQADIMISFVRGDHRDNSPFDGPGGNLAHAFQPGPGIGGDAHFDEDERWTNNFREYNLHRVAAHELGHSLGLSHSTDIGADMYPSYTFSGDVQLAQDDIDGIQAIYGRSQNPVQPIGPQTPKACDSKLTFDAITTIRGEVMFFKDRFYMRTNPFYPEVELNFISVFWPQLPNGLEAAYEFADRDEVRFFKGNKYWAVQGQNVLHGYPKDIYSSFGFPRTVKHIDAALSEENTGKTYFFVANKYWRYDEYKRSMDPGYPKMIAHDFPGIGHKVDAVFMKDGFFYFFHGTRQYKFDPKTKRILTLQKANSWFNCRKN

SEQ ID NO: 2814 - protein, 450 aa, Artificial Sequence
  MMP-1 variant L216E
FPATLETQEQDVDLVQKYLEKYYNLKNDGRQVEKRRNSGPVVEKLKQMQEFFGLKVTGKPDAETLKVMKQPRCGVPDVAQFVLTEGNPRWEQTHLTYRIENYTPDLPRADVDHAIEKAFQLWSNVTPLTFTKVSEGQADIMISFVRGDHRDNSPFDGPGGNLAHAFQPGPGIGGDAHFDEDERWTNNFREYNLHRVAAHELGHSLGLSHSTDIGAEMYPSYTFSGDVQLAQDDIDGIQAIYGRSQNPVQPIGPQTPKACDSKLTFDAITTIRGEVMFFKDRFYMRTNPFYPEVELNFISVFWPQLPNGLEAAYEFADRDEVRFFKGNKYWAVQGQNVLHGYPKDIYSSFGFPRTVKHIDAALSEENTGKTYFFVANKYWRYDEYKRSMDPGYPKMIAHDFPGIGHKVDAVFMKDGFFYFFHGTRQYKFDPKTKRILTLQKANSWFNCRKN

SEQ ID NO: 2815 - protein, 450 aa, Artificial Sequence
  MMP-1 variant L216H
FPATLETQEQDVDLVQKYLEKYYNLKNDGRQVEKRRNSGPVVEKLKQMQEFFGLKVTGKPDAETLKVMKQPRCGVPDVAQFVLTEGNPRWEQTHLTYRIENYTPDLPRADVDHAIEKAFQLWSNVTPLTFTKVSEGQADIMISFVRGDHRDNSPFDGPGGNLAHAFQPGPGIGGDAHFDEDERWTNNFREYNLHRVAAHELGHSLGLSHSTDIGAHMYPSYTFSGDVQLAQDDIDGIQAIYGRSQNPVQPIGPQTPKACDSKLTFDAITTIRGEVMFFKDRFYMRTNPFYPEVELNFISVFWPQLPNGLEAAYEFADRDEVRFFKGNKYWAVQGQNVLHGYPKDIYSSFGFPRTVKHIDAALSEENTGKTYFFVANKYWRYDEYKRSMDPGYPKMIAHDFPGIGHKVDAVFMKDGFFYFFHGTRQYKFDPKTKRILTLQKANSWFNCRKN

SEQ ID NO: 2816 - protein, 450 aa, Artificial Sequence
  MMP-1 variant L216K
FPATLETQEQDVDLVQKYLEKYYNLKNDGRQVEKRRNSGPVVEKLKQMQEFFGLKVTGKPDAETLKVMKQPRCGVPDVAQFVLTEGNPRWEQTHLTYRIENYTPDLPRADVDHAIEKAFQLWSNVTPLTFTKVSEGQADIMISFVRGDHRDNSPFDGPGGNLAHAFQPGPGIGGDAHFDEDERWTNNFREYNLHRVAAHELGHSLGLSHSTDIGAKMYPSYTFSGDVQLAQDDIDGIQAIYGRSQNPVQPIGPQTPKACDSKLTFDAITTIRGEVMFFKDRFYMRTNPFYPEVELNFISVFWPQLPNGLEAAYEFADRDEVRFFKGNKYWAVQGQNVLHGYPKDIYSSFGFPRTVKHIDAALSEENTGKTYFFVANKYWRYDEYKRSMDPGYPKMIAHDFPGIGHKVDAVFMKDGFFYFFHGTRQYKFDPKTKRILTLQKANSWFNCRKN

SEQ ID NO: 2817 - protein, 450 aa, Artificial Sequence
  MMP-1 variant L216R
FPATLETQEQDVDLVQKYLEKYYNLKNDGRQVEKRRNSGPVVEKLKQMQEFFGLKVTGKPDAETLKVMKQPRCGVPDVAQFVLTEGNPRWEQTHLTYRIENYTPDLPRADVDHAIEKAFQLWSNVTPLTFTKVSEGQADIMISFVRGDHRDNSPFDGPGGNLAHAFQPGPGIGGDAHFDEDERWTNNFREYNLHRVAAHELGHSLGLSHSTDIGARMYPSYTFSGDVQLAQDDIDGIQAIYGRSQNPVQPIGPQTPKACDSKLTFDAITTIRGEVMFFKDRFYMRTNPFYPEVELNFISVFWPQLPNGLEAAYEFADRDEVRFFKGNKYWAVQGQNVLHGYPKDIYSSFGFPRTVKHIDAALSEENTGKTYFFVANKYWRYDEYKRSMDPGYPKMIAHDFPGIGHKVDAVFMKDGFFYFFHGTRQYKFDPKTKRILTLQKANSWFNCRKN

SEQ ID NO: 2818 - protein, 450 aa, Artificial Sequence
  MMP-1 variant L216C
FPATLETQEQDVDLVQKYLEKYYNLKNDGRQVEKRRNSGPVVEKLKQMQEFFGLKVTGKPDAETLKVMKQPRCGVPDVAQFVLTEGNPRWEQTHLTYRIENYTPDLPRADVDHAIEKAFQLWSNVTPLTFTKVSEGQADIMISFVRGDHRDNSPFDGPGGNLAHAFQPGPGIGGDAHFDEDERWTNNFREYNLHRVAAHELGHSLGLSHSTDIGACMYPSYTFSGDVQLAQDDIDGIQAIYGRSQNPVQPIGPQTPKACDSKLTFDAITTIRGEVMFFKDRFYMRTNPFYPEVELNFISVFWPQLPNGLEAAYEFADRDEVRFFKGNKYWAVQGQNVLHGYPKDIYSSFGFPRTVKHIDAALSEENTGKTYFFVANKYWRYDEYKRSMDPGYPKMIAHDFPGIGHKVDAVFMKDGFFYFFHGTRQYKFDPKTKRILTLQKANSWFNCRKN

SEQ ID NO: 2819 - protein, 450 aa, Artificial Sequence
  MMP-1 variant L216N
FPATLETQEQDVDLVQKYLEKYYNLKNDGRQVEKRRNSGPVVEKLKQMQEFFGLKVTGKPDAETLKVMKQPRCGVPDVAQFVLTEGNPRWEQTHLTYRIENYTPDLPRADVDHAIEKAFQLWSNVTPLTFTKVSEGQADIMISFVRGDHRDNSPFDGPGGNLAHAFQPGPGIGGDAHFDEDERWTNNFREYNLHRVAAHELGHSLGLSHSTDIGANMYPSYTFSGDVQLAQDDIDGIQAIYGRSQNPVQPIGPQTPKACDSKLTFDAITTIRGEVMFFKDRFYMRTNPFYPEVELNFISVFWPQLPNGLEAAYEFADRDEVRFFKGNKYWAVQGQNVLHGYPKDIYSSFGFPRTVKHIDAALSEENTGKTYFFVANKYWRYDEYKRSMDPGYPKMIAHDFPGIGHKVDAVFMKDGFFYFFHGTRQYKFDPKTKRILTLQKANSWFNCRKN

SEQ ID NO: 2820 - protein, 450 aa, Artificial Sequence
  MMP-1 variant L216Q
FPATLETQEQDVDLVQKYLEKYYNLKNDGRQVEKRRNSGPVVEKLKQMQEFFGLKVTGKPDAETLKVMKQPRCGVPDVAQFVLTEGNPRWEQTHLTYRIENYTPDLPRADVDHAIEKAFQLWSNVTPLTFTKVSEGQADIMISFVRGDHRDNSPFDGPGGNLAHAFQPGPGIGGDAHFDEDERWTNNFREYNLHRVAAHELGHSLGLSHSTDIGAQMYPSYTFSGDVQLAQDDIDGIQAIYGRSQNPVQPIGPQTPKACDSKLTFDAITTIRGEVMFFKDRFYMRTNPFYPEVELNFISVFWPQLPNGLEAAYEFADRDEVRFFKGNKYWAVQGQNVLHGYPKDIYSSFGFPRTVKHIDAALSEENTGKTYFFVANKYWRYDEYKRSMDPGYPKMIAHDFPGIGHKVDAVFMKDGFFYFFHGTRQYKFDPKTKRILTLQKANSWFNCRKN

SEQ ID NO: 2821 - protein, 450 aa, Artificial Sequence
  MMP-1 variant L216T
FPATLETQEQDVDLVQKYLEKYYNLKNDGRQVEKRRNSGPVVEKLKQMQEFFGLKVTGKPDAETLKVMKQPRCGVPDVAQFVLTEGNPRWEQTHLTYRIENYTPDLPRADVDHAIEKAFQLWSNVTPLTFTKVSEGQADIMISFVRGDHRDNSPFDGPGGNLAHAFQPGPGIGGDAHFDEDERWTNNFREYNLHRVAAHELGHSLGLSHSTDIGATMYPSYTFSGDVQLAQDDIDGIQAIYGRSQNPVQPIGPQTPKACDSKLTFDAITTIRGEVMFFKDRFYMRTNPFYPEVELNFISVFWPQLPNGLEAAYEFADRDEVRFFKGNKYWAVQGQNVLHGYPKDIYSSFGFPRTVKHIDAALSEENTGKTYFFVANKYWRYDEYKRSMDPGYPKMIAHDFPGIGHKVDAVFMKDGFFYFFHGTRQYKFDPKTKRILTLQKANSWFNCRKN

SEQ ID NO: 2822 - protein, 450 aa, Artificial Sequence
  MMP-1 variant L216Y
FPATLETQEQDVDLVQKYLEKYYNLKNDGRQVEKRRNSGPVVEKLKQMQEFFGLKVTGKPDAETLKVMKQPRCGVPDVAQFVLTEGNPRWEQTHLTYRIENYTPDLPRADVDHAIEKAFQLWSNVTPLTFTKVSEGQADIMISFVRGDHRDNSPFDGPGGNLAHAFQPGPGIGGDAHFDEDERWTNNFREYNLHRVAAHELGHSLGLSHSTDIGAYMYPSYTFSGDVQLAQDDIDGIQAIYGRSQNPVQPIGPQTPKACDSKLTFDAITTIRGEVMFFKDRFYMRTNPFYPEVELNFISVFWPQLPNGLEAAYEFADRDEVRFFKGNKYWAVQGQNVLHGYPKDIYSSFGFPRTVKHIDAALSEENTGKTYFFVANKYWRYDEYKRSMDPGYPKMIAHDFPGIGHKVDAVFMKDGFFYFFHGTRQYKFDPKTKRILTLQKANSWFNCRKN

SEQ ID NO: 2823 - protein, 450 aa, Artificial Sequence
  MMP-1 variant L216S
FPATLETQEQDVDLVQKYLEKYYNLKNDGRQVEKRRNSGPVVEKLKQMQEFFGLKVTGKPDAETLKVMKQPRCGVPDVAQFVLTEGNPRWEQTHLTYRIENYTPDLPRADVDHAIEKAFQLWSNVTPLTFTKVSEGQADIMISFVRGDHRDNSPFDGPGGNLAHAFQPGPGIGGDAHFDEDERWTNNFREYNLHRVAAHELGHSLGLSHSTDIGASMYPSYTFSGDVQLAQDDIDGIQAIYGRSQNPVQPIGPQTPKACDSKLTFDAITTIRGEVMFFKDRFYMRTNPFYPEVELNFISVFWPQLPNGLEAAYEFADRDEVRFFKGNKYWAVQGQNVLHGYPKDIYSSFGFPRTVKHIDAALSEENTGKTYFFVANKYWRYDEYKRSMDPGYPKMIAHDFPGIGHKVDAVFMKDGFFYFFHGTRQYKFDPKTKRILTLQKANSWFNCRKN

SEQ ID NO: 2824 - protein, 450 aa, Artificial Sequence
  MMP-1 variant L216G
FPATLETQEQDVDLVQKYLEKYYNLKNDGRQVEKRRNSGPVVEKLKQMQEFFGLKVTGKPDAETLKVMKQPRCGVPDVAQFVLTEGNPRWEQTHLTYRIENYTPDLPRADVDHAIEKAFQLWSNVTPLTFTKVSEGQADIMISFVRGDHRDNSPFDGPGGNLAHAFQPGPGIGGDAHFDEDERWTNNFREYNLHRVAAHELGHSLGLSHSTDIGAGMYPSYTFSGDVQLAQDDIDGIQAIYGRSQNPVQPIGPQTPKACDSKLTFDAITTIRGEVMFFKDRFYMRTNPFYPEVELNFISVFWPQLPNGLEAAYEFADRDEVRFFKGNKYWAVQGQNVLHGYPKDIYSSFGFPRTVKHIDAALSEENTGKTYFFVANKYWRYDEYKRSMDPGYPKMIAHDFPGIGHKVDAVFMKDGFFYFFHGTRQYKFDPKTKRILTLQKANSWFNCRKN

SEQ ID NO: 2825 - protein, 450 aa, Artificial Sequence
  MMP-1 variant L216F
FPATLETQEQDVDLVQKYLEKYYNLKNDGRQVEKRRNSGPVVEKLKQMQEFFGLKVTGKPDAETLKVMKQPRCGVPDVAQFVLTEGNPRWEQTHLTYRIENYTPDLPRADVDHAIEKAFQLWSNVTPLTFTKVSEGQADIMISFVRGDHRDNSPFDGPGGNLAHAFQPGPGIGGDAHFDEDERWTNNFREYNLHRVAAHELGHSLGLSHSTDIGAFMYPSYTFSGDVQLAQDDIDGIQAIYGRSQNPVQPIGPQTPKACDSKLTFDAITTIRGEVMFFKDRFYMRTNPFYPEVELNFISVFWPQLPNGLEAAYEFADRDEVRFFKGNKYWAVQGQNVLHGYPKDIYSSFGFPRTVKHIDAALSEENTGKTYFFVANKYWRYDEYKRSMDPGYPKMIAHDFPGIGHKVDAVFMKDGFFYFFHGTRQYKFDPKTKRILTLQKANSWFNCRKN

SEQ ID NO: 2826 - protein, 450 aa, Artificial Sequence
  MMP-1 variant L216M
FPATLETQEQDVDLVQKYLEKYYNLKNDGRQVEKRRNSGPVVEKLKQMQEFFGLKVTGKPDAETLKVMKQPRCGVPDVAQFVLTEGNPRWEQTHLTYRIENYTPDLPRADVDHAIEKAFQLWSNVTPLTFTKVSEGQADIMISFVRGDHRDNSPFDGPGGNLAHAFQPGPGIGGDAHFDEDERWTNNFREYNLHRVAAHELGHSLGLSHSTDIGAMMYPSYTFSGDVQLAQDDIDGIQAIYGRSQNPVQPIGPQTPKACDSKLTFDAITTIRGEVMFFKDRFYMRTNPFYPEVELNFISVFWPQLPNGLEAAYEFADRDEVRFFKGNKYWAVQGQNVLHGYPKDIYSSFGFPRTVKHIDAALSEENTGKTYFFVANKYWRYDEYKRSMDPGYPKMIAHDFPGIGHKVDAVFMKDGFFYFFHGTRQYKFDPKTKRILTLQKANSWFNCRKN

SEQ ID NO: 2827 - protein, 450 aa, Artificial Sequence
  MMP-1 variant L216W
FPATLETQEQDVDLVQKYLEKYYNLKNDGRQVEKRRNSGPVVEKLKQMQEFFGLKVTGKPDAETLKVMKQPRCGVPDVAQFVLTEGNPRWEQTHLTYRIENYTPDLPRADVDHAIEKAFQLWSNVTPLTFTKVSEGQADIMISFVRGDHRDNSPFDGPGGNLAHAFQPGPGIGGDAHFDEDERWTNNFREYNLHRVAAHELGHSLGLSHSTDIGAWMYPSYTFSGDVQLAQDDIDGIQAIYGRSQNPVQPIGPQTPKACDSKLTFDAITTIRGEVMFFKDRFYMRTNPFYPEVELNFISVFWPQLPNGLEAAYEFADRDEVRFFKGNKYWAVQGQNVLHGYPKDIYSSFGFPRTVKHIDAALSEENTGKTYFFVANKYWRYDEYKRSMDPGYPKMIAHDFPGIGHKVDAVFMKDGFFYFFHGTRQYKFDPKTKRILTLQKANSWFNCRKN

SEQ ID NO: 2828 - protein, 450 aa, Artificial Sequence
  MMP-1 variant L216I
FPATLETQEQDVDLVQKYLEKYYNLKNDGRQVEKRRNSGPVVEKLKQMQEFFGLKVTGKPDAETLKVMKQPRCGVPDVAQFVLTEGNPRWEQTHLTYRIENYTPDLPRADVDHAIEKAFQLWSNVTPLTFTKVSEGQADIMISFVRGDHRDNSPFDGPGGNLAHAFQPGPGIGGDAHFDEDERWTNNFREYNLHRVAAHELGHSLGLSHSTDIGAIMYPSYTFSGDVQLAQDDIDGIQAIYGRSQNPVQPIGPQTPKACDSKLTFDAITTIRGEVMFFKDRFYMRTNPFYPEVELNFISVFWPQLPNGLEAAYEFADRDEVRFFKGNKYWAVQGQNVLHGYPKDIYSSFGFPRTVKHIDAALSEENTGKTYFFVANKYWRYDEYKRSMDPGYPKMIAHDFPGIGHKVDAVFMKDGFFYFFHGTRQYKFDPKTKRILTLQKANSWFNCRKN

SEQ ID NO: 2829 - protein, 450 aa, Artificial Sequence
  MMP-1 variant L216V
FPATLETQEQDVDLVQKYLEKYYNLKNDGRQVEKRRNSGPVVEKLKQMQEFFGLKVTGKPDAETLKVMKQPRCGVPDVAQFVLTEGNPRWEQTHLTYRIENYTPDLPRADVDHAIEKAFQLWSNVTPLTFTKVSEGQADIMISFVRGDHRDNSPFDGPGGNLAHAFQPGPGIGGDAHFDEDERWTNNFREYNLHRVAAHELGHSLGLSHSTDIGAVMYPSYTFSGDVQLAQDDIDGIQAIYGRSQNPVQPIGPQTPKACDSKLTFDAITTIRGEVMFFKDRFYMRTNPFYPEVELNFISVFWPQLPNGLEAAYEFADRDEVRFFKGNKYWAVQGQNVLHGYPKDIYSSFGFPRTVKHIDAALSEENTGKTYFFVANKYWRYDEYKRSMDPGYPKMIAHDFPGIGHKVDAVFMKDGFFYFFHGTRQYKFDPKTKRILTLQKANSWFNCRKN

SEQ ID NO: 2830 - protein, 450 aa, Artificial Sequence
  MMP-1 variant L216A
FPATLETQEQDVDLVQKYLEKYYNLKNDGRQVEKRRNSGPVVEKLKQMQEFFGLKVTGKPDAETLKVMKQPRCGVPDVAQFVLTEGNPRWEQTHLTYRIENYTPDLPRADVDHAIEKAFQLWSNVTPLTFTKVSEGQADIMISFVRGDHRDNSPFDGPGGNLAHAFQPGPGIGGDAHFDEDERWTNNFREYNLHRVAAHELGHSLGLSHSTDIGAAMYPSYTFSGDVQLAQDDIDGIQAIYGRSQNPVQPIGPQTPKACDSKLTFDAITTIRGEVMFFKDRFYMRTNPFYPEVELNFISVFWPQLPNGLEAAYEFADRDEVRFFKGNKYWAVQGQNVLHGYPKDIYSSFGFPRTVKHIDAALSEENTGKTYFFVANKYWRYDEYKRSMDPGYPKMIAHDFPGIGHKVDAVFMKDGFFYFFHGTRQYKFDPKTKRILTLQKANSWFNCRKN

SEQ ID NO: 2831 - protein, 450 aa, Artificial Sequence
  MMP-1 variant L216P
FPATLETQEQDVDLVQKYLEKYYNLKNDGRQVEKRRNSGPVVEKLKQMQEFFGLKVTGKPDAETLKVMKQPRCGVPDVAQFVLTEGNPRWEQTHLTYRIENYTPDLPRADVDHAIEKAFQLWSNVTPLTFTKVSEGQADIMISFVRGDHRDNSPFDGPGGNLAHAFQPGPGIGGDAHFDEDERWTNNFREYNLHRVAAHELGHSLGLSHSTDIGAPMYPSYTFSGDVQLAQDDIDGIQAIYGRSQNPVQPIGPQTPKACDSKLTFDAITTIRGEVMFFKDRFYMRTNPFYPEVELNFISVFWPQLPNGLEAAYEFADRDEVRFFKGNKYWAVQGQNVLHGYPKDIYSSFGFPRTVKHIDAALSEENTGKTYFFVANKYWRYDEYKRSMDPGYPKMIAHDFPGIGHKVDAVFMKDGFFYFFHGTRQYKFDPKTKRILTLQKANSWFNCRKN

SEQ ID NO: 2832 - protein, 450 aa, Artificial Sequence
  MMP-1 variant M217D
FPATLETQEQDVDLVQKYLEKYYNLKNDGRQVEKRRNSGPVVEKLKQMQEFFGLKVTGKPDAETLKVMKQPRCGVPDVAQFVLTEGNPRWEQTHLTYRIENYTPDLPRADVDHAIEKAFQLWSNVTPLTFTKVSEGQADIMISFVRGDHRDNSPFDGPGGNLAHAFQPGPGIGGDAHFDEDERWTNNFREYNLHRVAAHELGHSLGLSHSTDIGALDYPSYTFSGDVQLAQDDIDGIQAIYGRSQNPVQPIGPQTPKACDSKLTFDAITTIRGEVMFFKDRFYMRTNPFYPEVELNFISVFWPQLPNGLEAAYEFADRDEVRFFKGNKYWAVQGQNVLHGYPKDIYSSFGFPRTVKHIDAALSEENTGKTYFFVANKYWRYDEYKRSMDPGYPKMIAHDFPGIGHKVDAVFMKDGFFYFFHGTRQYKFDPKTKRILTLQKANSWFNCRKN

SEQ ID NO: 2833 - protein, 450 aa, Artificial Sequence
  MMP-1 variant M217E
FPATLETQEQDVDLVQKYLEKYYNLKNDGRQVEKRRNSGPVVEKLKQMQEFFGLKVTGKPDAETLKVMKQPRCGVPDVAQFVLTEGNPRWEQTHLTYRIENYTPDLPRADVDHAIEKAFQLWSNVTPLTFTKVSEGQADIMISFVRGDHRDNSPFDGPGGNLAHAFQPGPGIGGDAHFDEDERWTNNFREYNLHRVAAHELGHSLGLSHSTDIGALEYPSYTFSGDVQLAQDDIDGIQAIYGRSQNPVQPIGPQTPKACDSKLTFDAITTIRGEVMFFKDRFYMRTNPFYPEVELNFISVFWPQLPNGLEAAYEFADRDEVRFFKGNKYWAVQGQNVLHGYPKDIYSSFGFPRTVKHIDAALSEENTGKTYFFVANKYWRYDEYKRSMDPGYPKMIAHDFPGIGHKVDAVFMKDGFFYFFHGTRQYKFDPKTKRILTLQKANSWFNCRKN

SEQ ID NO: 2834 - protein, 450 aa, Artificial Sequence
  MMP-1 variant M217H
FPATLETQEQDVDLVQKYLEKYYNLKNDGRQVEKRRNSGPVVEKLKQMQEFFGLKVTGKPDAETLKVMKQPRCGVPDVAQFVLTEGNPRWEQTHLTYRIENYTPDLPRADVDHAIEKAFQLWSNVTPLTFTKVSEGQADIMISFVRGDHRDNSPFDGPGGNLAHAFQPGPGIGGDAHFDEDERWTNNFREYNLHRVAAHELGHSLGLSHSTDIGALHYPSYTFSGDVQLAQDDIDGIQAIYGRSQNPVQPIGPQTPKACDSKLTFDAITTIRGEVMFFKDRFYMRTNPFYPEVELNFISVFWPQLPNGLEAAYEFADRDEVRFFKGNKYWAVQGQNVLHGYPKDIYSSFGFPRTVKHIDAALSEENTGKTYFFVANKYWRYDEYKRSMDPGYPKMIAHDFPGIGHKVDAVFMKDGFFYFFHGTRQYKFDPKTKRILTLQKANSWFNCRKN

SEQ ID NO: 2835 - protein, 450 aa, Artificial Sequence
  MMP-1 variant M217K
FPATLETQEQDVDLVQKYLEKYYNLKNDGRQVEKRRNSGPVVEKLKQMQEFFGLKVTGKPDAETLKVMKQPRCGVPDVAQFVLTEGNPRWEQTHLTYRIENYTPDLPRADVDHAIEKAFQLWSNVTPLTFTKVSEGQADIMISFVRGDHRDNSPFDGPGGNLAHAFQPGPGIGGDAHFDEDERWTNNFREYNLHRVAAHELGHSLGLSHSTDIGALKYPSYTFSGDVQLAQDDIDGIQAIYGRSQNPVQPIGPQTPKACDSKLTFDAITTIRGEVMFFKDRFYMRTNPFYPEVELNFISVFWPQLPNGLEAAYEFADRDEVRFFKGNKYWAVQGQNVLHGYPKDIYSSFGFPRTVKHIDAALSEENTGKTYFFVANKYWRYDEYKRSMDPGYPKMIAHDFPGIGHKVDAVFMKDGFFYFFHGTRQYKFDPKTKRILTLQKANSWFNCRKN

SEQ ID NO: 2836 - protein, 450 aa, Artificial Sequence
  MMP-1 variant M217R
FPATLETQEQDVDLVQKYLEKYYNLKNDGRQVEKRRNSGPVVEKLKQMQEFFGLKVTGKPDAETLKVMKQPRCGVPDVAQFVLTEGNPRWEQTHLTYRIENYTPDLPRADVDHAIEKAFQLWSNVTPLTFTKVSEGQADIMISFVRGDHRDNSPFDGPGGNLAHAFQPGPGIGGDAHFDEDERWTNNFREYNLHRVAAHELGHSLGLSHSTDIGALRYPSYTFSGDVQLAQDDIDGIQAIYGRSQNPVQPIGPQTPKACDSKLTFDAITTIRGEVMFFKDRFYMRTNPFYPEVELNFISVFWPQLPNGLEAAYEFADRDEVRFFKGNKYWAVQGQNVLHGYPKDIYSSFGFPRTVKHIDAALSEENTGKTYFFVANKYWRYDEYKRSMDPGYPKMIAHDFPGIGHKVDAVFMKDGFFYFFHGTRQYKFDPKTKRILTLQKANSWFNCRKN

SEQ ID NO: 2837 - protein, 450 aa, Artificial Sequence
  MMP-1 variant M217C
FPATLETQEQDVDLVQKYLEKYYNLKNDGRQVEKRRNSGPVVEKLKQMQEFFGLKVTGKPDAETLKVMKQPRCGVPDVAQFVLTEGNPRWEQTHLTYRIENYTPDLPRADVDHAIEKAFQLWSNVTPLTFTKVSEGQADIMISFVRGDHRDNSPFDGPGGNLAHAFQPGPGIGGDAHFDEDERWTNNFREYNLHRVAAHELGHSLGLSHSTDIGALCYPSYTFSGDVQLAQDDIDGIQAIYGRSQNPVQPIGPQTPKACDSKLTFDAITTIRGEVMFFKDRFYMRTNPFYPEVELNFISVFWPQLPNGLEAAYEFADRDEVRFFKGNKYWAVQGQNVLHGYPKDIYSSFGFPRTVKHIDAALSEENTGKTYFFVANKYWRYDEYKRSMDPGYPKMIAHDFPGIGHKVDAVFMKDGFFYFFHGTRQYKFDPKTKRILTLQKANSWFNCRKN

SEQ ID NO: 2838 - protein, 450 aa, Artificial Sequence
  MMP-1 variant M217N
FPATLETQEQDVDLVQKYLEKYYNLKNDGRQVEKRRNSGPVVEKLKQMQEFFGLKVTGKPDAETLKVMKQPRCGVPDVAQFVLTEGNPRWEQTHLTYRIENYTPDLPRADVDHAIEKAFQLWSNVTPLTFTKVSEGQADIMISFVRGDHRDNSPFDGPGGNLAHAFQPGPGIGGDAHFDEDERWTNNFREYNLHRVAAHELGHSLGLSHSTDIGALNYPSYTFSGDVQLAQDDIDGIQAIYGRSQNPVQPIGPQTPKACDSKLTFDAITTIRGEVMFFKDRFYMRTNPFYPEVELNFISVFWPQLPNGLEAAYEFADRDEVRFFKGNKYWAVQGQNVLHGYPKDIYSSFGFPRTVKHIDAALSEENTGKTYFFVANKYWRYDEYKRSMDPGYPKMIAHDFPGIGHKVDAVFMKDGFFYFFHGTRQYKFDPKTKRILTLQKANSWFNCRKN

SEQ ID NO: 2839 - protein, 450 aa, Artificial Sequence
  MMP-1 variant M217Q
FPATLETQEQDVDLVQKYLEKYYNLKNDGRQVEKRRNSGPVVEKLKQMQEFFGLKVTGKPDAETLKVMKQPRCGVPDVAQFVLTEGNPRWEQTHLTYRIENYTPDLPRADVDHAIEKAFQLWSNVTPLTFTKVSEGQADIMISFVRGDHRDNSPFDGPGGNLAHAFQPGPGIGGDAHFDEDERWTNNFREYNLHRVAAHELGHSLGLSHSTDIGALQYPSYTFSGDVQLAQDDIDGIQAIYGRSQNPVQPIGPQTPKACDSKLTFDAITTIRGEVMFFKDRFYMRTNPFYPEVELNFISVFWPQLPNGLEAAYEFADRDEVRFFKGNKYWAVQGQNVLHGYPKDIYSSFGFPRTVKHIDAALSEENTGKTYFFVANKYWRYDEYKRSMDPGYPKMIAHDFPGIGHKVDAVFMKDGFFYFFHGTRQYKFDPKTKRILTLQKANSWFNCRKN

SEQ ID NO: 2840 - protein, 450 aa, Artificial Sequence
  MMP-1 variant M217T
FPATLETQEQDVDLVQKYLEKYYNLKNDGRQVEKRRNSGPVVEKLKQMQEFFGLKVTGKPDAETLKVMKQPRCGVPDVAQFVLTEGNPRWEQTHLTYRIENYTPDLPRADVDHAIEKAFQLWSNVTPLTFTKVSEGQADIMISFVRGDHRDNSPFDGPGGNLAHAFQPGPGIGGDAHFDEDERWTNNFREYNLHRVAAHELGHSLGLSHSTDIGALTYPSYTFSGDVQLAQDDIDGIQAIYGRSQNPVQPIGPQTPKACDSKLTFDAITTIRGEVMFFKDRFYMRTNPFYPEVELNFISVFWPQLPNGLEAAYEFADRDEVRFFKGNKYWAVQGQNVLHGYPKDIYSSFGFPRTVKHIDAALSEENTGKTYFFVANKYWRYDEYKRSMDPGYPKMIAHDFPGIGHKVDAVFMKDGFFYFFHGTRQYKFDPKTKRILTLQKANSWFNCRKN

SEQ ID NO: 2841 - protein, 450 aa, Artificial Sequence
  MMP-1 variant M217Y
FPATLETQEQDVDLVQKYLEKYYNLKNDGRQVEKRRNSGPVVEKLKQMQEFFGLKVTGKPDAETLKVMKQPRCGVPDVAQFVLTEGNPRWEQTHLTYRIENYTPDLPRADVDHAIEKAFQLWSNVTPLTFTKVSEGQADIMISFVRGDHRDNSPFDGPGGNLAHAFQPGPGIGGDAHFDEDERWTNNFREYNLHRVAAHELGHSLGLSHSTDIGALYYPSYTFSGDVQLAQDDIDGIQAIYGRSQNPVQPIGPQTPKACDSKLTFDAITTIRGEVMFFKDRFYMRTNPFYPEVELNFISVFWPQLPNGLEAAYEFADRDEVRFFKGNKYWAVQGQNVLHGYPKDIYSSFGFPRTVKHIDAALSEENTGKTYFFVANKYWRYDEYKRSMDPGYPKMIAHDFPGIGHKVDAVFMKDGFFYFFHGTRQYKFDPKTKRILTLQKANSWFNCRKN

SEQ ID NO: 2842 - protein, 450 aa, Artificial Sequence
  MMP-1 variant M217S
FPATLETQEQDVDLVQKYLEKYYNLKNDGRQVEKRRNSGPVVEKLKQMQEFFGLKVTGKPDAETLKVMKQPRCGVPDVAQFVLTEGNPRWEQTHLTYRIENYTPDLPRADVDHAIEKAFQLWSNVTPLTFTKVSEGQADIMISFVRGDHRDNSPFDGPGGNLAHAFQPGPGIGGDAHFDEDERWTNNFREYNLHRVAAHELGHSLGLSHSTDIGALSYPSYTFSGDVQLAQDDIDGIQAIYGRSQNPVQPIGPQTPKACDSKLTFDAITTIRGEVMFFKDRFYMRTNPFYPEVELNFISVFWPQLPNGLEAAYEFADRDEVRFFKGNKYWAVQGQNVLHGYPKDIYSSFGFPRTVKHIDAALSEENTGKTYFFVANKYWRYDEYKRSMDPGYPKMIAHDFPGIGHKVDAVFMKDGFFYFFHGTRQYKFDPKTKRILTLQKANSWFNCRKN

SEQ ID NO: 2843 - protein, 450 aa, Artificial Sequence
  MMP-1 variant M217G
FPATLETQEQDVDLVQKYLEKYYNLKNDGRQVEKRRNSGPVVEKLKQMQEFFGLKVTGKPDAETLKVMKQPRCGVPDVAQFVLTEGNPRWEQTHLTYRIENYTPDLPRADVDHAIEKAFQLWSNVTPLTFTKVSEGQADIMISFVRGDHRDNSPFDGPGGNLAHAFQPGPGIGGDAHFDEDERWTNNFREYNLHRVAAHELGHSLGLSHSTDIGALGYPSYTFSGDVQLAQDDIDGIQAIYGRSQNPVQPIGPQTPKACDSKLTFDAITTIRGEVMFFKDRFYMRTNPFYPEVELNFISVFWPQLPNGLEAAYEFADRDEVRFFKGNKYWAVQGQNVLHGYPKDIYSSFGFPRTVKHIDAALSEENTGKTYFFVANKYWRYDEYKRSMDPGYPKMIAHDFPGIGHKVDAVFMKDGFFYFFHGTRQYKFDPKTKRILTLQKANSWFNCRKN

SEQ ID NO: 2844 - protein, 450 aa, Artificial Sequence
  MMP-1 variant M217F
FPATLETQEQDVDLVQKYLEKYYNLKNDGRQVEKRRNSGPVVEKLKQMQEFFGLKVTGKPDAETLKVMKQPRCGVPDVAQFVLTEGNPRWEQTHLTYRIENYTPDLPRADVDHAIEKAFQLWSNVTPLTFTKVSEGQADIMISFVRGDHRDNSPFDGPGGNLAHAFQPGPGIGGDAHFDEDERWTNNFREYNLHRVAAHELGHSLGLSHSTDIGALFYPSYTFSGDVQLAQDDIDGIQAIYGRSQNPVQPIGPQTPKACDSKLTFDAITTIRGEVMFFKDRFYMRTNPFYPEVELNFISVFWPQLPNGLEAAYEFADRDEVRFFKGNKYWAVQGQNVLHGYPKDIYSSFGFPRTVKHIDAALSEENTGKTYFFVANKYWRYDEYKRSMDPGYPKMIAHDFPGIGHKVDAVFMKDGFFYFFHGTRQYKFDPKTKRILTLQKANSWFNCRKN

SEQ ID NO: 2845 - protein, 450 aa, Artificial Sequence
  MMP-1 variant M217W
FPATLETQEQDVDLVQKYLEKYYNLKNDGRQVEKRRNSGPVVEKLKQMQEFFGLKVTGKPDAETLKVMKQPRCGVPDVAQFVLTEGNPRWEQTHLTYRIENYTPDLPRADVDHAIEKAFQLWSNVTPLTFTKVSEGQADIMISFVRGDHRDNSPFDGPGGNLAHAFQPGPGIGGDAHFDEDERWTNNFREYNLHRVAAHELGHSLGLSHSTDIGALWYPSYTFSGDVQLAQDDIDGIQAIYGRSQNPVQPIGPQTPKACDSKLTFDAITTIRGEVMFFKDRFYMRTNPFYPEVELNFISVFWPQLPNGLEAAYEFADRDEVRFFKGNKYWAVQGQNVLHGYPKDIYSSFGFPRTVKHIDAALSEENTGKTYFFVANKYWRYDEYKRSMDPGYPKMIAHDFPGIGHKVDAVFMKDGFFYFFHGTRQYKFDPKTKRILTLQKANSWFNCRKN

SEQ ID NO: 2846 - protein, 450 aa, Artificial Sequence
  MMP-1 variant M217I
FPATLETQEQDVDLVQKYLEKYYNLKNDGRQVEKRRNSGPVVEKLKQMQEFFGLKVTGKPDAETLKVMKQPRCGVPDVAQFVLTEGNPRWEQTHLTYRIENYTPDLPRADVDHAIEKAFQLWSNVTPLTFTKVSEGQADIMISFVRGDHRDNSPFDGPGGNLAHAFQPGPGIGGDAHFDEDERWTNNFREYNLHRVAAHELGHSLGLSHSTDIGALIYPSYTFSGDVQLAQDDIDGIQAIYGRSQNPVQPIGPQTPKACDSKLTFDAITTIRGEVMFFKDRFYMRTNPFYPEVELNFISVFWPQLPNGLEAAYEFADRDEVRFFKGNKYWAVQGQNVLHGYPKDIYSSFGFPRTVKHIDAALSEENTGKTYFFVANKYWRYDEYKRSMDPGYPKMIAHDFPGIGHKVDAVFMKDGFFYFFHGTRQYKFDPKTKRILTLQKANSWFNCRKN

SEQ ID NO: 2847 - protein, 450 aa, Artificial Sequence
  MMP-1 variant M217V
FPATLETQEQDVDLVQKYLEKYYNLKNDGRQVEKRRNSGPVVEKLKQMQEFFGLKVTGKPDAETLKVMKQPRCGVPDVAQFVLTEGNPRWEQTHLTYRIENYTPDLPRADVDHAIEKAFQLWSNVTPLTFTKVSEGQADIMISFVRGDHRDNSPFDGPGGNLAHAFQPGPGIGGDAHFDEDERWTNNFREYNLHRVAAHELGHSLGLSHSTDIGALVYPSYTFSGDVQLAQDDIDGIQAIYGRSQNPVQPIGPQTPKACDSKLTFDAITTIRGEVMFFKDRFYMRTNPFYPEVELNFISVFWPQLPNGLEAAYEFADRDEVRFFKGNKYWAVQGQNVLHGYPKDIYSSFGFPRTVKHIDAALSEENTGKTYFFVANKYWRYDEYKRSMDPGYPKMIAHDFPGIGHKVDAVFMKDGFFYFFHGTRQYKFDPKTKRILTLQKANSWFNCRKN

SEQ ID NO: 2848 - protein, 450 aa, Artificial Sequence
  MMP-1 variant M217L
FPATLETQEQDVDLVQKYLEKYYNLKNDGRQVEKRRNSGPVVEKLKQMQEFFGLKVTGKPDAETLKVMKQPRCGVPDVAQFVLTEGNPRWEQTHLTYRIENYTPDLPRADVDHAIEKAFQLWSNVTPLTFTKVSEGQADIMISFVRGDHRDNSPFDGPGGNLAHAFQPGPGIGGDAHFDEDERWTNNFREYNLHRVAAHELGHSLGLSHSTDIGALLYPSYTFSGDVQLAQDDIDGIQAIYGRSQNPVQPIGPQTPKACDSKLTFDAITTIRGEVMFFKDRFYMRTNPFYPEVELNFISVFWPQLPNGLEAAYEFADRDEVRFFKGNKYWAVQGQNVLHGYPKDIYSSFGFPRTVKHIDAALSEENTGKTYFFVANKYWRYDEYKRSMDPGYPKMIAHDFPGIGHKVDAVFMKDGFFYFFHGTRQYKFDPKTKRILTLQKANSWFNCRKN

SEQ ID NO: 2849 - protein, 450 aa, Artificial Sequence
  MMP-1 variant M217A
FPATLETQEQDVDLVQKYLEKYYNLKNDGRQVEKRRNSGPVVEKLKQMQEFFGLKVTGKPDAETLKVMKQPRCGVPDVAQFVLTEGNPRWEQTHLTYRIENYTPDLPRADVDHAIEKAFQLWSNVTPLTFTKVSEGQADIMISFVRGDHRDNSPFDGPGGNLAHAFQPGPGIGGDAHFDEDERWTNNFREYNLHRVAAHELGHSLGLSHSTDIGALAYPSYTFSGDVQLAQDDIDGIQAIYGRSQNPVQPIGPQTPKACDSKLTFDAITTIRGEVMFFKDRFYMRTNPFYPEVELNFISVFWPQLPNGLEAAYEFADRDEVRFFKGNKYWAVQGQNVLHGYPKDIYSSFGFPRTVKHIDAALSEENTGKTYFFVANKYWRYDEYKRSMDPGYPKMIAHDFPGIGHKVDAVFMKDGFFYFFHGTRQYKFDPKTKRILTLQKANSWFNCRKN

SEQ ID NO: 2850 - protein, 450 aa, Artificial Sequence
  MMP-1 variant M217P
FPATLETQEQDVDLVQKYLEKYYNLKNDGRQVEKRRNSGPVVEKLKQMQEFFGLKVTGKPDAETLKVMKQPRCGVPDVAQFVLTEGNPRWEQTHLTYRIENYTPDLPRADVDHAIEKAFQLWSNVTPLTFTKVSEGQADIMISFVRGDHRDNSPFDGPGGNLAHAFQPGPGIGGDAHFDEDERWTNNFREYNLHRVAAHELGHSLGLSHSTDIGALPYPSYTFSGDVQLAQDDIDGIQAIYGRSQNPVQPIGPQTPKACDSKLTFDAITTIRGEVMFFKDRFYMRTNPFYPEVELNFISVFWPQLPNGLEAAYEFADRDEVRFFKGNKYWAVQGQNVLHGYPKDIYSSFGFPRTVKHIDAALSEENTGKTYFFVANKYWRYDEYKRSMDPGYPKMIAHDFPGIGHKVDAVFMKDGFFYFFHGTRQYKFDPKTKRILTLQKANSWFNCRKN

SEQ ID NO: 2851 - protein, 450 aa, Artificial Sequence
  MMP-1 variant P219D
FPATLETQEQDVDLVQKYLEKYYNLKNDGRQVEKRRNSGPVVEKLKQMQEFFGLKVTGKPDAETLKVMKQPRCGVPDVAQFVLTEGNPRWEQTHLTYRIENYTPDLPRADVDHAIEKAFQLWSNVTPLTFTKVSEGQADIMISFVRGDHRDNSPFDGPGGNLAHAFQPGPGIGGDAHFDEDERWTNNFREYNLHRVAAHELGHSLGLSHSTDIGALMYDSYTFSGDVQLAQDDIDGIQAIYGRSQNPVQPIGPQTPKACDSKLTFDAITTIRGEVMFFKDRFYMRTNPFYPEVELNFISVFWPQLPNGLEAAYEFADRDEVRFFKGNKYWAVQGQNVLHGYPKDIYSSFGFPRTVKHIDAALSEENTGKTYFFVANKYWRYDEYKRSMDPGYPKMIAHDFPGIGHKVDAVFMKDGFFYFFHGTRQYKFDPKTKRILTLQKANSWFNCRKN

SEQ ID NO: 2852 - protein, 450 aa, Artificial Sequence
  MMP-1 variant P219E
FPATLETQEQDVDLVQKYLEKYYNLKNDGRQVEKRRNSGPVVEKLKQMQEFFGLKVTGKPDAETLKVMKQPRCGVPDVAQFVLTEGNPRWEQTHLTYRIENYTPDLPRADVDHAIEKAFQLWSNVTPLTFTKVSEGQADIMISFVRGDHRDNSPFDGPGGNLAHAFQPGPGIGGDAHFDEDERWTNNFREYNLHRVAAHELGHSLGLSHSTDIGALMYESYTFSGDVQLAQDDIDGIQAIYGRSQNPVQPIGPQTPKACDSKLTFDAITTIRGEVMFFKDRFYMRTNPFYPEVELNFISVFWPQLPNGLEAAYEFADRDEVRFFKGNKYWAVQGQNVLHGYPKDIYSSFGFPRTVKHIDAALSEENTGKTYFFVANKYWRYDEYKRSMDPGYPKMIAHDFPGIGHKVDAVFMKDGFFYFFHGTRQYKFDPKTKRILTLQKANSWFNCRKN

SEQ ID NO: 2853 - protein, 450 aa, Artificial Sequence
  MMP-1 variant P219H
FPATLETQEQDVDLVQKYLEKYYNLKNDGRQVEKRRNSGPVVEKLKQMQEFFGLKVTGKPDAETLKVMKQPRCGVPDVAQFVLTEGNPRWEQTHLTYRIENYTPDLPRADVDHAIEKAFQLWSNVTPLTFTKVSEGQADIMISFVRGDHRDNSPFDGPGGNLAHAFQPGPGIGGDAHFDEDERWTNNFREYNLHRVAAHELGHSLGLSHSTDIGALMYHSYTFSGDVQLAQDDIDGIQAIYGRSQNPVQPIGPQTPKACDSKLTFDAITTIRGEVMFFKDRFYMRTNPFYPEVELNFISVFWPQLPNGLEAAYEFADRDEVRFFKGNKYWAVQGQNVLHGYPKDIYSSFGFPRTVKHIDAALSEENTGKTYFFVANKYWRYDEYKRSMDPGYPKMIAHDFPGIGHKVDAVFMKDGFFYFFHGTRQYKFDPKTKRILTLQKANSWFNCRKN

SEQ ID NO: 2854 - protein, 450 aa, Artificial Sequence
  MMP-1 variant P219K
FPATLETQEQDVDLVQKYLEKYYNLKNDGRQVEKRRNSGPVVEKLKQMQEFFGLKVTGKPDAETLKVMKQPRCGVPDVAQFVLTEGNPRWEQTHLTYRIENYTPDLPRADVDHAIEKAFQLWSNVTPLTFTKVSEGQADIMISFVRGDHRDNSPFDGPGGNLAHAFQPGPGIGGDAHFDEDERWTNNFREYNLHRVAAHELGHSLGLSHSTDIGALMYKSYTFSGDVQLAQDDIDGIQAIYGRSQNPVQPIGPQTPKACDSKLTFDAITTIRGEVMFFKDRFYMRTNPFYPEVELNFISVFWPQLPNGLEAAYEFADRDEVRFFKGNKYWAVQGQNVLHGYPKDIYSSFGFPRTVKHIDAALSEENTGKTYFFVANKYWRYDEYKRSMDPGYPKMIAHDFPGIGHKVDAVFMKDGFFYFFHGTRQYKFDPKTKRILTLQKANSWFNCRKN

SEQ ID NO: 2855 - protein, 450 aa, Artificial Sequence
  MMP-1 variant P219R
FPATLETQEQDVDLVQKYLEKYYNLKNDGRQVEKRRNSGPVVEKLKQMQEFFGLKVTGKPDAETLKVMKQPRCGVPDVAQFVLTEGNPRWEQTHLTYRIENYTPDLPRADVDHAIEKAFQLWSNVTPLTFTKVSEGQADIMISFVRGDHRDNSPFDGPGGNLAHAFQPGPGIGGDAHFDEDERWTNNFREYNLHRVAAHELGHSLGLSHSTDIGALMYRSYTFSGDVQLAQDDIDGIQAIYGRSQNPVQPIGPQTPKACDSKLTFDAITTIRGEVMFFKDRFYMRTNPFYPEVELNFISVFWPQLPNGLEAAYEFADRDEVRFFKGNKYWAVQGQNVLHGYPKDIYSSFGFPRTVKHIDAALSEENTGKTYFFVANKYWRYDEYKRSMDPGYPKMIAHDFPGIGHKVDAVFMKDGFFYFFHGTRQYKFDPKTKRILTLQKANSWFNCRKN

SEQ ID NO: 2856 - protein, 450 aa, Artificial Sequence
  MMP-1 variant P219C
FPATLETQEQDVDLVQKYLEKYYNLKNDGRQVEKRRNSGPVVEKLKQMQEFFGLKVTGKPDAETLKVMKQPRCGVPDVAQFVLTEGNPRWEQTHLTYRIENYTPDLPRADVDHAIEKAFQLWSNVTPLTFTKVSEGQADIMISFVRGDHRDNSPFDGPGGNLAHAFQPGPGIGGDAHFDEDERWTNNFREYNLHRVAAHELGHSLGLSHSTDIGALMYCSYTFSGDVQLAQDDIDGIQAIYGRSQNPVQPIGPQTPKACDSKLTFDAITTIRGEVMFFKDRFYMRTNPFYPEVELNFISVFWPQLPNGLEAAYEFADRDEVRFFKGNKYWAVQGQNVLHGYPKDIYSSFGFPRTVKHIDAALSEENTGKTYFFVANKYWRYDEYKRSMDPGYPKMIAHDFPGIGHKVDAVFMKDGFFYFFHGTRQYKFDPKTKRILTLQKANSWFNCRKN

SEQ ID NO: 2857 - protein, 450 aa, Artificial Sequence
  MMP-1 variant P219N
FPATLETQEQDVDLVQKYLEKYYNLKNDGRQVEKRRNSGPVVEKLKQMQEFFGLKVTGKPDAETLKVMKQPRCGVPDVAQFVLTEGNPRWEQTHLTYRIENYTPDLPRADVDHAIEKAFQLWSNVTPLTFTKVSEGQADIMISFVRGDHRDNSPFDGPGGNLAHAFQPGPGIGGDAHFDEDERWTNNFREYNLHRVAAHELGHSLGLSHSTDIGALMYNSYTFSGDVQLAQDDIDGIQAIYGRSQNPVQPIGPQTPKACDSKLTFDAITTIRGEVMFFKDRFYMRTNPFYPEVELNFISVFWPQLPNGLEAAYEFADRDEVRFFKGNKYWAVQGQNVLHGYPKDIYSSFGFPRTVKHIDAALSEENTGKTYFFVANKYWRYDEYKRSMDPGYPKMIAHDFPGIGHKVDAVFMKDGFFYFFHGTRQYKFDPKTKRILTLQKANSWFNCRKN

SEQ ID NO: 2858 - protein, 450 aa, Artificial Sequence
  MMP-1 variant P219Q
FPATLETQEQDVDLVQKYLEKYYNLKNDGRQVEKRRNSGPVVEKLKQMQEFFGLKVTGKPDAETLKVMKQPRCGVPDVAQFVLTEGNPRWEQTHLTYRIENYTPDLPRADVDHAIEKAFQLWSNVTPLTFTKVSEGQADIMISFVRGDHRDNSPFDGPGGNLAHAFQPGPGIGGDAHFDEDERWTNNFREYNLHRVAAHELGHSLGLSHSTDIGALMYQSYTFSGDVQLAQDDIDGIQAIYGRSQNPVQPIGPQTPKACDSKLTFDAITTIRGEVMFFKDRFYMRTNPFYPEVELNFISVFWPQLPNGLEAAYEFADRDEVRFFKGNKYWAVQGQNVLHGYPKDIYSSFGFPRTVKHIDAALSEENTGKTYFFVANKYWRYDEYKRSMDPGYPKMIAHDFPGIGHKVDAVFMKDGFFYFFHGTRQYKFDPKTKRILTLQKANSWFNCRKN

SEQ ID NO: 2859 - protein, 450 aa, Artificial Sequence
  MMP-1 variant P219T
FPATLETQEQDVDLVQKYLEKYYNLKNDGRQVEKRRNSGPVVEKLKQMQEFFGLKVTGKPDAETLKVMKQPRCGVPDVAQFVLTEGNPRWEQTHLTYRIENYTPDLPRADVDHAIEKAFQLWSNVTPLTFTKVSEGQADIMISFVRGDHRDNSPFDGPGGNLAHAFQPGPGIGGDAHFDEDERWTNNFREYNLHRVAAHELGHSLGLSHSTDIGALMYTSYTFSGDVQLAQDDIDGIQAIYGRSQNPVQPIGPQTPKACDSKLTFDAITTIRGEVMFFKDRFYMRTNPFYPEVELNFISVFWPQLPNGLEAAYEFADRDEVRFFKGNKYWAVQGQNVLHGYPKDIYSSFGFPRTVKHIDAALSEENTGKTYFFVANKYWRYDEYKRSMDPGYPKMIAHDFPGIGHKVDAVFMKDGFFYFFHGTRQYKFDPKTKRILTLQKANSWFNCRKN

SEQ ID NO: 2860 - protein, 450 aa, Artificial Sequence
  MMP-1 variant P219Y
FPATLETQEQDVDLVQKYLEKYYNLKNDGRQVEKRRNSGPVVEKLKQMQEFFGLKVTGKPDAETLKVMKQPRCGVPDVAQFVLTEGNPRWEQTHLTYRIENYTPDLPRADVDHAIEKAFQLWSNVTPLTFTKVSEGQADIMISFVRGDHRDNSPFDGPGGNLAHAFQPGPGIGGDAHFDEDERWTNNFREYNLHRVAAHELGHSLGLSHSTDIGALMYYSYTFSGDVQLAQDDIDGIQAIYGRSQNPVQPIGPQTPKACDSKLTFDAITTIRGEVMFFKDRFYMRTNPFYPEVELNFISVFWPQLPNGLEAAYEFADRDEVRFFKGNKYWAVQGQNVLHGYPKDIYSSFGFPRTVKHIDAALSEENTGKTYFFVANKYWRYDEYKRSMDPGYPKMIAHDFPGIGHKVDAVFMKDGFFYFFHGTRQYKFDPKTKRILTLQKANSWFNCRKN

SEQ ID NO: 2861 - protein, 450 aa, Artificial Sequence
  MMP-1 variant P219S
FPATLETQEQDVDLVQKYLEKYYNLKNDGRQVEKRRNSGPVVEKLKQMQEFFGLKVTGKPDAETLKVMKQPRCGVPDVAQFVLTEGNPRWEQTHLTYRIENYTPDLPRADVDHAIEKAFQLWSNVTPLTFTKVSEGQADIMISFVRGDHRDNSPFDGPGGNLAHAFQPGPGIGGDAHFDEDERWTNNFREYNLHRVAAHELGHSLGLSHSTDIGALMYSSYTFSGDVQLAQDDIDGIQAIYGRSQNPVQPIGPQTPKACDSKLTFDAITTIRGEVMFFKDRFYMRTNPFYPEVELNFISVFWPQLPNGLEAAYEFADRDEVRFFKGNKYWAVQGQNVLHGYPKDIYSSFGFPRTVKHIDAALSEENTGKTYFFVANKYWRYDEYKRSMDPGYPKMIAHDFPGIGHKVDAVFMKDGFFYFFHGTRQYKFDPKTKRILTLQKANSWFNCRKN

SEQ ID NO: 2862 - protein, 450 aa, Artificial Sequence
  MMP-1 variant P219G
FPATLETQEQDVDLVQKYLEKYYNLKNDGRQVEKRRNSGPVVEKLKQMQEFFGLKVTGKPDAETLKVMKQPRCGVPDVAQFVLTEGNPRWEQTHLTYRIENYTPDLPRADVDHAIEKAFQLWSNVTPLTFTKVSEGQADIMISFVRGDHRDNSPFDGPGGNLAHAFQPGPGIGGDAHFDEDERWTNNFREYNLHRVAAHELGHSLGLSHSTDIGALMYGSYTFSGDVQLAQDDIDGIQAIYGRSQNPVQPIGPQTPKACDSKLTFDAITTIRGEVMFFKDRFYMRTNPFYPEVELNFISVFWPQLPNGLEAAYEFADRDEVRFFKGNKYWAVQGQNVLHGYPKDIYSSFGFPRTVKHIDAALSEENTGKTYFFVANKYWRYDEYKRSMDPGYPKMIAHDFPGIGHKVDAVFMKDGFFYFFHGTRQYKFDPKTKRILTLQKANSWFNCRKN

SEQ ID NO: 2863 - protein, 450 aa, Artificial Sequence
  MMP-1 variant P219F
FPATLETQEQDVDLVQKYLEKYYNLKNDGRQVEKRRNSGPVVEKLKQMQEFFGLKVTGKPDAETLKVMKQPRCGVPDVAQFVLTEGNPRWEQTHLTYRIENYTPDLPRADVDHAIEKAFQLWSNVTPLTFTKVSEGQADIMISFVRGDHRDNSPFDGPGGNLAHAFQPGPGIGGDAHFDEDERWTNNFREYNLHRVAAHELGHSLGLSHSTDIGALMYFSYTFSGDVQLAQDDIDGIQAIYGRSQNPVQPIGPQTPKACDSKLTFDAITTIRGEVMFFKDRFYMRTNPFYPEVELNFISVFWPQLPNGLEAAYEFADRDEVRFFKGNKYWAVQGQNVLHGYPKDIYSSFGFPRTVKHIDAALSEENTGKTYFFVANKYWRYDEYKRSMDPGYPKMIAHDFPGIGHKVDAVFMKDGFFYFFHGTRQYKFDPKTKRILTLQKANSWFNCRKN

SEQ ID NO: 2864 - protein, 450 aa, Artificial Sequence
  MMP-1 variant P219M
FPATLETQEQDVDLVQKYLEKYYNLKNDGRQVEKRRNSGPVVEKLKQMQEFFGLKVTGKPDAETLKVMKQPRCGVPDVAQFVLTEGNPRWEQTHLTYRIENYTPDLPRADVDHAIEKAFQLWSNVTPLTFTKVSEGQADIMISFVRGDHRDNSPFDGPGGNLAHAFQPGPGIGGDAHFDEDERWTNNFREYNLHRVAAHELGHSLGLSHSTDIGALMYMSYTFSGDVQLAQDDIDGIQAIYGRSQNPVQPIGPQTPKACDSKLTFDAITTIRGEVMFFKDRFYMRTNPFYPEVELNFISVFWPQLPNGLEAAYEFADRDEVRFFKGNKYWAVQGQNVLHGYPKDIYSSFGFPRTVKHIDAALSEENTGKTYFFVANKYWRYDEYKRSMDPGYPKMIAHDFPGIGHKVDAVFMKDGFFYFFHGTRQYKFDPKTKRILTLQKANSWFNCRKN

SEQ ID NO: 2865 - protein, 450 aa, Artificial Sequence
  MMP-1 variant P219W
FPATLETQEQDVDLVQKYLEKYYNLKNDGRQVEKRRNSGPVVEKLKQMQEFFGLKVTGKPDAETLKVMKQPRCGVPDVAQFVLTEGNPRWEQTHLTYRIENYTPDLPRADVDHAIEKAFQLWSNVTPLTFTKVSEGQADIMISFVRGDHRDNSPFDGPGGNLAHAFQPGPGIGGDAHFDEDERWTNNFREYNLHRVAAHELGHSLGLSHSTDIGALMYWSYTFSGDVQLAQDDIDGIQAIYGRSQNPVQPIGPQTPKACDSKLTFDAITTIRGEVMFFKDRFYMRTNPFYPEVELNFISVFWPQLPNGLEAAYEFADRDEVRFFKGNKYWAVQGQNVLHGYPKDIYSSFGFPRTVKHIDAALSEENTGKTYFFVANKYWRYDEYKRSMDPGYPKMIAHDFPGIGHKVDAVFMKDGFFYFFHGTRQYKFDPKTKRILTLQKANSWFNCRKN

SEQ ID NO: 2866 - protein, 450 aa, Artificial Sequence
  MMP-1 variant P219I
FPATLETQEQDVDLVQKYLEKYYNLKNDGRQVEKRRNSGPVVEKLKQMQEFFGLKVTGKPDAETLKVMKQPRCGVPDVAQFVLTEGNPRWEQTHLTYRIENYTPDLPRADVDHAIEKAFQLWSNVTPLTFTKVSEGQADIMISFVRGDHRDNSPFDGPGGNLAHAFQPGPGIGGDAHFDEDERWTNNFREYNLHRVAAHELGHSLGLSHSTDIGALMYISYTFSGDVQLAQDDIDGIQAIYGRSQNPVQPIGPQTPKACDSKLTFDAITTIRGEVMFFKDRFYMRTNPFYPEVELNFISVFWPQLPNGLEAAYEFADRDEVRFFKGNKYWAVQGQNVLHGYPKDIYSSFGFPRTVKHIDAALSEENTGKTYFFVANKYWRYDEYKRSMDPGYPKMIAHDFPGIGHKVDAVFMKDGFFYFFHGTRQYKFDPKTKRILTLQKANSWFNCRKN

SEQ ID NO: 2867 - protein, 450 aa, Artificial Sequence
  MMP-1 variant P219V
FPATLETQEQDVDLVQKYLEKYYNLKNDGRQVEKRRNSGPVVEKLKQMQEFFGLKVTGKPDAETLKVMKQPRCGVPDVAQFVLTEGNPRWEQTHLTYRIENYTPDLPRADVDHAIEKAFQLWSNVTPLTFTKVSEGQADIMISFVRGDHRDNSPFDGPGGNLAHAFQPGPGIGGDAHFDEDERWTNNFREYNLHRVAAHELGHSLGLSHSTDIGALMYVSYTFSGDVQLAQDDIDGIQAIYGRSQNPVQPIGPQTPKACDSKLTFDAITTIRGEVMFFKDRFYMRTNPFYPEVELNFISVFWPQLPNGLEAAYEFADRDEVRFFKGNKYWAVQGQNVLHGYPKDIYSSFGFPRTVKHIDAALSEENTGKTYFFVANKYWRYDEYKRSMDPGYPKMIAHDFPGIGHKVDAVFMKDGFFYFFHGTRQYKFDPKTKRILTLQKANSWFNCRKN

SEQ ID NO: 2868 - protein, 450 aa, Artificial Sequence
  MMP-1 variant P219L
FPATLETQEQDVDLVQKYLEKYYNLKNDGRQVEKRRNSGPVVEKLKQMQEFFGLKVTGKPDAETLKVMKQPRCGVPDVAQFVLTEGNPRWEQTHLTYRIENYTPDLPRADVDHAIEKAFQLWSNVTPLTFTKVSEGQADIMISFVRGDHRDNSPFDGPGGNLAHAFQPGPGIGGDAHFDEDERWTNNFREYNLHRVAAHELGHSLGLSHSTDIGALMYLSYTFSGDVQLAQDDIDGIQAIYGRSQNPVQPIGPQTPKACDSKLTFDAITTIRGEVMFFKDRFYMRTNPFYPEVELNFISVFWPQLPNGLEAAYEFADRDEVRFFKGNKYWAVQGQNVLHGYPKDIYSSFGFPRTVKHIDAALSEENTGKTYFFVANKYWRYDEYKRSMDPGYPKMIAHDFPGIGHKVDAVFMKDGFFYFFHGTRQYKFDPKTKRILTLQKANSWFNCRKN

SEQ ID NO: 2869 - protein, 450 aa, Artificial Sequence
  MMP-1 variant P219A
FPATLETQEQDVDLVQKYLEKYYNLKNDGRQVEKRRNSGPVVEKLKQMQEFFGLKVTGKPDAETLKVMKQPRCGVPDVAQFVLTEGNPRWEQTHLTYRIENYTPDLPRADVDHAIEKAFQLWSNVTPLTFTKVSEGQADIMISFVRGDHRDNSPFDGPGGNLAHAFQPGPGIGGDAHFDEDERWTNNFREYNLHRVAAHELGHSLGLSHSTDIGALMYASYTFSGDVQLAQDDIDGIQAIYGRSQNPVQPIGPQTPKACDSKLTFDAITTIRGEVMFFKDRFYMRTNPFYPEVELNFISVFWPQLPNGLEAAYEFADRDEVRFFKGNKYWAVQGQNVLHGYPKDIYSSFGFPRTVKHIDAALSEENTGKTYFFVANKYWRYDEYKRSMDPGYPKMIAHDFPGIGHKVDAVFMKDGFFYFFHGTRQYKFDPKTKRILTLQKANSWFNCRKN

SEQ ID NO: 2870 - protein, 450 aa, Artificial Sequence
  MMP-1 variant S220D
FPATLETQEQDVDLVQKYLEKYYNLKNDGRQVEKRRNSGPVVEKLKQMQEFFGLKVTGKPDAETLKVMKQPRCGVPDVAQFVLTEGNPRWEQTHLTYRIENYTPDLPRADVDHAIEKAFQLWSNVTPLTFTKVSEGQADIMISFVRGDHRDNSPFDGPGGNLAHAFQPGPGIGGDAHFDEDERWTNNFREYNLHRVAAHELGHSLGLSHSTDIGALMYPDYTFSGDVQLAQDDIDGIQAIYGRSQNPVQPIGPQTPKACDSKLTFDAITTIRGEVMFFKDRFYMRTNPFYPEVELNFISVFWPQLPNGLEAAYEFADRDEVRFFKGNKYWAVQGQNVLHGYPKDIYSSFGFPRTVKHIDAALSEENTGKTYFFVANKYWRYDEYKRSMDPGYPKMIAHDFPGIGHKVDAVFMKDGFFYFFHGTRQYKFDPKTKRILTLQKANSWFNCRKN

SEQ ID NO: 2871 - protein, 450 aa, Artificial Sequence
  MMP-1 variant S220E
FPATLETQEQDVDLVQKYLEKYYNLKNDGRQVEKRRNSGPVVEKLKQMQEFFGLKVTGKPDAETLKVMKQPRCGVPDVAQFVLTEGNPRWEQTHLTYRIENYTPDLPRADVDHAIEKAFQLWSNVTPLTFTKVSEGQADIMISFVRGDHRDNSPFDGPGGNLAHAFQPGPGIGGDAHFDEDERWTNNFREYNLHRVAAHELGHSLGLSHSTDIGALMYPEYTFSGDVQLAQDDIDGIQAIYGRSQNPVQPIGPQTPKACDSKLTFDAITTIRGEVMFFKDRFYMRTNPFYPEVELNFISVFWPQLPNGLEAAYEFADRDEVRFFKGNKYWAVQGQNVLHGYPKDIYSSFGFPRTVKHIDAALSEENTGKTYFFVANKYWRYDEYKRSMDPGYPKMIAHDFPGIGHKVDAVFMKDGFFYFFHGTRQYKFDPKTKRILTLQKANSWFNCRKN

SEQ ID NO: 2872 - protein, 450 aa, Artificial Sequence
  MMP-1 variant S220H
FPATLETQEQDVDLVQKYLEKYYNLKNDGRQVEKRRNSGPVVEKLKQMQEFFGLKVTGKPDAETLKVMKQPRCGVPDVAQFVLTEGNPRWEQTHLTYRIENYTPDLPRADVDHAIEKAFQLWSNVTPLTFTKVSEGQADIMISFVRGDHRDNSPFDGPGGNLAHAFQPGPGIGGDAHFDEDERWTNNFREYNLHRVAAHELGHSLGLSHSTDIGALMYPHYTFSGDVQLAQDDIDGIQAIYGRSQNPVQPIGPQTPKACDSKLTFDAITTIRGEVMFFKDRFYMRTNPFYPEVELNFISVFWPQLPNGLEAAYEFADRDEVRFFKGNKYWAVQGQNVLHGYPKDIYSSFGFPRTVKHIDAALSEENTGKTYFFVANKYWRYDEYKRSMDPGYPKMIAHDFPGIGHKVDAVFMKDGFFYFFHGTRQYKFDPKTKRILTLQKANSWFNCRKN

SEQ ID NO: 2873 - protein, 450 aa, Artificial Sequence
  MMP-1 variant S220K
FPATLETQEQDVDLVQKYLEKYYNLKNDGRQVEKRRNSGPVVEKLKQMQEFFGLKVTGKPDAETLKVMKQPRCGVPDVAQFVLTEGNPRWEQTHLTYRIENYTPDLPRADVDHAIEKAFQLWSNVTPLTFTKVSEGQADIMISFVRGDHRDNSPFDGPGGNLAHAFQPGPGIGGDAHFDEDERWTNNFREYNLHRVAAHELGHSLGLSHSTDIGALMYPKYTFSGDVQLAQDDIDGIQAIYGRSQNPVQPIGPQTPKACDSKLTFDAITTIRGEVMFFKDRFYMRTNPFYPEVELNFISVFWPQLPNGLEAAYEFADRDEVRFFKGNKYWAVQGQNVLHGYPKDIYSSFGFPRTVKHIDAALSEENTGKTYFFVANKYWRYDEYKRSMDPGYPKMIAHDFPGIGHKVDAVFMKDGFFYFFHGTRQYKFDPKTKRILTLQKANSWFNCRKN

SEQ ID NO: 2874 - protein, 450 aa, Artificial Sequence
  MMP-1 variant S220R
FPATLETQEQDVDLVQKYLEKYYNLKNDGRQVEKRRNSGPVVEKLKQMQEFFGLKVTGKPDAETLKVMKQPRCGVPDVAQFVLTEGNPRWEQTHLTYRIENYTPDLPRADVDHAIEKAFQLWSNVTPLTFTKVSEGQADIMISFVRGDHRDNSPFDGPGGNLAHAFQPGPGIGGDAHFDEDERWTNNFREYNLHRVAAHELGHSLGLSHSTDIGALMYPRYTFSGDVQLAQDDIDGIQAIYGRSQNPVQPIGPQTPKACDSKLTFDAITTIRGEVMFFKDRFYMRTNPFYPEVELNFISVFWPQLPNGLEAAYEFADRDEVRFFKGNKYWAVQGQNVLHGYPKDIYSSFGFPRTVKHIDAALSEENTGKTYFFVANKYWRYDEYKRSMDPGYPKMIAHDFPGIGHKVDAVFMKDGFFYFFHGTRQYKFDPKTKRILTLQKANSWFNCRKN

SEQ ID NO: 2875 - protein, 450 aa, Artificial Sequence
  MMP-1 variant S220C
FPATLETQEQDVDLVQKYLEKYYNLKNDGRQVEKRRNSGPVVEKLKQMQEFFGLKVTGKPDAETLKVMKQPRCGVPDVAQFVLTEGNPRWEQTHLTYRIENYTPDLPRADVDHAIEKAFQLWSNVTPLTFTKVSEGQADIMISFVRGDHRDNSPFDGPGGNLAHAFQPGPGIGGDAHFDEDERWTNNFREYNLHRVAAHELGHSLGLSHSTDIGALMYPCYTFSGDVQLAQDDIDGIQAIYGRSQNPVQPIGPQTPKACDSKLTFDAITTIRGEVMFFKDRFYMRTNPFYPEVELNFISVFWPQLPNGLEAAYEFADRDEVRFFKGNKYWAVQGQNVLHGYPKDIYSSFGFPRTVKHIDAALSEENTGKTYFFVANKYWRYDEYKRSMDPGYPKMIAHDFPGIGHKVDAVFMKDGFFYFFHGTRQYKFDPKTKRILTLQKANSWFNCRKN

SEQ ID NO: 2876 - protein, 450 aa, Artificial Sequence
  MMP-1 variant S220N
FPATLETQEQDVDLVQKYLEKYYNLKNDGRQVEKRRNSGPVVEKLKQMQEFFGLKVTGKPDAETLKVMKQPRCGVPDVAQFVLTEGNPRWEQTHLTYRIENYTPDLPRADVDHAIEKAFQLWSNVTPLTFTKVSEGQADIMISFVRGDHRDNSPFDGPGGNLAHAFQPGPGIGGDAHFDEDERWTNNFREYNLHRVAAHELGHSLGLSHSTDIGALMYPNYTFSGDVQLAQDDIDGIQAIYGRSQNPVQPIGPQTPKACDSKLTFDAITTIRGEVMFFKDRFYMRTNPFYPEVELNFISVFWPQLPNGLEAAYEFADRDEVRFFKGNKYWAVQGQNVLHGYPKDIYSSFGFPRTVKHIDAALSEENTGKTYFFVANKYWRYDEYKRSMDPGYPKMIAHDFPGIGHKVDAVFMKDGFFYFFHGTRQYKFDPKTKRILTLQKANSWFNCRKN

SEQ ID NO: 2877 - protein, 450 aa, Artificial Sequence
  MMP-1 variant S220Q
FPATLETQEQDVDLVQKYLEKYYNLKNDGRQVEKRRNSGPVVEKLKQMQEFFGLKVTGKPDAETLKVMKQPRCGVPDVAQFVLTEGNPRWEQTHLTYRIENYTPDLPRADVDHAIEKAFQLWSNVTPLTFTKVSEGQADIMISFVRGDHRDNSPFDGPGGNLAHAFQPGPGIGGDAHFDEDERWTNNFREYNLHRVAAHELGHSLGLSHSTDIGALMYPQYTFSGDVQLAQDDIDGIQAIYGRSQNPVQPIGPQTPKACDSKLTFDAITTIRGEVMFFKDRFYMRTNPFYPEVELNFISVFWPQLPNGLEAAYEFADRDEVRFFKGNKYWAVQGQNVLHGYPKDIYSSFGFPRTVKHIDAALSEENTGKTYFFVANKYWRYDEYKRSMDPGYPKMIAHDFPGIGHKVDAVFMKDGFFYFFHGTRQYKFDPKTKRILTLQKANSWFNCRKN

SEQ ID NO: 2878 - protein, 450 aa, Artificial Sequence
  MMP-1 variant S220T
FPATLETQEQDVDLVQKYLEKYYNLKNDGRQVEKRRNSGPVVEKLKQMQEFFGLKVTGKPDAETLKVMKQPRCGVPDVAQFVLTEGNPRWEQTHLTYRIENYTPDLPRADVDHAIEKAFQLWSNVTPLTFTKVSEGQADIMISFVRGDHRDNSPFDGPGGNLAHAFQPGPGIGGDAHFDEDERWTNNFREYNLHRVAAHELGHSLGLSHSTDIGALMYPTYTFSGDVQLAQDDIDGIQAIYGRSQNPVQPIGPQTPKACDSKLTFDAITTIRGEVMFFKDRFYMRTNPFYPEVELNFISVFWPQLPNGLEAAYEFADRDEVRFFKGNKYWAVQGQNVLHGYPKDIYSSFGFPRTVKHIDAALSEENTGKTYFFVANKYWRYDEYKRSMDPGYPKMIAHDFPGIGHKVDAVFMKDGFFYFFHGTRQYKFDPKTKRILTLQKANSWFNCRKN

SEQ ID NO: 2879 - protein, 450 aa, Artificial Sequence
  MMP-1 variant S220Y
FPATLETQEQDVDLVQKYLEKYYNLKNDGRQVEKRRNSGPVVEKLKQMQEFFGLKVTGKPDAETLKVMKQPRCGVPDVAQFVLTEGNPRWEQTHLTYRIENYTPDLPRADVDHAIEKAFQLWSNVTPLTFTKVSEGQADIMISFVRGDHRDNSPFDGPGGNLAHAFQPGPGIGGDAHFDEDERWTNNFREYNLHRVAAHELGHSLGLSHSTDIGALMYPYYTFSGDVQLAQDDIDGIQAIYGRSQNPVQPIGPQTPKACDSKLTFDAITTIRGEVMFFKDRFYMRTNPFYPEVELNFISVFWPQLPNGLEAAYEFADRDEVRFFKGNKYWAVQGQNVLHGYPKDIYSSFGFPRTVKHIDAALSEENTGKTYFFVANKYWRYDEYKRSMDPGYPKMIAHDFPGIGHKVDAVFMKDGFFYFFHGTRQYKFDPKTKRILTLQKANSWFNCRKN

SEQ ID NO: 2880 - protein, 450 aa, Artificial Sequence
  MMP-1 variant S220G
FPATLETQEQDVDLVQKYLEKYYNLKNDGRQVEKRRNSGPVVEKLKQMQEFFGLKVTGKPDAETLKVMKQPRCGVPDVAQFVLTEGNPRWEQTHLTYRIENYTPDLPRADVDHAIEKAFQLWSNVTPLTFTKVSEGQADIMISFVRGDHRDNSPFDGPGGNLAHAFQPGPGIGGDAHFDEDERWTNNFREYNLHRVAAHELGHSLGLSHSTDIGALMYPGYTFSGDVQLAQDDIDGIQAIYGRSQNPVQPIGPQTPKACDSKLTFDAITTIRGEVMFFKDRFYMRTNPFYPEVELNFISVFWPQLPNGLEAAYEFADRDEVRFFKGNKYWAVQGQNVLHGYPKDIYSSFGFPRTVKHIDAALSEENTGKTYFFVANKYWRYDEYKRSMDPGYPKMIAHDFPGIGHKVDAVFMKDGFFYFFHGTRQYKFDPKTKRILTLQKANSWFNCRKN

SEQ ID NO: 2881 - protein, 450 aa, Artificial Sequence
  MMP-1 variant S220F
FPATLETQEQDVDLVQKYLEKYYNLKNDGRQVEKRRNSGPVVEKLKQMQEFFGLKVTGKPDAETLKVMKQPRCGVPDVAQFVLTEGNPRWEQTHLTYRIENYTPDLPRADVDHAIEKAFQLWSNVTPLTFTKVSEGQADIMISFVRGDHRDNSPFDGPGGNLAHAFQPGPGIGGDAHFDEDERWTNNFREYNLHRVAAHELGHSLGLSHSTDIGALMYPFYTFSGDVQLAQDDIDGIQAIYGRSQNPVQPIGPQTPKACDSKLTFDAITTIRGEVMFFKDRFYMRTNPFYPEVELNFISVFWPQLPNGLEAAYEFADRDEVRFFKGNKYWAVQGQNVLHGYPKDIYSSFGFPRTVKHIDAALSEENTGKTYFFVANKYWRYDEYKRSMDPGYPKMIAHDFPGIGHKVDAVFMKDGFFYFFHGTRQYKFDPKTKRILTLQKANSWFNCRKN

SEQ ID NO: 2882 - protein, 450 aa, Artificial Sequence
  MMP-1 variant S220M
FPATLETQEQDVDLVQKYLEKYYNLKNDGRQVEKRRNSGPVVEKLKQMQEFFGLKVTGKPDAETLKVMKQPRCGVPDVAQFVLTEGNPRWEQTHLTYRIENYTPDLPRADVDHAIEKAFQLWSNVTPLTFTKVSEGQADIMISFVRGDHRDNSPFDGPGGNLAHAFQPGPGIGGDAHFDEDERWTNNFREYNLHRVAAHELGHSLGLSHSTDIGALMYPMYTFSGDVQLAQDDIDGIQAIYGRSQNPVQPIGPQTPKACDSKLTFDAITTIRGEVMFFKDRFYMRTNPFYPEVELNFISVFWPQLPNGLEAAYEFADRDEVRFFKGNKYWAVQGQNVLHGYPKDIYSSFGFPRTVKHIDAALSEENTGKTYFFVANKYWRYDEYKRSMDPGYPKMIAHDFPGIGHKVDAVFMKDGFFYFFHGTRQYKFDPKTKRILTLQKANSWFNCRKN

SEQ ID NO: 2883 - protein, 450 aa, Artificial Sequence
  MMP-1 variant S220W
FPATLETQEQDVDLVQKYLEKYYNLKNDGRQVEKRRNSGPVVEKLKQMQEFFGLKVTGKPDAETLKVMKQPRCGVPDVAQFVLTEGNPRWEQTHLTYRIENYTPDLPRADVDHAIEKAFQLWSNVTPLTFTKVSEGQADIMISFVRGDHRDNSPFDGPGGNLAHAFQPGPGIGGDAHFDEDERWTNNFREYNLHRVAAHELGHSLGLSHSTDIGALMYPWYTFSGDVQLAQDDIDGIQAIYGRSQNPVQPIGPQTPKACDSKLTFDAITTIRGEVMFFKDRFYMRTNPFYPEVELNFISVFWPQLPNGLEAAYEFADRDEVRFFKGNKYWAVQGQNVLHGYPKDIYSSFGFPRTVKHIDAALSEENTGKTYFFVANKYWRYDEYKRSMDPGYPKMIAHDFPGIGHKVDAVFMKDGFFYFFHGTRQYKFDPKTKRILTLQKANSWFNCRKN

SEQ ID NO: 2884 - protein, 450 aa, Artificial Sequence
  MMP-1 variant S220I
FPATLETQEQDVDLVQKYLEKYYNLKNDGRQVEKRRNSGPVVEKLKQMQEFFGLKVTGKPDAETLKVMKQPRCGVPDVAQFVLTEGNPRWEQTHLTYRIENYTPDLPRADVDHAIEKAFQLWSNVTPLTFTKVSEGQADIMISFVRGDHRDNSPFDGPGGNLAHAFQPGPGIGGDAHFDEDERWTNNFREYNLHRVAAHELGHSLGLSHSTDIGALMYPIYTFSGDVQLAQDDIDGIQAIYGRSQNPVQPIGPQTPKACDSKLTFDAITTIRGEVMFFKDRFYMRTNPFYPEVELNFISVFWPQLPNGLEAAYEFADRDEVRFFKGNKYWAVQGQNVLHGYPKDIYSSFGFPRTVKHIDAALSEENTGKTYFFVANKYWRYDEYKRSMDPGYPKMIAHDFPGIGHKVDAVFMKDGFFYFFHGTRQYKFDPKTKRILTLQKANSWFNCRKN

SEQ ID NO: 2885 - protein, 450 aa, Artificial Sequence
  MMP-1 variant S220V
FPATLETQEQDVDLVQKYLEKYYNLKNDGRQVEKRRNSGPVVEKLKQMQEFFGLKVTGKPDAETLKVMKQPRCGVPDVAQFVLTEGNPRWEQTHLTYRIENYTPDLPRADVDHAIEKAFQLWSNVTPLTFTKVSEGQADIMISFVRGDHRDNSPFDGPGGNLAHAFQPGPGIGGDAHFDEDERWTNNFREYNLHRVAAHELGHSLGLSHSTDIGALMYPVYTFSGDVQLAQDDIDGIQAIYGRSQNPVQPIGPQTPKACDSKLTFDAITTIRGEVMFFKDRFYMRTNPFYPEVELNFISVFWPQLPNGLEAAYEFADRDEVRFFKGNKYWAVQGQNVLHGYPKDIYSSFGFPRTVKHIDAALSEENTGKTYFFVANKYWRYDEYKRSMDPGYPKMIAHDFPGIGHKVDAVFMKDGFFYFFHGTRQYKFDPKTKRILTLQKANSWFNCRKN

SEQ ID NO: 2886 - protein, 450 aa, Artificial Sequence
  MMP-1 variant S220L
FPATLETQEQDVDLVQKYLEKYYNLKNDGRQVEKRRNSGPVVEKLKQMQEFFGLKVTGKPDAETLKVMKQPRCGVPDVAQFVLTEGNPRWEQTHLTYRIENYTPDLPRADVDHAIEKAFQLWSNVTPLTFTKVSEGQADIMISFVRGDHRDNSPFDGPGGNLAHAFQPGPGIGGDAHFDEDERWTNNFREYNLHRVAAHELGHSLGLSHSTDIGALMYPLYTFSGDVQLAQDDIDGIQAIYGRSQNPVQPIGPQTPKACDSKLTFDAITTIRGEVMFFKDRFYMRTNPFYPEVELNFISVFWPQLPNGLEAAYEFADRDEVRFFKGNKYWAVQGQNVLHGYPKDIYSSFGFPRTVKHIDAALSEENTGKTYFFVANKYWRYDEYKRSMDPGYPKMIAHDFPGIGHKVDAVFMKDGFFYFFHGTRQYKFDPKTKRILTLQKANSWFNCRKN

SEQ ID NO: 2887 - protein, 450 aa, Artificial Sequence
  MMP-1 variant S220A
FPATLETQEQDVDLVQKYLEKYYNLKNDGRQVEKRRNSGPVVEKLKQMQEFFGLKVTGKPDAETLKVMKQPRCGVPDVAQFVLTEGNPRWEQTHLTYRIENYTPDLPRADVDHAIEKAFQLWSNVTPLTFTKVSEGQADIMISFVRGDHRDNSPFDGPGGNLAHAFQPGPGIGGDAHFDEDERWTNNFREYNLHRVAAHELGHSLGLSHSTDIGALMYPAYTFSGDVQLAQDDIDGIQAIYGRSQNPVQPIGPQTPKACDSKLTFDAITTIRGEVMFFKDRFYMRTNPFYPEVELNFISVFWPQLPNGLEAAYEFADRDEVRFFKGNKYWAVQGQNVLHGYPKDIYSSFGFPRTVKHIDAALSEENTGKTYFFVANKYWRYDEYKRSMDPGYPKMIAHDFPGIGHKVDAVFMKDGFFYFFHGTRQYKFDPKTKRILTLQKANSWFNCRKN

SEQ ID NO: 2888 - protein, 450 aa, Artificial Sequence
  MMP-1 variant S220P
FPATLETQEQDVDLVQKYLEKYYNLKNDGRQVEKRRNSGPVVEKLKQMQEFFGLKVTGKPDAETLKVMKQPRCGVPDVAQFVLTEGNPRWEQTHLTYRIENYTPDLPRADVDHAIEKAFQLWSNVTPLTFTKVSEGQADIMISFVRGDHRDNSPFDGPGGNLAHAFQPGPGIGGDAHFDEDERWTNNFREYNLHRVAAHELGHSLGLSHSTDIGALMYPPYTFSGDVQLAQDDIDGIQAIYGRSQNPVQPIGPQTPKACDSKLTFDAITTIRGEVMFFKDRFYMRTNPFYPEVELNFISVFWPQLPNGLEAAYEFADRDEVRFFKGNKYWAVQGQNVLHGYPKDIYSSFGFPRTVKHIDAALSEENTGKTYFFVANKYWRYDEYKRSMDPGYPKMIAHDFPGIGHKVDAVFMKDGFFYFFHGTRQYKFDPKTKRILTLQKANSWFNCRKN

SEQ ID NO: 2889 - protein, 450 aa, Artificial Sequence
  MMP-1 variant Y221D
FPATLETQEQDVDLVQKYLEKYYNLKNDGRQVEKRRNSGPVVEKLKQMQEFFGLKVTGKPDAETLKVMKQPRCGVPDVAQFVLTEGNPRWEQTHLTYRIENYTPDLPRADVDHAIEKAFQLWSNVTPLTFTKVSEGQADIMISFVRGDHRDNSPFDGPGGNLAHAFQPGPGIGGDAHFDEDERWTNNFREYNLHRVAAHELGHSLGLSHSTDIGALMYPSDTFSGDVQLAQDDIDGIQAIYGRSQNPVQPIGPQTPKACDSKLTFDAITTIRGEVMFFKDRFYMRTNPFYPEVELNFISVFWPQLPNGLEAAYEFADRDEVRFFKGNKYWAVQGQNVLHGYPKDIYSSFGFPRTVKHIDAALSEENTGKTYFFVANKYWRYDEYKRSMDPGYPKMIAHDFPGIGHKVDAVFMKDGFFYFFHGTRQYKFDPKTKRILTLQKANSWFNCRKN

SEQ ID NO: 2890 - protein, 450 aa, Artificial Sequence
  MMP-1 variant Y221E
FPATLETQEQDVDLVQKYLEKYYNLKNDGRQVEKRRNSGPVVEKLKQMQEFFGLKVTGKPDAETLKVMKQPRCGVPDVAQFVLTEGNPRWEQTHLTYRIENYTPDLPRADVDHAIEKAFQLWSNVTPLTFTKVSEGQADIMISFVRGDHRDNSPFDGPGGNLAHAFQPGPGIGGDAHFDEDERWTNNFREYNLHRVAAHELGHSLGLSHSTDIGALMYPSETFSGDVQLAQDDIDGIQAIYGRSQNPVQPIGPQTPKACDSKLTFDAITTIRGEVMFFKDRFYMRTNPFYPEVELNFISVFWPQLPNGLEAAYEFADRDEVRFFKGNKYWAVQGQNVLHGYPKDIYSSFGFPRTVKHIDAALSEENTGKTYFFVANKYWRYDEYKRSMDPGYPKMIAHDFPGIGHKVDAVFMKDGFFYFFHGTRQYKFDPKTKRILTLQKANSWFNCRKN

SEQ ID NO: 2891 - protein, 450 aa, Artificial Sequence
  MMP-1 variant Y221H
FPATLETQEQDVDLVQKYLEKYYNLKNDGRQVEKRRNSGPVVEKLKQMQEFFGLKVTGKPDAETLKVMKQPRCGVPDVAQFVLTEGNPRWEQTHLTYRIENYTPDLPRADVDHAIEKAFQLWSNVTPLTFTKVSEGQADIMISFVRGDHRDNSPFDGPGGNLAHAFQPGPGIGGDAHFDEDERWTNNFREYNLHRVAAHELGHSLGLSHSTDIGALMYPSHTFSGDVQLAQDDIDGIQAIYGRSQNPVQPIGPQTPKACDSKLTFDAITTIRGEVMFFKDRFYMRTNPFYPEVELNFISVFWPQLPNGLEAAYEFADRDEVRFFKGNKYWAVQGQNVLHGYPKDIYSSFGFPRTVKHIDAALSEENTGKTYFFVANKYWRYDEYKRSMDPGYPKMIAHDFPGIGHKVDAVFMKDGFFYFFHGTRQYKFDPKTKRILTLQKANSWFNCRKN

SEQ ID NO: 2892 - protein, 450 aa, Artificial Sequence
  MMP-1 variant Y221K
FPATLETQEQDVDLVQKYLEKYYNLKNDGRQVEKRRNSGPVVEKLKQMQEFFGLKVTGKPDAETLKVMKQPRCGVPDVAQFVLTEGNPRWEQTHLTYRIENYTPDLPRADVDHAIEKAFQLWSNVTPLTFTKVSEGQADIMISFVRGDHRDNSPFDGPGGNLAHAFQPGPGIGGDAHFDEDERWTNNFREYNLHRVAAHELGHSLGLSHSTDIGALMYPSKTFSGDVQLAQDDIDGIQAIYGRSQNPVQPIGPQTPKACDSKLTFDAITTIRGEVMFFKDRFYMRTNPFYPEVELNFISVFWPQLPNGLEAAYEFADRDEVRFFKGNKYWAVQGQNVLHGYPKDIYSSFGFPRTVKHIDAALSEENTGKTYFFVANKYWRYDEYKRSMDPGYPKMIAHDFPGIGHKVDAVFMKDGFFYFFHGTRQYKFDPKTKRILTLQKANSWFNCRKN

SEQ ID NO: 2893 - protein, 450 aa, Artificial Sequence
  MMP-1 variant Y221R
FPATLETQEQDVDLVQKYLEKYYNLKNDGRQVEKRRNSGPVVEKLKQMQEFFGLKVTGKPDAETLKVMKQPRCGVPDVAQFVLTEGNPRWEQTHLTYRIENYTPDLPRADVDHAIEKAFQLWSNVTPLTFTKVSEGQADIMISFVRGDHRDNSPFDGPGGNLAHAFQPGPGIGGDAHFDEDERWTNNFREYNLHRVAAHELGHSLGLSHSTDIGALMYPSRTFSGDVQLAQDDIDGIQAIYGRSQNPVQPIGPQTPKACDSKLTFDAITTIRGEVMFFKDRFYMRTNPFYPEVELNFISVFWPQLPNGLEAAYEFADRDEVRFFKGNKYWAVQGQNVLHGYPKDIYSSFGFPRTVKHIDAALSEENTGKTYFFVANKYWRYDEYKRSMDPGYPKMIAHDFPGIGHKVDAVFMKDGFFYFFHGTRQYKFDPKTKRILTLQKANSWFNCRKN

SEQ ID NO: 2894 - protein, 450 aa, Artificial Sequence
  MMP-1 variant Y221C
FPATLETQEQDVDLVQKYLEKYYNLKNDGRQVEKRRNSGPVVEKLKQMQEFFGLKVTGKPDAETLKVMKQPRCGVPDVAQFVLTEGNPRWEQTHLTYRIENYTPDLPRADVDHAIEKAFQLWSNVTPLTFTKVSEGQADIMISFVRGDHRDNSPFDGPGGNLAHAFQPGPGIGGDAHFDEDERWTNNFREYNLHRVAAHELGHSLGLSHSTDIGALMYPSCTFSGDVQLAQDDIDGIQAIYGRSQNPVQPIGPQTPKACDSKLTFDAITTIRGEVMFFKDRFYMRTNPFYPEVELNFISVFWPQLPNGLEAAYEFADRDEVRFFKGNKYWAVQGQNVLHGYPKDIYSSFGFPRTVKHIDAALSEENTGKTYFFVANKYWRYDEYKRSMDPGYPKMIAHDFPGIGHKVDAVFMKDGFFYFFHGTRQYKFDPKTKRILTLQKANSWFNCRKN

SEQ ID NO: 2895 - protein, 450 aa, Artificial Sequence
  MMP-1 variant Y221N
FPATLETQEQDVDLVQKYLEKYYNLKNDGRQVEKRRNSGPVVEKLKQMQEFFGLKVTGKPDAETLKVMKQPRCGVPDVAQFVLTEGNPRWEQTHLTYRIENYTPDLPRADVDHAIEKAFQLWSNVTPLTFTKVSEGQADIMISFVRGDHRDNSPFDGPGGNLAHAFQPGPGIGGDAHFDEDERWTNNFREYNLHRVAAHELGHSLGLSHSTDIGALMYPSNTFSGDVQLAQDDIDGIQAIYGRSQNPVQPIGPQTPKACDSKLTFDAITTIRGEVMFFKDRFYMRTNPFYPEVELNFISVFWPQLPNGLEAAYEFADRDEVRFFKGNKYWAVQGQNVLHGYPKDIYSSFGFPRTVKHIDAALSEENTGKTYFFVANKYWRYDEYKRSMDPGYPKMIAHDFPGIGHKVDAVFMKDGFFYFFHGTRQYKFDPKTKRILTLQKANSWFNCRKN

SEQ ID NO: 2896 - protein, 450 aa, Artificial Sequence
  MMP-1 variant Y221Q
FPATLETQEQDVDLVQKYLEKYYNLKNDGRQVEKRRNSGPVVEKLKQMQEFFGLKVTGKPDAETLKVMKQPRCGVPDVAQFVLTEGNPRWEQTHLTYRIENYTPDLPRADVDHAIEKAFQLWSNVTPLTFTKVSEGQADIMISFVRGDHRDNSPFDGPGGNLAHAFQPGPGIGGDAHFDEDERWTNNFREYNLHRVAAHELGHSLGLSHSTDIGALMYPSQTFSGDVQLAQDDIDGIQAIYGRSQNPVQPIGPQTPKACDSKLTFDAITTIRGEVMFFKDRFYMRTNPFYPEVELNFISVFWPQLPNGLEAAYEFADRDEVRFFKGNKYWAVQGQNVLHGYPKDIYSSFGFPRTVKHIDAALSEENTGKTYFFVANKYWRYDEYKRSMDPGYPKMIAHDFPGIGHKVDAVFMKDGFFYFFHGTRQYKFDPKTKRILTLQKANSWFNCRKN

SEQ ID NO: 2897 - protein, 450 aa, Artificial Sequence
  MMP-1 variant Y221T
FPATLETQEQDVDLVQKYLEKYYNLKNDGRQVEKRRNSGPVVEKLKQMQEFFGLKVTGKPDAETLKVMKQPRCGVPDVAQFVLTEGNPRWEQTHLTYRIENYTPDLPRADVDHAIEKAFQLWSNVTPLTFTKVSEGQADIMISFVRGDHRDNSPFDGPGGNLAHAFQPGPGIGGDAHFDEDERWTNNFREYNLHRVAAHELGHSLGLSHSTDIGALMYPSTTFSGDVQLAQDDIDGIQAIYGRSQNPVQPIGPQTPKACDSKLTFDAITTIRGEVMFFKDRFYMRTNPFYPEVELNFISVFWPQLPNGLEAAYEFADRDEVRFFKGNKYWAVQGQNVLHGYPKDIYSSFGFPRTVKHIDAALSEENTGKTYFFVANKYWRYDEYKRSMDPGYPKMIAHDFPGIGHKVDAVFMKDGFFYFFHGTRQYKFDPKTKRILTLQKANSWFNCRKN

SEQ ID NO: 2898 - protein, 450 aa, Artificial Sequence
  MMP-1 variant Y221S
FPATLETQEQDVDLVQKYLEKYYNLKNDGRQVEKRRNSGPVVEKLKQMQEFFGLKVTGKPDAETLKVMKQPRCGVPDVAQFVLTEGNPRWEQTHLTYRIENYTPDLPRADVDHAIEKAFQLWSNVTPLTFTKVSEGQADIMISFVRGDHRDNSPFDGPGGNLAHAFQPGPGIGGDAHFDEDERWTNNFREYNLHRVAAHELGHSLGLSHSTDIGALMYPSSTFSGDVQLAQDDIDGIQAIYGRSQNPVQPIGPQTPKACDSKLTFDAITTIRGEVMFFKDRFYMRTNPFYPEVELNFISVFWPQLPNGLEAAYEFADRDEVRFFKGNKYWAVQGQNVLHGYPKDIYSSFGFPRTVKHIDAALSEENTGKTYFFVANKYWRYDEYKRSMDPGYPKMIAHDFPGIGHKVDAVFMKDGFFYFFHGTRQYKFDPKTKRILTLQKANSWFNCRKN

SEQ ID NO: 2899 - protein, 450 aa, Artificial Sequence
  MMP-1 variant Y221G
FPATLETQEQDVDLVQKYLEKYYNLKNDGRQVEKRRNSGPVVEKLKQMQEFFGLKVTGKPDAETLKVMKQPRCGVPDVAQFVLTEGNPRWEQTHLTYRIENYTPDLPRADVDHAIEKAFQLWSNVTPLTFTKVSEGQADIMISFVRGDHRDNSPFDGPGGNLAHAFQPGPGIGGDAHFDEDERWTNNFREYNLHRVAAHELGHSLGLSHSTDIGALMYPSGTFSGDVQLAQDDIDGIQAIYGRSQNPVQPIGPQTPKACDSKLTFDAITTIRGEVMFFKDRFYMRTNPFYPEVELNFISVFWPQLPNGLEAAYEFADRDEVRFFKGNKYWAVQGQNVLHGYPKDIYSSFGFPRTVKHIDAALSEENTGKTYFFVANKYWRYDEYKRSMDPGYPKMIAHDFPGIGHKVDAVFMKDGFFYFFHGTRQYKFDPKTKRILTLQKANSWFNCRKN

SEQ ID NO: 2900 - protein, 450 aa, Artificial Sequence
  MMP-1 variant Y221F
FPATLETQEQDVDLVQKYLEKYYNLKNDGRQVEKRRNSGPVVEKLKQMQEFFGLKVTGKPDAETLKVMKQPRCGVPDVAQFVLTEGNPRWEQTHLTYRIENYTPDLPRADVDHAIEKAFQLWSNVTPLTFTKVSEGQADIMISFVRGDHRDNSPFDGPGGNLAHAFQPGPGIGGDAHFDEDERWTNNFREYNLHRVAAHELGHSLGLSHSTDIGALMYPSFTFSGDVQLAQDDIDGIQAIYGRSQNPVQPIGPQTPKACDSKLTFDAITTIRGEVMFFKDRFYMRTNPFYPEVELNFISVFWPQLPNGLEAAYEFADRDEVRFFKGNKYWAVQGQNVLHGYPKDIYSSFGFPRTVKHIDAALSEENTGKTYFFVANKYWRYDEYKRSMDPGYPKMIAHDFPGIGHKVDAVFMKDGFFYFFHGTRQYKFDPKTKRILTLQKANSWFNCRKN

SEQ ID NO: 2901 - protein, 450 aa, Artificial Sequence
  MMP-1 variant Y221M
FPATLETQEQDVDLVQKYLEKYYNLKNDGRQVEKRRNSGPVVEKLKQMQEFFGLKVTGKPDAETLKVMKQPRCGVPDVAQFVLTEGNPRWEQTHLTYRIENYTPDLPRADVDHAIEKAFQLWSNVTPLTFTKVSEGQADIMISFVRGDHRDNSPFDGPGGNLAHAFQPGPGIGGDAHFDEDERWTNNFREYNLHRVAAHELGHSLGLSHSTDIGALMYPSMTFSGDVQLAQDDIDGIQAIYGRSQNPVQPIGPQTPKACDSKLTFDAITTIRGEVMFFKDRFYMRTNPFYPEVELNFISVFWPQLPNGLEAAYEFADRDEVRFFKGNKYWAVQGQNVLHGYPKDIYSSFGFPRTVKHIDAALSEENTGKTYFFVANKYWRYDEYKRSMDPGYPKMIAHDFPGIGHKVDAVFMKDGFFYFFHGTRQYKFDPKTKRILTLQKANSWFNCRKN

SEQ ID NO: 2902 - protein, 450 aa, Artificial Sequence
  MMP-1 variant Y221W
FPATLETQEQDVDLVQKYLEKYYNLKNDGRQVEKRRNSGPVVEKLKQMQEFFGLKVTGKPDAETLKVMKQPRCGVPDVAQFVLTEGNPRWEQTHLTYRIENYTPDLPRADVDHAIEKAFQLWSNVTPLTFTKVSEGQADIMISFVRGDHRDNSPFDGPGGNLAHAFQPGPGIGGDAHFDEDERWTNNFREYNLHRVAAHELGHSLGLSHSTDIGALMYPSWTFSGDVQLAQDDIDGIQAIYGRSQNPVQPIGPQTPKACDSKLTFDAITTIRGEVMFFKDRFYMRTNPFYPEVELNFISVFWPQLPNGLEAAYEFADRDEVRFFKGNKYWAVQGQNVLHGYPKDIYSSFGFPRTVKHIDAALSEENTGKTYFFVANKYWRYDEYKRSMDPGYPKMIAHDFPGIGHKVDAVFMKDGFFYFFHGTRQYKFDPKTKRILTLQKANSWFNCRKN

SEQ ID NO: 2903 - protein, 450 aa, Artificial Sequence
  MMP-1 variant Y221I
FPATLETQEQDVDLVQKYLEKYYNLKNDGRQVEKRRNSGPVVEKLKQMQEFFGLKVTGKPDAETLKVMKQPRCGVPDVAQFVLTEGNPRWEQTHLTYRIENYTPDLPRADVDHAIEKAFQLWSNVTPLTFTKVSEGQADIMISFVRGDHRDNSPFDGPGGNLAHAFQPGPGIGGDAHFDEDERWTNNFREYNLHRVAAHELGHSLGLSHSTDIGALMYPSITFSGDVQLAQDDIDGIQAIYGRSQNPVQPIGPQTPKACDSKLTFDAITTIRGEVMFFKDRFYMRTNPFYPEVELNFISVFWPQLPNGLEAAYEFADRDEVRFFKGNKYWAVQGQNVLHGYPKDIYSSFGFPRTVKHIDAALSEENTGKTYFFVANKYWRYDEYKRSMDPGYPKMIAHDFPGIGHKVDAVFMKDGFFYFFHGTRQYKFDPKTKRILTLQKANSWFNCRKN

SEQ ID NO: 2904 - protein, 450 aa, Artificial Sequence
  MMP-1 variant Y221V
FPATLETQEQDVDLVQKYLEKYYNLKNDGRQVEKRRNSGPVVEKLKQMQEFFGLKVTGKPDAETLKVMKQPRCGVPDVAQFVLTEGNPRWEQTHLTYRIENYTPDLPRADVDHAIEKAFQLWSNVTPLTFTKVSEGQADIMISFVRGDHRDNSPFDGPGGNLAHAFQPGPGIGGDAHFDEDERWTNNFREYNLHRVAAHELGHSLGLSHSTDIGALMYPSVTFSGDVQLAQDDIDGIQAIYGRSQNPVQPIGPQTPKACDSKLTFDAITTIRGEVMFFKDRFYMRTNPFYPEVELNFISVFWPQLPNGLEAAYEFADRDEVRFFKGNKYWAVQGQNVLHGYPKDIYSSFGFPRTVKHIDAALSEENTGKTYFFVANKYWRYDEYKRSMDPGYPKMIAHDFPGIGHKVDAVFMKDGFFYFFHGTRQYKFDPKTKRILTLQKANSWFNCRKN

SEQ ID NO: 2905 - protein, 450 aa, Artificial Sequence
  MMP-1 variant Y221L
FPATLETQEQDVDLVQKYLEKYYNLKNDGRQVEKRRNSGPVVEKLKQMQEFFGLKVTGKPDAETLKVMKQPRCGVPDVAQFVLTEGNPRWEQTHLTYRIENYTPDLPRADVDHAIEKAFQLWSNVTPLTFTKVSEGQADIMISFVRGDHRDNSPFDGPGGNLAHAFQPGPGIGGDAHFDEDERWTNNFREYNLHRVAAHELGHSLGLSHSTDIGALMYPSLTFSGDVQLAQDDIDGIQAIYGRSQNPVQPIGPQTPKACDSKLTFDAITTIRGEVMFFKDRFYMRTNPFYPEVELNFISVFWPQLPNGLEAAYEFADRDEVRFFKGNKYWAVQGQNVLHGYPKDIYSSFGFPRTVKHIDAALSEENTGKTYFFVANKYWRYDEYKRSMDPGYPKMIAHDFPGIGHKVDAVFMKDGFFYFFHGTRQYKFDPKTKRILTLQKANSWFNCRKN

SEQ ID NO: 2906 - protein, 450 aa, Artificial Sequence
  MMP-1 variant Y221A
FPATLETQEQDVDLVQKYLEKYYNLKNDGRQVEKRRNSGPVVEKLKQMQEFFGLKVTGKPDAETLKVMKQPRCGVPDVAQFVLTEGNPRWEQTHLTYRIENYTPDLPRADVDHAIEKAFQLWSNVTPLTFTKVSEGQADIMISFVRGDHRDNSPFDGPGGNLAHAFQPGPGIGGDAHFDEDERWTNNFREYNLHRVAAHELGHSLGLSHSTDIGALMYPSATFSGDVQLAQDDIDGIQAIYGRSQNPVQPIGPQTPKACDSKLTFDAITTIRGEVMFFKDRFYMRTNPFYPEVELNFISVFWPQLPNGLEAAYEFADRDEVRFFKGNKYWAVQGQNVLHGYPKDIYSSFGFPRTVKHIDAALSEENTGKTYFFVANKYWRYDEYKRSMDPGYPKMIAHDFPGIGHKVDAVFMKDGFFYFFHGTRQYKFDPKTKRILTLQKANSWFNCRKN

SEQ ID NO: 2907 - protein, 450 aa, Artificial Sequence
  MMP-1 variant Y221P
FPATLETQEQDVDLVQKYLEKYYNLKNDGRQVEKRRNSGPVVEKLKQMQEFFGLKVTGKPDAETLKVMKQPRCGVPDVAQFVLTEGNPRWEQTHLTYRIENYTPDLPRADVDHAIEKAFQLWSNVTPLTFTKVSEGQADIMISFVRGDHRDNSPFDGPGGNLAHAFQPGPGIGGDAHFDEDERWTNNFREYNLHRVAAHELGHSLGLSHSTDIGALMYPSPTFSGDVQLAQDDIDGIQAIYGRSQNPVQPIGPQTPKACDSKLTFDAITTIRGEVMFFKDRFYMRTNPFYPEVELNFISVFWPQLPNGLEAAYEFADRDEVRFFKGNKYWAVQGQNVLHGYPKDIYSSFGFPRTVKHIDAALSEENTGKTYFFVANKYWRYDEYKRSMDPGYPKMIAHDFPGIGHKVDAVFMKDGFFYFFHGTRQYKFDPKTKRILTLQKANSWFNCRKN

SEQ ID NO: 2908 - protein, 450 aa, Artificial Sequence
  MMP-1 variant T222D
FPATLETQEQDVDLVQKYLEKYYNLKNDGRQVEKRRNSGPVVEKLKQMQEFFGLKVTGKPDAETLKVMKQPRCGVPDVAQFVLTEGNPRWEQTHLTYRIENYTPDLPRADVDHAIEKAFQLWSNVTPLTFTKVSEGQADIMISFVRGDHRDNSPFDGPGGNLAHAFQPGPGIGGDAHFDEDERWTNNFREYNLHRVAAHELGHSLGLSHSTDIGALMYPSYDFSGDVQLAQDDIDGIQAIYGRSQNPVQPIGPQTPKACDSKLTFDAITTIRGEVMFFKDRFYMRTNPFYPEVELNFISVFWPQLPNGLEAAYEFADRDEVRFFKGNKYWAVQGQNVLHGYPKDIYSSFGFPRTVKHIDAALSEENTGKTYFFVANKYWRYDEYKRSMDPGYPKMIAHDFPGIGHKVDAVFMKDGFFYFFHGTRQYKFDPKTKRILTLQKANSWFNCRKN

SEQ ID NO: 2909 - protein, 450 aa, Artificial Sequence
  MMP-1 variant T222E
FPATLETQEQDVDLVQKYLEKYYNLKNDGRQVEKRRNSGPVVEKLKQMQEFFGLKVTGKPDAETLKVMKQPRCGVPDVAQFVLTEGNPRWEQTHLTYRIENYTPDLPRADVDHAIEKAFQLWSNVTPLTFTKVSEGQADIMISFVRGDHRDNSPFDGPGGNLAHAFQPGPGIGGDAHFDEDERWTNNFREYNLHRVAAHELGHSLGLSHSTDIGALMYPSYEFSGDVQLAQDDIDGIQAIYGRSQNPVQPIGPQTPKACDSKLTFDAITTIRGEVMFFKDRFYMRTNPFYPEVELNFISVFWPQLPNGLEAAYEFADRDEVRFFKGNKYWAVQGQNVLHGYPKDIYSSFGFPRTVKHIDAALSEENTGKTYFFVANKYWRYDEYKRSMDPGYPKMIAHDFPGIGHKVDAVFMKDGFFYFFHGTRQYKFDPKTKRILTLQKANSWFNCRKN

SEQ ID NO: 2910 - protein, 450 aa, Artificial Sequence
  MMP-1 variant T222H
FPATLETQEQDVDLVQKYLEKYYNLKNDGRQVEKRRNSGPVVEKLKQMQEFFGLKVTGKPDAETLKVMKQPRCGVPDVAQFVLTEGNPRWEQTHLTYRIENYTPDLPRADVDHAIEKAFQLWSNVTPLTFTKVSEGQADIMISFVRGDHRDNSPFDGPGGNLAHAFQPGPGIGGDAHFDEDERWTNNFREYNLHRVAAHELGHSLGLSHSTDIGALMYPSYHFSGDVQLAQDDIDGIQAIYGRSQNPVQPIGPQTPKACDSKLTFDAITTIRGEVMFFKDRFYMRTNPFYPEVELNFISVFWPQLPNGLEAAYEFADRDEVRFFKGNKYWAVQGQNVLHGYPKDIYSSFGFPRTVKHIDAALSEENTGKTYFFVANKYWRYDEYKRSMDPGYPKMIAHDFPGIGHKVDAVFMKDGFFYFFHGTRQYKFDPKTKRILTLQKANSWFNCRKN

SEQ ID NO: 2911 - protein, 450 aa, Artificial Sequence
  MMP-1 variant T222K
FPATLETQEQDVDLVQKYLEKYYNLKNDGRQVEKRRNSGPVVEKLKQMQEFFGLKVTGKPDAETLKVMKQPRCGVPDVAQFVLTEGNPRWEQTHLTYRIENYTPDLPRADVDHAIEKAFQLWSNVTPLTFTKVSEGQADIMISFVRGDHRDNSPFDGPGGNLAHAFQPGPGIGGDAHFDEDERWTNNFREYNLHRVAAHELGHSLGLSHSTDIGALMYPSYKFSGDVQLAQDDIDGIQAIYGRSQNPVQPIGPQTPKACDSKLTFDAITTIRGEVMFFKDRFYMRTNPFYPEVELNFISVFWPQLPNGLEAAYEFADRDEVRFFKGNKYWAVQGQNVLHGYPKDIYSSFGFPRTVKHIDAALSEENTGKTYFFVANKYWRYDEYKRSMDPGYPKMIAHDFPGIGHKVDAVFMKDGFFYFFHGTRQYKFDPKTKRILTLQKANSWFNCRKN

SEQ ID NO: 2912 - protein, 450 aa, Artificial Sequence
  MMP-1 variant T222R
FPATLETQEQDVDLVQKYLEKYYNLKNDGRQVEKRRNSGPVVEKLKQMQEFFGLKVTGKPDAETLKVMKQPRCGVPDVAQFVLTEGNPRWEQTHLTYRIENYTPDLPRADVDHAIEKAFQLWSNVTPLTFTKVSEGQADIMISFVRGDHRDNSPFDGPGGNLAHAFQPGPGIGGDAHFDEDERWTNNFREYNLHRVAAHELGHSLGLSHSTDIGALMYPSYRFSGDVQLAQDDIDGIQAIYGRSQNPVQPIGPQTPKACDSKLTFDAITTIRGEVMFFKDRFYMRTNPFYPEVELNFISVFWPQLPNGLEAAYEFADRDEVRFFKGNKYWAVQGQNVLHGYPKDIYSSFGFPRTVKHIDAALSEENTGKTYFFVANKYWRYDEYKRSMDPGYPKMIAHDFPGIGHKVDAVFMKDGFFYFFHGTRQYKFDPKTKRILTLQKANSWFNCRKN

SEQ ID NO: 2913 - protein, 450 aa, Artificial Sequence
  MMP-1 variant T222C
FPATLETQEQDVDLVQKYLEKYYNLKNDGRQVEKRRNSGPVVEKLKQMQEFFGLKVTGKPDAETLKVMKQPRCGVPDVAQFVLTEGNPRWEQTHLTYRIENYTPDLPRADVDHAIEKAFQLWSNVTPLTFTKVSEGQADIMISFVRGDHRDNSPFDGPGGNLAHAFQPGPGIGGDAHFDEDERWTNNFREYNLHRVAAHELGHSLGLSHSTDIGALMYPSYCFSGDVQLAQDDIDGIQAIYGRSQNPVQPIGPQTPKACDSKLTFDAITTIRGEVMFFKDRFYMRTNPFYPEVELNFISVFWPQLPNGLEAAYEFADRDEVRFFKGNKYWAVQGQNVLHGYPKDIYSSFGFPRTVKHIDAALSEENTGKTYFFVANKYWRYDEYKRSMDPGYPKMIAHDFPGIGHKVDAVFMKDGFFYFFHGTRQYKFDPKTKRILTLQKANSWFNCRKN

SEQ ID NO: 2914 - protein, 450 aa, Artificial Sequence
  MMP-1 variant T222N
FPATLETQEQDVDLVQKYLEKYYNLKNDGRQVEKRRNSGPVVEKLKQMQEFFGLKVTGKPDAETLKVMKQPRCGVPDVAQFVLTEGNPRWEQTHLTYRIENYTPDLPRADVDHAIEKAFQLWSNVTPLTFTKVSEGQADIMISFVRGDHRDNSPFDGPGGNLAHAFQPGPGIGGDAHFDEDERWTNNFREYNLHRVAAHELGHSLGLSHSTDIGALMYPSYNFSGDVQLAQDDIDGIQAIYGRSQNPVQPIGPQTPKACDSKLTFDAITTIRGEVMFFKDRFYMRTNPFYPEVELNFISVFWPQLPNGLEAAYEFADRDEVRFFKGNKYWAVQGQNVLHGYPKDIYSSFGFPRTVKHIDAALSEENTGKTYFFVANKYWRYDEYKRSMDPGYPKMIAHDFPGIGHKVDAVFMKDGFFYFFHGTRQYKFDPKTKRILTLQKANSWFNCRKN

SEQ ID NO: 2915 - protein, 450 aa, Artificial Sequence
  MMP-1 variant T222Q
FPATLETQEQDVDLVQKYLEKYYNLKNDGRQVEKRRNSGPVVEKLKQMQEFFGLKVTGKPDAETLKVMKQPRCGVPDVAQFVLTEGNPRWEQTHLTYRIENYTPDLPRADVDHAIEKAFQLWSNVTPLTFTKVSEGQADIMISFVRGDHRDNSPFDGPGGNLAHAFQPGPGIGGDAHFDEDERWTNNFREYNLHRVAAHELGHSLGLSHSTDIGALMYPSYQFSGDVQLAQDDIDGIQAIYGRSQNPVQPIGPQTPKACDSKLTFDAITTIRGEVMFFKDRFYMRTNPFYPEVELNFISVFWPQLPNGLEAAYEFADRDEVRFFKGNKYWAVQGQNVLHGYPKDIYSSFGFPRTVKHIDAALSEENTGKTYFFVANKYWRYDEYKRSMDPGYPKMIAHDFPGIGHKVDAVFMKDGFFYFFHGTRQYKFDPKTKRILTLQKANSWFNCRKN

SEQ ID NO: 2916 - protein, 450 aa, Artificial Sequence
  MMP-1 variant T222Y
FPATLETQEQDVDLVQKYLEKYYNLKNDGRQVEKRRNSGPVVEKLKQMQEFFGLKVTGKPDAETLKVMKQPRCGVPDVAQFVLTEGNPRWEQTHLTYRIENYTPDLPRADVDHAIEKAFQLWSNVTPLTFTKVSEGQADIMISFVRGDHRDNSPFDGPGGNLAHAFQPGPGIGGDAHFDEDERWTNNFREYNLHRVAAHELGHSLGLSHSTDIGALMYPSYYFSGDVQLAQDDIDGIQAIYGRSQNPVQPIGPQTPKACDSKLTFDAITTIRGEVMFFKDRFYMRTNPFYPEVELNFISVFWPQLPNGLEAAYEFADRDEVRFFKGNKYWAVQGQNVLHGYPKDIYSSFGFPRTVKHIDAALSEENTGKTYFFVANKYWRYDEYKRSMDPGYPKMIAHDFPGIGHKVDAVFMKDGFFYFFHGTRQYKFDPKTKRILTLQKANSWFNCRKN

SEQ ID NO: 2917 - protein, 450 aa, Artificial Sequence
  MMP-1 variant T222S
FPATLETQEQDVDLVQKYLEKYYNLKNDGRQVEKRRNSGPVVEKLKQMQEFFGLKVTGKPDAETLKVMKQPRCGVPDVAQFVLTEGNPRWEQTHLTYRIENYTPDLPRADVDHAIEKAFQLWSNVTPLTFTKVSEGQADIMISFVRGDHRDNSPFDGPGGNLAHAFQPGPGIGGDAHFDEDERWTNNFREYNLHRVAAHELGHSLGLSHSTDIGALMYPSYSFSGDVQLAQDDIDGIQAIYGRSQNPVQPIGPQTPKACDSKLTFDAITTIRGEVMFFKDRFYMRTNPFYPEVELNFISVFWPQLPNGLEAAYEFADRDEVRFFKGNKYWAVQGQNVLHGYPKDIYSSFGFPRTVKHIDAALSEENTGKTYFFVANKYWRYDEYKRSMDPGYPKMIAHDFPGIGHKVDAVFMKDGFFYFFHGTRQYKFDPKTKRILTLQKANSWFNCRKN

SEQ ID NO: 2918 - protein, 450 aa, Artificial Sequence
  MMP-1 variant T222G
FPATLETQEQDVDLVQKYLEKYYNLKNDGRQVEKRRNSGPVVEKLKQMQEFFGLKVTGKPDAETLKVMKQPRCGVPDVAQFVLTEGNPRWEQTHLTYRIENYTPDLPRADVDHAIEKAFQLWSNVTPLTFTKVSEGQADIMISFVRGDHRDNSPFDGPGGNLAHAFQPGPGIGGDAHFDEDERWTNNFREYNLHRVAAHELGHSLGLSHSTDIGALMYPSYGFSGDVQLAQDDIDGIQAIYGRSQNPVQPIGPQTPKACDSKLTFDAITTIRGEVMFFKDRFYMRTNPFYPEVELNFISVFWPQLPNGLEAAYEFADRDEVRFFKGNKYWAVQGQNVLHGYPKDIYSSFGFPRTVKHIDAALSEENTGKTYFFVANKYWRYDEYKRSMDPGYPKMIAHDFPGIGHKVDAVFMKDGFFYFFHGTRQYKFDPKTKRILTLQKANSWFNCRKN

SEQ ID NO: 2919 - protein, 450 aa, Artificial Sequence
  MMP-1 variant T222F
FPATLETQEQDVDLVQKYLEKYYNLKNDGRQVEKRRNSGPVVEKLKQMQEFFGLKVTGKPDAETLKVMKQPRCGVPDVAQFVLTEGNPRWEQTHLTYRIENYTPDLPRADVDHAIEKAFQLWSNVTPLTFTKVSEGQADIMISFVRGDHRDNSPFDGPGGNLAHAFQPGPGIGGDAHFDEDERWTNNFREYNLHRVAAHELGHSLGLSHSTDIGALMYPSYFFSGDVQLAQDDIDGIQAIYGRSQNPVQPIGPQTPKACDSKLTFDAITTIRGEVMFFKDRFYMRTNPFYPEVELNFISVFWPQLPNGLEAAYEFADRDEVRFFKGNKYWAVQGQNVLHGYPKDIYSSFGFPRTVKHIDAALSEENTGKTYFFVANKYWRYDEYKRSMDPGYPKMIAHDFPGIGHKVDAVFMKDGFFYFFHGTRQYKFDPKTKRILTLQKANSWFNCRKN

SEQ ID NO: 2920 - protein, 450 aa, Artificial Sequence
  MMP-1 variant T222M
FPATLETQEQDVDLVQKYLEKYYNLKNDGRQVEKRRNSGPVVEKLKQMQEFFGLKVTGKPDAETLKVMKQPRCGVPDVAQFVLTEGNPRWEQTHLTYRIENYTPDLPRADVDHAIEKAFQLWSNVTPLTFTKVSEGQADIMISFVRGDHRDNSPFDGPGGNLAHAFQPGPGIGGDAHFDEDERWTNNFREYNLHRVAAHELGHSLGLSHSTDIGALMYPSYMFSGDVQLAQDDIDGIQAIYGRSQNPVQPIGPQTPKACDSKLTFDAITTIRGEVMFFKDRFYMRTNPFYPEVELNFISVFWPQLPNGLEAAYEFADRDEVRFFKGNKYWAVQGQNVLHGYPKDIYSSFGFPRTVKHIDAALSEENTGKTYFFVANKYWRYDEYKRSMDPGYPKMIAHDFPGIGHKVDAVFMKDGFFYFFHGTRQYKFDPKTKRILTLQKANSWFNCRKN

SEQ ID NO: 2921 - protein, 450 aa, Artificial Sequence
  MMP-1 variant T222W
FPATLETQEQDVDLVQKYLEKYYNLKNDGRQVEKRRNSGPVVEKLKQMQEFFGLKVTGKPDAETLKVMKQPRCGVPDVAQFVLTEGNPRWEQTHLTYRIENYTPDLPRADVDHAIEKAFQLWSNVTPLTFTKVSEGQADIMISFVRGDHRDNSPFDGPGGNLAHAFQPGPGIGGDAHFDEDERWTNNFREYNLHRVAAHELGHSLGLSHSTDIGALMYPSYWFSGDVQLAQDDIDGIQAIYGRSQNPVQPIGPQTPKACDSKLTFDAITTIRGEVMFFKDRFYMRTNPFYPEVELNFISVFWPQLPNGLEAAYEFADRDEVRFFKGNKYWAVQGQNVLHGYPKDIYSSFGFPRTVKHIDAALSEENTGKTYFFVANKYWRYDEYKRSMDPGYPKMIAHDFPGIGHKVDAVFMKDGFFYFFHGTRQYKFDPKTKRILTLQKANSWFNCRKN

SEQ ID NO: 2922 - protein, 450 aa, Artificial Sequence
  MMP-1 variant T222I
FPATLETQEQDVDLVQKYLEKYYNLKNDGRQVEKRRNSGPVVEKLKQMQEFFGLKVTGKPDAETLKVMKQPRCGVPDVAQFVLTEGNPRWEQTHLTYRIENYTPDLPRADVDHAIEKAFQLWSNVTPLTFTKVSEGQADIMISFVRGDHRDNSPFDGPGGNLAHAFQPGPGIGGDAHFDEDERWTNNFREYNLHRVAAHELGHSLGLSHSTDIGALMYPSYIFSGDVQLAQDDIDGIQAIYGRSQNPVQPIGPQTPKACDSKLTFDAITTIRGEVMFFKDRFYMRTNPFYPEVELNFISVFWPQLPNGLEAAYEFADRDEVRFFKGNKYWAVQGQNVLHGYPKDIYSSFGFPRTVKHIDAALSEENTGKTYFFVANKYWRYDEYKRSMDPGYPKMIAHDFPGIGHKVDAVFMKDGFFYFFHGTRQYKFDPKTKRILTLQKANSWFNCRKN

SEQ ID NO: 2923 - protein, 450 aa, Artificial Sequence
  MMP-1 variant T222V
FPATLETQEQDVDLVQKYLEKYYNLKNDGRQVEKRRNSGPVVEKLKQMQEFFGLKVTGKPDAETLKVMKQPRCGVPDVAQFVLTEGNPRWEQTHLTYRIENYTPDLPRADVDHAIEKAFQLWSNVTPLTFTKVSEGQADIMISFVRGDHRDNSPFDGPGGNLAHAFQPGPGIGGDAHFDEDERWTNNFREYNLHRVAAHELGHSLGLSHSTDIGALMYPSYVFSGDVQLAQDDIDGIQAIYGRSQNPVQPIGPQTPKACDSKLTFDAITTIRGEVMFFKDRFYMRTNPFYPEVELNFISVFWPQLPNGLEAAYEFADRDEVRFFKGNKYWAVQGQNVLHGYPKDIYSSFGFPRTVKHIDAALSEENTGKTYFFVANKYWRYDEYKRSMDPGYPKMIAHDFPGIGHKVDAVFMKDGFFYFFHGTRQYKFDPKTKRILTLQKANSWFNCRKN

SEQ ID NO: 2924 - protein, 450 aa, Artificial Sequence
  MMP-1 variant T222L
FPATLETQEQDVDLVQKYLEKYYNLKNDGRQVEKRRNSGPVVEKLKQMQEFFGLKVTGKPDAETLKVMKQPRCGVPDVAQFVLTEGNPRWEQTHLTYRIENYTPDLPRADVDHAIEKAFQLWSNVTPLTFTKVSEGQADIMISFVRGDHRDNSPFDGPGGNLAHAFQPGPGIGGDAHFDEDERWTNNFREYNLHRVAAHELGHSLGLSHSTDIGALMYPSYLFSGDVQLAQDDIDGIQAIYGRSQNPVQPIGPQTPKACDSKLTFDAITTIRGEVMFFKDRFYMRTNPFYPEVELNFISVFWPQLPNGLEAAYEFADRDEVRFFKGNKYWAVQGQNVLHGYPKDIYSSFGFPRTVKHIDAALSEENTGKTYFFVANKYWRYDEYKRSMDPGYPKMIAHDFPGIGHKVDAVFMKDGFFYFFHGTRQYKFDPKTKRILTLQKANSWFNCRKN

SEQ ID NO: 2925 - protein, 450 aa, Artificial Sequence
  MMP-1 variant T222A
FPATLETQEQDVDLVQKYLEKYYNLKNDGRQVEKRRNSGPVVEKLKQMQEFFGLKVTGKPDAETLKVMKQPRCGVPDVAQFVLTEGNPRWEQTHLTYRIENYTPDLPRADVDHAIEKAFQLWSNVTPLTFTKVSEGQADIMISFVRGDHRDNSPFDGPGGNLAHAFQPGPGIGGDAHFDEDERWTNNFREYNLHRVAAHELGHSLGLSHSTDIGALMYPSYAFSGDVQLAQDDIDGIQAIYGRSQNPVQPIGPQTPKACDSKLTFDAITTIRGEVMFFKDRFYMRTNPFYPEVELNFISVFWPQLPNGLEAAYEFADRDEVRFFKGNKYWAVQGQNVLHGYPKDIYSSFGFPRTVKHIDAALSEENTGKTYFFVANKYWRYDEYKRSMDPGYPKMIAHDFPGIGHKVDAVFMKDGFFYFFHGTRQYKFDPKTKRILTLQKANSWFNCRKN

SEQ ID NO: 2926 - protein, 450 aa, Artificial Sequence
  MMP-1 variant T222P
FPATLETQEQDVDLVQKYLEKYYNLKNDGRQVEKRRNSGPVVEKLKQMQEFFGLKVTGKPDAETLKVMKQPRCGVPDVAQFVLTEGNPRWEQTHLTYRIENYTPDLPRADVDHAIEKAFQLWSNVTPLTFTKVSEGQADIMISFVRGDHRDNSPFDGPGGNLAHAFQPGPGIGGDAHFDEDERWTNNFREYNLHRVAAHELGHSLGLSHSTDIGALMYPSYPFSGDVQLAQDDIDGIQAIYGRSQNPVQPIGPQTPKACDSKLTFDAITTIRGEVMFFKDRFYMRTNPFYPEVELNFISVFWPQLPNGLEAAYEFADRDEVRFFKGNKYWAVQGQNVLHGYPKDIYSSFGFPRTVKHIDAALSEENTGKTYFFVANKYWRYDEYKRSMDPGYPKMIAHDFPGIGHKVDAVFMKDGFFYFFHGTRQYKFDPKTKRILTLQKANSWFNCRKN

SEQ ID NO: 2927 - protein, 450 aa, Artificial Sequence
  MMP-1 variant S224E
FPATLETQEQDVDLVQKYLEKYYNLKNDGRQVEKRRNSGPVVEKLKQMQEFFGLKVTGKPDAETLKVMKQPRCGVPDVAQFVLTEGNPRWEQTHLTYRIENYTPDLPRADVDHAIEKAFQLWSNVTPLTFTKVSEGQADIMISFVRGDHRDNSPFDGPGGNLAHAFQPGPGIGGDAHFDEDERWTNNFREYNLHRVAAHELGHSLGLSHSTDIGALMYPSYTFEGDVQLAQDDIDGIQAIYGRSQNPVQPIGPQTPKACDSKLTFDAITTIRGEVMFFKDRFYMRTNPFYPEVELNFISVFWPQLPNGLEAAYEFADRDEVRFFKGNKYWAVQGQNVLHGYPKDIYSSFGFPRTVKHIDAALSEENTGKTYFFVANKYWRYDEYKRSMDPGYPKMIAHDFPGIGHKVDAVFMKDGFFYFFHGTRQYKFDPKTKRILTLQKANSWFNCRKN

SEQ ID NO: 2928 - protein, 450 aa, Artificial Sequence; identical to SEQ ID NO: 2927
  MMP-1 variant S224E

SEQ ID NO: 2929 - protein, 450 aa, Artificial Sequence
  MMP-1 variant S224H
FPATLETQEQDVDLVQKYLEKYYNLKNDGRQVEKRRNSGPVVEKLKQMQEFFGLKVTGKPDAETLKVMKQPRCGVPDVAQFVLTEGNPRWEQTHLTYRIENYTPDLPRADVDHAIEKAFQLWSNVTPLTFTKVSEGQADIMISFVRGDHRDNSPFDGPGGNLAHAFQPGPGIGGDAHFDEDERWTNNFREYNLHRVAAHELGHSLGLSHSTDIGALMYPSYTFHGDVQLAQDDIDGIQAIYGRSQNPVQPIGPQTPKACDSKLTFDAITTIRGEVMFFKDRFYMRTNPFYPEVELNFISVFWPQLPNGLEAAYEFADRDEVRFFKGNKYWAVQGQNVLHGYPKDIYSSFGFPRTVKHIDAALSEENTGKTYFFVANKYWRYDEYKRSMDPGYPKMIAHDFPGIGHKVDAVFMKDGFFYFFHGTRQYKFDPKTKRILTLQKANSWFNCRKN

SEQ ID NO: 2930 - protein, 450 aa, Artificial Sequence
  MMP-1 variant S224K
FPATLETQEQDVDLVQKYLEKYYNLKNDGRQVEKRRNSGPVVEKLKQMQEFFGLKVTGKPDAETLKVMKQPRCGVPDVAQFVLTEGNPRWEQTHLTYRIENYTPDLPRADVDHAIEKAFQLWSNVTPLTFTKVSEGQADIMISFVRGDHRDNSPFDGPGGNLAHAFQPGPGIGGDAHFDEDERWTNNFREYNLHRVAAHELGHSLGLSHSTDIGALMYPSYTFKGDVQLAQDDIDGIQAIYGRSQNPVQPIGPQTPKACDSKLTFDAITTIRGEVMFFKDRFYMRTNPFYPEVELNFISVFWPQLPNGLEAAYEFADRDEVRFFKGNKYWAVQGQNVLHGYPKDIYSSFGFPRTVKHIDAALSEENTGKTYFFVANKYWRYDEYKRSMDPGYPKMIAHDFPGIGHKVDAVFMKDGFFYFFHGTRQYKFDPKTKRILTLQKANSWFNCRKN

SEQ ID NO: 2931 - protein, 450 aa, Artificial Sequence
  MMP-1 variant S224R
FPATLETQEQDVDLVQKYLEKYYNLKNDGRQVEKRRNSGPVVEKLKQMQEFFGLKVTGKPDAETLKVMKQPRCGVPDVAQFVLTEGNPRWEQTHLTYRIENYTPDLPRADVDHAIEKAFQLWSNVTPLTFTKVSEGQADIMISFVRGDHRDNSPFDGPGGNLAHAFQPGPGIGGDAHFDEDERWTNNFREYNLHRVAAHELGHSLGLSHSTDIGALMYPSYTFRGDVQLAQDDIDGIQAIYGRSQNPVQPIGPQTPKACDSKLTFDAITTIRGEVMFFKDRFYMRTNPFYPEVELNFISVFWPQLPNGLEAAYEFADRDEVRFFKGNKYWAVQGQNVLHGYPKDIYSSFGFPRTVKHIDAALSEENTGKTYFFVANKYWRYDEYKRSMDPGYPKMIAHDFPGIGHKVDAVFMKDGFFYFFHGTRQYKFDPKTKRILTLQKANSWFNCRKN

SEQ ID NO: 2932 - protein, 450 aa, Artificial Sequence
  MMP-1 variant S224C
FPATLETQEQDVDLVQKYLEKYYNLKNDGRQVEKRRNSGPVVEKLKQMQEFFGLKVTGKPDAETLKVMKQPRCGVPDVAQFVLTEGNPRWEQTHLTYRIENYTPDLPRADVDHAIEKAFQLWSNVTPLTFTKVSEGQADIMISFVRGDHRDNSPFDGPGGNLAHAFQPGPGIGGDAHFDEDERWTNNFREYNLHRVAAHELGHSLGLSHSTDIGALMYPSYTFCGDVQLAQDDIDGIQAIYGRSQNPVQPIGPQTPKACDSKLTFDAITTIRGEVMFFKDRFYMRTNPFYPEVELNFISVFWPQLPNGLEAAYEFADRDEVRFFKGNKYWAVQGQNVLHGYPKDIYSSFGFPRTVKHIDAALSEENTGKTYFFVANKYWRYDEYKRSMDPGYPKMIAHDFPGIGHKVDAVFMKDGFFYFFHGTRQYKFDPKTKRILTLQKANSWFNCRKN

SEQ ID NO: 2933 - protein, 450 aa, Artificial Sequence
  MMP-1 variant S224N
FPATLETQEQDVDLVQKYLEKYYNLKNDGRQVEKRRNSGPVVEKLKQMQEFFGLKVTGKPDAETLKVMKQPRCGVPDVAQFVLTEGNPRWEQTHLTYRIENYTPDLPRADVDHAIEKAFQLWSNVTPLTFTKVSEGQADIMISFVRGDHRDNSPFDGPGGNLAHAFQPGPGIGGDAHFDEDERWTNNFREYNLHRVAAHELGHSLGLSHSTDIGALMYPSYTFNGDVQLAQDDIDGIQAIYGRSQNPVQPIGPQTPKACDSKLTFDAITTIRGEVMFFKDRFYMRTNPFYPEVELNFISVFWPQLPNGLEAAYEFADRDEVRFFKGNKYWAVQGQNVLHGYPKDIYSSFGFPRTVKHIDAALSEENTGKTYFFVANKYWRYDEYKRSMDPGYPKMIAHDFPGIGHKVDAVFMKDGFFYFFHGTRQYKFDPKTKRILTLQKANSWFNCRKN

SEQ ID NO: 2934 - protein, 450 aa, Artificial Sequence
  MMP-1 variant S224Q
FPATLETQEQDVDLVQKYLEKYYNLKNDGRQVEKRRNSGPVVEKLKQMQEFFGLKVTGKPDAETLKVMKQPRCGVPDVAQFVLTEGNPRWEQTHLTYRIENYTPDLPRADVDHAIEKAFQLWSNVTPLTFTKVSEGQADIMISFVRGDHRDNSPFDGPGGNLAHAFQPGPGIGGDAHFDEDERWTNNFREYNLHRVAAHELGHSLGLSHSTDIGALMYPSYTFQGDVQLAQDDIDGIQAIYGRSQNPVQPIGPQTPKACDSKLTFDAITTIRGEVMFFKDRFYMRTNPFYPEVELNFISVFWPQLPNGLEAAYEFADRDEVRFFKGNKYWAVQGQNVLHGYPKDIYSSFGFPRTVKHIDAALSEENTGKTYFFVANKYWRYDEYKRSMDPGYPKMIAHDFPGIGHKVDAVFMKDGFFYFFHGTRQYKFDPKTKRILTLQKANSWFNCRKN

SEQ ID NO: 2935 - protein, 450 aa, Artificial Sequence
  MMP-1 variant S224T
FPATLETQEQDVDLVQKYLEKYYNLKNDGRQVEKRRNSGPVVEKLKQMQEFFGLKVTGKPDAETLKVMKQPRCGVPDVAQFVLTEGNPRWEQTHLTYRIENYTPDLPRADVDHAIEKAFQLWSNVTPLTFTKVSEGQADIMISFVRGDHRDNSPFDGPGGNLAHAFQPGPGIGGDAHFDEDERWTNNFREYNLHRVAAHELGHSLGLSHSTDIGALMYPSYTFTGDVQLAQDDIDGIQAIYGRSQNPVQPIGPQTPKACDSKLTFDAITTIRGEVMFFKDRFYMRTNPFYPEVELNFISVFWPQLPNGLEAAYEFADRDEVRFFKGNKYWAVQGQNVLHGYPKDIYSSFGFPRTVKHIDAALSEENTGKTYFFVANKYWRYDEYKRSMDPGYPKMIAHDFPGIGHKVDAVFMKDGFFYFFHGTRQYKFDPKTKRILTLQKANSWFNCRKN

SEQ ID NO: 2936 - protein, 450 aa, Artificial Sequence
  MMP-1 variant S224Y
FPATLETQEQDVDLVQKYLEKYYNLKNDGRQVEKRRNSGPVVEKLKQMQEFFGLKVTGKPDAETLKVMKQPRCGVPDVAQFVLTEGNPRWEQTHLTYRIENYTPDLPRADVDHAIEKAFQLWSNVTPLTFTKVSEGQADIMISFVRGDHRDNSPFDGPGGNLAHAFQPGPGIGGDAHFDEDERWTNNFREYNLHRVAAHELGHSLGLSHSTDIGALMYPSYTFYGDVQLAQDDIDGIQAIYGRSQNPVQPIGPQTPKACDSKLTFDAITTIRGEVMFFKDRFYMRTNPFYPEVELNFISVFWPQLPNGLEAAYEFADRDEVRFFKGNKYWAVQGQNVLHGYPKDIYSSFGFPRTVKHIDAALSEENTGKTYFFVANKYWRYDEYKRSMDPGYPKMIAHDFPGIGHKVDAVFMKDGFFYFFHGTRQYKFDPKTKRILTLQKANSWFNCRKN

SEQ ID NO: 2937 - protein, 450 aa, Artificial Sequence
  MMP-1 variant S224G
FPATLETQEQDVDLVQKYLEKYYNLKNDGRQVEKRRNSGPVVEKLKQMQEFFGLKVTGKPDAETLKVMKQPRCGVPDVAQFVLTEGNPRWEQTHLTYRIENYTPDLPRADVDHAIEKAFQLWSNVTPLTFTKVSEGQADIMISFVRGDHRDNSPFDGPGGNLAHAFQPGPGIGGDAHFDEDERWTNNFREYNLHRVAAHELGHSLGLSHSTDIGALMYPSYTFGGDVQLAQDDIDGIQAIYGRSQNPVQPIGPQTPKACDSKLTFDAITTIRGEVMFFKDRFYMRTNPFYPEVELNFISVFWPQLPNGLEAAYEFADRDEVRFFKGNKYWAVQGQNVLHGYPKDIYSSFGFPRTVKHIDAALSEENTGKTYFFVANKYWRYDEYKRSMDPGYPKMIAHDFPGIGHKVDAVFMKDGFFYFFHGTRQYKFDPKTKRILTLQKANSWFNCRKN

SEQ ID NO: 2938 - protein, 450 aa, Artificial Sequence
  MMP-1 variant S224F
FPATLETQEQDVDLVQKYLEKYYNLKNDGRQVEKRRNSGPVVEKLKQMQEFFGLKVTGKPDAETLKVMKQPRCGVPDVAQFVLTEGNPRWEQTHLTYRIENYTPDLPRADVDHAIEKAFQLWSNVTPLTFTKVSEGQADIMISFVRGDHRDNSPFDGPGGNLAHAFQPGPGIGGDAHFDEDERWTNNFREYNLHRVAAHELGHSLGLSHSTDIGALMYPSYTFFGDVQLAQDDIDGIQAIYGRSQNPVQPIGPQTPKACDSKLTFDAITTIRGEVMFFKDRFYMRTNPFYPEVELNFISVFWPQLPNGLEAAYEFADRDEVRFFKGNKYWAVQGQNVLHGYPKDIYSSFGFPRTVKHIDAALSEENTGKTYFFVANKYWRYDEYKRSMDPGYPKMIAHDFPGIGHKVDAVFMKDGFFYFFHGTRQYKFDPKTKRILTLQKANSWFNCRKN

SEQ ID NO: 2939 - protein, 450 aa, Artificial Sequence
  MMP-1 variant S224M
FPATLETQEQDVDLVQKYLEKYYNLKNDGRQVEKRRNSGPVVEKLKQMQEFFGLKVTGKPDAETLKVMKQPRCGVPDVAQFVLTEGNPRWEQTHLTYRIENYTPDLPRADVDHAIEKAFQLWSNVTPLTFTKVSEGQADIMISFVRGDHRDNSPFDGPGGNLAHAFQPGPGIGGDAHFDEDERWTNNFREYNLHRVAAHELGHSLGLSHSTDIGALMYPSYTFMGDVQLAQDDIDGIQAIYGRSQNPVQPIGPQTPKACDSKLTFDAITTIRGEVMFFKDRFYMRTNPFYPEVELNFISVFWPQLPNGLEAAYEFADRDEVRFFKGNKYWAVQGQNVLHGYPKDIYSSFGFPRTVKHIDAALSEENTGKTYFFVANKYWRYDEYKRSMDPGYPKMIAHDFPGIGHKVDAVFMKDGFFYFFHGTRQYKFDPKTKRILTLQKANSWFNCRKN

SEQ ID NO: 2940 - protein, 450 aa, Artificial Sequence
  MMP-1 variant S224W
FPATLETQEQDVDLVQKYLEKYYNLKNDGRQVEKRRNSGPVVEKLKQMQEFFGLKVTGKPDAETLKVMKQPRCGVPDVAQFVLTEGNPRWEQTHLTYRIENYTPDLPRADVDHAIEKAFQLWSNVTPLTFTKVSEGQADIMISFVRGDHRDNSPFDGPGGNLAHAFQPGPGIGGDAHFDEDERWTNNFREYNLHRVAAHELGHSLGLSHSTDIGALMYPSYTFWGDVQLAQDDIDGIQAIYGRSQNPVQPIGPQTPKACDSKLTFDAITTIRGEVMFFKDRFYMRTNPFYPEVELNFISVFWPQLPNGLEAAYEFADRDEVRFFKGNKYWAVQGQNVLHGYPKDIYSSFGFPRTVKHIDAALSEENTGKTYFFVANKYWRYDEYKRSMDPGYPKMIAHDFPGIGHKVDAVFMKDGFFYFFHGTRQYKFDPKTKRILTLQKANSWFNCRKN

SEQ ID NO: 2941 - protein, 450 aa, Artificial Sequence
  MMP-1 variant S224I
FPATLETQEQDVDLVQKYLEKYYNLKNDGRQVEKRRNSGPVVEKLKQMQEFFGLKVTGKPDAETLKVMKQPRCGVPDVAQFVLTEGNPRWEQTHLTYRIENYTPDLPRADVDHAIEKAFQLWSNVTPLTFTKVSEGQADIMISFVRGDHRDNSPFDGPGGNLAHAFQPGPGIGGDAHFDEDERWTNNFREYNLHRVAAHELGHSLGLSHSTDIGALMYPSYTFIGDVQLAQDDIDGIQAIYGRSQNPVQPIGPQTPKACDSKLTFDAITTIRGEVMFFKDRFYMRTNPFYPEVELNFISVFWPQLPNGLEAAYEFADRDEVRFFKGNKYWAVQGQNVLHGYPKDIYSSFGFPRTVKHIDAALSEENTGKTYFFVANKYWRYDEYKRSMDPGYPKMIAHDFPGIGHKVDAVFMKDGFFYFFHGTRQYKFDPKTKRILTLQKANSWFNCRKN

SEQ ID NO: 2942 - protein, 450 aa, Artificial Sequence
  MMP-1 variant S224V
FPATLETQEQDVDLVQKYLEKYYNLKNDGRQVEKRRNSGPVVEKLKQMQEFFGLKVTGKPDAETLKVMKQPRCGVPDVAQFVLTEGNPRWEQTHLTYRIENYTPDLPRADVDHAIEKAFQLWSNVTPLTFTKVSEGQADIMISFVRGDHRDNSPFDGPGGNLAHAFQPGPGIGGDAHFDEDERWTNNFREYNLHRVAAHELGHSLGLSHSTDIGALMYPSYTFVGDVQLAQDDIDGIQAIYGRSQNPVQPIGPQTPKACDSKLTFDAITTIRGEVMFFKDRFYMRTNPFYPEVELNFISVFWPQLPNGLEAAYEFADRDEVRFFKGNKYWAVQGQNVLHGYPKDIYSSFGFPRTVKHIDAALSEENTGKTYFFVANKYWRYDEYKRSMDPGYPKMIAHDFPGIGHKVDAVFMKDGFFYFFHGTRQYKFDPKTKRILTLQKANSWFNCRKN

SEQ ID NO: 2943 - protein, 450 aa, Artificial Sequence
  MMP-1 variant S224L
FPATLETQEQDVDLVQKYLEKYYNLKNDGRQVEKRRNSGPVVEKLKQMQEFFGLKVTGKPDAETLKVMKQPRCGVPDVAQFVLTEGNPRWEQTHLTYRIENYTPDLPRADVDHAIEKAFQLWSNVTPLTFTKVSEGQADIMISFVRGDHRDNSPFDGPGGNLAHAFQPGPGIGGDAHFDEDERWTNNFREYNLHRVAAHELGHSLGLSHSTDIGALMYPSYTFLGDVQLAQDDIDGIQAIYGRSQNPVQPIGPQTPKACDSKLTFDAITTIRGEVMFFKDRFYMRTNPFYPEVELNFISVFWPQLPNGLEAAYEFADRDEVRFFKGNKYWAVQGQNVLHGYPKDIYSSFGFPRTVKHIDAALSEENTGKTYFFVANKYWRYDEYKRSMDPGYPKMIAHDFPGIGHKVDAVFMKDGFFYFFHGTRQYKFDPKTKRILTLQKANSWFNCRKN

SEQ ID NO: 2944 - protein, 450 aa, Artificial Sequence
  MMP-1 variant S224A
FPATLETQEQDVDLVQKYLEKYYNLKNDGRQVEKRRNSGPVVEKLKQMQEFFGLKVTGKPDAETLKVMKQPRCGVPDVAQFVLTEGNPRWEQTHLTYRIENYTPDLPRADVDHAIEKAFQLWSNVTPLTFTKVSEGQADIMISFVRGDHRDNSPFDGPGGNLAHAFQPGPGIGGDAHFDEDERWTNNFREYNLHRVAAHELGHSLGLSHSTDIGALMYPSYTFAGDVQLAQDDIDGIQAIYGRSQNPVQPIGPQTPKACDSKLTFDAITTIRGEVMFFKDRFYMRTNPFYPEVELNFISVFWPQLPNGLEAAYEFADRDEVRFFKGNKYWAVQGQNVLHGYPKDIYSSFGFPRTVKHIDAALSEENTGKTYFFVANKYWRYDEYKRSMDPGYPKMIAHDFPGIGHKVDAVFMKDGFFYFFHGTRQYKFDPKTKRILTLQKANSWFNCRKN

SEQ ID NO: 2945 - protein, 450 aa, Artificial Sequence
  MMP-1 variant S224P
FPATLETQEQDVDLVQKYLEKYYNLKNDGRQVEKRRNSGPVVEKLKQMQEFFGLKVTGKPDAETLKVMKQPRCGVPDVAQFVLTEGNPRWEQTHLTYRIENYTPDLPRADVDHAIEKAFQLWSNVTPLTFTKVSEGQADIMISFVRGDHRDNSPFDGPGGNLAHAFQPGPGIGGDAHFDEDERWTNNFREYNLHRVAAHELGHSLGLSHSTDIGALMYPSYTFPGDVQLAQDDIDGIQAIYGRSQNPVQPIGPQTPKACDSKLTFDAITTIRGEVMFFKDRFYMRTNPFYPEVELNFISVFWPQLPNGLEAAYEFADRDEVRFFKGNKYWAVQGQNVLHGYPKDIYSSFGFPRTVKHIDAALSEENTGKTYFFVANKYWRYDEYKRSMDPGYPKMIAHDFPGIGHKVDAVFMKDGFFYFFHGTRQYKFDPKTKRILTLQKANSWFNCRKN

SEQ ID NO: 2946 - protein, 450 aa, Artificial Sequence
  MMP-1 variant G225D
FPATLETQEQDVDLVQKYLEKYYNLKNDGRQVEKRRNSGPVVEKLKQMQEFFGLKVTGKPDAETLKVMKQPRCGVPDVAQFVLTEGNPRWEQTHLTYRIENYTPDLPRADVDHAIEKAFQLWSNVTPLTFTKVSEGQADIMISFVRGDHRDNSPFDGPGGNLAHAFQPGPGIGGDAHFDEDERWTNNFREYNLHRVAAHELGHSLGLSHSTDIGALMYPSYTFSDDVQLAQDDIDGIQAIYGRSQNPVQPIGPQTPKACDSKLTFDAITTIRGEVMFFKDRFYMRTNPFYPEVELNFISVFWPQLPNGLEAAYEFADRDEVRFFKGNKYWAVQGQNVLHGYPKDIYSSFGFPRTVKHIDAALSEENTGKTYFFVANKYWRYDEYKRSMDPGYPKMIAHDFPGIGHKVDAVFMKDGFFYFFHGTRQYKFDPKTKRILTLQKANSWFNCRKN

SEQ ID NO: 2947 - protein, 450 aa, Artificial Sequence
  MMP-1 variant G225E
FPATLETQEQDVDLVQKYLEKYYNLKNDGRQVEKRRNSGPVVEKLKQMQEFFGLKVTGKPDAETLKVMKQPRCGVPDVAQFVLTEGNPRWEQTHLTYRIENYTPDLPRADVDHAIEKAFQLWSNVTPLTFTKVSEGQADIMISFVRGDHRDNSPFDGPGGNLAHAFQPGPGIGGDAHFDEDERWTNNFREYNLHRVAAHELGHSLGLSHSTDIGALMYPSYTFSEDVQLAQDDIDGIQAIYGRSQNPVQPIGPQTPKACDSKLTFDAITTIRGEVMFFKDRFYMRTNPFYPEVELNFISVFWPQLPNGLEAAYEFADRDEVRFFKGNKYWAVQGQNVLHGYPKDIYSSFGFPRTVKHIDAALSEENTGKTYFFVANKYWRYDEYKRSMDPGYPKMIAHDFPGIGHKVDAVFMKDGFFYFFHGTRQYKFDPKTKRILTLQKANSWFNCRKN

SEQ ID NO: 2948 - protein, 450 aa, Artificial Sequence
  MMP-1 variant G225H
FPATLETQEQDVDLVQKYLEKYYNLKNDGRQVEKRRNSGPVVEKLKQMQEFFGLKVTGKPDAETLKVMKQPRCGVPDVAQFVLTEGNPRWEQTHLTYRIENYTPDLPRADVDHAIEKAFQLWSNVTPLTFTKVSEGQADIMISFVRGDHRDNSPFDGPGGNLAHAFQPGPGIGGDAHFDEDERWTNNFREYNLHRVAAHELGHSLGLSHSTDIGALMYPSYTFSHDVQLAQDDIDGIQAIYGRSQNPVQPIGPQTPKACDSKLTFDAITTIRGEVMFFKDRFYMRTNPFYPEVELNFISVFWPQLPNGLEAAYEFADRDEVRFFKGNKYWAVQGQNVLHGYPKDIYSSFGFPRTVKHIDAALSEENTGKTYFFVANKYWRYDEYKRSMDPGYPKMIAHDFPGIGHKVDAVFMKDGFFYFFHGTRQYKFDPKTKRILTLQKANSWFNCRKN

SEQ ID NO: 2949 - protein, 450 aa, Artificial Sequence
  MMP-1 variant G225K
FPATLETQEQDVDLVQKYLEKYYNLKNDGRQVEKRRNSGPVVEKLKQMQEFFGLKVTGKPDAETLKVMKQPRCGVPDVAQFVLTEGNPRWEQTHLTYRIENYTPDLPRADVDHAIEKAFQLWSNVTPLTFTKVSEGQADIMISFVRGDHRDNSPFDGPGGNLAHAFQPGPGIGGDAHFDEDERWTNNFREYNLHRVAAHELGHSLGLSHSTDIGALMYPSYTFSKDVQLAQDDIDGIQAIYGRSQNPVQPIGPQTPKACDSKLTFDAITTIRGEVMFFKDRFYMRTNPFYPEVELNFISVFWPQLPNGLEAAYEFADRDEVRFFKGNKYWAVQGQNVLHGYPKDIYSSFGFPRTVKHIDAALSEENTGKTYFFVANKYWRYDEYKRSMDPGYPKMIAHDFPGIGHKVDAVFMKDGFFYFFHGTRQYKFDPKTKRILTLQKANSWFNCRKN

SEQ ID NO: 2950 - protein, 450 aa, Artificial Sequence
  MMP-1 variant G225R
FPATLETQEQDVDLVQKYLEKYYNLKNDGRQVEKRRNSGPVVEKLKQMQEFFGLKVTGKPDAETLKVMKQPRCGVPDVAQFVLTEGNPRWEQTHLTYRIENYTPDLPRADVDHAIEKAFQLWSNVTPLTFTKVSEGQADIMISFVRGDHRDNSPFDGPGGNLAHAFQPGPGIGGDAHFDEDERWTNNFREYNLHRVAAHELGHSLGLSHSTDIGALMYPSYTFSRDVQLAQDDIDGIQAIYGRSQNPVQPIGPQTPKACDSKLTFDAITTIRGEVMFFKDRFYMRTNPFYPEVELNFISVFWPQLPNGLEAAYEFADRDEVRFFKGNKYWAVQGQNVLHGYPKDIYSSFGFPRTVKHIDAALSEENTGKTYFFVANKYWRYDEYKRSMDPGYPKMIAHDFPGIGHKVDAVFMKDGFFYFFHGTRQYKFDPKTKRILTLQKANSWFNCRKN

SEQ ID NO: 2951 - protein, 450 aa, Artificial Sequence
  MMP-1 variant G225C
FPATLETQEQDVDLVQKYLEKYYNLKNDGRQVEKRRNSGPVVEKLKQMQEFFGLKVTGKPDAETLKVMKQPRCGVPDVAQFVLTEGNPRWEQTHLTYRIENYTPDLPRADVDHAIEKAFQLWSNVTPLTFTKVSEGQADIMISFVRGDHRDNSPFDGPGGNLAHAFQPGPGIGGDAHFDEDERWTNNFREYNLHRVAAHELGHSLGLSHSTDIGALMYPSYTFSCDVQLAQDDIDGIQAIYGRSQNPVQPIGPQTPKACDSKLTFDAITTIRGEVMFFKDRFYMRTNPFYPEVELNFISVFWPQLPNGLEAAYEFADRDEVRFFKGNKYWAVQGQNVLHGYPKDIYSSFGFPRTVKHIDAALSEENTGKTYFFVANKYWRYDEYKRSMDPGYPKMIAHDFPGIGHKVDAVFMKDGFFYFFHGTRQYKFDPKTKRILTLQKANSWFNCRKN

SEQ ID NO: 2952 - protein, 450 aa, Artificial Sequence
  MMP-1 variant G225N
FPATLETQEQDVDLVQKYLEKYYNLKNDGRQVEKRRNSGPVVEKLKQMQEFFGLKVTGKPDAETLKVMKQPRCGVPDVAQFVLTEGNPRWEQTHLTYRIENYTPDLPRADVDHAIEKAFQLWSNVTPLTFTKVSEGQADIMISFVRGDHRDNSPFDGPGGNLAHAFQPGPGIGGDAHFDEDERWTNNFREYNLHRVAAHELGHSLGLSHSTDIGALMYPSYTFSNDVQLAQDDIDGIQAIYGRSQNPVQPIGPQTPKACDSKLTFDAITTIRGEVMFFKDRFYMRTNPFYPEVELNFISVFWPQLPNGLEAAYEFADRDEVRFFKGNKYWAVQGQNVLHGYPKDIYSSFGFPRTVKHIDAALSEENTGKTYFFVANKYWRYDEYKRSMDPGYPKMIAHDFPGIGHKVDAVFMKDGFFYFFHGTRQYKFDPKTKRILTLQKANSWFNCRKN

SEQ ID NO: 2953 - protein, 450 aa, Artificial Sequence
  MMP-1 variant G225Q
FPATLETQEQDVDLVQKYLEKYYNLKNDGRQVEKRRNSGPVVEKLKQMQEFFGLKVTGKPDAETLKVMKQPRCGVPDVAQFVLTEGNPRWEQTHLTYRIENYTPDLPRADVDHAIEKAFQLWSNVTPLTFTKVSEGQADIMISFVRGDHRDNSPFDGPGGNLAHAFQPGPGIGGDAHFDEDERWTNNFREYNLHRVAAHELGHSLGLSHSTDIGALMYPSYTFSQDVQLAQDDIDGIQAIYGRSQNPVQPIGPQTPKACDSKLTFDAITTIRGEVMFFKDRFYMRTNPFYPEVELNFISVFWPQLPNGLEAAYEFADRDEVRFFKGNKYWAVQGQNVLHGYPKDIYSSFGFPRTVKHIDAALSEENTGKTYFFVANKYWRYDEYKRSMDPGYPKMIAHDFPGIGHKVDAVFMKDGFFYFFHGTRQYKFDPKTKRILTLQKANSWFNCRKN

SEQ ID NO: 2954 - protein, 450 aa, Artificial Sequence
  MMP-1 variant G225T
FPATLETQEQDVDLVQKYLEKYYNLKNDGRQVEKRRNSGPVVEKLKQMQEFFGLKVTGKPDAETLKVMKQPRCGVPDVAQFVLTEGNPRWEQTHLTYRIENYTPDLPRADVDHAIEKAFQLWSNVTPLTFTKVSEGQADIMISFVRGDHRDNSPFDGPGGNLAHAFQPGPGIGGDAHFDEDERWTNNFREYNLHRVAAHELGHSLGLSHSTDIGALMYPSYTFSTDVQLAQDDIDGIQAIYGRSQNPVQPIGPQTPKACDSKLTFDAITTIRGEVMFFKDRFYMRTNPFYPEVELNFISVFWPQLPNGLEAAYEFADRDEVRFFKGNKYWAVQGQNVLHGYPKDIYSSFGFPRTVKHIDAALSEENTGKTYFFVANKYWRYDEYKRSMDPGYPKMIAHDFPGIGHKVDAVFMKDGFFYFFHGTRQYKFDPKTKRILTLQKANSWFNCRKN

SEQ ID NO: 2955 - protein, 450 aa, Artificial Sequence
  MMP-1 variant G225Y
FPATLETQEQDVDLVQKYLEKYYNLKNDGRQVEKRRNSGPVVEKLKQMQEFFGLKVTGKPDAETLKVMKQPRCGVPDVAQFVLTEGNPRWEQTHLTYRIENYTPDLPRADVDHAIEKAFQLWSNVTPLTFTKVSEGQADIMISFVRGDHRDNSPFDGPGGNLAHAFQPGPGIGGDAHFDEDERWTNNFREYNLHRVAAHELGHSLGLSHSTDIGALMYPSYTFSYDVQLAQDDIDGIQAIYGRSQNPVQPIGPQTPKACDSKLTFDAITTIRGEVMFFKDRFYMRTNPFYPEVELNFISVFWPQLPNGLEAAYEFADRDEVRFFKGNKYWAVQGQNVLHGYPKDIYSSFGFPRTVKHIDAALSEENTGKTYFFVANKYWRYDEYKRSMDPGYPKMIAHDFPGIGHKVDAVFMKDGFFYFFHGTRQYKFDPKTKRILTLQKANSWFNCRKN

SEQ ID NO: 2956 - protein, 450 aa, Artificial Sequence
  MMP-1 variant G225S
FPATLETQEQDVDLVQKYLEKYYNLKNDGRQVEKRRNSGPVVEKLKQMQEFFGLKVTGKPDAETLKVMKQPRCGVPDVAQFVLTEGNPRWEQTHLTYRIENYTPDLPRADVDHAIEKAFQLWSNVTPLTFTKVSEGQADIMISFVRGDHRDNSPFDGPGGNLAHAFQPGPGIGGDAHFDEDERWTNNFREYNLHRVAAHELGHSLGLSHSTDIGALMYPSYTFSSDVQLAQDDIDGIQAIYGRSQNPVQPIGPQTPKACDSKLTFDAITTIRGEVMFFKDRFYMRTNPFYPEVELNFISVFWPQLPNGLEAAYEFADRDEVRFFKGNKYWAVQGQNVLHGYPKDIYSSFGFPRTVKHIDAALSEENTGKTYFFVANKYWRYDEYKRSMDPGYPKMIAHDFPGIGHKVDAVFMKDGFFYFFHGTRQYKFDPKTKRILTLQKANSWFNCRKN

SEQ ID NO: 2957 - protein, 450 aa, Artificial Sequence
  MMP-1 variant G225F
FPATLETQEQDVDLVQKYLEKYYNLKNDGRQVEKRRNSGPVVEKLKQMQEFFGLKVTGKPDAETLKVMKQPRCGVPDVAQFVLTEGNPRWEQTHLTYRIENYTPDLPRADVDHAIEKAFQLWSNVTPLTFTKVSEGQADIMISFVRGDHRDNSPFDGPGGNLAHAFQPGPGIGGDAHFDEDERWTNNFREYNLHRVAAHELGHSLGLSHSTDIGALMYPSYTFSFDVQLAQDDIDGIQAIYGRSQNPVQPIGPQTPKACDSKLTFDAITTIRGEVMFFKDRFYMRTNPFYPEVELNFISVFWPQLPNGLEAAYEFADRDEVRFFKGNKYWAVQGQNVLHGYPKDIYSSFGFPRTVKHIDAALSEENTGKTYFFVANKYWRYDEYKRSMDPGYPKMIAHDFPGIGHKVDAVFMKDGFFYFFHGTRQYKFDPKTKRILTLQKANSWFNCRKN

SEQ ID NO: 2958 - protein, 450 aa, Artificial Sequence
  MMP-1 variant G225M
FPATLETQEQDVDLVQKYLEKYYNLKNDGRQVEKRRNSGPVVEKLKQMQEFFGLKVTGKPDAETLKVMKQPRCGVPDVAQFVLTEGNPRWEQTHLTYRIENYTPDLPRADVDHAIEKAFQLWSNVTPLTFTKVSEGQADIMISFVRGDHRDNSPFDGPGGNLAHAFQPGPGIGGDAHFDEDERWTNNFREYNLHRVAAHELGHSLGLSHSTDIGALMYPSYTFSMDVQLAQDDIDGIQAIYGRSQNPVQPIGPQTPKACDSKLTFDAITTIRGEVMFFKDRFYMRTNPFYPEVELNFISVFWPQLPNGLEAAYEFADRDEVRFFKGNKYWAVQGQNVLHGYPKDIYSSFGFPRTVKHIDAALSEENTGKTYFFVANKYWRYDEYKRSMDPGYPKMIAHDFPGIGHKVDAVFMKDGFFYFFHGTRQYKFDPKTKRILTLQKANSWFNCRKN

SEQ ID NO: 2959 - protein, 450 aa, Artificial Sequence
  MMP-1 variant G225W
FPATLETQEQDVDLVQKYLEKYYNLKNDGRQVEKRRNSGPVVEKLKQMQEFFGLKVTGKPDAETLKVMKQPRCGVPDVAQFVLTEGNPRWEQTHLTYRIENYTPDLPRADVDHAIEKAFQLWSNVTPLTFTKVSEGQADIMISFVRGDHRDNSPFDGPGGNLAHAFQPGPGIGGDAHFDEDERWTNNFREYNLHRVAAHELGHSLGLSHSTDIGALMYPSYTFSWDVQLAQDDIDGIQAIYGRSQNPVQPIGPQTPKACDSKLTFDAITTIRGEVMFFKDRFYMRTNPFYPEVELNFISVFWPQLPNGLEAAYEFADRDEVRFFKGNKYWAVQGQNVLHGYPKDIYSSFGFPRTVKHIDAALSEENTGKTYFFVANKYWRYDEYKRSMDPGYPKMIAHDFPGIGHKVDAVFMKDGFFYFFHGTRQYKFDPKTKRILTLQKANSWFNCRKN

SEQ ID NO: 2960 - protein, 450 aa, Artificial Sequence
  MMP-1 variant G225I
FPATLETQEQDVDLVQKYLEKYYNLKNDGRQVEKRRNSGPVVEKLKQMQEFFGLKVTGKPDAETLKVMKQPRCGVPDVAQFVLTEGNPRWEQTHLTYRIENYTPDLPRADVDHAIEKAFQLWSNVTPLTFTKVSEGQADIMISFVRGDHRDNSPFDGPGGNLAHAFQPGPGIGGDAHFDEDERWTNNFREYNLHRVAAHELGHSLGLSHSTDIGALMYPSYTFSIDVQLAQDDIDGIQAIYGRSQNPVQPIGPQTPKACDSKLTFDAITTIRGEVMFFKDRFYMRTNPFYPEVELNFISVFWPQLPNGLEAAYEFADRDEVRFFKGNKYWAVQGQNVLHGYPKDIYSSFGFPRTVKHIDAALSEENTGKTYFFVANKYWRYDEYKRSMDPGYPKMIAHDFPGIGHKVDAVFMKDGFFYFFHGTRQYKFDPKTKRILTLQKANSWFNCRKN

SEQ ID NO: 2961 - protein, 450 aa, Artificial Sequence
  MMP-1 variant G225V
FPATLETQEQDVDLVQKYLEKYYNLKNDGRQVEKRRNSGPVVEKLKQMQEFFGLKVTGKPDAETLKVMKQPRCGVPDVAQFVLTEGNPRWEQTHLTYRIENYTPDLPRADVDHAIEKAFQLWSNVTPLTFTKVSEGQADIMISFVRGDHRDNSPFDGPGGNLAHAFQPGPGIGGDAHFDEDERWTNNFREYNLHRVAAHELGHSLGLSHSTDIGALMYPSYTFSVDVQLAQDDIDGIQAIYGRSQNPVQPIGPQTPKACDSKLTFDAITTIRGEVMFFKDRFYMRTNPFYPEVELNFISVFWPQLPNGLEAAYEFADRDEVRFFKGNKYWAVQGQNVLHGYPKDIYSSFGFPRTVKHIDAALSEENTGKTYFFVANKYWRYDEYKRSMDPGYPKMIAHDFPGIGHKVDAVFMKDGFFYFFHGTRQYKFDPKTKRILTLQKANSWFNCRKN

SEQ ID NO: 2962 - protein, 450 aa, Artificial Sequence
  MMP-1 variant G225L
FPATLETQEQDVDLVQKYLEKYYNLKNDGRQVEKRRNSGPVVEKLKQMQEFFGLKVTGKPDAETLKVMKQPRCGVPDVAQFVLTEGNPRWEQTHLTYRIENYTPDLPRADVDHAIEKAFQLWSNVTPLTFTKVSEGQADIMISFVRGDHRDNSPFDGPGGNLAHAFQPGPGIGGDAHFDEDERWTNNFREYNLHRVAAHELGHSLGLSHSTDIGALMYPSYTFSLDVQLAQDDIDGIQAIYGRSQNPVQPIGPQTPKACDSKLTFDAITTIRGEVMFFKDRFYMRTNPFYPEVELNFISVFWPQLPNGLEAAYEFADRDEVRFFKGNKYWAVQGQNVLHGYPKDIYSSFGFPRTVKHIDAALSEENTGKTYFFVANKYWRYDEYKRSMDPGYPKMIAHDFPGIGHKVDAVFMKDGFFYFFHGTRQYKFDPKTKRILTLQKANSWFNCRKN

SEQ ID NO: 2963 - protein, 450 aa, Artificial Sequence
  MMP-1 variant G225A
FPATLETQEQDVDLVQKYLEKYYNLKNDGRQVEKRRNSGPVVEKLKQMQEFFGLKVTGKPDAETLKVMKQPRCGVPDVAQFVLTEGNPRWEQTHLTYRIENYTPDLPRADVDHAIEKAFQLWSNVTPLTFTKVSEGQADIMISFVRGDHRDNSPFDGPGGNLAHAFQPGPGIGGDAHFDEDERWTNNFREYNLHRVAAHELGHSLGLSHSTDIGALMYPSYTFSADVQLAQDDIDGIQAIYGRSQNPVQPIGPQTPKACDSKLTFDAITTIRGEVMFFKDRFYMRTNPFYPEVELNFISVFWPQLPNGLEAAYEFADRDEVRFFKGNKYWAVQGQNVLHGYPKDIYSSFGFPRTVKHIDAALSEENTGKTYFFVANKYWRYDEYKRSMDPGYPKMIAHDFPGIGHKVDAVFMKDGFFYFFHGTRQYKFDPKTKRILTLQKANSWFNCRKN

SEQ ID NO: 2964 - protein, 450 aa, Artificial Sequence
  MMP-1 variant G225P
FPATLETQEQDVDLVQKYLEKYYNLKNDGRQVEKRRNSGPVVEKLKQMQEFFGLKVTGKPDAETLKVMKQPRCGVPDVAQFVLTEGNPRWEQTHLTYRIENYTPDLPRADVDHAIEKAFQLWSNVTPLTFTKVSEGQADIMISFVRGDHRDNSPFDGPGGNLAHAFQPGPGIGGDAHFDEDERWTNNFREYNLHRVAAHELGHSLGLSHSTDIGALMYPSYTFSPDVQLAQDDIDGIQAIYGRSQNPVQPIGPQTPKACDSKLTFDAITTIRGEVMFFKDRFYMRTNPFYPEVELNFISVFWPQLPNGLEAAYEFADRDEVRFFKGNKYWAVQGQNVLHGYPKDIYSSFGFPRTVKHIDAALSEENTGKTYFFVANKYWRYDEYKRSMDPGYPKMIAHDFPGIGHKVDAVFMKDGFFYFFHGTRQYKFDPKTKRILTLQKANSWFNCRKN

SEQ ID NO: 2965 - protein, 450 aa, Artificial Sequence
  MMP-1 variant D226E
FPATLETQEQDVDLVQKYLEKYYNLKNDGRQVEKRRNSGPVVEKLKQMQEFFGLKVTGKPDAETLKVMKQPRCGVPDVAQFVLTEGNPRWEQTHLTYRIENYTPDLPRADVDHAIEKAFQLWSNVTPLTFTKVSEGQADIMISFVRGDHRDNSPFDGPGGNLAHAFQPGPGIGGDAHFDEDERWTNNFREYNLHRVAAHELGHSLGLSHSTDIGALMYPSYTFSGEVQLAQDDIDGIQAIYGRSQNPVQPIGPQTPKACDSKLTFDAITTIRGEVMFFKDRFYMRTNPFYPEVELNFISVFWPQLPNGLEAAYEFADRDEVRFFKGNKYWAVQGQNVLHGYPKDIYSSFGFPRTVKHIDAALSEENTGKTYFFVANKYWRYDEYKRSMDPGYPKMIAHDFPGIGHKVDAVFMKDGFFYFFHGTRQYKFDPKTKRILTLQKANSWFNCRKN

SEQ ID NO: 2966 - protein, 450 aa, Artificial Sequence
  MMP-1 variant D226H
FPATLETQEQDVDLVQKYLEKYYNLKNDGRQVEKRRNSGPVVEKLKQMQEFFGLKVTGKPDAETLKVMKQPRCGVPDVAQFVLTEGNPRWEQTHLTYRIENYTPDLPRADVDHAIEKAFQLWSNVTPLTFTKVSEGQADIMISFVRGDHRDNSPFDGPGGNLAHAFQPGPGIGGDAHFDEDERWTNNFREYNLHRVAAHELGHSLGLSHSTDIGALMYPSYTFSGHVQLAQDDIDGIQAIYGRSQNPVQPIGPQTPKACDSKLTFDAITTIRGEVMFFKDRFYMRTNPFYPEVELNFISVFWPQLPNGLEAAYEFADRDEVRFFKGNKYWAVQGQNVLHGYPKDIYSSFGFPRTVKHIDAALSEENTGKTYFFVANKYWRYDEYKRSMDPGYPKMIAHDFPGIGHKVDAVFMKDGFFYFFHGTRQYKFDPKTKRILTLQKANSWFNCRKN

SEQ ID NO: 2967 - protein, 450 aa, Artificial Sequence
  MMP-1 variant D226K
FPATLETQEQDVDLVQKYLEKYYNLKNDGRQVEKRRNSGPVVEKLKQMQEFFGLKVTGKPDAETLKVMKQPRCGVPDVAQFVLTEGNPRWEQTHLTYRIENYTPDLPRADVDHAIEKAFQLWSNVTPLTFTKVSEGQADIMISFVRGDHRDNSPFDGPGGNLAHAFQPGPGIGGDAHFDEDERWTNNFREYNLHRVAAHELGHSLGLSHSTDIGALMYPSYTFSGKVQLAQDDIDGIQAIYGRSQNPVQPIGPQTPKACDSKLTFDAITTIRGEVMFFKDRFYMRTNPFYPEVELNFISVFWPQLPNGLEAAYEFADRDEVRFFKGNKYWAVQGQNVLHGYPKDIYSSFGFPRTVKHIDAALSEENTGKTYFFVANKYWRYDEYKRSMDPGYPKMIAHDFPGIGHKVDAVFMKDGFFYFFHGTRQYKFDPKTKRILTLQKANSWFNCRKN

SEQ ID NO: 2968 - protein, 450 aa, Artificial Sequence
  MMP-1 variant D226R
FPATLETQEQDVDLVQKYLEKYYNLKNDGRQVEKRRNSGPVVEKLKQMQEFFGLKVTGKPDAETLKVMKQPRCGVPDVAQFVLTEGNPRWEQTHLTYRIENYTPDLPRADVDHAIEKAFQLWSNVTPLTFTKVSEGQADIMISFVRGDHRDNSPFDGPGGNLAHAFQPGPGIGGDAHFDEDERWTNNFREYNLHRVAAHELGHSLGLSHSTDIGALMYPSYTFSGRVQLAQDDIDGIQAIYGRSQNPVQPIGPQTPKACDSKLTFDAITTIRGEVMFFKDRFYMRTNPFYPEVELNFISVFWPQLPNGLEAAYEFADRDEVRFFKGNKYWAVQGQNVLHGYPKDIYSSFGFPRTVKHIDAALSEENTGKTYFFVANKYWRYDEYKRSMDPGYPKMIAHDFPGIGHKVDAVFMKDGFFYFFHGTRQYKFDPKTKRILTLQKANSWFNCRKN

SEQ ID NO: 2969 - protein, 450 aa, Artificial Sequence
  MMP-1 variant D226C
FPATLETQEQDVDLVQKYLEKYYNLKNDGRQVEKRRNSGPVVEKLKQMQEFFGLKVTGKPDAETLKVMKQPRCGVPDVAQFVLTEGNPRWEQTHLTYRIENYTPDLPRADVDHAIEKAFQLWSNVTPLTFTKVSEGQADIMISFVRGDHRDNSPFDGPGGNLAHAFQPGPGIGGDAHFDEDERWTNNFREYNLHRVAAHELGHSLGLSHSTDIGALMYPSYTFSGCVQLAQDDIDGIQAIYGRSQNPVQPIGPQTPKACDSKLTFDAITTIRGEVMFFKDRFYMRTNPFYPEVELNFISVFWPQLPNGLEAAYEFADRDEVRFFKGNKYWAVQGQNVLHGYPKDIYSSFGFPRTVKHIDAALSEENTGKTYFFVANKYWRYDEYKRSMDPGYPKMIAHDFPGIGHKVDAVFMKDGFFYFFHGTRQYKFDPKTKRILTLQKANSWFNCRKN

SEQ ID NO: 2970 - protein, 450 aa, Artificial Sequence
  MMP-1 variant D226N
FPATLETQEQDVDLVQKYLEKYYNLKNDGRQVEKRRNSGPVVEKLKQMQEFFGLKVTGKPDAETLKVMKQPRCGVPDVAQFVLTEGNPRWEQTHLTYRIENYTPDLPRADVDHAIEKAFQLWSNVTPLTFTKVSEGQADIMISFVRGDHRDNSPFDGPGGNLAHAFQPGPGIGGDAHFDEDERWTNNFREYNLHRVAAHELGHSLGLSHSTDIGALMYPSYTFSGNVQLAQDDIDGIQAIYGRSQNPVQPIGPQTPKACDSKLTFDAITTIRGEVMFFKDRFYMRTNPFYPEVELNFISVFWPQLPNGLEAAYEFADRDEVRFFKGNKYWAVQGQNVLHGYPKDIYSSFGFPRTVKHIDAALSEENTGKTYFFVANKYWRYDEYKRSMDPGYPKMIAHDFPGIGHKVDAVFMKDGFFYFFHGTRQYKFDPKTKRILTLQKANSWFNCRKN

SEQ ID NO: 2971 - protein, 450 aa, Artificial Sequence
  MMP-1 variant D226Q
FPATLETQEQDVDLVQKYLEKYYNLKNDGRQVEKRRNSGPVVEKLKQMQEFFGLKVTGKPDAETLKVMKQPRCGVPDVAQFVLTEGNPRWEQTHLTYRIENYTPDLPRADVDHAIEKAFQLWSNVTPLTFTKVSEGQADIMISFVRGDHRDNSPFDGPGGNLAHAFQPGPGIGGDAHFDEDERWTNNFREYNLHRVAAHELGHSLGLSHSTDIGALMYPSYTFSGQVQLAQDDIDGIQAIYGRSQNPVQPIGPQTPKACDSKLTFDAITTIRGEVMFFKDRFYMRTNPFYPEVELNFISVFWPQLPNGLEAAYEFADRDEVRFFKGNKYWAVQGQNVLHGYPKDIYSSFGFPRTVKHIDAALSEENTGKTYFFVANKYWRYDEYKRSMDPGYPKMIAHDFPGIGHKVDAVFMKDGFFYFFHGTRQYKFDPKTKRILTLQKANSWFNCRKN

SEQ ID NO: 2972 - protein, 450 aa, Artificial Sequence
  MMP-1 variant D226T
FPATLETQEQDVDLVQKYLEKYYNLKNDGRQVEKRRNSGPVVEKLKQMQEFFGLKVTGKPDAETLKVMKQPRCGVPDVAQFVLTEGNPRWEQTHLTYRIENYTPDLPRADVDHAIEKAFQLWSNVTPLTFTKVSEGQADIMISFVRGDHRDNSPFDGPGGNLAHAFQPGPGIGGDAHFDEDERWTNNFREYNLHRVAAHELGHSLGLSHSTDIGALMYPSYTFSGTVQLAQDDIDGIQAIYGRSQNPVQPIGPQTPKACDSKLTFDAITTIRGEVMFFKDRFYMRTNPFYPEVELNFISVFWPQLPNGLEAAYEFADRDEVRFFKGNKYWAVQGQNVLHGYPKDIYSSFGFPRTVKHIDAALSEENTGKTYFFVANKYWRYDEYKRSMDPGYPKMIAHDFPGIGHKVDAVFMKDGFFYFFHGTRQYKFDPKTKRILTLQKANSWFNCRKN

SEQ ID NO: 2973 - protein, 450 aa, Artificial Sequence
  MMP-1 variant D226Y
FPATLETQEQDVDLVQKYLEKYYNLKNDGRQVEKRRNSGPVVEKLKQMQEFFGLKVTGKPDAETLKVMKQPRCGVPDVAQFVLTEGNPRWEQTHLTYRIENYTPDLPRADVDHAIEKAFQLWSNVTPLTFTKVSEGQADIMISFVRGDHRDNSPFDGPGGNLAHAFQPGPGIGGDAHFDEDERWTNNFREYNLHRVAAHELGHSLGLSHSTDIGALMYPSYTFSGYVQLAQDDIDGIQAIYGRSQNPVQPIGPQTPKACDSKLTFDAITTIRGEVMFFKDRFYMRTNPFYPEVELNFISVFWPQLPNGLEAAYEFADRDEVRFFKGNKYWAVQGQNVLHGYPKDIYSSFGFPRTVKHIDAALSEENTGKTYFFVANKYWRYDEYKRSMDPGYPKMIAHDFPGIGHKVDAVFMKDGFFYFFHGTRQYKFDPKTKRILTLQKANSWFNCRKN

SEQ ID NO: 2974 - protein, 450 aa, Artificial Sequence
  MMP-1 variant D226S
FPATLETQEQDVDLVQKYLEKYYNLKNDGRQVEKRRNSGPVVEKLKQMQEFFGLKVTGKPDAETLKVMKQPRCGVPDVAQFVLTEGNPRWEQTHLTYRIENYTPDLPRADVDHAIEKAFQLWSNVTPLTFTKVSEGQADIMISFVRGDHRDNSPFDGPGGNLAHAFQPGPGIGGDAHFDEDERWTNNFREYNLHRVAAHELGHSLGLSHSTDIGALMYPSYTFSGSVQLAQDDIDGIQAIYGRSQNPVQPIGPQTPKACDSKLTFDAITTIRGEVMFFKDRFYMRTNPFYPEVELNFISVFWPQLPNGLEAAYEFADRDEVRFFKGNKYWAVQGQNVLHGYPKDIYSSFGFPRTVKHIDAALSEENTGKTYFFVANKYWRYDEYKRSMDPGYPKMIAHDFPGIGHKVDAVFMKDGFFYFFHGTRQYKFDPKTKRILTLQKANSWFNCRKN

SEQ ID NO: 2975 - protein, 450 aa, Artificial Sequence
  MMP-1 variant D226G
FPATLETQEQDVDLVQKYLEKYYNLKNDGRQVEKRRNSGPVVEKLKQMQEFFGLKVTGKPDAETLKVMKQPRCGVPDVAQFVLTEGNPRWEQTHLTYRIENYTPDLPRADVDHAIEKAFQLWSNVTPLTFTKVSEGQADIMISFVRGDHRDNSPFDGPGGNLAHAFQPGPGIGGDAHFDEDERWTNNFREYNLHRVAAHELGHSLGLSHSTDIGALMYPSYTFSGGVQLAQDDIDGIQAIYGRSQNPVQPIGPQTPKACDSKLTFDAITTIRGEVMFFKDRFYMRTNPFYPEVELNFISVFWPQLPNGLEAAYEFADRDEVRFFKGNKYWAVQGQNVLHGYPKDIYSSFGFPRTVKHIDAALSEENTGKTYFFVANKYWRYDEYKRSMDPGYPKMIAHDFPGIGHKVDAVFMKDGFFYFFHGTRQYKFDPKTKRILTLQKANSWFNCRKN

SEQ ID NO: 2976 - protein, 450 aa, Artificial Sequence
  MMP-1 variant D226F
FPATLETQEQDVDLVQKYLEKYYNLKNDGRQVEKRRNSGPVVEKLKQMQEFFGLKVTGKPDAETLKVMKQPRCGVPDVAQFVLTEGNPRWEQTHLTYRIENYTPDLPRADVDHAIEKAFQLWSNVTPLTFTKVSEGQADIMISFVRGDHRDNSPFDGPGGNLAHAFQPGPGIGGDAHFDEDERWTNNFREYNLHRVAAHELGHSLGLSHSTDIGALMYPSYTFSGFVQLAQDDIDGIQAIYGRSQNPVQPIGPQTPKACDSKLTFDAITTIRGEVMFFKDRFYMRTNPFYPEVELNFISVFWPQLPNGLEAAYEFADRDEVRFFKGNKYWAVQGQNVLHGYPKDIYSSFGFPRTVKHIDAALSEENTGKTYFFVANKYWRYDEYKRSMDPGYPKMIAHDFPGIGHKVDAVFMKDGFFYFFHGTRQYKFDPKTKRILTLQKANSWFNCRKN

SEQ ID NO: 2977 - protein, 450 aa, Artificial Sequence
  MMP-1 variant D226M
FPATLETQEQDVDLVQKYLEKYYNLKNDGRQVEKRRNSGPVVEKLKQMQEFFGLKVTGKPDAETLKVMKQPRCGVPDVAQFVLTEGNPRWEQTHLTYRIENYTPDLPRADVDHAIEKAFQLWSNVTPLTFTKVSEGQADIMISFVRGDHRDNSPFDGPGGNLAHAFQPGPGIGGDAHFDEDERWTNNFREYNLHRVAAHELGHSLGLSHSTDIGALMYPSYTFSGMVQLAQDDIDGIQAIYGRSQNPVQPIGPQTPKACDSKLTFDAITTIRGEVMFFKDRFYMRTNPFYPEVELNFISVFWPQLPNGLEAAYEFADRDEVRFFKGNKYWAVQGQNVLHGYPKDIYSSFGFPRTVKHIDAALSEENTGKTYFFVANKYWRYDEYKRSMDPGYPKMIAHDFPGIGHKVDAVFMKDGFFYFFHGTRQYKFDPKTKRILTLQKANSWFNCRKN

SEQ ID NO: 2978 - protein, 450 aa, Artificial Sequence
  MMP-1 variant D226W
FPATLETQEQDVDLVQKYLEKYYNLKNDGRQVEKRRNSGPVVEKLKQMQEFFGLKVTGKPDAETLKVMKQPRCGVPDVAQFVLTEGNPRWEQTHLTYRIENYTPDLPRADVDHAIEKAFQLWSNVTPLTFTKVSEGQADIMISFVRGDHRDNSPFDGPGGNLAHAFQPGPGIGGDAHFDEDERWTNNFREYNLHRVAAHELGHSLGLSHSTDIGALMYPSYTFSGWVQLAQDDIDGIQAIYGRSQNPVQPIGPQTPKACDSKLTFDAITTIRGEVMFFKDRFYMRTNPFYPEVELNFISVFWPQLPNGLEAAYEFADRDEVRFFKGNKYWAVQGQNVLHGYPKDIYSSFGFPRTVKHIDAALSEENTGKTYFFVANKYWRYDEYKRSMDPGYPKMIAHDFPGIGHKVDAVFMKDGFFYFFHGTRQYKFDPKTKRILTLQKANSWFNCRKN

SEQ ID NO: 2979 - protein, 450 aa, Artificial Sequence
  MMP-1 variant D226I
FPATLETQEQDVDLVQKYLEKYYNLKNDGRQVEKRRNSGPVVEKLKQMQEFFGLKVTGKPDAETLKVMKQPRCGVPDVAQFVLTEGNPRWEQTHLTYRIENYTPDLPRADVDHAIEKAFQLWSNVTPLTFTKVSEGQADIMISFVRGDHRDNSPFDGPGGNLAHAFQPGPGIGGDAHFDEDERWTNNFREYNLHRVAAHELGHSLGLSHSTDIGALMYPSYTFSGIVQLAQDDIDGIQAIYGRSQNPVQPIGPQTPKACDSKLTFDAITTIRGEVMFFKDRFYMRTNPFYPEVELNFISVFWPQLPNGLEAAYEFADRDEVRFFKGNKYWAVQGQNVLHGYPKDIYSSFGFPRTVKHIDAALSEENTGKTYFFVANKYWRYDEYKRSMDPGYPKMIAHDFPGIGHKVDAVFMKDGFFYFFHGTRQYKFDPKTKRILTLQKANSWFNCRKN

SEQ ID NO: 2980 - protein, 450 aa, Artificial Sequence
  MMP-1 variant D226V
FPATLETQEQDVDLVQKYLEKYYNLKNDGRQVEKRRNSGPVVEKLKQMQEFFGLKVTGKPDAETLKVMKQPRCGVPDVAQFVLTEGNPRWEQTHLTYRIENYTPDLPRADVDHAIEKAFQLWSNVTPLTFTKVSEGQADIMISFVRGDHRDNSPFDGPGGNLAHAFQPGPGIGGDAHFDEDERWTNNFREYNLHRVAAHELGHSLGLSHSTDIGALMYPSYTFSGVVQLAQDDIDGIQAIYGRSQNPVQPIGPQTPKACDSKLTFDAITTIRGEVMFFKDRFYMRTNPFYPEVELNFISVFWPQLPNGLEAAYEFADRDEVRFFKGNKYWAVQGQNVLHGYPKDIYSSFGFPRTVKHIDAALSEENTGKTYFFVANKYWRYDEYKRSMDPGYPKMIAHDFPGIGHKVDAVFMKDGFFYFFHGTRQYKFDPKTKRILTLQKANSWFNCRKN

SEQ ID NO: 2981 - protein, 450 aa, Artificial Sequence
  MMP-1 variant D226L
FPATLETQEQDVDLVQKYLEKYYNLKNDGRQVEKRRNSGPVVEKLKQMQEFFGLKVTGKPDAETLKVMKQPRCGVPDVAQFVLTEGNPRWEQTHLTYRIENYTPDLPRADVDHAIEKAFQLWSNVTPLTFTKVSEGQADIMISFVRGDHRDNSPFDGPGGNLAHAFQPGPGIGGDAHFDEDERWTNNFREYNLHRVAAHELGHSLGLSHSTDIGALMYPSYTFSGLVQLAQDDIDGIQAIYGRSQNPVQPIGPQTPKACDSKLTFDAITTIRGEVMFFKDRFYMRTNPFYPEVELNFISVFWPQLPNGLEAAYEFADRDEVRFFKGNKYWAVQGQNVLHGYPKDIYSSFGFPRTVKHIDAALSEENTGKTYFFVANKYWRYDEYKRSMDPGYPKMIAHDFPGIGHKVDAVFMKDGFFYFFHGTRQYKFDPKTKRILTLQKANSWFNCRKN

SEQ ID NO: 2982 - protein, 450 aa, Artificial Sequence
  MMP-1 variant D226A
FPATLETQEQDVDLVQKYLEKYYNLKNDGRQVEKRRNSGPVVEKLKQMQEFFGLKVTGKPDAETLKVMKQPRCGVPDVAQFVLTEGNPRWEQTHLTYRIENYTPDLPRADVDHAIEKAFQLWSNVTPLTFTKVSEGQADIMISFVRGDHRDNSPFDGPGGNLAHAFQPGPGIGGDAHFDEDERWTNNFREYNLHRVAAHELGHSLGLSHSTDIGALMYPSYTFSGAVQLAQDDIDGIQAIYGRSQNPVQPIGPQTPKACDSKLTFDAITTIRGEVMFFKDRFYMRTNPFYPEVELNFISVFWPQLPNGLEAAYEFADRDEVRFFKGNKYWAVQGQNVLHGYPKDIYSSFGFPRTVKHIDAALSEENTGKTYFFVANKYWRYDEYKRSMDPGYPKMIAHDFPGIGHKVDAVFMKDGFFYFFHGTRQYKFDPKTKRILTLQKANSWFNCRKN

SEQ ID NO: 2983 - protein, 450 aa, Artificial Sequence
  MMP-1 variant D226P
FPATLETQEQDVDLVQKYLEKYYNLKNDGRQVEKRRNSGPVVEKLKQMQEFFGLKVTGKPDAETLKVMKQPRCGVPDVAQFVLTEGNPRWEQTHLTYRIENYTPDLPRADVDHAIEKAFQLWSNVTPLTFTKVSEGQADIMISFVRGDHRDNSPFDGPGGNLAHAFQPGPGIGGDAHFDEDERWTNNFREYNLHRVAAHELGHSLGLSHSTDIGALMYPSYTFSGPVQLAQDDIDGIQAIYGRSQNPVQPIGPQTPKACDSKLTFDAITTIRGEVMFFKDRFYMRTNPFYPEVELNFISVFWPQLPNGLEAAYEFADRDEVRFFKGNKYWAVQGQNVLHGYPKDIYSSFGFPRTVKHIDAALSEENTGKTYFFVANKYWRYDEYKRSMDPGYPKMIAHDFPGIGHKVDAVFMKDGFFYFFHGTRQYKFDPKTKRILTLQKANSWFNCRKN

SEQ ID NO: 2984 - protein, 450 aa, Artificial Sequence
  MMP-1 variant Q231D
FPATLETQEQDVDLVQKYLEKYYNLKNDGRQVEKRRNSGPVVEKLKQMQEFFGLKVTGKPDAETLKVMKQPRCGVPDVAQFVLTEGNPRWEQTHLTYRIENYTPDLPRADVDHAIEKAFQLWSNVTPLTFTKVSEGQADIMISFVRGDHRDNSPFDGPGGNLAHAFQPGPGIGGDAHFDEDERWTNNFREYNLHRVAAHELGHSLGLSHSTDIGALMYPSYTFSGDVQLADDDIDGIQAIYGRSQNPVQPIGPQTPKACDSKLTFDAITTIRGEVMFFKDRFYMRTNPFYPEVELNFISVFWPQLPNGLEAAYEFADRDEVRFFKGNKYWAVQGQNVLHGYPKDIYSSFGFPRTVKHIDAALSEENTGKTYFFVANKYWRYDEYKRSMDPGYPKMIAHDFPGIGHKVDAVFMKDGFFYFFHGTRQYKFDPKTKRILTLQKANSWFNCRKN

SEQ ID NO: 2985 - protein, 450 aa, Artificial Sequence
  MMP-1 variant Q231E
FPATLETQEQDVDLVQKYLEKYYNLKNDGRQVEKRRNSGPVVEKLKQMQEFFGLKVTGKPDAETLKVMKQPRCGVPDVAQFVLTEGNPRWEQTHLTYRIENYTPDLPRADVDHAIEKAFQLWSNVTPLTFTKVSEGQADIMISFVRGDHRDNSPFDGPGGNLAHAFQPGPGIGGDAHFDEDERWTNNFREYNLHRVAAHELGHSLGLSHSTDIGALMYPSYTFSGDVQLAEDDIDGIQAIYGRSQNPVQPIGPQTPKACDSKLTFDAITTIRGEVMFFKDRFYMRTNPFYPEVELNFISVFWPQLPNGLEAAYEFADRDEVRFFKGNKYWAVQGQNVLHGYPKDIYSSFGFPRTVKHIDAALSEENTGKTYFFVANKYWRYDEYKRSMDPGYPKMIAHDFPGIGHKVDAVFMKDGFFYFFHGTRQYKFDPKTKRILTLQKANSWFNCRKN

SEQ ID NO: 2986 - protein, 450 aa, Artificial Sequence
  MMP-1 variant Q231H
FPATLETQEQDVDLVQKYLEKYYNLKNDGRQVEKRRNSGPVVEKLKQMQEFFGLKVTGKPDAETLKVMKQPRCGVPDVAQFVLTEGNPRWEQTHLTYRIENYTPDLPRADVDHAIEKAFQLWSNVTPLTFTKVSEGQADIMISFVRGDHRDNSPFDGPGGNLAHAFQPGPGIGGDAHFDEDERWTNNFREYNLHRVAAHELGHSLGLSHSTDIGALMYPSYTFSGDVQLAHDDIDGIQAIYGRSQNPVQPIGPQTPKACDSKLTFDAITTIRGEVMFFKDRFYMRTNPFYPEVELNFISVFWPQLPNGLEAAYEFADRDEVRFFKGNKYWAVQGQNVLHGYPKDIYSSFGFPRTVKHIDAALSEENTGKTYFFVANKYWRYDEYKRSMDPGYPKMIAHDFPGIGHKVDAVFMKDGFFYFFHGTRQYKFDPKTKRILTLQKANSWFNCRKN

SEQ ID NO: 2987 - protein, 450 aa, Artificial Sequence
  MMP-1 variant Q231K
FPATLETQEQDVDLVQKYLEKYYNLKNDGRQVEKRRNSGPVVEKLKQMQEFFGLKVTGKPDAETLKVMKQPRCGVPDVAQFVLTEGNPRWEQTHLTYRIENYTPDLPRADVDHAIEKAFQLWSNVTPLTFTKVSEGQADIMISFVRGDHRDNSPFDGPGGNLAHAFQPGPGIGGDAHFDEDERWTNNFREYNLHRVAAHELGHSLGLSHSTDIGALMYPSYTFSGDVQLAKDDIDGIQAIYGRSQNPVQPIGPQTPKACDSKLTFDAITTIRGEVMFFKDRFYMRTNPFYPEVELNFISVFWPQLPNGLEAAYEFADRDEVRFFKGNKYWAVQGQNVLHGYPKDIYSSFGFPRTVKHIDAALSEENTGKTYFFVANKYWRYDEYKRSMDPGYPKMIAHDFPGIGHKVDAVFMKDGFFYFFHGTRQYKFDPKTKRILTLQKANSWFNCRKN

SEQ ID NO: 2988 - protein, 450 aa, Artificial Sequence
  MMP-1 variant Q231R
FPATLETQEQDVDLVQKYLEKYYNLKNDGRQVEKRRNSGPVVEKLKQMQEFFGLKVTGKPDAETLKVMKQPRCGVPDVAQFVLTEGNPRWEQTHLTYRIENYTPDLPRADVDHAIEKAFQLWSNVTPLTFTKVSEGQADIMISFVRGDHRDNSPFDGPGGNLAHAFQPGPGIGGDAHFDEDERWTNNFREYNLHRVAAHELGHSLGLSHSTDIGALMYPSYTFSGDVQLARDDIDGIQAIYGRSQNPVQPIGPQTPKACDSKLTFDAITTIRGEVMFFKDRFYMRTNPFYPEVELNFISVFWPQLPNGLEAAYEFADRDEVRFFKGNKYWAVQGQNVLHGYPKDIYSSFGFPRTVKHIDAALSEENTGKTYFFVANKYWRYDEYKRSMDPGYPKMIAHDFPGIGHKVDAVFMKDGFFYFFHGTRQYKFDPKTKRILTLQKANSWFNCRKN

SEQ ID NO: 2989 - protein, 450 aa, Artificial Sequence
  MMP-1 variant Q231C
FPATLETQEQDVDLVQKYLEKYYNLKNDGRQVEKRRNSGPVVEKLKQMQEFFGLKVTGKPDAETLKVMKQPRCGVPDVAQFVLTEGNPRWEQTHLTYRIENYTPDLPRADVDHAIEKAFQLWSNVTPLTFTKVSEGQADIMISFVRGDHRDNSPFDGPGGNLAHAFQPGPGIGGDAHFDEDERWTNNFREYNLHRVAAHELGHSLGLSHSTDIGALMYPSYTFSGDVQLACDDIDGIQAIYGRSQNPVQPIGPQTPKACDSKLTFDAITTIRGEVMFFKDRFYMRTNPFYPEVELNFISVFWPQLPNGLEAAYEFADRDEVRFFKGNKYWAVQGQNVLHGYPKDIYSSFGFPRTVKHIDAALSEENTGKTYFFVANKYWRYDEYKRSMDPGYPKMIAHDFPGIGHKVDAVFMKDGFFYFFHGTRQYKFDPKTKRILTLQKANSWFNCRKN

SEQ ID NO: 2990 - protein, 450 aa, Artificial Sequence
  MMP-1 variant Q231N
FPATLETQEQDVDLVQKYLEKYYNLKNDGRQVEKRRNSGPVVEKLKQMQEFFGLKVTGKPDAETLKVMKQPRCGVPDVAQFVLTEGNPRWEQTHLTYRIENYTPDLPRADVDHAIEKAFQLWSNVTPLTFTKVSEGQADIMISFVRGDHRDNSPFDGPGGNLAHAFQPGPGIGGDAHFDEDERWTNNFREYNLHRVAAHELGHSLGLSHSTDIGALMYPSYTFSGDVQLANDDIDGIQAIYGRSQNPVQPIGPQTPKACDSKLTFDAITTIRGEVMFFKDRFYMRTNPFYPEVELNFISVFWPQLPNGLEAAYEFADRDEVRFFKGNKYWAVQGQNVLHGYPKDIYSSFGFPRTVKHIDAALSEENTGKTYFFVANKYWRYDEYKRSMDPGYPKMIAHDFPGIGHKVDAVFMKDGFFYFFHGTRQYKFDPKTKRILTLQKANSWFNCRKN

SEQ ID NO: 2991 - protein, 450 aa, Artificial Sequence
  MMP-1 variant Q231T
FPATLETQEQDVDLVQKYLEKYYNLKNDGRQVEKRRNSGPVVEKLKQMQEFFGLKVTGKPDAETLKVMKQPRCGVPDVAQFVLTEGNPRWEQTHLTYRIENYTPDLPRADVDHAIEKAFQLWSNVTPLTFTKVSEGQADIMISFVRGDHRDNSPFDGPGGNLAHAFQPGPGIGGDAHFDEDERWTNNFREYNLHRVAAHELGHSLGLSHSTDIGALMYPSYTFSGDVQLATDDIDGIQAIYGRSQNPVQPIGPQTPKACDSKLTFDAITTIRGEVMFFKDRFYMRTNPFYPEVELNFISVFWPQLPNGLEAAYEFADRDEVRFFKGNKYWAVQGQNVLHGYPKDIYSSFGFPRTVKHIDAALSEENTGKTYFFVANKYWRYDEYKRSMDPGYPKMIAHDFPGIGHKVDAVFMKDGFFYFFHGTRQYKFDPKTKRILTLQKANSWFNCRKN

SEQ ID NO: 2992 - protein, 450 aa, Artificial Sequence
  MMP-1 variant Q231Y
FPATLETQEQDVDLVQKYLEKYYNLKNDGRQVEKRRNSGPVVEKLKQMQEFFGLKVTGKPDAETLKVMKQPRCGVPDVAQFVLTEGNPRWEQTHLTYRIENYTPDLPRADVDHAIEKAFQLWSNVTPLTFTKVSEGQADIMISFVRGDHRDNSPFDGPGGNLAHAFQPGPGIGGDAHFDEDERWTNNFREYNLHRVAAHELGHSLGLSHSTDIGALMYPSYTFSGDVQLAYDDIDGIQAIYGRSQNPVQPIGPQTPKACDSKLTFDAITTIRGEVMFFKDRFYMRTNPFYPEVELNFISVFWPQLPNGLEAAYEFADRDEVRFFKGNKYWAVQGQNVLHGYPKDIYSSFGFPRTVKHIDAALSEENTGKTYFFVANKYWRYDEYKRSMDPGYPKMIAHDFPGIGHKVDAVFMKDGFFYFFHGTRQYKFDPKTKRILTLQKANSWFNCRKN

SEQ ID NO: 2993 - protein, 450 aa, Artificial Sequence
  MMP-1 variant Q231S
FPATLETQEQDVDLVQKYLEKYYNLKNDGRQVEKRRNSGPVVEKLKQMQEFFGLKVTGKPDAETLKVMKQPRCGVPDVAQFVLTEGNPRWEQTHLTYRIENYTPDLPRADVDHAIEKAFQLWSNVTPLTFTKVSEGQADIMISFVRGDHRDNSPFDGPGGNLAHAFQPGPGIGGDAHFDEDERWTNNFREYNLHRVAAHELGHSLGLSHSTDIGALMYPSYTFSGDVQLASDDIDGIQAIYGRSQNPVQPIGPQTPKACDSKLTFDAITTIRGEVMFFKDRFYMRTNPFYPEVELNFISVFWPQLPNGLEAAYEFADRDEVRFFKGNKYWAVQGQNVLHGYPKDIYSSFGFPRTVKHIDAALSEENTGKTYFFVANKYWRYDEYKRSMDPGYPKMIAHDFPGIGHKVDAVFMKDGFFYFFHGTRQYKFDPKTKRILTLQKANSWFNCRKN

SEQ ID NO: 2994 - protein, 450 aa, Artificial Sequence
  MMP-1 variant Q231G
FPATLETQEQDVDLVQKYLEKYYNLKNDGRQVEKRRNSGPVVEKLKQMQEFFGLKVTGKPDAETLKVMKQPRCGVPDVAQFVLTEGNPRWEQTHLTYRIENYTPDLPRADVDHAIEKAFQLWSNVTPLTFTKVSEGQADIMISFVRGDHRDNSPFDGPGGNLAHAFQPGPGIGGDAHFDEDERWTNNFREYNLHRVAAHELGHSLGLSHSTDIGALMYPSYTFSGDVQLAGDDIDGIQAIYGRSQNPVQPIGPQTPKACDSKLTFDAITTIRGEVMFFKDRFYMRTNPFYPEVELNFISVFWPQLPNGLEAAYEFADRDEVRFFKGNKYWAVQGQNVLHGYPKDIYSSFGFPRTVKHIDAALSEENTGKTYFFVANKYWRYDEYKRSMDPGYPKMIAHDFPGIGHKVDAVFMKDGFFYFFHGTRQYKFDPKTKRILTLQKANSWFNCRKN

SEQ ID NO: 2995 - protein, 450 aa, Artificial Sequence
  MMP-1 variant Q231F
FPATLETQEQDVDLVQKYLEKYYNLKNDGRQVEKRRNSGPVVEKLKQMQEFFGLKVTGKPDAETLKVMKQPRCGVPDVAQFVLTEGNPRWEQTHLTYRIENYTPDLPRADVDHAIEKAFQLWSNVTPLTFTKVSEGQADIMISFVRGDHRDNSPFDGPGGNLAHAFQPGPGIGGDAHFDEDERWTNNFREYNLHRVAAHELGHSLGLSHSTDIGALMYPSYTFSGDVQLAFDDIDGIQAIYGRSQNPVQPIGPQTPKACDSKLTFDAITTIRGEVMFFKDRFYMRTNPFYPEVELNFISVFWPQLPNGLEAAYEFADRDEVRFFKGNKYWAVQGQNVLHGYPKDIYSSFGFPRTVKHIDAALSEENTGKTYFFVANKYWRYDEYKRSMDPGYPKMIAHDFPGIGHKVDAVFMKDGFFYFFHGTRQYKFDPKTKRILTLQKANSWFNCRKN

SEQ ID NO: 2996 - protein, 450 aa, Artificial Sequence
  MMP-1 variant Q231M
FPATLETQEQDVDLVQKYLEKYYNLKNDGRQVEKRRNSGPVVEKLKQMQEFFGLKVTGKPDAETLKVMKQPRCGVPDVAQFVLTEGNPRWEQTHLTYRIENYTPDLPRADVDHAIEKAFQLWSNVTPLTFTKVSEGQADIMISFVRGDHRDNSPFDGPGGNLAHAFQPGPGIGGDAHFDEDERWTNNFREYNLHRVAAHELGHSLGLSHSTDIGALMYPSYTFSGDVQLAMDDIDGIQAIYGRSQNPVQPIGPQTPKACDSKLTFDAITTIRGEVMFFKDRFYMRTNPFYPEVELNFISVFWPQLPNGLEAAYEFADRDEVRFFKGNKYWAVQGQNVLHGYPKDIYSSFGFPRTVKHIDAALSEENTGKTYFFVANKYWRYDEYKRSMDPGYPKMIAHDFPGIGHKVDAVFMKDGFFYFFHGTRQYKFDPKTKRILTLQKANSWFNCRKN

SEQ ID NO: 2997 - protein, 450 aa, Artificial Sequence
  MMP-1 variant Q231W
FPATLETQEQDVDLVQKYLEKYYNLKNDGRQVEKRRNSGPVVEKLKQMQEFFGLKVTGKPDAETLKVMKQPRCGVPDVAQFVLTEGNPRWEQTHLTYRIENYTPDLPRADVDHAIEKAFQLWSNVTPLTFTKVSEGQADIMISFVRGDHRDNSPFDGPGGNLAHAFQPGPGIGGDAHFDEDERWTNNFREYNLHRVAAHELGHSLGLSHSTDIGALMYPSYTFSGDVQLAWDDIDGIQAIYGRSQNPVQPIGPQTPKACDSKLTFDAITTIRGEVMFFKDRFYMRTNPFYPEVELNFISVFWPQLPNGLEAAYEFADRDEVRFFKGNKYWAVQGQNVLHGYPKDIYSSFGFPRTVKHIDAALSEENTGKTYFFVANKYWRYDEYKRSMDPGYPKMIAHDFPGIGHKVDAVFMKDGFFYFFHGTRQYKFDPKTKRILTLQKANSWFNCRKN

SEQ ID NO: 2998 - protein, 450 aa, Artificial Sequence
  MMP-1 variant Q231I
FPATLETQEQDVDLVQKYLEKYYNLKNDGRQVEKRRNSGPVVEKLKQMQEFFGLKVTGKPDAETLKVMKQPRCGVPDVAQFVLTEGNPRWEQTHLTYRIENYTPDLPRADVDHAIEKAFQLWSNVTPLTFTKVSEGQADIMISFVRGDHRDNSPFDGPGGNLAHAFQPGPGIGGDAHFDEDERWTNNFREYNLHRVAAHELGHSLGLSHSTDIGALMYPSYTFSGDVQLAIDDIDGIQAIYGRSQNPVQPIGPQTPKACDSKLTFDAITTIRGEVMFFKDRFYMRTNPFYPEVELNFISVFWPQLPNGLEAAYEFADRDEVRFFKGNKYWAVQGQNVLHGYPKDIYSSFGFPRTVKHIDAALSEENTGKTYFFVANKYWRYDEYKRSMDPGYPKMIAHDFPGIGHKVDAVFMKDGFFYFFHGTRQYKFDPKTKRILTLQKANSWFNCRKN

SEQ ID NO: 2999 - protein, 450 aa, Artificial Sequence
  MMP-1 variant Q231V
FPATLETQEQDVDLVQKYLEKYYNLKNDGRQVEKRRNSGPVVEKLKQMQEFFGLKVTGKPDAETLKVMKQPRCGVPDVAQFVLTEGNPRWEQTHLTYRIENYTPDLPRADVDHAIEKAFQLWSNVTPLTFTKVSEGQADIMISFVRGDHRDNSPFDGPGGNLAHAFQPGPGIGGDAHFDEDERWTNNFREYNLHRVAAHELGHSLGLSHSTDIGALMYPSYTFSGDVQLAVDDIDGIQAIYGRSQNPVQPIGPQTPKACDSKLTFDAITTIRGEVMFFKDRFYMRTNPFYPEVELNFISVFWPQLPNGLEAAYEFADRDEVRFFKGNKYWAVQGQNVLHGYPKDIYSSFGFPRTVKHIDAALSEENTGKTYFFVANKYWRYDEYKRSMDPGYPKMIAHDFPGIGHKVDAVFMKDGFFYFFHGTRQYKFDPKTKRILTLQKANSWFNCRKN

SEQ ID NO: 3000 - protein, 450 aa, Artificial Sequence
  MMP-1 variant Q231L
FPATLETQEQDVDLVQKYLEKYYNLKNDGRQVEKRRNSGPVVEKLKQMQEFFGLKVTGKPDAETLKVMKQPRCGVPDVAQFVLTEGNPRWEQTHLTYRIENYTPDLPRADVDHAIEKAFQLWSNVTPLTFTKVSEGQADIMISFVRGDHRDNSPFDGPGGNLAHAFQPGPGIGGDAHFDEDERWTNNFREYNLHRVAAHELGHSLGLSHSTDIGALMYPSYTFSGDVQLALDDIDGIQAIYGRSQNPVQPIGPQTPKACDSKLTFDAITTIRGEVMFFKDRFYMRTNPFYPEVELNFISVFWPQLPNGLEAAYEFADRDEVRFFKGNKYWAVQGQNVLHGYPKDIYSSFGFPRTVKHIDAALSEENTGKTYFFVANKYWRYDEYKRSMDPGYPKMIAHDFPGIGHKVDAVFMKDGFFYFFHGTRQYKFDPKTKRILTLQKANSWFNCRKN

SEQ ID NO: 3001 - protein, 450 aa, Artificial Sequence
  MMP-1 variant Q231A
FPATLETQEQDVDLVQKYLEKYYNLKNDGRQVEKRRNSGPVVEKLKQMQEFFGLKVTGKPDAETLKVMKQPRCGVPDVAQFVLTEGNPRWEQTHLTYRIENYTPDLPRADVDHAIEKAFQLWSNVTPLTFTKVSEGQADIMISFVRGDHRDNSPFDGPGGNLAHAFQPGPGIGGDAHFDEDERWTNNFREYNLHRVAAHELGHSLGLSHSTDIGALMYPSYTFSGDVQLAADDIDGIQAIYGRSQNPVQPIGPQTPKACDSKLTFDAITTIRGEVMFFKDRFYMRTNPFYPEVELNFISVFWPQLPNGLEAAYEFADRDEVRFFKGNKYWAVQGQNVLHGYPKDIYSSFGFPRTVKHIDAALSEENTGKTYFFVANKYWRYDEYKRSMDPGYPKMIAHDFPGIGHKVDAVFMKDGFFYFFHGTRQYKFDPKTKRILTLQKANSWFNCRKN

SEQ ID NO: 3002 - protein, 450 aa, Artificial Sequence
  MMP-1 variant Q231P
FPATLETQEQDVDLVQKYLEKYYNLKNDGRQVEKRRNSGPVVEKLKQMQEFFGLKVTGKPDAETLKVMKQPRCGVPDVAQFVLTEGNPRWEQTHLTYRIENYTPDLPRADVDHAIEKAFQLWSNVTPLTFTKVSEGQADIMISFVRGDHRDNSPFDGPGGNLAHAFQPGPGIGGDAHFDEDERWTNNFREYNLHRVAAHELGHSLGLSHSTDIGALMYPSYTFSGDVQLAPDDIDGIQAIYGRSQNPVQPIGPQTPKACDSKLTFDAITTIRGEVMFFKDRFYMRTNPFYPEVELNFISVFWPQLPNGLEAAYEFADRDEVRFFKGNKYWAVQGQNVLHGYPKDIYSSFGFPRTVKHIDAALSEENTGKTYFFVANKYWRYDEYKRSMDPGYPKMIAHDFPGIGHKVDAVFMKDGFFYFFHGTRQYKFDPKTKRILTLQKANSWFNCRKN

SEQ ID NO: 3003 - protein, 450 aa, Artificial Sequence
  MMP-1 variant D232E
FPATLETQEQDVDLVQKYLEKYYNLKNDGRQVEKRRNSGPVVEKLKQMQEFFGLKVTGKPDAETLKVMKQPRCGVPDVAQFVLTEGNPRWEQTHLTYRIENYTPDLPRADVDHAIEKAFQLWSNVTPLTFTKVSEGQADIMISFVRGDHRDNSPFDGPGGNLAHAFQPGPGIGGDAHFDEDERWTNNFREYNLHRVAAHELGHSLGLSHSTDIGALMYPSYTFSGDVQLAQEDIDGIQAIYGRSQNPVQPIGPQTPKACDSKLTFDAITTIRGEVMFFKDRFYMRTNPFYPEVELNFISVFWPQLPNGLEAAYEFADRDEVRFFKGNKYWAVQGQNVLHGYPKDIYSSFGFPRTVKHIDAALSEENTGKTYFFVANKYWRYDEYKRSMDPGYPKMIAHDFPGIGHKVDAVFMKDGFFYFFHGTRQYKFDPKTKRILTLQKANSWFNCRKN

SEQ ID NO: 3004 - protein, 450 aa, Artificial Sequence
  MMP-1 variant D232H
FPATLETQEQDVDLVQKYLEKYYNLKNDGRQVEKRRNSGPVVEKLKQMQEFFGLKVTGKPDAETLKVMKQPRCGVPDVAQFVLTEGNPRWEQTHLTYRIENYTPDLPRADVDHAIEKAFQLWSNVTPLTFTKVSEGQADIMISFVRGDHRDNSPFDGPGGNLAHAFQPGPGIGGDAHFDEDERWTNNFREYNLHRVAAHELGHSLGLSHSTDIGALMYPSYTFSGDVQLAQHDIDGIQAIYGRSQNPVQPIGPQTPKACDSKLTFDAITTIRGEVMFFKDRFYMRTNPFYPEVELNFISVFWPQLPNGLEAAYEFADRDEVRFFKGNKYWAVQGQNVLHGYPKDIYSSFGFPRTVKHIDAALSEENTGKTYFFVANKYWRYDEYKRSMDPGYPKMIAHDFPGIGHKVDAVFMKDGFFYFFHGTRQYKFDPKTKRILTLQKANSWFNCRKN

SEQ ID NO: 3005 - protein, 450 aa, Artificial Sequence
  MMP-1 variant D232K
FPATLETQEQDVDLVQKYLEKYYNLKNDGRQVEKRRNSGPVVEKLKQMQEFFGLKVTGKPDAETLKVMKQPRCGVPDVAQFVLTEGNPRWEQTHLTYRIENYTPDLPRADVDHAIEKAFQLWSNVTPLTFTKVSEGQADIMISFVRGDHRDNSPFDGPGGNLAHAFQPGPGIGGDAHFDEDERWTNNFREYNLHRVAAHELGHSLGLSHSTDIGALMYPSYTFSGDVQLAQKDIDGIQAIYGRSQNPVQPIGPQTPKACDSKLTFDAITTIRGEVMFFKDRFYMRTNPFYPEVELNFISVFWPQLPNGLEAAYEFADRDEVRFFKGNKYWAVQGQNVLHGYPKDIYSSFGFPRTVKHIDAALSEENTGKTYFFVANKYWRYDEYKRSMDPGYPKMIAHDFPGIGHKVDAVFMKDGFFYFFHGTRQYKFDPKTKRILTLQKANSWFNCRKN

SEQ ID NO: 3006 - protein, 450 aa, Artificial Sequence
  MMP-1 variant D232R
FPATLETQEQDVDLVQKYLEKYYNLKNDGRQVEKRRNSGPVVEKLKQMQEFFGLKVTGKPDAETLKVMKQPRCGVPDVAQFVLTEGNPRWEQTHLTYRIENYTPDLPRADVDHAIEKAFQLWSNVTPLTFTKVSEGQADIMISFVRGDHRDNSPFDGPGGNLAHAFQPGPGIGGDAHFDEDERWTNNFREYNLHRVAAHELGHSLGLSHSTDIGALMYPSYTFSGDVQLAQRDIDGIQAIYGRSQNPVQPIGPQTPKACDSKLTFDAITTIRGEVMFFKDRFYMRTNPFYPEVELNFISVFWPQLPNGLEAAYEFADRDEVRFFKGNKYWAVQGQNVLHGYPKDIYSSFGFPRTVKHIDAALSEENTGKTYFFVANKYWRYDEYKRSMDPGYPKMIAHDFPGIGHKVDAVFMKDGFFYFFHGTRQYKFDPKTKRILTLQKANSWFNCRKN

SEQ ID NO: 3007 - protein, 450 aa, Artificial Sequence
  MMP-1 variant D232C
FPATLETQEQDVDLVQKYLEKYYNLKNDGRQVEKRRNSGPVVEKLKQMQEFFGLKVTGKPDAETLKVMKQPRCGVPDVAQFVLTEGNPRWEQTHLTYRIENYTPDLPRADVDHAIEKAFQLWSNVTPLTFTKVSEGQADIMISFVRGDHRDNSPFDGPGGNLAHAFQPGPGIGGDAHFDEDERWTNNFREYNLHRVAAHELGHSLGLSHSTDIGALMYPSYTFSGDVQLAQCDIDGIQAIYGRSQNPVQPIGPQTPKACDSKLTFDAITTIRGEVMFFKDRFYMRTNPFYPEVELNFISVFWPQLPNGLEAAYEFADRDEVRFFKGNKYWAVQGQNVLHGYPKDIYSSFGFPRTVKHIDAALSEENTGKTYFFVANKYWRYDEYKRSMDPGYPKMIAHDFPGIGHKVDAVFMKDGFFYFFHGTRQYKFDPKTKRILTLQKANSWFNCRKN

SEQ ID NO: 3008 - protein, 450 aa, Artificial Sequence
  MMP-1 variant D232N
FPATLETQEQDVDLVQKYLEKYYNLKNDGRQVEKRRNSGPVVEKLKQMQEFFGLKVTGKPDAETLKVMKQPRCGVPDVAQFVLTEGNPRWEQTHLTYRIENYTPDLPRADVDHAIEKAFQLWSNVTPLTFTKVSEGQADIMISFVRGDHRDNSPFDGPGGNLAHAFQPGPGIGGDAHFDEDERWTNNFREYNLHRVAAHELGHSLGLSHSTDIGALMYPSYTFSGDVQLAQNDIDGIQAIYGRSQNPVQPIGPQTPKACDSKLTFDAITTIRGEVMFFKDRFYMRTNPFYPEVELNFISVFWPQLPNGLEAAYEFADRDEVRFFKGNKYWAVQGQNVLHGYPKDIYSSFGFPRTVKHIDAALSEENTGKTYFFVANKYWRYDEYKRSMDPGYPKMIAHDFPGIGHKVDAVFMKDGFFYFFHGTRQYKFDPKTKRILTLQKANSWFNCRKN

SEQ ID NO: 3009 - protein, 450 aa, Artificial Sequence
  MMP-1 variant D232Q
FPATLETQEQDVDLVQKYLEKYYNLKNDGRQVEKRRNSGPVVEKLKQMQEFFGLKVTGKPDAETLKVMKQPRCGVPDVAQFVLTEGNPRWEQTHLTYRIENYTPDLPRADVDHAIEKAFQLWSNVTPLTFTKVSEGQADIMISFVRGDHRDNSPFDGPGGNLAHAFQPGPGIGGDAHFDEDERWTNNFREYNLHRVAAHELGHSLGLSHSTDIGALMYPSYTFSGDVQLAQQDIDGIQAIYGRSQNPVQPIGPQTPKACDSKLTFDAITTIRGEVMFFKDRFYMRTNPFYPEVELNFISVFWPQLPNGLEAAYEFADRDEVRFFKGNKYWAVQGQNVLHGYPKDIYSSFGFPRTVKHIDAALSEENTGKTYFFVANKYWRYDEYKRSMDPGYPKMIAHDFPGIGHKVDAVFMKDGFFYFFHGTRQYKFDPKTKRILTLQKANSWFNCRKN

SEQ ID NO: 3010 - protein, 450 aa, Artificial Sequence
  MMP-1 variant D232T
FPATLETQEQDVDLVQKYLEKYYNLKNDGRQVEKRRNSGPVVEKLKQMQEFFGLKVTGKPDAETLKVMKQPRCGVPDVAQFVLTEGNPRWEQTHLTYRIENYTPDLPRADVDHAIEKAFQLWSNVTPLTFTKVSEGQADIMISFVRGDHRDNSPFDGPGGNLAHAFQPGPGIGGDAHFDEDERWTNNFREYNLHRVAAHELGHSLGLSHSTDIGALMYPSYTFSGDVQLAQTDIDGIQAIYGRSQNPVQPIGPQTPKACDSKLTFDAITTIRGEVMFFKDRFYMRTNPFYPEVELNFISVFWPQLPNGLEAAYEFADRDEVRFFKGNKYWAVQGQNVLHGYPKDIYSSFGFPRTVKHIDAALSEENTGKTYFFVANKYWRYDEYKRSMDPGYPKMIAHDFPGIGHKVDAVFMKDGFFYFFHGTRQYKFDPKTKRILTLQKANSWFNCRKN

SEQ ID NO: 3011 - protein, 450 aa, Artificial Sequence
  MMP-1 variant D232Y
FPATLETQEQDVDLVQKYLEKYYNLKNDGRQVEKRRNSGPVVEKLKQMQEFFGLKVTGKPDAETLKVMKQPRCGVPDVAQFVLTEGNPRWEQTHLTYRIENYTPDLPRADVDHAIEKAFQLWSNVTPLTFTKVSEGQADIMISFVRGDHRDNSPFDGPGGNLAHAFQPGPGIGGDAHFDEDERWTNNFREYNLHRVAAHELGHSLGLSHSTDIGALMYPSYTFSGDVQLAQYDIDGIQAIYGRSQNPVQPIGPQTPKACDSKLTFDAITTIRGEVMFFKDRFYMRTNPFYPEVELNFISVFWPQLPNGLEAAYEFADRDEVRFFKGNKYWAVQGQNVLHGYPKDIYSSFGFPRTVKHIDAALSEENTGKTYFFVANKYWRYDEYKRSMDPGYPKMIAHDFPGIGHKVDAVFMKDGFFYFFHGTRQYKFDPKTKRILTLQKANSWFNCRKN

SEQ ID NO: 3012 - protein, 450 aa, Artificial Sequence
  MMP-1 variant D232S
FPATLETQEQDVDLVQKYLEKYYNLKNDGRQVEKRRNSGPVVEKLKQMQEFFGLKVTGKPDAETLKVMKQPRCGVPDVAQFVLTEGNPRWEQTHLTYRIENYTPDLPRADVDHAIEKAFQLWSNVTPLTFTKVSEGQADIMISFVRGDHRDNSPFDGPGGNLAHAFQPGPGIGGDAHFDEDERWTNNFREYNLHRVAAHELGHSLGLSHSTDIGALMYPSYTFSGDVQLAQSDIDGIQAIYGRSQNPVQPIGPQTPKACDSKLTFDAITTIRGEVMFFKDRFYMRTNPFYPEVELNFISVFWPQLPNGLEAAYEFADRDEVRFFKGNKYWAVQGQNVLHGYPKDIYSSFGFPRTVKHIDAALSEENTGKTYFFVANKYWRYDEYKRSMDPGYPKMIAHDFPGIGHKVDAVFMKDGFFYFFHGTRQYKFDPKTKRILTLQKANSWFNCRKN

SEQ ID NO: 3013 - protein, 450 aa, Artificial Sequence
  MMP-1 variant D232G
FPATLETQEQDVDLVQKYLEKYYNLKNDGRQVEKRRNSGPVVEKLKQMQEFFGLKVTGKPDAETLKVMKQPRCGVPDVAQFVLTEGNPRWEQTHLTYRIENYTPDLPRADVDHAIEKAFQLWSNVTPLTFTKVSEGQADIMISFVRGDHRDNSPFDGPGGNLAHAFQPGPGIGGDAHFDEDERWTNNFREYNLHRVAAHELGHSLGLSHSTDIGALMYPSYTFSGDVQLAQGDIDGIQAIYGRSQNPVQPIGPQTPKACDSKLTFDAITTIRGEVMFFKDRFYMRTNPFYPEVELNFISVFWPQLPNGLEAAYEFADRDEVRFFKGNKYWAVQGQNVLHGYPKDIYSSFGFPRTVKHIDAALSEENTGKTYFFVANKYWRYDEYKRSMDPGYPKMIAHDFPGIGHKVDAVFMKDGFFYFFHGTRQYKFDPKTKRILTLQKANSWFNCRKN

SEQ ID NO: 3014 - protein, 450 aa, Artificial Sequence
  MMP-1 variant D232F
FPATLETQEQDVDLVQKYLEKYYNLKNDGRQVEKRRNSGPVVEKLKQMQEFFGLKVTGKPDAETLKVMKQPRCGVPDVAQFVLTEGNPRWEQTHLTYRIENYTPDLPRADVDHAIEKAFQLWSNVTPLTFTKVSEGQADIMISFVRGDHRDNSPFDGPGGNLAHAFQPGPGIGGDAHFDEDERWTNNFREYNLHRVAAHELGHSLGLSHSTDIGALMYPSYTFSGDVQLAQFDIDGIQAIYGRSQNPVQPIGPQTPKACDSKLTFDAITTIRGEVMFFKDRFYMRTNPFYPEVELNFISVFWPQLPNGLEAAYEFADRDEVRFFKGNKYWAVQGQNVLHGYPKDIYSSFGFPRTVKHIDAALSEENTGKTYFFVANKYWRYDEYKRSMDPGYPKMIAHDFPGIGHKVDAVFMKDGFFYFFHGTRQYKFDPKTKRILTLQKANSWFNCRKN

SEQ ID NO: 3015 - protein, 450 aa, Artificial Sequence
  MMP-1 variant D232M
FPATLETQEQDVDLVQKYLEKYYNLKNDGRQVEKRRNSGPVVEKLKQMQEFFGLKVTGKPDAETLKVMKQPRCGVPDVAQFVLTEGNPRWEQTHLTYRIENYTPDLPRADVDHAIEKAFQLWSNVTPLTFTKVSEGQADIMISFVRGDHRDNSPFDGPGGNLAHAFQPGPGIGGDAHFDEDERWTNNFREYNLHRVAAHELGHSLGLSHSTDIGALMYPSYTFSGDVQLAQMDIDGIQAIYGRSQNPVQPIGPQTPKACDSKLTFDAITTIRGEVMFFKDRFYMRTNPFYPEVELNFISVFWPQLPNGLEAAYEFADRDEVRFFKGNKYWAVQGQNVLHGYPKDIYSSFGFPRTVKHIDAALSEENTGKTYFFVANKYWRYDEYKRSMDPGYPKMIAHDFPGIGHKVDAVFMKDGFFYFFHGTRQYKFDPKTKRILTLQKANSWFNCRKN

SEQ ID NO: 3016 - protein, 450 aa, Artificial Sequence
  MMP-1 variant D232W
FPATLETQEQDVDLVQKYLEKYYNLKNDGRQVEKRRNSGPVVEKLKQMQEFFGLKVTGKPDAETLKVMKQPRCGVPDVAQFVLTEGNPRWEQTHLTYRIENYTPDLPRADVDHAIEKAFQLWSNVTPLTFTKVSEGQADIMISFVRGDHRDNSPFDGPGGNLAHAFQPGPGIGGDAHFDEDERWTNNFREYNLHRVAAHELGHSLGLSHSTDIGALMYPSYTFSGDVQLAQWDIDGIQAIYGRSQNPVQPIGPQTPKACDSKLTFDAITTIRGEVMFFKDRFYMRTNPFYPEVELNFISVFWPQLPNGLEAAYEFADRDEVRFFKGNKYWAVQGQNVLHGYPKDIYSSFGFPRTVKHIDAALSEENTGKTYFFVANKYWRYDEYKRSMDPGYPKMIAHDFPGIGHKVDAVFMKDGFFYFFHGTRQYKFDPKTKRILTLQKANSWFNCRKN

SEQ ID NO: 3017 - protein, 450 aa, Artificial Sequence
  MMP-1 variant D232I
FPATLETQEQDVDLVQKYLEKYYNLKNDGRQVEKRRNSGPVVEKLKQMQEFFGLKVTGKPDAETLKVMKQPRCGVPDVAQFVLTEGNPRWEQTHLTYRIENYTPDLPRADVDHAIEKAFQLWSNVTPLTFTKVSEGQADIMISFVRGDHRDNSPFDGPGGNLAHAFQPGPGIGGDAHFDEDERWTNNFREYNLHRVAAHELGHSLGLSHSTDIGALMYPSYTFSGDVQLAQIDIDGIQAIYGRSQNPVQPIGPQTPKACDSKLTFDAITTIRGEVMFFKDRFYMRTNPFYPEVELNFISVFWPQLPNGLEAAYEFADRDEVRFFKGNKYWAVQGQNVLHGYPKDIYSSFGFPRTVKHIDAALSEENTGKTYFFVANKYWRYDEYKRSMDPGYPKMIAHDFPGIGHKVDAVFMKDGFFYFFHGTRQYKFDPKTKRILTLQKANSWFNCRKN

SEQ ID NO: 3018 - protein, 450 aa, Artificial Sequence
  MMP-1 variant D232V
FPATLETQEQDVDLVQKYLEKYYNLKNDGRQVEKRRNSGPVVEKLKQMQEFFGLKVTGKPDAETLKVMKQPRCGVPDVAQFVLTEGNPRWEQTHLTYRIENYTPDLPRADVDHAIEKAFQLWSNVTPLTFTKVSEGQADIMISFVRGDHRDNSPFDGPGGNLAHAFQPGPGIGGDAHFDEDERWTNNFREYNLHRVAAHELGHSLGLSHSTDIGALMYPSYTFSGDVQLAQVDIDGIQAIYGRSQNPVQPIGPQTPKACDSKLTFDAITTIRGEVMFFKDRFYMRTNPFYPEVELNFISVFWPQLPNGLEAAYEFADRDEVRFFKGNKYWAVQGQNVLHGYPKDIYSSFGFPRTVKHIDAALSEENTGKTYFFVANKYWRYDEYKRSMDPGYPKMIAHDFPGIGHKVDAVFMKDGFFYFFHGTRQYKFDPKTKRILTLQKANSWFNCRKN

SEQ ID NO: 3019 - protein, 450 aa, Artificial Sequence
  MMP-1 variant D232L
FPATLETQEQDVDLVQKYLEKYYNLKNDGRQVEKRRNSGPVVEKLKQMQEFFGLKVTGKPDAETLKVMKQPRCGVPDVAQFVLTEGNPRWEQTHLTYRIENYTPDLPRADVDHAIEKAFQLWSNVTPLTFTKVSEGQADIMISFVRGDHRDNSPFDGPGGNLAHAFQPGPGIGGDAHFDEDERWTNNFREYNLHRVAAHELGHSLGLSHSTDIGALMYPSYTFSGDVQLAQLDIDGIQAIYGRSQNPVQPIGPQTPKACDSKLTFDAITTIRGEVMFFKDRFYMRTNPFYPEVELNFISVFWPQLPNGLEAAYEFADRDEVRFFKGNKYWAVQGQNVLHGYPKDIYSSFGFPRTVKHIDAALSEENTGKTYFFVANKYWRYDEYKRSMDPGYPKMIAHDFPGIGHKVDAVFMKDGFFYFFHGTRQYKFDPKTKRILTLQKANSWFNCRKN

SEQ ID NO: 3020 - protein, 450 aa, Artificial Sequence
  MMP-1 variant D232A
FPATLETQEQDVDLVQKYLEKYYNLKNDGRQVEKRRNSGPVVEKLKQMQEFFGLKVTGKPDAETLKVMKQPRCGVPDVAQFVLTEGNPRWEQTHLTYRIENYTPDLPRADVDHAIEKAFQLWSNVTPLTFTKVSEGQADIMISFVRGDHRDNSPFDGPGGNLAHAFQPGPGIGGDAHFDEDERWTNNFREYNLHRVAAHELGHSLGLSHSTDIGALMYPSYTFSGDVQLAQADIDGIQAIYGRSQNPVQPIGPQTPKACDSKLTFDAITTIRGEVMFFKDRFYMRTNPFYPEVELNFISVFWPQLPNGLEAAYEFADRDEVRFFKGNKYWAVQGQNVLHGYPKDIYSSFGFPRTVKHIDAALSEENTGKTYFFVANKYWRYDEYKRSMDPGYPKMIAHDFPGIGHKVDAVFMKDGFFYFFHGTRQYKFDPKTKRILTLQKANSWFNCRKN

SEQ ID NO: 3021 - protein, 450 aa, Artificial Sequence
  MMP-1 variant D232P
FPATLETQEQDVDLVQKYLEKYYNLKNDGRQVEKRRNSGPVVEKLKQMQEFFGLKVTGKPDAETLKVMKQPRCGVPDVAQFVLTEGNPRWEQTHLTYRIENYTPDLPRADVDHAIEKAFQLWSNVTPLTFTKVSEGQADIMISFVRGDHRDNSPFDGPGGNLAHAFQPGPGIGGDAHFDEDERWTNNFREYNLHRVAAHELGHSLGLSHSTDIGALMYPSYTFSGDVQLAQPDIDGIQAIYGRSQNPVQPIGPQTPKACDSKLTFDAITTIRGEVMFFKDRFYMRTNPFYPEVELNFISVFWPQLPNGLEAAYEFADRDEVRFFKGNKYWAVQGQNVLHGYPKDIYSSFGFPRTVKHIDAALSEENTGKTYFFVANKYWRYDEYKRSMDPGYPKMIAHDFPGIGHKVDAVFMKDGFFYFFHGTRQYKFDPKTKRILTLQKANSWFNCRKN

SEQ ID NO: 3022 - protein, 450 aa, Artificial Sequence
  MMP-1 variant D235E
FPATLETQEQDVDLVQKYLEKYYNLKNDGRQVEKRRNSGPVVEKLKQMQEFFGLKVTGKPDAETLKVMKQPRCGVPDVAQFVLTEGNPRWEQTHLTYRIENYTPDLPRADVDHAIEKAFQLWSNVTPLTFTKVSEGQADIMISFVRGDHRDNSPFDGPGGNLAHAFQPGPGIGGDAHFDEDERWTNNFREYNLHRVAAHELGHSLGLSHSTDIGALMYPSYTFSGDVQLAQDDIEGIQAIYGRSQNPVQPIGPQTPKACDSKLTFDAITTIRGEVMFFKDRFYMRTNPFYPEVELNFISVFWPQLPNGLEAAYEFADRDEVRFFKGNKYWAVQGQNVLHGYPKDIYSSFGFPRTVKHIDAALSEENTGKTYFFVANKYWRYDEYKRSMDPGYPKMIAHDFPGIGHKVDAVFMKDGFFYFFHGTRQYKFDPKTKRILTLQKANSWFNCRKN

SEQ ID NO: 3023 - protein, 450 aa, Artificial Sequence
  MMP-1 variant D235H
FPATLETQEQDVDLVQKYLEKYYNLKNDGRQVEKRRNSGPVVEKLKQMQEFFGLKVTGKPDAETLKVMKQPRCGVPDVAQFVLTEGNPRWEQTHLTYRIENYTPDLPRADVDHAIEKAFQLWSNVTPLTFTKVSEGQADIMISFVRGDHRDNSPFDGPGGNLAHAFQPGPGIGGDAHFDEDERWTNNFREYNLHRVAAHELGHSLGLSHSTDIGALMYPSYTFSGDVQLAQDDIHGIQAIYGRSQNPVQPIGPQTPKACDSKLTFDAITTIRGEVMFFKDRFYMRTNPFYPEVELNFISVFWPQLPNGLEAAYEFADRDEVRFFKGNKYWAVQGQNVLHGYPKDIYSSFGFPRTVKHIDAALSEENTGKTYFFVANKYWRYDEYKRSMDPGYPKMIAHDFPGIGHKVDAVFMKDGFFYFFHGTRQYKFDPKTKRILTLQKANSWFNCRKN

SEQ ID NO: 3024 - protein, 450 aa, Artificial Sequence
  MMP-1 variant D235K
FPATLETQEQDVDLVQKYLEKYYNLKNDGRQVEKRRNSGPVVEKLKQMQEFFGLKVTGKPDAETLKVMKQPRCGVPDVAQFVLTEGNPRWEQTHLTYRIENYTPDLPRADVDHAIEKAFQLWSNVTPLTFTKVSEGQADIMISFVRGDHRDNSPFDGPGGNLAHAFQPGPGIGGDAHFDEDERWTNNFREYNLHRVAAHELGHSLGLSHSTDIGALMYPSYTFSGDVQLAQDDIKGIQAIYGRSQNPVQPIGPQTPKACDSKLTFDAITTIRGEVMFFKDRFYMRTNPFYPEVELNFISVFWPQLPNGLEAAYEFADRDEVRFFKGNKYWAVQGQNVLHGYPKDIYSSFGFPRTVKHIDAALSEENTGKTYFFVANKYWRYDEYKRSMDPGYPKMIAHDFPGIGHKVDAVFMKDGFFYFFHGTRQYKFDPKTKRILTLQKANSWFNCRKN

SEQ ID NO: 3025 - protein, 450 aa, Artificial Sequence
  MMP-1 variant D235R
FPATLETQEQDVDLVQKYLEKYYNLKNDGRQVEKRRNSGPVVEKLKQMQEFFGLKVTGKPDAETLKVMKQPRCGVPDVAQFVLTEGNPRWEQTHLTYRIENYTPDLPRADVDHAIEKAFQLWSNVTPLTFTKVSEGQADIMISFVRGDHRDNSPFDGPGGNLAHAFQPGPGIGGDAHFDEDERWTNNFREYNLHRVAAHELGHSLGLSHSTDIGALMYPSYTFSGDVQLAQDDIRGIQAIYGRSQNPVQPIGPQTPKACDSKLTFDAITTIRGEVMFFKDRFYMRTNPFYPEVELNFISVFWPQLPNGLEAAYEFADRDEVRFFKGNKYWAVQGQNVLHGYPKDIYSSFGFPRTVKHIDAALSEENTGKTYFFVANKYWRYDEYKRSMDPGYPKMIAHDFPGIGHKVDAVFMKDGFFYFFHGTRQYKFDPKTKRILTLQKANSWFNCRKN

SEQ ID NO: 3026 - protein, 450 aa, Artificial Sequence
  MMP-1 variant D235C
FPATLETQEQDVDLVQKYLEKYYNLKNDGRQVEKRRNSGPVVEKLKQMQEFFGLKVTGKPDAETLKVMKQPRCGVPDVAQFVLTEGNPRWEQTHLTYRIENYTPDLPRADVDHAIEKAFQLWSNVTPLTFTKVSEGQADIMISFVRGDHRDNSPFDGPGGNLAHAFQPGPGIGGDAHFDEDERWTNNFREYNLHRVAAHELGHSLGLSHSTDIGALMYPSYTFSGDVQLAQDDICGIQAIYGRSQNPVQPIGPQTPKACDSKLTFDAITTIRGEVMFFKDRFYMRTNPFYPEVELNFISVFWPQLPNGLEAAYEFADRDEVRFFKGNKYWAVQGQNVLHGYPKDIYSSFGFPRTVKHIDAALSEENTGKTYFFVANKYWRYDEYKRSMDPGYPKMIAHDFPGIGHKVDAVFMKDGFFYFFHGTRQYKFDPKTKRILTLQKANSWFNCRKN

SEQ ID NO: 3027 - protein, 450 aa, Artificial Sequence
  MMP-1 variant D235N
FPATLETQEQDVDLVQKYLEKYYNLKNDGRQVEKRRNSGPVVEKLKQMQEFFGLKVTGKPDAETLKVMKQPRCGVPDVAQFVLTEGNPRWEQTHLTYRIENYTPDLPRADVDHAIEKAFQLWSNVTPLTFTKVSEGQADIMISFVRGDHRDNSPFDGPGGNLAHAFQPGPGIGGDAHFDEDERWTNNFREYNLHRVAAHELGHSLGLSHSTDIGALMYPSYTFSGDVQLAQDDINGIQAIYGRSQNPVQPIGPQTPKACDSKLTFDAITTIRGEVMFFKDRFYMRTNPFYPEVELNFISVFWPQLPNGLEAAYEFADRDEVRFFKGNKYWAVQGQNVLHGYPKDIYSSFGFPRTVKHIDAALSEENTGKTYFFVANKYWRYDEYKRSMDPGYPKMIAHDFPGIGHKVDAVFMKDGFFYFFHGTRQYKFDPKTKRILTLQKANSWFNCRKN

SEQ ID NO: 3028 - protein, 450 aa, Artificial Sequence
  MMP-1 variant D235Q
FPATLETQEQDVDLVQKYLEKYYNLKNDGRQVEKRRNSGPVVEKLKQMQEFFGLKVTGKPDAETLKVMKQPRCGVPDVAQFVLTEGNPRWEQTHLTYRIENYTPDLPRADVDHAIEKAFQLWSNVTPLTFTKVSEGQADIMISFVRGDHRDNSPFDGPGGNLAHAFQPGPGIGGDAHFDEDERWTNNFREYNLHRVAAHELGHSLGLSHSTDIGALMYPSYTFSGDVQLAQDDIQGIQAIYGRSQNPVQPIGPQTPKACDSKLTFDAITTIRGEVMFFKDRFYMRTNPFYPEVELNFISVFWPQLPNGLEAAYEFADRDEVRFFKGNKYWAVQGQNVLHGYPKDIYSSFGFPRTVKHIDAALSEENTGKTYFFVANKYWRYDEYKRSMDPGYPKMIAHDFPGIGHKVDAVFMKDGFFYFFHGTRQYKFDPKTKRILTLQKANSWFNCRKN

SEQ ID NO: 3029 - protein, 450 aa, Artificial Sequence
  MMP-1 variant D235T
FPATLETQEQDVDLVQKYLEKYYNLKNDGRQVEKRRNSGPVVEKLKQMQEFFGLKVTGKPDAETLKVMKQPRCGVPDVAQFVLTEGNPRWEQTHLTYRIENYTPDLPRADVDHAIEKAFQLWSNVTPLTFTKVSEGQADIMISFVRGDHRDNSPFDGPGGNLAHAFQPGPGIGGDAHFDEDERWTNNFREYNLHRVAAHELGHSLGLSHSTDIGALMYPSYTFSGDVQLAQDDITGIQAIYGRSQNPVQPIGPQTPKACDSKLTFDAITTIRGEVMFFKDRFYMRTNPFYPEVELNFISVFWPQLPNGLEAAYEFADRDEVRFFKGNKYWAVQGQNVLHGYPKDIYSSFGFPRTVKHIDAALSEENTGKTYFFVANKYWRYDEYKRSMDPGYPKMIAHDFPGIGHKVDAVFMKDGFFYFFHGTRQYKFDPKTKRILTLQKANSWFNCRKN

SEQ ID NO: 3030 - protein, 450 aa, Artificial Sequence
  MMP-1 variant D235Y
FPATLETQEQDVDLVQKYLEKYYNLKNDGRQVEKRRNSGPVVEKLKQMQEFFGLKVTGKPDAETLKVMKQPRCGVPDVAQFVLTEGNPRWEQTHLTYRIENYTPDLPRADVDHAIEKAFQLWSNVTPLTFTKVSEGQADIMISFVRGDHRDNSPFDGPGGNLAHAFQPGPGIGGDAHFDEDERWTNNFREYNLHRVAAHELGHSLGLSHSTDIGALMYPSYTFSGDVQLAQDDIYGIQAIYGRSQNPVQPIGPQTPKACDSKLTFDAITTIRGEVMFFKDRFYMRTNPFYPEVELNFISVFWPQLPNGLEAAYEFADRDEVRFFKGNKYWAVQGQNVLHGYPKDIYSSFGFPRTVKHIDAALSEENTGKTYFFVANKYWRYDEYKRSMDPGYPKMIAHDFPGIGHKVDAVFMKDGFFYFFHGTRQYKFDPKTKRILTLQKANSWFNCRKN

SEQ ID NO: 3031 - protein, 450 aa, Artificial Sequence
  MMP-1 variant D235S
FPATLETQEQDVDLVQKYLEKYYNLKNDGRQVEKRRNSGPVVEKLKQMQEFFGLKVTGKPDAETLKVMKQPRCGVPDVAQFVLTEGNPRWEQTHLTYRIENYTPDLPRADVDHAIEKAFQLWSNVTPLTFTKVSEGQADIMISFVRGDHRDNSPFDGPGGNLAHAFQPGPGIGGDAHFDEDERWTNNFREYNLHRVAAHELGHSLGLSHSTDIGALMYPSYTFSGDVQLAQDDISGIQAIYGRSQNPVQPIGPQTPKACDSKLTFDAITTIRGEVMFFKDRFYMRTNPFYPEVELNFISVFWPQLPNGLEAAYEFADRDEVRFFKGNKYWAVQGQNVLHGYPKDIYSSFGFPRTVKHIDAALSEENTGKTYFFVANKYWRYDEYKRSMDPGYPKMIAHDFPGIGHKVDAVFMKDGFFYFFHGTRQYKFDPKTKRILTLQKANSWFNCRKN

SEQ ID NO: 3032 - protein, 450 aa, Artificial Sequence
  MMP-1 variant D235G
FPATLETQEQDVDLVQKYLEKYYNLKNDGRQVEKRRNSGPVVEKLKQMQEFFGLKVTGKPDAETLKVMKQPRCGVPDVAQFVLTEGNPRWEQTHLTYRIENYTPDLPRADVDHAIEKAFQLWSNVTPLTFTKVSEGQADIMISFVRGDHRDNSPFDGPGGNLAHAFQPGPGIGGDAHFDEDERWTNNFREYNLHRVAAHELGHSLGLSHSTDIGALMYPSYTFSGDVQLAQDDIGGIQAIYGRSQNPVQPIGPQTPKACDSKLTFDAITTIRGEVMFFKDRFYMRTNPFYPEVELNFISVFWPQLPNGLEAAYEFADRDEVRFFKGNKYWAVQGQNVLHGYPKDIYSSFGFPRTVKHIDAALSEENTGKTYFFVANKYWRYDEYKRSMDPGYPKMIAHDFPGIGHKVDAVFMKDGFFYFFHGTRQYKFDPKTKRILTLQKANSWFNCRKN

SEQ ID NO: 3033 - protein, 450 aa, Artificial Sequence
  MMP-1 variant D235F
FPATLETQEQDVDLVQKYLEKYYNLKNDGRQVEKRRNSGPVVEKLKQMQEFFGLKVTGKPDAETLKVMKQPRCGVPDVAQFVLTEGNPRWEQTHLTYRIENYTPDLPRADVDHAIEKAFQLWSNVTPLTFTKVSEGQADIMISFVRGDHRDNSPFDGPGGNLAHAFQPGPGIGGDAHFDEDERWTNNFREYNLHRVAAHELGHSLGLSHSTDIGALMYPSYTFSGDVQLAQDDIFGIQAIYGRSQNPVQPIGPQTPKACDSKLTFDAITTIRGEVMFFKDRFYMRTNPFYPEVELNFISVFWPQLPNGLEAAYEFADRDEVRFFKGNKYWAVQGQNVLHGYPKDIYSSFGFPRTVKHIDAALSEENTGKTYFFVANKYWRYDEYKRSMDPGYPKMIAHDFPGIGHKVDAVFMKDGFFYFFHGTRQYKFDPKTKRILTLQKANSWFNCRKN

SEQ ID NO: 3034 - protein, 450 aa, Artificial Sequence
  MMP-1 variant D235M
FPATLETQEQDVDLVQKYLEKYYNLKNDGRQVEKRRNSGPVVEKLKQMQEFFGLKVTGKPDAETLKVMKQPRCGVPDVAQFVLTEGNPRWEQTHLTYRIENYTPDLPRADVDHAIEKAFQLWSNVTPLTFTKVSEGQADIMISFVRGDHRDNSPFDGPGGNLAHAFQPGPGIGGDAHFDEDERWTNNFREYNLHRVAAHELGHSLGLSHSTDIGALMYPSYTFSGDVQLAQDDIMGIQAIYGRSQNPVQPIGPQTPKACDSKLTFDAITTIRGEVMFFKDRFYMRTNPFYPEVELNFISVFWPQLPNGLEAAYEFADRDEVRFFKGNKYWAVQGQNVLHGYPKDIYSSFGFPRTVKHIDAALSEENTGKTYFFVANKYWRYDEYKRSMDPGYPKMIAHDFPGIGHKVDAVFMKDGFFYFFHGTRQYKFDPKTKRILTLQKANSWFNCRKN

SEQ ID NO: 3035 - protein, 450 aa, Artificial Sequence
  MMP-1 variant D235W
FPATLETQEQDVDLVQKYLEKYYNLKNDGRQVEKRRNSGPVVEKLKQMQEFFGLKVTGKPDAETLKVMKQPRCGVPDVAQFVLTEGNPRWEQTHLTYRIENYTPDLPRADVDHAIEKAFQLWSNVTPLTFTKVSEGQADIMISFVRGDHRDNSPFDGPGGNLAHAFQPGPGIGGDAHFDEDERWTNNFREYNLHRVAAHELGHSLGLSHSTDIGALMYPSYTFSGDVQLAQDDIWGIQAIYGRSQNPVQPIGPQTPKACDSKLTFDAITTIRGEVMFFKDRFYMRTNPFYPEVELNFISVFWPQLPNGLEAAYEFADRDEVRFFKGNKYWAVQGQNVLHGYPKDIYSSFGFPRTVKHIDAALSEENTGKTYFFVANKYWRYDEYKRSMDPGYPKMIAHDFPGIGHKVDAVFMKDGFFYFFHGTRQYKFDPKTKRILTLQKANSWFNCRKN

SEQ ID NO: 3036 - protein, 450 aa, Artificial Sequence
  MMP-1 variant D235I
FPATLETQEQDVDLVQKYLEKYYNLKNDGRQVEKRRNSGPVVEKLKQMQEFFGLKVTGKPDAETLKVMKQPRCGVPDVAQFVLTEGNPRWEQTHLTYRIENYTPDLPRADVDHAIEKAFQLWSNVTPLTFTKVSEGQADIMISFVRGDHRDNSPFDGPGGNLAHAFQPGPGIGGDAHFDEDERWTNNFREYNLHRVAAHELGHSLGLSHSTDIGALMYPSYTFSGDVQLAQDDIIGIQAIYGRSQNPVQPIGPQTPKACDSKLTFDAITTIRGEVMFFKDRFYMRTNPFYPEVELNFISVFWPQLPNGLEAAYEFADRDEVRFFKGNKYWAVQGQNVLHGYPKDIYSSFGFPRTVKHIDAALSEENTGKTYFFVANKYWRYDEYKRSMDPGYPKMIAHDFPGIGHKVDAVFMKDGFFYFFHGTRQYKFDPKTKRILTLQKANSWFNCRKN

SEQ ID NO: 3037 - protein, 450 aa, Artificial Sequence
  MMP-1 variant D235V
FPATLETQEQDVDLVQKYLEKYYNLKNDGRQVEKRRNSGPVVEKLKQMQEFFGLKVTGKPDAETLKVMKQPRCGVPDVAQFVLTEGNPRWEQTHLTYRIENYTPDLPRADVDHAIEKAFQLWSNVTPLTFTKVSEGQADIMISFVRGDHRDNSPFDGPGGNLAHAFQPGPGIGGDAHFDEDERWTNNFREYNLHRVAAHELGHSLGLSHSTDIGALMYPSYTFSGDVQLAQDDIVGIQAIYGRSQNPVQPIGPQTPKACDSKLTFDAITTIRGEVMFFKDRFYMRTNPFYPEVELNFISVFWPQLPNGLEAAYEFADRDEVRFFKGNKYWAVQGQNVLHGYPKDIYSSFGFPRTVKHIDAALSEENTGKTYFFVANKYWRYDEYKRSMDPGYPKMIAHDFPGIGHKVDAVFMKDGFFYFFHGTRQYKFDPKTKRILTLQKANSWFNCRKN

SEQ ID NO: 3038 - protein, 450 aa, Artificial Sequence
  MMP-1 variant D235L
FPATLETQEQDVDLVQKYLEKYYNLKNDGRQVEKRRNSGPVVEKLKQMQEFFGLKVTGKPDAETLKVMKQPRCGVPDVAQFVLTEGNPRWEQTHLTYRIENYTPDLPRADVDHAIEKAFQLWSNVTPLTFTKVSEGQADIMISFVRGDHRDNSPFDGPGGNLAHAFQPGPGIGGDAHFDEDERWTNNFREYNLHRVAAHELGHSLGLSHSTDIGALMYPSYTFSGDVQLAQDDILGIQAIYGRSQNPVQPIGPQTPKACDSKLTFDAITTIRGEVMFFKDRFYMRTNPFYPEVELNFISVFWPQLPNGLEAAYEFADRDEVRFFKGNKYWAVQGQNVLHGYPKDIYSSFGFPRTVKHIDAALSEENTGKTYFFVANKYWRYDEYKRSMDPGYPKMIAHDFPGIGHKVDAVFMKDGFFYFFHGTRQYKFDPKTKRILTLQKANSWFNCRKN

SEQ ID NO: 3039 - protein, 450 aa, Artificial Sequence
  MMP-1 variant D235A
FPATLETQEQDVDLVQKYLEKYYNLKNDGRQVEKRRNSGPVVEKLKQMQEFFGLKVTGKPDAETLKVMKQPRCGVPDVAQFVLTEGNPRWEQTHLTYRIENYTPDLPRADVDHAIEKAFQLWSNVTPLTFTKVSEGQADIMISFVRGDHRDNSPFDGPGGNLAHAFQPGPGIGGDAHFDEDERWTNNFREYNLHRVAAHELGHSLGLSHSTDIGALMYPSYTFSGDVQLAQDDIAGIQAIYGRSQNPVQPIGPQTPKACDSKLTFDAITTIRGEVMFFKDRFYMRTNPFYPEVELNFISVFWPQLPNGLEAAYEFADRDEVRFFKGNKYWAVQGQNVLHGYPKDIYSSFGFPRTVKHIDAALSEENTGKTYFFVANKYWRYDEYKRSMDPGYPKMIAHDFPGIGHKVDAVFMKDGFFYFFHGTRQYKFDPKTKRILTLQKANSWFNCRKN

SEQ ID NO: 3040 - protein, 450 aa, Artificial Sequence
  MMP-1 variant D235P
FPATLETQEQDVDLVQKYLEKYYNLKNDGRQVEKRRNSGPVVEKLKQMQEFFGLKVTGKPDAETLKVMKQPRCGVPDVAQFVLTEGNPRWEQTHLTYRIENYTPDLPRADVDHAIEKAFQLWSNVTPLTFTKVSEGQADIMISFVRGDHRDNSPFDGPGGNLAHAFQPGPGIGGDAHFDEDERWTNNFREYNLHRVAAHELGHSLGLSHSTDIGALMYPSYTFSGDVQLAQDDIPGIQAIYGRSQNPVQPIGPQTPKACDSKLTFDAITTIRGEVMFFKDRFYMRTNPFYPEVELNFISVFWPQLPNGLEAAYEFADRDEVRFFKGNKYWAVQGQNVLHGYPKDIYSSFGFPRTVKHIDAALSEENTGKTYFFVANKYWRYDEYKRSMDPGYPKMIAHDFPGIGHKVDAVFMKDGFFYFFHGTRQYKFDPKTKRILTLQKANSWFNCRKN

SEQ ID NO: 3041 - protein, 450 aa, Artificial Sequence
  MMP-1 variant G236D
FPATLETQEQDVDLVQKYLEKYYNLKNDGRQVEKRRNSGPVVEKLKQMQEFFGLKVTGKPDAETLKVMKQPRCGVPDVAQFVLTEGNPRWEQTHLTYRIENYTPDLPRADVDHAIEKAFQLWSNVTPLTFTKVSEGQADIMISFVRGDHRDNSPFDGPGGNLAHAFQPGPGIGGDAHFDEDERWTNNFREYNLHRVAAHELGHSLGLSHSTDIGALMYPSYTFSGDVQLAQDDIDDIQAIYGRSQNPVQPIGPQTPKACDSKLTFDAITTIRGEVMFFKDRFYMRTNPFYPEVELNFISVFWPQLPNGLEAAYEFADRDEVRFFKGNKYWAVQGQNVLHGYPKDIYSSFGFPRTVKHIDAALSEENTGKTYFFVANKYWRYDEYKRSMDPGYPKMIAHDFPGIGHKVDAVFMKDGFFYFFHGTRQYKFDPKTKRILTLQKANSWFNCRKN

SEQ ID NO: 3042 - protein, 450 aa, Artificial Sequence
  MMP-1 variant G236E
FPATLETQEQDVDLVQKYLEKYYNLKNDGRQVEKRRNSGPVVEKLKQMQEFFGLKVTGKPDAETLKVMKQPRCGVPDVAQFVLTEGNPRWEQTHLTYRIENYTPDLPRADVDHAIEKAFQLWSNVTPLTFTKVSEGQADIMISFVRGDHRDNSPFDGPGGNLAHAFQPGPGIGGDAHFDEDERWTNNFREYNLHRVAAHELGHSLGLSHSTDIGALMYPSYTFSGDVQLAQDDIDEIQAIYGRSQNPVQPIGPQTPKACDSKLTFDAITTIRGEVMFFKDRFYMRTNPFYPEVELNFISVFWPQLPNGLEAAYEFADRDEVRFFKGNKYWAVQGQNVLHGYPKDIYSSFGFPRTVKHIDAALSEENTGKTYFFVANKYWRYDEYKRSMDPGYPKMIAHDFPGIGHKVDAVFMKDGFFYFFHGTRQYKFDPKTKRILTLQKANSWFNCRKN

SEQ ID NO: 3043 - protein, 450 aa, Artificial Sequence
  MMP-1 variant G236H
FPATLETQEQDVDLVQKYLEKYYNLKNDGRQVEKRRNSGPVVEKLKQMQEFFGLKVTGKPDAETLKVMKQPRCGVPDVAQFVLTEGNPRWEQTHLTYRIENYTPDLPRADVDHAIEKAFQLWSNVTPLTFTKVSEGQADIMISFVRGDHRDNSPFDGPGGNLAHAFQPGPGIGGDAHFDEDERWTNNFREYNLHRVAAHELGHSLGLSHSTDIGALMYPSYTFSGDVQLAQDDIDHIQAIYGRSQNPVQPIGPQTPKACDSKLTFDAITTIRGEVMFFKDRFYMRTNPFYPEVELNFISVFWPQLPNGLEAAYEFADRDEVRFFKGNKYWAVQGQNVLHGYPKDIYSSFGFPRTVKHIDAALSEENTGKTYFFVANKYWRYDEYKRSMDPGYPKMIAHDFPGIGHKVDAVFMKDGFFYFFHGTRQYKFDPKTKRILTLQKANSWFNCRKN

SEQ ID NO: 3044 - protein, 450 aa, Artificial Sequence
  MMP-1 variant G236K
FPATLETQEQDVDLVQKYLEKYYNLKNDGRQVEKRRNSGPVVEKLKQMQEFFGLKVTGKPDAETLKVMKQPRCGVPDVAQFVLTEGNPRWEQTHLTYRIENYTPDLPRADVDHAIEKAFQLWSNVTPLTFTKVSEGQADIMISFVRGDHRDNSPFDGPGGNLAHAFQPGPGIGGDAHFDEDERWTNNFREYNLHRVAAHELGHSLGLSHSTDIGALMYPSYTFSGDVQLAQDDIDKIQAIYGRSQNPVQPIGPQTPKACDSKLTFDAITTIRGEVMFFKDRFYMRTNPFYPEVELNFISVFWPQLPNGLEAAYEFADRDEVRFFKGNKYWAVQGQNVLHGYPKDIYSSFGFPRTVKHIDAALSEENTGKTYFFVANKYWRYDEYKRSMDPGYPKMIAHDFPGIGHKVDAVFMKDGFFYFFHGTRQYKFDPKTKRILTLQKANSWFNCRKN

SEQ ID NO: 3045 - protein, 450 aa, Artificial Sequence
  MMP-1 variant G236R
FPATLETQEQDVDLVQKYLEKYYNLKNDGRQVEKRRNSGPVVEKLKQMQEFFGLKVTGKPDAETLKVMKQPRCGVPDVAQFVLTEGNPRWEQTHLTYRIENYTPDLPRADVDHAIEKAFQLWSNVTPLTFTKVSEGQADIMISFVRGDHRDNSPFDGPGGNLAHAFQPGPGIGGDAHFDEDERWTNNFREYNLHRVAAHELGHSLGLSHSTDIGALMYPSYTFSGDVQLAQDDIDRIQAIYGRSQNPVQPIGPQTPKACDSKLTFDAITTIRGEVMFFKDRFYMRTNPFYPEVELNFISVFWPQLPNGLEAAYEFADRDEVRFFKGNKYWAVQGQNVLHGYPKDIYSSFGFPRTVKHIDAALSEENTGKTYFFVANKYWRYDEYKRSMDPGYPKMIAHDFPGIGHKVDAVFMKDGFFYFFHGTRQYKFDPKTKRILTLQKANSWFNCRKN

SEQ ID NO: 3046 - protein, 450 aa, Artificial Sequence
  MMP-1 variant G236C
FPATLETQEQDVDLVQKYLEKYYNLKNDGRQVEKRRNSGPVVEKLKQMQEFFGLKVTGKPDAETLKVMKQPRCGVPDVAQFVLTEGNPRWEQTHLTYRIENYTPDLPRADVDHAIEKAFQLWSNVTPLTFTKVSEGQADIMISFVRGDHRDNSPFDGPGGNLAHAFQPGPGIGGDAHFDEDERWTNNFREYNLHRVAAHELGHSLGLSHSTDIGALMYPSYTFSGDVQLAQDDIDCIQAIYGRSQNPVQPIGPQTPKACDSKLTFDAITTIRGEVMFFKDRFYMRTNPFYPEVELNFISVFWPQLPNGLEAAYEFADRDEVRFFKGNKYWAVQGQNVLHGYPKDIYSSFGFPRTVKHIDAALSEENTGKTYFFVANKYWRYDEYKRSMDPGYPKMIAHDFPGIGHKVDAVFMKDGFFYFFHGTRQYKFDPKTKRILTLQKANSWFNCRKN

SEQ ID NO: 3047 - protein, 450 aa, Artificial Sequence
  MMP-1 variant G236N
FPATLETQEQDVDLVQKYLEKYYNLKNDGRQVEKRRNSGPVVEKLKQMQEFFGLKVTGKPDAETLKVMKQPRCGVPDVAQFVLTEGNPRWEQTHLTYRIENYTPDLPRADVDHAIEKAFQLWSNVTPLTFTKVSEGQADIMISFVRGDHRDNSPFDGPGGNLAHAFQPGPGIGGDAHFDEDERWTNNFREYNLHRVAAHELGHSLGLSHSTDIGALMYPSYTFSGDVQLAQDDIDNIQAIYGRSQNPVQPIGPQTPKACDSKLTFDAITTIRGEVMFFKDRFYMRTNPFYPEVELNFISVFWPQLPNGLEAAYEFADRDEVRFFKGNKYWAVQGQNVLHGYPKDIYSSFGFPRTVKHIDAALSEENTGKTYFFVANKYWRYDEYKRSMDPGYPKMIAHDFPGIGHKVDAVFMKDGFFYFFHGTRQYKFDPKTKRILTLQKANSWFNCRKN

SEQ ID NO: 3048 - protein, 450 aa, Artificial Sequence
  MMP-1 variant G236Q
FPATLETQEQDVDLVQKYLEKYYNLKNDGRQVEKRRNSGPVVEKLKQMQEFFGLKVTGKPDAETLKVMKQPRCGVPDVAQFVLTEGNPRWEQTHLTYRIENYTPDLPRADVDHAIEKAFQLWSNVTPLTFTKVSEGQADIMISFVRGDHRDNSPFDGPGGNLAHAFQPGPGIGGDAHFDEDERWTNNFREYNLHRVAAHELGHSLGLSHSTDIGALMYPSYTFSGDVQLAQDDIDQIQAIYGRSQNPVQPIGPQTPKACDSKLTFDAITTIRGEVMFFKDRFYMRTNPFYPEVELNFISVFWPQLPNGLEAAYEFADRDEVRFFKGNKYWAVQGQNVLHGYPKDIYSSFGFPRTVKHIDAALSEENTGKTYFFVANKYWRYDEYKRSMDPGYPKMIAHDFPGIGHKVDAVFMKDGFFYFFHGTRQYKFDPKTKRILTLQKANSWFNCRKN

SEQ ID NO: 3049 - protein, 450 aa, Artificial Sequence
  MMP-1 variant G236T
FPATLETQEQDVDLVQKYLEKYYNLKNDGRQVEKRRNSGPVVEKLKQMQEFFGLKVTGKPDAETLKVMKQPRCGVPDVAQFVLTEGNPRWEQTHLTYRIENYTPDLPRADVDHAIEKAFQLWSNVTPLTFTKVSEGQADIMISFVRGDHRDNSPFDGPGGNLAHAFQPGPGIGGDAHFDEDERWTNNFREYNLHRVAAHELGHSLGLSHSTDIGALMYPSYTFSGDVQLAQDDIDTIQAIYGRSQNPVQPIGPQTPKACDSKLTFDAITTIRGEVMFFKDRFYMRTNPFYPEVELNFISVFWPQLPNGLEAAYEFADRDEVRFFKGNKYWAVQGQNVLHGYPKDIYSSFGFPRTVKHIDAALSEENTGKTYFFVANKYWRYDEYKRSMDPGYPKMIAHDFPGIGHKVDAVFMKDGFFYFFHGTRQYKFDPKTKRILTLQKANSWFNCRKN

SEQ ID NO: 3050 - protein, 450 aa, Artificial Sequence
  MMP-1 variant G236Y
FPATLETQEQDVDLVQKYLEKYYNLKNDGRQVEKRRNSGPVVEKLKQMQEFFGLKVTGKPDAETLKVMKQPRCGVPDVAQFVLTEGNPRWEQTHLTYRIENYTPDLPRADVDHAIEKAFQLWSNVTPLTFTKVSEGQADIMISFVRGDHRDNSPFDGPGGNLAHAFQPGPGIGGDAHFDEDERWTNNFREYNLHRVAAHELGHSLGLSHSTDIGALMYPSYTFSGDVQLAQDDIDYIQAIYGRSQNPVQPIGPQTPKACDSKLTFDAITTIRGEVMFFKDRFYMRTNPFYPEVELNFISVFWPQLPNGLEAAYEFADRDEVRFFKGNKYWAVQGQNVLHGYPKDIYSSFGFPRTVKHIDAALSEENTGKTYFFVANKYWRYDEYKRSMDPGYPKMIAHDFPGIGHKVDAVFMKDGFFYFFHGTRQYKFDPKTKRILTLQKANSWFNCRKN

SEQ ID NO: 3051 - protein, 450 aa, Artificial Sequence
  MMP-1 variant G236S
FPATLETQEQDVDLVQKYLEKYYNLKNDGRQVEKRRNSGPVVEKLKQMQEFFGLKVTGKPDAETLKVMKQPRCGVPDVAQFVLTEGNPRWEQTHLTYRIENYTPDLPRADVDHAIEKAFQLWSNVTPLTFTKVSEGQADIMISFVRGDHRDNSPFDGPGGNLAHAFQPGPGIGGDAHFDEDERWTNNFREYNLHRVAAHELGHSLGLSHSTDIGALMYPSYTFSGDVQLAQDDIDSIQAIYGRSQNPVQPIGPQTPKACDSKLTFDAITTIRGEVMFFKDRFYMRTNPFYPEVELNFISVFWPQLPNGLEAAYEFADRDEVRFFKGNKYWAVQGQNVLHGYPKDIYSSFGFPRTVKHIDAALSEENTGKTYFFVANKYWRYDEYKRSMDPGYPKMIAHDFPGIGHKVDAVFMKDGFFYFFHGTRQYKFDPKTKRILTLQKANSWFNCRKN

SEQ ID NO: 3052 - protein, 450 aa, Artificial Sequence
  MMP-1 variant G236F
FPATLETQEQDVDLVQKYLEKYYNLKNDGRQVEKRRNSGPVVEKLKQMQEFFGLKVTGKPDAETLKVMKQPRCGVPDVAQFVLTEGNPRWEQTHLTYRIENYTPDLPRADVDHAIEKAFQLWSNVTPLTFTKVSEGQADIMISFVRGDHRDNSPFDGPGGNLAHAFQPGPGIGGDAHFDEDERWTNNFREYNLHRVAAHELGHSLGLSHSTDIGALMYPSYTFSGDVQLAQDDIDFIQAIYGRSQNPVQPIGPQTPKACDSKLTFDAITTIRGEVMFFKDRFYMRTNPFYPEVELNFISVFWPQLPNGLEAAYEFADRDEVRFFKGNKYWAVQGQNVLHGYPKDIYSSFGFPRTVKHIDAALSEENTGKTYFFVANKYWRYDEYKRSMDPGYPKMIAHDFPGIGHKVDAVFMKDGFFYFFHGTRQYKFDPKTKRILTLQKANSWFNCRKN

SEQ ID NO: 3053 - protein, 450 aa, Artificial Sequence
  MMP-1 variant G236M
FPATLETQEQDVDLVQKYLEKYYNLKNDGRQVEKRRNSGPVVEKLKQMQEFFGLKVTGKPDAETLKVMKQPRCGVPDVAQFVLTEGNPRWEQTHLTYRIENYTPDLPRADVDHAIEKAFQLWSNVTPLTFTKVSEGQADIMISFVRGDHRDNSPFDGPGGNLAHAFQPGPGIGGDAHFDEDERWTNNFREYNLHRVAAHELGHSLGLSHSTDIGALMYPSYTFSGDVQLAQDDIDMIQAIYGRSQNPVQPIGPQTPKACDSKLTFDAITTIRGEVMFFKDRFYMRTNPFYPEVELNFISVFWPQLPNGLEAAYEFADRDEVRFFKGNKYWAVQGQNVLHGYPKDIYSSFGFPRTVKHIDAALSEENTGKTYFFVANKYWRYDEYKRSMDPGYPKMIAHDFPGIGHKVDAVFMKDGFFYFFHGTRQYKFDPKTKRILTLQKANSWFNCRKN

SEQ ID NO: 3054 - protein, 450 aa, Artificial Sequence
  MMP-1 variant G236W
FPATLETQEQDVDLVQKYLEKYYNLKNDGRQVEKRRNSGPVVEKLKQMQEFFGLKVTGKPDAETLKVMKQPRCGVPDVAQFVLTEGNPRWEQTHLTYRIENYTPDLPRADVDHAIEKAFQLWSNVTPLTFTKVSEGQADIMISFVRGDHRDNSPFDGPGGNLAHAFQPGPGIGGDAHFDEDERWTNNFREYNLHRVAAHELGHSLGLSHSTDIGALMYPSYTFSGDVQLAQDDIDWIQAIYGRSQNPVQPIGPQTPKACDSKLTFDAITTIRGEVMFFKDRFYMRTNPFYPEVELNFISVFWPQLPNGLEAAYEFADRDEVRFFKGNKYWAVQGQNVLHGYPKDIYSSFGFPRTVKHIDAALSEENTGKTYFFVANKYWRYDEYKRSMDPGYPKMIAHDFPGIGHKVDAVFMKDGFFYFFHGTRQYKFDPKTKRILTLQKANSWFNCRKN

SEQ ID NO: 3055 - protein, 450 aa, Artificial Sequence
  MMP-1 variant G236I
FPATLETQEQDVDLVQKYLEKYYNLKNDGRQVEKRRNSGPVVEKLKQMQEFFGLKVTGKPDAETLKVMKQPRCGVPDVAQFVLTEGNPRWEQTHLTYRIENYTPDLPRADVDHAIEKAFQLWSNVTPLTFTKVSEGQADIMISFVRGDHRDNSPFDGPGGNLAHAFQPGPGIGGDAHFDEDERWTNNFREYNLHRVAAHELGHSLGLSHSTDIGALMYPSYTFSGDVQLAQDDIDIIQAIYGRSQNPVQPIGPQTPKACDSKLTFDAITTIRGEVMFFKDRFYMRTNPFYPEVELNFISVFWPQLPNGLEAAYEFADRDEVRFFKGNKYWAVQGQNVLHGYPKDIYSSFGFPRTVKHIDAALSEENTGKTYFFVANKYWRYDEYKRSMDPGYPKMIAHDFPGIGHKVDAVFMKDGFFYFFHGTRQYKFDPKTKRILTLQKANSWFNCRKN

SEQ ID NO: 3056 - protein, 450 aa, Artificial Sequence
  MMP-1 variant G236V
FPATLETQEQDVDLVQKYLEKYYNLKNDGRQVEKRRNSGPVVEKLKQMQEFFGLKVTGKPDAETLKVMKQPRCGVPDVAQFVLTEGNPRWEQTHLTYRIENYTPDLPRADVDHAIEKAFQLWSNVTPLTFTKVSEGQADIMISFVRGDHRDNSPFDGPGGNLAHAFQPGPGIGGDAHFDEDERWTNNFREYNLHRVAAHELGHSLGLSHSTDIGALMYPSYTFSGDVQLAQDDIDVIQAIYGRSQNPVQPIGPQTPKACDSKLTFDAITTIRGEVMFFKDRFYMRTNPFYPEVELNFISVFWPQLPNGLEAAYEFADRDEVRFFKGNKYWAVQGQNVLHGYPKDIYSSFGFPRTVKHIDAALSEENTGKTYFFVANKYWRYDEYKRSMDPGYPKMIAHDFPGIGHKVDAVFMKDGFFYFFHGTRQYKFDPKTKRILTLQKANSWFNCRKN

SEQ ID NO: 3057 - protein, 450 aa, Artificial Sequence
  MMP-1 variant G236L
FPATLETQEQDVDLVQKYLEKYYNLKNDGRQVEKRRNSGPVVEKLKQMQEFFGLKVTGKPDAETLKVMKQPRCGVPDVAQFVLTEGNPRWEQTHLTYRIENYTPDLPRADVDHAIEKAFQLWSNVTPLTFTKVSEGQADIMISFVRGDHRDNSPFDGPGGNLAHAFQPGPGIGGDAHFDEDERWTNNFREYNLHRVAAHELGHSLGLSHSTDIGALMYPSYTFSGDVQLAQDDIDLIQAIYGRSQNPVQPIGPQTPKACDSKLTFDAITTIRGEVMFFKDRFYMRTNPFYPEVELNFISVFWPQLPNGLEAAYEFADRDEVRFFKGNKYWAVQGQNVLHGYPKDIYSSFGFPRTVKHIDAALSEENTGKTYFFVANKYWRYDEYKRSMDPGYPKMIAHDFPGIGHKVDAVFMKDGFFYFFHGTRQYKFDPKTKRILTLQKANSWFNCRKN

SEQ ID NO: 3058 - protein, 450 aa, Artificial Sequence
  MMP-1 variant G236A
FPATLETQEQDVDLVQKYLEKYYNLKNDGRQVEKRRNSGPVVEKLKQMQEFFGLKVTGKPDAETLKVMKQPRCGVPDVAQFVLTEGNPRWEQTHLTYRIENYTPDLPRADVDHAIEKAFQLWSNVTPLTFTKVSEGQADIMISFVRGDHRDNSPFDGPGGNLAHAFQPGPGIGGDAHFDEDERWTNNFREYNLHRVAAHELGHSLGLSHSTDIGALMYPSYTFSGDVQLAQDDIDAIQAIYGRSQNPVQPIGPQTPKACDSKLTFDAITTIRGEVMFFKDRFYMRTNPFYPEVELNFISVFWPQLPNGLEAAYEFADRDEVRFFKGNKYWAVQGQNVLHGYPKDIYSSFGFPRTVKHIDAALSEENTGKTYFFVANKYWRYDEYKRSMDPGYPKMIAHDFPGIGHKVDAVFMKDGFFYFFHGTRQYKFDPKTKRILTLQKANSWFNCRKN

SEQ ID NO: 3059 - protein, 450 aa, Artificial Sequence
  MMP-1 variant G236P
FPATLETQEQDVDLVQKYLEKYYNLKNDGRQVEKRRNSGPVVEKLKQMQEFFGLKVTGKPDAETLKVMKQPRCGVPDVAQFVLTEGNPRWEQTHLTYRIENYTPDLPRADVDHAIEKAFQLWSNVTPLTFTKVSEGQADIMISFVRGDHRDNSPFDGPGGNLAHAFQPGPGIGGDAHFDEDERWTNNFREYNLHRVAAHELGHSLGLSHSTDIGALMYPSYTFSGDVQLAQDDIDPIQAIYGRSQNPVQPIGPQTPKACDSKLTFDAITTIRGEVMFFKDRFYMRTNPFYPEVELNFISVFWPQLPNGLEAAYEFADRDEVRFFKGNKYWAVQGQNVLHGYPKDIYSSFGFPRTVKHIDAALSEENTGKTYFFVANKYWRYDEYKRSMDPGYPKMIAHDFPGIGHKVDAVFMKDGFFYFFHGTRQYKFDPKTKRILTLQKANSWFNCRKN

SEQ ID NO: 3060 - protein, 450 aa, Artificial Sequence
  MMP-1 variant I237D
FPATLETQEQDVDLVQKYLEKYYNLKNDGRQVEKRRNSGPVVEKLKQMQEFFGLKVTGKPDAETLKVMKQPRCGVPDVAQFVLTEGNPRWEQTHLTYRIENYTPDLPRADVDHAIEKAFQLWSNVTPLTFTKVSEGQADIMISFVRGDHRDNSPFDGPGGNLAHAFQPGPGIGGDAHFDEDERWTNNFREYNLHRVAAHELGHSLGLSHSTDIGALMYPSYTFSGDVQLAQDDIDGDQAIYGRSQNPVQPIGPQTPKACDSKLTFDAITTIRGEVMFFKDRFYMRTNPFYPEVELNFISVFWPQLPNGLEAAYEFADRDEVRFFKGNKYWAVQGQNVLHGYPKDIYSSFGFPRTVKHIDAALSEENTGKTYFFVANKYWRYDEYKRSMDPGYPKMIAHDFPGIGHKVDAVFMKDGFFYFFHGTRQYKFDPKTKRILTLQKANSWFNCRKN

SEQ ID NO: 3061 - protein, 450 aa, Artificial Sequence
  MMP-1 variant I237E
FPATLETQEQDVDLVQKYLEKYYNLKNDGRQVEKRRNSGPVVEKLKQMQEFFGLKVTGKPDAETLKVMKQPRCGVPDVAQFVLTEGNPRWEQTHLTYRIENYTPDLPRADVDHAIEKAFQLWSNVTPLTFTKVSEGQADIMISFVRGDHRDNSPFDGPGGNLAHAFQPGPGIGGDAHFDEDERWTNNFREYNLHRVAAHELGHSLGLSHSTDIGALMYPSYTFSGDVQLAQDDIDGEQAIYGRSQNPVQPIGPQTPKACDSKLTFDAITTIRGEVMFFKDRFYMRTNPFYPEVELNFISVFWPQLPNGLEAAYEFADRDEVRFFKGNKYWAVQGQNVLHGYPKDIYSSFGFPRTVKHIDAALSEENTGKTYFFVANKYWRYDEYKRSMDPGYPKMIAHDFPGIGHKVDAVFMKDGFFYFFHGTRQYKFDPKTKRILTLQKANSWFNCRKN

SEQ ID NO: 3062 - protein, 450 aa, Artificial Sequence
  MMP-1 variant I237H
FPATLETQEQDVDLVQKYLEKYYNLKNDGRQVEKRRNSGPVVEKLKQMQEFFGLKVTGKPDAETLKVMKQPRCGVPDVAQFVLTEGNPRWEQTHLTYRIENYTPDLPRADVDHAIEKAFQLWSNVTPLTFTKVSEGQADIMISFVRGDHRDNSPFDGPGGNLAHAFQPGPGIGGDAHFDEDERWTNNFREYNLHRVAAHELGHSLGLSHSTDIGALMYPSYTFSGDVQLAQDDIDGHQAIYGRSQNPVQPIGPQTPKACDSKLTFDAITTIRGEVMFFKDRFYMRTNPFYPEVELNFISVFWPQLPNGLEAAYEFADRDEVRFFKGNKYWAVQGQNVLHGYPKDIYSSFGFPRTVKHIDAALSEENTGKTYFFVANKYWRYDEYKRSMDPGYPKMIAHDFPGIGHKVDAVFMKDGFFYFFHGTRQYKFDPKTKRILTLQKANSWFNCRKN

SEQ ID NO: 3063 - protein, 450 aa, Artificial Sequence
  MMP-1 variant I237K
FPATLETQEQDVDLVQKYLEKYYNLKNDGRQVEKRRNSGPVVEKLKQMQEFFGLKVTGKPDAETLKVMKQPRCGVPDVAQFVLTEGNPRWEQTHLTYRIENYTPDLPRADVDHAIEKAFQLWSNVTPLTFTKVSEGQADIMISFVRGDHRDNSPFDGPGGNLAHAFQPGPGIGGDAHFDEDERWTNNFREYNLHRVAAHELGHSLGLSHSTDIGALMYPSYTFSGDVQLAQDDIDGKQAIYGRSQNPVQPIGPQTPKACDSKLTFDAITTIRGEVMFFKDRFYMRTNPFYPEVELNFISVFWPQLPNGLEAAYEFADRDEVRFFKGNKYWAVQGQNVLHGYPKDIYSSFGFPRTVKHIDAALSEENTGKTYFFVANKYWRYDEYKRSMDPGYPKMIAHDFPGIGHKVDAVFMKDGFFYFFHGTRQYKFDPKTKRILTLQKANSWFNCRKN

SEQ ID NO: 3064 - protein, 450 aa, Artificial Sequence
  MMP-1 variant I237R
FPATLETQEQDVDLVQKYLEKYYNLKNDGRQVEKRRNSGPVVEKLKQMQEFFGLKVTGKPDAETLKVMKQPRCGVPDVAQFVLTEGNPRWEQTHLTYRIENYTPDLPRADVDHAIEKAFQLWSNVTPLTFTKVSEGQADIMISFVRGDHRDNSPFDGPGGNLAHAFQPGPGIGGDAHFDEDERWTNNFREYNLHRVAAHELGHSLGLSHSTDIGALMYPSYTFSGDVQLAQDDIDGRQAIYGRSQNPVQPIGPQTPKACDSKLTFDAITTIRGEVMFFKDRFYMRTNPFYPEVELNFISVFWPQLPNGLEAAYEFADRDEVRFFKGNKYWAVQGQNVLHGYPKDIYSSFGFPRTVKHIDAALSEENTGKTYFFVANKYWRYDEYKRSMDPGYPKMIAHDFPGIGHKVDAVFMKDGFFYFFHGTRQYKFDPKTKRILTLQKANSWFNCRKN

SEQ ID NO: 3065 - protein, 450 aa, Artificial Sequence
  MMP-1 variant I237C
FPATLETQEQDVDLVQKYLEKYYNLKNDGRQVEKRRNSGPVVEKLKQMQEFFGLKVTGKPDAETLKVMKQPRCGVPDVAQFVLTEGNPRWEQTHLTYRIENYTPDLPRADVDHAIEKAFQLWSNVTPLTFTKVSEGQADIMISFVRGDHRDNSPFDGPGGNLAHAFQPGPGIGGDAHFDEDERWTNNFREYNLHRVAAHELGHSLGLSHSTDIGALMYPSYTFSGDVQLAQDDIDGCQAIYGRSQNPVQPIGPQTPKACDSKLTFDAITTIRGEVMFFKDRFYMRTNPFYPEVELNFISVFWPQLPNGLEAAYEFADRDEVRFFKGNKYWAVQGQNVLHGYPKDIYSSFGFPRTVKHIDAALSEENTGKTYFFVANKYWRYDEYKRSMDPGYPKMIAHDFPGIGHKVDAVFMKDGFFYFFHGTRQYKFDPKTKRILTLQKANSWFNCRKN

SEQ ID NO: 3066 - protein, 450 aa, Artificial Sequence
  MMP-1 variant I237N
FPATLETQEQDVDLVQKYLEKYYNLKNDGRQVEKRRNSGPVVEKLKQMQEFFGLKVTGKPDAETLKVMKQPRCGVPDVAQFVLTEGNPRWEQTHLTYRIENYTPDLPRADVDHAIEKAFQLWSNVTPLTFTKVSEGQADIMISFVRGDHRDNSPFDGPGGNLAHAFQPGPGIGGDAHFDEDERWTNNFREYNLHRVAAHELGHSLGLSHSTDIGALMYPSYTFSGDVQLAQDDIDGNQAIYGRSQNPVQPIGPQTPKACDSKLTFDAITTIRGEVMFFKDRFYMRTNPFYPEVELNFISVFWPQLPNGLEAAYEFADRDEVRFFKGNKYWAVQGQNVLHGYPKDIYSSFGFPRTVKHIDAALSEENTGKTYFFVANKYWRYDEYKRSMDPGYPKMIAHDFPGIGHKVDAVFMKDGFFYFFHGTRQYKFDPKTKRILTLQKANSWFNCRKN

SEQ ID NO: 3067 - protein, 450 aa, Artificial Sequence
  MMP-1 variant I237Q
FPATLETQEQDVDLVQKYLEKYYNLKNDGRQVEKRRNSGPVVEKLKQMQEFFGLKVTGKPDAETLKVMKQPRCGVPDVAQFVLTEGNPRWEQTHLTYRIENYTPDLPRADVDHAIEKAFQLWSNVTPLTFTKVSEGQADIMISFVRGDHRDNSPFDGPGGNLAHAFQPGPGIGGDAHFDEDERWTNNFREYNLHRVAAHELGHSLGLSHSTDIGALMYPSYTFSGDVQLAQDDIDGQQAIYGRSQNPVQPIGPQTPKACDSKLTFDAITTIRGEVMFFKDRFYMRTNPFYPEVELNFISVFWPQLPNGLEAAYEFADRDEVRFFKGNKYWAVQGQNVLHGYPKDIYSSFGFPRTVKHIDAALSEENTGKTYFFVANKYWRYDEYKRSMDPGYPKMIAHDFPGIGHKVDAVFMKDGFFYFFHGTRQYKFDPKTKRILTLQKANSWFNCRKN

SEQ ID NO: 3068 - protein, 450 aa, Artificial Sequence
  MMP-1 variant I237T
FPATLETQEQDVDLVQKYLEKYYNLKNDGRQVEKRRNSGPVVEKLKQMQEFFGLKVTGKPDAETLKVMKQPRCGVPDVAQFVLTEGNPRWEQTHLTYRIENYTPDLPRADVDHAIEKAFQLWSNVTPLTFTKVSEGQADIMISFVRGDHRDNSPFDGPGGNLAHAFQPGPGIGGDAHFDEDERWTNNFREYNLHRVAAHELGHSLGLSHSTDIGALMYPSYTFSGDVQLAQDDIDGTQAIYGRSQNPVQPIGPQTPKACDSKLTFDAITTIRGEVMFFKDRFYMRTNPFYPEVELNFISVFWPQLPNGLEAAYEFADRDEVRFFKGNKYWAVQGQNVLHGYPKDIYSSFGFPRTVKHIDAALSEENTGKTYFFVANKYWRYDEYKRSMDPGYPKMIAHDFPGIGHKVDAVFMKDGFFYFFHGTRQYKFDPKTKRILTLQKANSWFNCRKN

SEQ ID NO: 3069 - protein, 450 aa, Artificial Sequence
  MMP-1 variant I237Y
FPATLETQEQDVDLVQKYLEKYYNLKNDGRQVEKRRNSGPVVEKLKQMQEFFGLKVTGKPDAETLKVMKQPRCGVPDVAQFVLTEGNPRWEQTHLTYRIENYTPDLPRADVDHAIEKAFQLWSNVTPLTFTKVSEGQADIMISFVRGDHRDNSPFDGPGGNLAHAFQPGPGIGGDAHFDEDERWTNNFREYNLHRVAAHELGHSLGLSHSTDIGALMYPSYTFSGDVQLAQDDIDGYQAIYGRSQNPVQPIGPQTPKACDSKLTFDAITTIRGEVMFFKDRFYMRTNPFYPEVELNFISVFWPQLPNGLEAAYEFADRDEVRFFKGNKYWAVQGQNVLHGYPKDIYSSFGFPRTVKHIDAALSEENTGKTYFFVANKYWRYDEYKRSMDPGYPKMIAHDFPGIGHKVDAVFMKDGFFYFFHGTRQYKFDPKTKRILTLQKANSWFNCRKN

SEQ ID NO: 3070 - protein, 450 aa, Artificial Sequence
  MMP-1 variant I237S
FPATLETQEQDVDLVQKYLEKYYNLKNDGRQVEKRRNSGPVVEKLKQMQEFFGLKVTGKPDAETLKVMKQPRCGVPDVAQFVLTEGNPRWEQTHLTYRIENYTPDLPRADVDHAIEKAFQLWSNVTPLTFTKVSEGQADIMISFVRGDHRDNSPFDGPGGNLAHAFQPGPGIGGDAHFDEDERWTNNFREYNLHRVAAHELGHSLGLSHSTDIGALMYPSYTFSGDVQLAQDDIDGSQAIYGRSQNPVQPIGPQTPKACDSKLTFDAITTIRGEVMFFKDRFYMRTNPFYPEVELNFISVFWPQLPNGLEAAYEFADRDEVRFFKGNKYWAVQGQNVLHGYPKDIYSSFGFPRTVKHIDAALSEENTGKTYFFVANKYWRYDEYKRSMDPGYPKMIAHDFPGIGHKVDAVFMKDGFFYFFHGTRQYKFDPKTKRILTLQKANSWFNCRKN

SEQ ID NO: 3071 - protein, 450 aa, Artificial Sequence
  MMP-1 variant I237G
FPATLETQEQDVDLVQKYLEKYYNLKNDGRQVEKRRNSGPVVEKLKQMQEFFGLKVTGKPDAETLKVMKQPRCGVPDVAQFVLTEGNPRWEQTHLTYRIENYTPDLPRADVDHAIEKAFQLWSNVTPLTFTKVSEGQADIMISFVRGDHRDNSPFDGPGGNLAHAFQPGPGIGGDAHFDEDERWTNNFREYNLHRVAAHELGHSLGLSHSTDIGALMYPSYTFSGDVQLAQDDIDGGQAIYGRSQNPVQPIGPQTPKACDSKLTFDAITTIRGEVMFFKDRFYMRTNPFYPEVELNFISVFWPQLPNGLEAAYEFADRDEVRFFKGNKYWAVQGQNVLHGYPKDIYSSFGFPRTVKHIDAALSEENTGKTYFFVANKYWRYDEYKRSMDPGYPKMIAHDFPGIGHKVDAVFMKDGFFYFFHGTRQYKFDPKTKRILTLQKANSWFNCRKN

SEQ ID NO: 3072 - protein, 450 aa, Artificial Sequence
  MMP-1 variant I237F
FPATLETQEQDVDLVQKYLEKYYNLKNDGRQVEKRRNSGPVVEKLKQMQEFFGLKVTGKPDAETLKVMKQPRCGVPDVAQFVLTEGNPRWEQTHLTYRIENYTPDLPRADVDHAIEKAFQLWSNVTPLTFTKVSEGQADIMISFVRGDHRDNSPFDGPGGNLAHAFQPGPGIGGDAHFDEDERWTNNFREYNLHRVAAHELGHSLGLSHSTDIGALMYPSYTFSGDVQLAQDDIDGFQAIYGRSQNPVQPIGPQTPKACDSKLTFDAITTIRGEVMFFKDRFYMRTNPFYPEVELNFISVFWPQLPNGLEAAYEFADRDEVRFFKGNKYWAVQGQNVLHGYPKDIYSSFGFPRTVKHIDAALSEENTGKTYFFVANKYWRYDEYKRSMDPGYPKMIAHDFPGIGHKVDAVFMKDGFFYFFHGTRQYKFDPKTKRILTLQKANSWFNCRKN

SEQ ID NO: 3073 - protein, 450 aa, Artificial Sequence
  MMP-1 variant I237M
FPATLETQEQDVDLVQKYLEKYYNLKNDGRQVEKRRNSGPVVEKLKQMQEFFGLKVTGKPDAETLKVMKQPRCGVPDVAQFVLTEGNPRWEQTHLTYRIENYTPDLPRADVDHAIEKAFQLWSNVTPLTFTKVSEGQADIMISFVRGDHRDNSPFDGPGGNLAHAFQPGPGIGGDAHFDEDERWTNNFREYNLHRVAAHELGHSLGLSHSTDIGALMYPSYTFSGDVQLAQDDIDGMQAIYGRSQNPVQPIGPQTPKACDSKLTFDAITTIRGEVMFFKDRFYMRTNPFYPEVELNFISVFWPQLPNGLEAAYEFADRDEVRFFKGNKYWAVQGQNVLHGYPKDIYSSFGFPRTVKHIDAALSEENTGKTYFFVANKYWRYDEYKRSMDPGYPKMIAHDFPGIGHKVDAVFMKDGFFYFFHGTRQYKFDPKTKRILTLQKANSWFNCRKN

SEQ ID NO: 3074 - protein, 450 aa, Artificial Sequence
  MMP-1 variant I237W
FPATLETQEQDVDLVQKYLEKYYNLKNDGRQVEKRRNSGPVVEKLKQMQEFFGLKVTGKPDAETLKVMKQPRCGVPDVAQFVLTEGNPRWEQTHLTYRIENYTPDLPRADVDHAIEKAFQLWSNVTPLTFTKVSEGQADIMISFVRGDHRDNSPFDGPGGNLAHAFQPGPGIGGDAHFDEDERWTNNFREYNLHRVAAHELGHSLGLSHSTDIGALMYPSYTFSGDVQLAQDDIDGWQAIYGRSQNPVQPIGPQTPKACDSKLTFDAITTIRGEVMFFKDRFYMRTNPFYPEVELNFISVFWPQLPNGLEAAYEFADRDEVRFFKGNKYWAVQGQNVLHGYPKDIYSSFGFPRTVKHIDAALSEENTGKTYFFVANKYWRYDEYKRSMDPGYPKMIAHDFPGIGHKVDAVFMKDGFFYFFHGTRQYKFDPKTKRILTLQKANSWFNCRKN

SEQ ID NO: 3075 - protein, 450 aa, Artificial Sequence
  MMP-1 variant I237V
FPATLETQEQDVDLVQKYLEKYYNLKNDGRQVEKRRNSGPVVEKLKQMQEFFGLKVTGKPDAETLKVMKQPRCGVPDVAQFVLTEGNPRWEQTHLTYRIENYTPDLPRADVDHAIEKAFQLWSNVTPLTFTKVSEGQADIMISFVRGDHRDNSPFDGPGGNLAHAFQPGPGIGGDAHFDEDERWTNNFREYNLHRVAAHELGHSLGLSHSTDIGALMYPSYTFSGDVQLAQDDIDGVQAIYGRSQNPVQPIGPQTPKACDSKLTFDAITTIRGEVMFFKDRFYMRTNPFYPEVELNFISVFWPQLPNGLEAAYEFADRDEVRFFKGNKYWAVQGQNVLHGYPKDIYSSFGFPRTVKHIDAALSEENTGKTYFFVANKYWRYDEYKRSMDPGYPKMIAHDFPGIGHKVDAVFMKDGFFYFFHGTRQYKFDPKTKRILTLQKANSWFNCRKN

SEQ ID NO: 3076 - protein, 450 aa, Artificial Sequence
  MMP-1 variant I237L
FPATLETQEQDVDLVQKYLEKYYNLKNDGRQVEKRRNSGPVVEKLKQMQEFFGLKVTGKPDAETLKVMKQPRCGVPDVAQFVLTEGNPRWEQTHLTYRIENYTPDLPRADVDHAIEKAFQLWSNVTPLTFTKVSEGQADIMISFVRGDHRDNSPFDGPGGNLAHAFQPGPGIGGDAHFDEDERWTNNFREYNLHRVAAHELGHSLGLSHSTDIGALMYPSYTFSGDVQLAQDDIDGLQAIYGRSQNPVQPIGPQTPKACDSKLTFDAITTIRGEVMFFKDRFYMRTNPFYPEVELNFISVFWPQLPNGLEAAYEFADRDEVRFFKGNKYWAVQGQNVLHGYPKDIYSSFGFPRTVKHIDAALSEENTGKTYFFVANKYWRYDEYKRSMDPGYPKMIAHDFPGIGHKVDAVFMKDGFFYFFHGTRQYKFDPKTKRILTLQKANSWFNCRKN

SEQ ID NO: 3077 - protein, 450 aa, Artificial Sequence
  MMP-1 variant I237A
FPATLETQEQDVDLVQKYLEKYYNLKNDGRQVEKRRNSGPVVEKLKQMQEFFGLKVTGKPDAETLKVMKQPRCGVPDVAQFVLTEGNPRWEQTHLTYRIENYTPDLPRADVDHAIEKAFQLWSNVTPLTFTKVSEGQADIMISFVRGDHRDNSPFDGPGGNLAHAFQPGPGIGGDAHFDEDERWTNNFREYNLHRVAAHELGHSLGLSHSTDIGALMYPSYTFSGDVQLAQDDIDGAQAIYGRSQNPVQPIGPQTPKACDSKLTFDAITTIRGEVMFFKDRFYMRTNPFYPEVELNFISVFWPQLPNGLEAAYEFADRDEVRFFKGNKYWAVQGQNVLHGYPKDIYSSFGFPRTVKHIDAALSEENTGKTYFFVANKYWRYDEYKRSMDPGYPKMIAHDFPGIGHKVDAVFMKDGFFYFFHGTRQYKFDPKTKRILTLQKANSWFNCRKN

SEQ ID NO: 3078 - protein, 450 aa, Artificial Sequence
  MMP-1 variant I237P
FPATLETQEQDVDLVQKYLEKYYNLKNDGRQVEKRRNSGPVVEKLKQMQEFFGLKVTGKPDAETLKVMKQPRCGVPDVAQFVLTEGNPRWEQTHLTYRIENYTPDLPRADVDHAIEKAFQLWSNVTPLTFTKVSEGQADIMISFVRGDHRDNSPFDGPGGNLAHAFQPGPGIGGDAHFDEDERWTNNFREYNLHRVAAHELGHSLGLSHSTDIGALMYPSYTFSGDVQLAQDDIDGPQAIYGRSQNPVQPIGPQTPKACDSKLTFDAITTIRGEVMFFKDRFYMRTNPFYPEVELNFISVFWPQLPNGLEAAYEFADRDEVRFFKGNKYWAVQGQNVLHGYPKDIYSSFGFPRTVKHIDAALSEENTGKTYFFVANKYWRYDEYKRSMDPGYPKMIAHDFPGIGHKVDAVFMKDGFFYFFHGTRQYKFDPKTKRILTLQKANSWFNCRKN

SEQ ID NO: 3079 - protein, 450 aa, Artificial Sequence
  MMP-1 variant Q238D
FPATLETQEQDVDLVQKYLEKYYNLKNDGRQVEKRRNSGPVVEKLKQMQEFFGLKVTGKPDAETLKVMKQPRCGVPDVAQFVLTEGNPRWEQTHLTYRIENYTPDLPRADVDHAIEKAFQLWSNVTPLTFTKVSEGQADIMISFVRGDHRDNSPFDGPGGNLAHAFQPGPGIGGDAHFDEDERWTNNFREYNLHRVAAHELGHSLGLSHSTDIGALMYPSYTFSGDVQLAQDDIDGIDAIYGRSQNPVQPIGPQTPKACDSKLTFDAITTIRGEVMFFKDRFYMRTNPFYPEVELNFISVFWPQLPNGLEAAYEFADRDEVRFFKGNKYWAVQGQNVLHGYPKDIYSSFGFPRTVKHIDAALSEENTGKTYFFVANKYWRYDEYKRSMDPGYPKMIAHDFPGIGHKVDAVFMKDGFFYFFHGTRQYKFDPKTKRILTLQKANSWFNCRKN

SEQ ID NO: 3080 - protein, 450 aa, Artificial Sequence
  MMP-1 variant Q238E
FPATLETQEQDVDLVQKYLEKYYNLKNDGRQVEKRRNSGPVVEKLKQMQEFFGLKVTGKPDAETLKVMKQPRCGVPDVAQFVLTEGNPRWEQTHLTYRIENYTPDLPRADVDHAIEKAFQLWSNVTPLTFTKVSEGQADIMISFVRGDHRDNSPFDGPGGNLAHAFQPGPGIGGDAHFDEDERWTNNFREYNLHRVAAHELGHSLGLSHSTDIGALMYPSYTFSGDVQLAQDDIDGIEAIYGRSQNPVQPIGPQTPKACDSKLTFDAITTIRGEVMFFKDRFYMRTNPFYPEVELNFISVFWPQLPNGLEAAYEFADRDEVRFFKGNKYWAVQGQNVLHGYPKDIYSSFGFPRTVKHIDAALSEENTGKTYFFVANKYWRYDEYKRSMDPGYPKMIAHDFPGIGHKVDAVFMKDGFFYFFHGTRQYKFDPKTKRILTLQKANSWFNCRKN

SEQ ID NO: 3081 - protein, 450 aa, Artificial Sequence
  MMP-1 variant Q238H
FPATLETQEQDVDLVQKYLEKYYNLKNDGRQVEKRRNSGPVVEKLKQMQEFFGLKVTGKPDAETLKVMKQPRCGVPDVAQFVLTEGNPRWEQTHLTYRIENYTPDLPRADVDHAIEKAFQLWSNVTPLTFTKVSEGQADIMISFVRGDHRDNSPFDGPGGNLAHAFQPGPGIGGDAHFDEDERWTNNFREYNLHRVAAHELGHSLGLSHSTDIGALMYPSYTFSGDVQLAQDDIDGIHAIYGRSQNPVQPIGPQTPKACDSKLTFDAITTIRGEVMFFKDRFYMRTNPFYPEVELNFISVFWPQLPNGLEAAYEFADRDEVRFFKGNKYWAVQGQNVLHGYPKDIYSSFGFPRTVKHIDAALSEENTGKTYFFVANKYWRYDEYKRSMDPGYPKMIAHDFPGIGHKVDAVFMKDGFFYFFHGTRQYKFDPKTKRILTLQKANSWFNCRKN

SEQ ID NO: 3082 - protein, 450 aa, Artificial Sequence
  MMP-1 variant Q238K
FPATLETQEQDVDLVQKYLEKYYNLKNDGRQVEKRRNSGPVVEKLKQMQEFFGLKVTGKPDAETLKVMKQPRCGVPDVAQFVLTEGNPRWEQTHLTYRIENYTPDLPRADVDHAIEKAFQLWSNVTPLTFTKVSEGQADIMISFVRGDHRDNSPFDGPGGNLAHAFQPGPGIGGDAHFDEDERWTNNFREYNLHRVAAHELGHSLGLSHSTDIGALMYPSYTFSGDVQLAQDDIDGIKAIYGRSQNPVQPIGPQTPKACDSKLTFDAITTIRGEVMFFKDRFYMRTNPFYPEVELNFISVFWPQLPNGLEAAYEFADRDEVRFFKGNKYWAVQGQNVLHGYPKDIYSSFGFPRTVKHIDAALSEENTGKTYFFVANKYWRYDEYKRSMDPGYPKMIAHDFPGIGHKVDAVFMKDGFFYFFHGTRQYKFDPKTKRILTLQKANSWFNCRKN

SEQ ID NO: 3083 - protein, 450 aa, Artificial Sequence
  MMP-1 variant Q238R
FPATLETQEQDVDLVQKYLEKYYNLKNDGRQVEKRRNSGPVVEKLKQMQEFFGLKVTGKPDAETLKVMKQPRCGVPDVAQFVLTEGNPRWEQTHLTYRIENYTPDLPRADVDHAIEKAFQLWSNVTPLTFTKVSEGQADIMISFVRGDHRDNSPFDGPGGNLAHAFQPGPGIGGDAHFDEDERWTNNFREYNLHRVAAHELGHSLGLSHSTDIGALMYPSYTFSGDVQLAQDDIDGIRAIYGRSQNPVQPIGPQTPKACDSKLTFDAITTIRGEVMFFKDRFYMRTNPFYPEVELNFISVFWPQLPNGLEAAYEFADRDEVRFFKGNKYWAVQGQNVLHGYPKDIYSSFGFPRTVKHIDAALSEENTGKTYFFVANKYWRYDEYKRSMDPGYPKMIAHDFPGIGHKVDAVFMKDGFFYFFHGTRQYKFDPKTKRILTLQKANSWFNCRKN

SEQ ID NO: 3084 - protein, 450 aa, Artificial Sequence
  MMP-1 variant Q238C
FPATLETQEQDVDLVQKYLEKYYNLKNDGRQVEKRRNSGPVVEKLKQMQEFFGLKVTGKPDAETLKVMKQPRCGVPDVAQFVLTEGNPRWEQTHLTYRIENYTPDLPRADVDHAIEKAFQLWSNVTPLTFTKVSEGQADIMISFVRGDHRDNSPFDGPGGNLAHAFQPGPGIGGDAHFDEDERWTNNFREYNLHRVAAHELGHSLGLSHSTDIGALMYPSYTFSGDVQLAQDDIDGICAIYGRSQNPVQPIGPQTPKACDSKLTFDAITTIRGEVMFFKDRFYMRTNPFYPEVELNFISVFWPQLPNGLEAAYEFADRDEVRFFKGNKYWAVQGQNVLHGYPKDIYSSFGFPRTVKHIDAALSEENTGKTYFFVANKYWRYDEYKRSMDPGYPKMIAHDFPGIGHKVDAVFMKDGFFYFFHGTRQYKFDPKTKRILTLQKANSWFNCRKN

SEQ ID NO: 3085 - protein, 450 aa, Artificial Sequence
  MMP-1 variant Q238N
FPATLETQEQDVDLVQKYLEKYYNLKNDGRQVEKRRNSGPVVEKLKQMQEFFGLKVTGKPDAETLKVMKQPRCGVPDVAQFVLTEGNPRWEQTHLTYRIENYTPDLPRADVDHAIEKAFQLWSNVTPLTFTKVSEGQADIMISFVRGDHRDNSPFDGPGGNLAHAFQPGPGIGGDAHFDEDERWTNNFREYNLHRVAAHELGHSLGLSHSTDIGALMYPSYTFSGDVQLAQDDIDGINAIYGRSQNPVQPIGPQTPKACDSKLTFDAITTIRGEVMFFKDRFYMRTNPFYPEVELNFISVFWPQLPNGLEAAYEFADRDEVRFFKGNKYWAVQGQNVLHGYPKDIYSSFGFPRTVKHIDAALSEENTGKTYFFVANKYWRYDEYKRSMDPGYPKMIAHDFPGIGHKVDAVFMKDGFFYFFHGTRQYKFDPKTKRILTLQKANSWFNCRKN

SEQ ID NO: 3086 - protein, 450 aa, Artificial Sequence
  MMP-1 variant Q238T
FPATLETQEQDVDLVQKYLEKYYNLKNDGRQVEKRRNSGPVVEKLKQMQEFFGLKVTGKPDAETLKVMKQPRCGVPDVAQFVLTEGNPRWEQTHLTYRIENYTPDLPRADVDHAIEKAFQLWSNVTPLTFTKVSEGQADIMISFVRGDHRDNSPFDGPGGNLAHAFQPGPGIGGDAHFDEDERWTNNFREYNLHRVAAHELGHSLGLSHSTDIGALMYPSYTFSGDVQLAQDDIDGITAIYGRSQNPVQPIGPQTPKACDSKLTFDAITTIRGEVMFFKDRFYMRTNPFYPEVELNFISVFWPQLPNGLEAAYEFADRDEVRFFKGNKYWAVQGQNVLHGYPKDIYSSFGFPRTVKHIDAALSEENTGKTYFFVANKYWRYDEYKRSMDPGYPKMIAHDFPGIGHKVDAVFMKDGFFYFFHGTRQYKFDPKTKRILTLQKANSWFNCRKN

SEQ ID NO: 3087 - protein, 450 aa, Artificial Sequence
  MMP-1 variant Q238Y
FPATLETQEQDVDLVQKYLEKYYNLKNDGRQVEKRRNSGPVVEKLKQMQEFFGLKVTGKPDAETLKVMKQPRCGVPDVAQFVLTEGNPRWEQTHLTYRIENYTPDLPRADVDHAIEKAFQLWSNVTPLTFTKVSEGQADIMISFVRGDHRDNSPFDGPGGNLAHAFQPGPGIGGDAHFDEDERWTNNFREYNLHRVAAHELGHSLGLSHSTDIGALMYPSYTFSGDVQLAQDDIDGIYAIYGRSQNPVQPIGPQTPKACDSKLTFDAITTIRGEVMFFKDRFYMRTNPFYPEVELNFISVFWPQLPNGLEAAYEFADRDEVRFFKGNKYWAVQGQNVLHGYPKDIYSSFGFPRTVKHIDAALSEENTGKTYFFVANKYWRYDEYKRSMDPGYPKMIAHDFPGIGHKVDAVFMKDGFFYFFHGTRQYKFDPKTKRILTLQKANSWFNCRKN

SEQ ID NO: 3088 - protein, 450 aa, Artificial Sequence
  MMP-1 variant Q238S
FPATLETQEQDVDLVQKYLEKYYNLKNDGRQVEKRRNSGPVVEKLKQMQEFFGLKVTGKPDAETLKVMKQPRCGVPDVAQFVLTEGNPRWEQTHLTYRIENYTPDLPRADVDHAIEKAFQLWSNVTPLTFTKVSEGQADIMISFVRGDHRDNSPFDGPGGNLAHAFQPGPGIGGDAHFDEDERWTNNFREYNLHRVAAHELGHSLGLSHSTDIGALMYPSYTFSGDVQLAQDDIDGISAIYGRSQNPVQPIGPQTPKACDSKLTFDAITTIRGEVMFFKDRFYMRTNPFYPEVELNFISVFWPQLPNGLEAAYEFADRDEVRFFKGNKYWAVQGQNVLHGYPKDIYSSFGFPRTVKHIDAALSEENTGKTYFFVANKYWRYDEYKRSMDPGYPKMIAHDFPGIGHKVDAVFMKDGFFYFFHGTRQYKFDPKTKRILTLQKANSWFNCRKN

SEQ ID NO: 3089 - protein, 450 aa, Artificial Sequence
  MMP-1 variant Q238G
FPATLETQEQDVDLVQKYLEKYYNLKNDGRQVEKRRNSGPVVEKLKQMQEFFGLKVTGKPDAETLKVMKQPRCGVPDVAQFVLTEGNPRWEQTHLTYRIENYTPDLPRADVDHAIEKAFQLWSNVTPLTFTKVSEGQADIMISFVRGDHRDNSPFDGPGGNLAHAFQPGPGIGGDAHFDEDERWTNNFREYNLHRVAAHELGHSLGLSHSTDIGALMYPSYTFSGDVQLAQDDIDGIGAIYGRSQNPVQPIGPQTPKACDSKLTFDAITTIRGEVMFFKDRFYMRTNPFYPEVELNFISVFWPQLPNGLEAAYEFADRDEVRFFKGNKYWAVQGQNVLHGYPKDIYSSFGFPRTVKHIDAALSEENTGKTYFFVANKYWRYDEYKRSMDPGYPKMIAHDFPGIGHKVDAVFMKDGFFYFFHGTRQYKFDPKTKRILTLQKANSWFNCRKN

SEQ ID NO: 3090 - protein, 450 aa, Artificial Sequence
  MMP-1 variant Q238F
FPATLETQEQDVDLVQKYLEKYYNLKNDGRQVEKRRNSGPVVEKLKQMQEFFGLKVTGKPDAETLKVMKQPRCGVPDVAQFVLTEGNPRWEQTHLTYRIENYTPDLPRADVDHAIEKAFQLWSNVTPLTFTKVSEGQADIMISFVRGDHRDNSPFDGPGGNLAHAFQPGPGIGGDAHFDEDERWTNNFREYNLHRVAAHELGHSLGLSHSTDIGALMYPSYTFSGDVQLAQDDIDGIFAIYGRSQNPVQPIGPQTPKACDSKLTFDAITTIRGEVMFFKDRFYMRTNPFYPEVELNFISVFWPQLPNGLEAAYEFADRDEVRFFKGNKYWAVQGQNVLHGYPKDIYSSFGFPRTVKHIDAALSEENTGKTYFFVANKYWRYDEYKRSMDPGYPKMIAHDFPGIGHKVDAVFMKDGFFYFFHGTRQYKFDPKTKRILTLQKANSWFNCRKN

SEQ ID NO: 3091 - protein, 450 aa, Artificial Sequence
  MMP-1 variant Q238M
FPATLETQEQDVDLVQKYLEKYYNLKNDGRQVEKRRNSGPVVEKLKQMQEFFGLKVTGKPDAETLKVMKQPRCGVPDVAQFVLTEGNPRWEQTHLTYRIENYTPDLPRADVDHAIEKAFQLWSNVTPLTFTKVSEGQADIMISFVRGDHRDNSPFDGPGGNLAHAFQPGPGIGGDAHFDEDERWTNNFREYNLHRVAAHELGHSLGLSHSTDIGALMYPSYTFSGDVQLAQDDIDGIMAIYGRSQNPVQPIGPQTPKACDSKLTFDAITTIRGEVMFFKDRFYMRTNPFYPEVELNFISVFWPQLPNGLEAAYEFADRDEVRFFKGNKYWAVQGQNVLHGYPKDIYSSFGFPRTVKHIDAALSEENTGKTYFFVANKYWRYDEYKRSMDPGYPKMIAHDFPGIGHKVDAVFMKDGFFYFFHGTRQYKFDPKTKRILTLQKANSWFNCRKN

SEQ ID NO: 3092 - protein, 450 aa, Artificial Sequence
  MMP-1 variant Q238W
FPATLETQEQDVDLVQKYLEKYYNLKNDGRQVEKRRNSGPVVEKLKQMQEFFGLKVTGKPDAETLKVMKQPRCGVPDVAQFVLTEGNPRWEQTHLTYRIENYTPDLPRADVDHAIEKAFQLWSNVTPLTFTKVSEGQADIMISFVRGDHRDNSPFDGPGGNLAHAFQPGPGIGGDAHFDEDERWTNNFREYNLHRVAAHELGHSLGLSHSTDIGALMYPSYTFSGDVQLAQDDIDGIWAIYGRSQNPVQPIGPQTPKACDSKLTFDAITTIRGEVMFFKDRFYMRTNPFYPEVELNFISVFWPQLPNGLEAAYEFADRDEVRFFKGNKYWAVQGQNVLHGYPKDIYSSFGFPRTVKHIDAALSEENTGKTYFFVANKYWRYDEYKRSMDPGYPKMIAHDFPGIGHKVDAVFMKDGFFYFFHGTRQYKFDPKTKRILTLQKANSWFNCRKN

SEQ ID NO: 3093 - protein, 450 aa, Artificial Sequence
  MMP-1 variant Q238I
FPATLETQEQDVDLVQKYLEKYYNLKNDGRQVEKRRNSGPVVEKLKQMQEFFGLKVTGKPDAETLKVMKQPRCGVPDVAQFVLTEGNPRWEQTHLTYRIENYTPDLPRADVDHAIEKAFQLWSNVTPLTFTKVSEGQADIMISFVRGDHRDNSPFDGPGGNLAHAFQPGPGIGGDAHFDEDERWTNNFREYNLHRVAAHELGHSLGLSHSTDIGALMYPSYTFSGDVQLAQDDIDGIIAIYGRSQNPVQPIGPQTPKACDSKLTFDAITTIRGEVMFFKDRFYMRTNPFYPEVELNFISVFWPQLPNGLEAAYEFADRDEVRFFKGNKYWAVQGQNVLHGYPKDIYSSFGFPRTVKHIDAALSEENTGKTYFFVANKYWRYDEYKRSMDPGYPKMIAHDFPGIGHKVDAVFMKDGFFYFFHGTRQYKFDPKTKRILTLQKANSWFNCRKN

SEQ ID NO: 3094 - protein, 450 aa, Artificial Sequence
  MMP-1 variant Q238V
FPATLETQEQDVDLVQKYLEKYYNLKNDGRQVEKRRNSGPVVEKLKQMQEFFGLKVTGKPDAETLKVMKQPRCGVPDVAQFVLTEGNPRWEQTHLTYRIENYTPDLPRADVDHAIEKAFQLWSNVTPLTFTKVSEGQADIMISFVRGDHRDNSPFDGPGGNLAHAFQPGPGIGGDAHFDEDERWTNNFREYNLHRVAAHELGHSLGLSHSTDIGALMYPSYTFSGDVQLAQDDIDGIVAIYGRSQNPVQPIGPQTPKACDSKLTFDAITTIRGEVMFFKDRFYMRTNPFYPEVELNFISVFWPQLPNGLEAAYEFADRDEVRFFKGNKYWAVQGQNVLHGYPKDIYSSFGFPRTVKHIDAALSEENTGKTYFFVANKYWRYDEYKRSMDPGYPKMIAHDFPGIGHKVDAVFMKDGFFYFFHGTRQYKFDPKTKRILTLQKANSWFNCRKN

SEQ ID NO: 3095 - protein, 450 aa, Artificial Sequence
  MMP-1 variant Q238L
FPATLETQEQDVDLVQKYLEKYYNLKNDGRQVEKRRNSGPVVEKLKQMQEFFGLKVTGKPDAETLKVMKQPRCGVPDVAQFVLTEGNPRWEQTHLTYRIENYTPDLPRADVDHAIEKAFQLWSNVTPLTFTKVSEGQADIMISFVRGDHRDNSPFDGPGGNLAHAFQPGPGIGGDAHFDEDERWTNNFREYNLHRVAAHELGHSLGLSHSTDIGALMYPSYTFSGDVQLAQDDIDGILAIYGRSQNPVQPIGPQTPKACDSKLTFDAITTIRGEVMFFKDRFYMRTNPFYPEVELNFISVFWPQLPNGLEAAYEFADRDEVRFFKGNKYWAVQGQNVLHGYPKDIYSSFGFPRTVKHIDAALSEENTGKTYFFVANKYWRYDEYKRSMDPGYPKMIAHDFPGIGHKVDAVFMKDGFFYFFHGTRQYKFDPKTKRILTLQKANSWFNCRKN

SEQ ID NO: 3096 - protein, 450 aa, Artificial Sequence
  MMP-1 variant Q238A
FPATLETQEQDVDLVQKYLEKYYNLKNDGRQVEKRRNSGPVVEKLKQMQEFFGLKVTGKPDAETLKVMKQPRCGVPDVAQFVLTEGNPRWEQTHLTYRIENYTPDLPRADVDHAIEKAFQLWSNVTPLTFTKVSEGQADIMISFVRGDHRDNSPFDGPGGNLAHAFQPGPGIGGDAHFDEDERWTNNFREYNLHRVAAHELGHSLGLSHSTDIGALMYPSYTFSGDVQLAQDDIDGIAAIYGRSQNPVQPIGPQTPKACDSKLTFDAITTIRGEVMFFKDRFYMRTNPFYPEVELNFISVFWPQLPNGLEAAYEFADRDEVRFFKGNKYWAVQGQNVLHGYPKDIYSSFGFPRTVKHIDAALSEENTGKTYFFVANKYWRYDEYKRSMDPGYPKMIAHDFPGIGHKVDAVFMKDGFFYFFHGTRQYKFDPKTKRILTLQKANSWFNCRKN

SEQ ID NO: 3097 - protein, 450 aa, Artificial Sequence
  MMP-1 variant Q238P
FPATLETQEQDVDLVQKYLEKYYNLKNDGRQVEKRRNSGPVVEKLKQMQEFFGLKVTGKPDAETLKVMKQPRCGVPDVAQFVLTEGNPRWEQTHLTYRIENYTPDLPRADVDHAIEKAFQLWSNVTPLTFTKVSEGQADIMISFVRGDHRDNSPFDGPGGNLAHAFQPGPGIGGDAHFDEDERWTNNFREYNLHRVAAHELGHSLGLSHSTDIGALMYPSYTFSGDVQLAQDDIDGIPAIYGRSQNPVQPIGPQTPKACDSKLTFDAITTIRGEVMFFKDRFYMRTNPFYPEVELNFISVFWPQLPNGLEAAYEFADRDEVRFFKGNKYWAVQGQNVLHGYPKDIYSSFGFPRTVKHIDAALSEENTGKTYFFVANKYWRYDEYKRSMDPGYPKMIAHDFPGIGHKVDAVFMKDGFFYFFHGTRQYKFDPKTKRILTLQKANSWFNCRKN

SEQ ID NO: 3098 - protein, 450 aa, Artificial Sequence
  MMP-1 variant A239D
FPATLETQEQDVDLVQKYLEKYYNLKNDGRQVEKRRNSGPVVEKLKQMQEFFGLKVTGKPDAETLKVMKQPRCGVPDVAQFVLTEGNPRWEQTHLTYRIENYTPDLPRADVDHAIEKAFQLWSNVTPLTFTKVSEGQADIMISFVRGDHRDNSPFDGPGGNLAHAFQPGPGIGGDAHFDEDERWTNNFREYNLHRVAAHELGHSLGLSHSTDIGALMYPSYTFSGDVQLAQDDIDGIQDIYGRSQNPVQPIGPQTPKACDSKLTFDAITTIRGEVMFFKDRFYMRTNPFYPEVELNFISVFWPQLPNGLEAAYEFADRDEVRFFKGNKYWAVQGQNVLHGYPKDIYSSFGFPRTVKHIDAALSEENTGKTYFFVANKYWRYDEYKRSMDPGYPKMIAHDFPGIGHKVDAVFMKDGFFYFFHGTRQYKFDPKTKRILTLQKANSWFNCRKN

SEQ ID NO: 3099 - protein, 450 aa, Artificial Sequence
  MMP-1 variant A239E
FPATLETQEQDVDLVQKYLEKYYNLKNDGRQVEKRRNSGPVVEKLKQMQEFFGLKVTGKPDAETLKVMKQPRCGVPDVAQFVLTEGNPRWEQTHLTYRIENYTPDLPRADVDHAIEKAFQLWSNVTPLTFTKVSEGQADIMISFVRGDHRDNSPFDGPGGNLAHAFQPGPGIGGDAHFDEDERWTNNFREYNLHRVAAHELGHSLGLSHSTDIGALMYPSYTFSGDVQLAQDDIDGIQEIYGRSQNPVQPIGPQTPKACDSKLTFDAITTIRGEVMFFKDRFYMRTNPFYPEVELNFISVFWPQLPNGLEAAYEFADRDEVRFFKGNKYWAVQGQNVLHGYPKDIYSSFGFPRTVKHIDAALSEENTGKTYFFVANKYWRYDEYKRSMDPGYPKMIAHDFPGIGHKVDAVFMKDGFFYFFHGTRQYKFDPKTKRILTLQKANSWFNCRKN

SEQ ID NO: 3100 - protein, 450 aa, Artificial Sequence
  MMP-1 variant A239H
FPATLETQEQDVDLVQKYLEKYYNLKNDGRQVEKRRNSGPVVEKLKQMQEFFGLKVTGKPDAETLKVMKQPRCGVPDVAQFVLTEGNPRWEQTHLTYRIENYTPDLPRADVDHAIEKAFQLWSNVTPLTFTKVSEGQADIMISFVRGDHRDNSPFDGPGGNLAHAFQPGPGIGGDAHFDEDERWTNNFREYNLHRVAAHELGHSLGLSHSTDIGALMYPSYTFSGDVQLAQDDIDGIQHIYGRSQNPVQPIGPQTPKACDSKLTFDAITTIRGEVMFFKDRFYMRTNPFYPEVELNFISVFWPQLPNGLEAAYEFADRDEVRFFKGNKYWAVQGQNVLHGYPKDIYSSFGFPRTVKHIDAALSEENTGKTYFFVANKYWRYDEYKRSMDPGYPKMIAHDFPGIGHKVDAVFMKDGFFYFFHGTRQYKFDPKTKRILTLQKANSWFNCRKN

SEQ ID NO: 3101 - protein, 450 aa, Artificial Sequence
  MMP-1 variant A239K
FPATLETQEQDVDLVQKYLEKYYNLKNDGRQVEKRRNSGPVVEKLKQMQEFFGLKVTGKPDAETLKVMKQPRCGVPDVAQFVLTEGNPRWEQTHLTYRIENYTPDLPRADVDHAIEKAFQLWSNVTPLTFTKVSEGQADIMISFVRGDHRDNSPFDGPGGNLAHAFQPGPGIGGDAHFDEDERWTNNFREYNLHRVAAHELGHSLGLSHSTDIGALMYPSYTFSGDVQLAQDDIDGIQKIYGRSQNPVQPIGPQTPKACDSKLTFDAITTIRGEVMFFKDRFYMRTNPFYPEVELNFISVFWPQLPNGLEAAYEFADRDEVRFFKGNKYWAVQGQNVLHGYPKDIYSSFGFPRTVKHIDAALSEENTGKTYFFVANKYWRYDEYKRSMDPGYPKMIAHDFPGIGHKVDAVFMKDGFFYFFHGTRQYKFDPKTKRILTLQKANSWFNCRKN

SEQ ID NO: 3102 - protein, 450 aa, Artificial Sequence
  MMP-1 variant A239R
FPATLETQEQDVDLVQKYLEKYYNLKNDGRQVEKRRNSGPVVEKLKQMQEFFGLKVTGKPDAETLKVMKQPRCGVPDVAQFVLTEGNPRWEQTHLTYRIENYTPDLPRADVDHAIEKAFQLWSNVTPLTFTKVSEGQADIMISFVRGDHRDNSPFDGPGGNLAHAFQPGPGIGGDAHFDEDERWTNNFREYNLHRVAAHELGHSLGLSHSTDIGALMYPSYTFSGDVQLAQDDIDGIQRIYGRSQNPVQPIGPQTPKACDSKLTFDAITTIRGEVMFFKDRFYMRTNPFYPEVELNFISVFWPQLPNGLEAAYEFADRDEVRFFKGNKYWAVQGQNVLHGYPKDIYSSFGFPRTVKHIDAALSEENTGKTYFFVANKYWRYDEYKRSMDPGYPKMIAHDFPGIGHKVDAVFMKDGFFYFFHGTRQYKFDPKTKRILTLQKANSWFNCRKN

SEQ ID NO: 3103 - protein, 450 aa, Artificial Sequence
  MMP-1 variant A239C
FPATLETQEQDVDLVQKYLEKYYNLKNDGRQVEKRRNSGPVVEKLKQMQEFFGLKVTGKPDAETLKVMKQPRCGVPDVAQFVLTEGNPRWEQTHLTYRIENYTPDLPRADVDHAIEKAFQLWSNVTPLTFTKVSEGQADIMISFVRGDHRDNSPFDGPGGNLAHAFQPGPGIGGDAHFDEDERWTNNFREYNLHRVAAHELGHSLGLSHSTDIGALMYPSYTFSGDVQLAQDDIDGIQCIYGRSQNPVQPIGPQTPKACDSKLTFDAITTIRGEVMFFKDRFYMRTNPFYPEVELNFISVFWPQLPNGLEAAYEFADRDEVRFFKGNKYWAVQGQNVLHGYPKDIYSSFGFPRTVKHIDAALSEENTGKTYFFVANKYWRYDEYKRSMDPGYPKMIAHDFPGIGHKVDAVFMKDGFFYFFHGTRQYKFDPKTKRILTLQKANSWFNCRKN

SEQ ID NO: 3104 - protein, 450 aa, Artificial Sequence
  MMP-1 variant A239N
FPATLETQEQDVDLVQKYLEKYYNLKNDGRQVEKRRNSGPVVEKLKQMQEFFGLKVTGKPDAETLKVMKQPRCGVPDVAQFVLTEGNPRWEQTHLTYRIENYTPDLPRADVDHAIEKAFQLWSNVTPLTFTKVSEGQADIMISFVRGDHRDNSPFDGPGGNLAHAFQPGPGIGGDAHFDEDERWTNNFREYNLHRVAAHELGHSLGLSHSTDIGALMYPSYTFSGDVQLAQDDIDGIQNIYGRSQNPVQPIGPQTPKACDSKLTFDAITTIRGEVMFFKDRFYMRTNPFYPEVELNFISVFWPQLPNGLEAAYEFADRDEVRFFKGNKYWAVQGQNVLHGYPKDIYSSFGFPRTVKHIDAALSEENTGKTYFFVANKYWRYDEYKRSMDPGYPKMIAHDFPGIGHKVDAVFMKDGFFYFFHGTRQYKFDPKTKRILTLQKANSWFNCRKN

SEQ ID NO: 3105 - protein, 450 aa, Artificial Sequence
  MMP-1 variant A239Q
FPATLETQEQDVDLVQKYLEKYYNLKNDGRQVEKRRNSGPVVEKLKQMQEFFGLKVTGKPDAETLKVMKQPRCGVPDVAQFVLTEGNPRWEQTHLTYRIENYTPDLPRADVDHAIEKAFQLWSNVTPLTFTKVSEGQADIMISFVRGDHRDNSPFDGPGGNLAHAFQPGPGIGGDAHFDEDERWTNNFREYNLHRVAAHELGHSLGLSHSTDIGALMYPSYTFSGDVQLAQDDIDGIQQIYGRSQNPVQPIGPQTPKACDSKLTFDAITTIRGEVMFFKDRFYMRTNPFYPEVELNFISVFWPQLPNGLEAAYEFADRDEVRFFKGNKYWAVQGQNVLHGYPKDIYSSFGFPRTVKHIDAALSEENTGKTYFFVANKYWRYDEYKRSMDPGYPKMIAHDFPGIGHKVDAVFMKDGFFYFFHGTRQYKFDPKTKRILTLQKANSWFNCRKN

SEQ ID NO: 3106 - protein, 450 aa, Artificial Sequence
  MMP-1 variant A239T
FPATLETQEQDVDLVQKYLEKYYNLKNDGRQVEKRRNSGPVVEKLKQMQEFFGLKVTGKPDAETLKVMKQPRCGVPDVAQFVLTEGNPRWEQTHLTYRIENYTPDLPRADVDHAIEKAFQLWSNVTPLTFTKVSEGQADIMISFVRGDHRDNSPFDGPGGNLAHAFQPGPGIGGDAHFDEDERWTNNFREYNLHRVAAHELGHSLGLSHSTDIGALMYPSYTFSGDVQLAQDDIDGIQTIYGRSQNPVQPIGPQTPKACDSKLTFDAITTIRGEVMFFKDRFYMRTNPFYPEVELNFISVFWPQLPNGLEAAYEFADRDEVRFFKGNKYWAVQGQNVLHGYPKDIYSSFGFPRTVKHIDAALSEENTGKTYFFVANKYWRYDEYKRSMDPGYPKMIAHDFPGIGHKVDAVFMKDGFFYFFHGTRQYKFDPKTKRILTLQKANSWFNCRKN

SEQ ID NO: 3107 - protein, 450 aa, Artificial Sequence
  MMP-1 variant A239Y
FPATLETQEQDVDLVQKYLEKYYNLKNDGRQVEKRRNSGPVVEKLKQMQEFFGLKVTGKPDAETLKVMKQPRCGVPDVAQFVLTEGNPRWEQTHLTYRIENYTPDLPRADVDHAIEKAFQLWSNVTPLTFTKVSEGQADIMISFVRGDHRDNSPFDGPGGNLAHAFQPGPGIGGDAHFDEDERWTNNFREYNLHRVAAHELGHSLGLSHSTDIGALMYPSYTFSGDVQLAQDDIDGIQYIYGRSQNPVQPIGPQTPKACDSKLTFDAITTIRGEVMFFKDRFYMRTNPFYPEVELNFISVFWPQLPNGLEAAYEFADRDEVRFFKGNKYWAVQGQNVLHGYPKDIYSSFGFPRTVKHIDAALSEENTGKTYFFVANKYWRYDEYKRSMDPGYPKMIAHDFPGIGHKVDAVFMKDGFFYFFHGTRQYKFDPKTKRILTLQKANSWFNCRKN

SEQ ID NO: 3108 - protein, 450 aa, Artificial Sequence
  MMP-1 variant A239S
FPATLETQEQDVDLVQKYLEKYYNLKNDGRQVEKRRNSGPVVEKLKQMQEFFGLKVTGKPDAETLKVMKQPRCGVPDVAQFVLTEGNPRWEQTHLTYRIENYTPDLPRADVDHAIEKAFQLWSNVTPLTFTKVSEGQADIMISFVRGDHRDNSPFDGPGGNLAHAFQPGPGIGGDAHFDEDERWTNNFREYNLHRVAAHELGHSLGLSHSTDIGALMYPSYTFSGDVQLAQDDIDGIQSIYGRSQNPVQPIGPQTPKACDSKLTFDAITTIRGEVMFFKDRFYMRTNPFYPEVELNFISVFWPQLPNGLEAAYEFADRDEVRFFKGNKYWAVQGQNVLHGYPKDIYSSFGFPRTVKHIDAALSEENTGKTYFFVANKYWRYDEYKRSMDPGYPKMIAHDFPGIGHKVDAVFMKDGFFYFFHGTRQYKFDPKTKRILTLQKANSWFNCRKN

SEQ ID NO: 3109 - protein, 450 aa, Artificial Sequence
  MMP-1 variant A239G
FPATLETQEQDVDLVQKYLEKYYNLKNDGRQVEKRRNSGPVVEKLKQMQEFFGLKVTGKPDAETLKVMKQPRCGVPDVAQFVLTEGNPRWEQTHLTYRIENYTPDLPRADVDHAIEKAFQLWSNVTPLTFTKVSEGQADIMISFVRGDHRDNSPFDGPGGNLAHAFQPGPGIGGDAHFDEDERWTNNFREYNLHRVAAHELGHSLGLSHSTDIGALMYPSYTFSGDVQLAQDDIDGIQGIYGRSQNPVQPIGPQTPKACDSKLTFDAITTIRGEVMFFKDRFYMRTNPFYPEVELNFISVFWPQLPNGLEAAYEFADRDEVRFFKGNKYWAVQGQNVLHGYPKDIYSSFGFPRTVKHIDAALSEENTGKTYFFVANKYWRYDEYKRSMDPGYPKMIAHDFPGIGHKVDAVFMKDGFFYFFHGTRQYKFDPKTKRILTLQKANSWFNCRKN

SEQ ID NO: 3110 - protein, 450 aa, Artificial Sequence
  MMP-1 variant A239F
FPATLETQEQDVDLVQKYLEKYYNLKNDGRQVEKRRNSGPVVEKLKQMQEFFGLKVTGKPDAETLKVMKQPRCGVPDVAQFVLTEGNPRWEQTHLTYRIENYTPDLPRADVDHAIEKAFQLWSNVTPLTFTKVSEGQADIMISFVRGDHRDNSPFDGPGGNLAHAFQPGPGIGGDAHFDEDERWTNNFREYNLHRVAAHELGHSLGLSHSTDIGALMYPSYTFSGDVQLAQDDIDGIQFIYGRSQNPVQPIGPQTPKACDSKLTFDAITTIRGEVMFFKDRFYMRTNPFYPEVELNFISVFWPQLPNGLEAAYEFADRDEVRFFKGNKYWAVQGQNVLHGYPKDIYSSFGFPRTVKHIDAALSEENTGKTYFFVANKYWRYDEYKRSMDPGYPKMIAHDFPGIGHKVDAVFMKDGFFYFFHGTRQYKFDPKTKRILTLQKANSWFNCRKN

SEQ ID NO: 3111 - protein, 450 aa, Artificial Sequence
  MMP-1 variant A239M
FPATLETQEQDVDLVQKYLEKYYNLKNDGRQVEKRRNSGPVVEKLKQMQEFFGLKVTGKPDAETLKVMKQPRCGVPDVAQFVLTEGNPRWEQTHLTYRIENYTPDLPRADVDHAIEKAFQLWSNVTPLTFTKVSEGQADIMISFVRGDHRDNSPFDGPGGNLAHAFQPGPGIGGDAHFDEDERWTNNFREYNLHRVAAHELGHSLGLSHSTDIGALMYPSYTFSGDVQLAQDDIDGIQMIYGRSQNPVQPIGPQTPKACDSKLTFDAITTIRGEVMFFKDRFYMRTNPFYPEVELNFISVFWPQLPNGLEAAYEFADRDEVRFFKGNKYWAVQGQNVLHGYPKDIYSSFGFPRTVKHIDAALSEENTGKTYFFVANKYWRYDEYKRSMDPGYPKMIAHDFPGIGHKVDAVFMKDGFFYFFHGTRQYKFDPKTKRILTLQKANSWFNCRKN

SEQ ID NO: 3112 - protein, 450 aa, Artificial Sequence
  MMP-1 variant A239W
FPATLETQEQDVDLVQKYLEKYYNLKNDGRQVEKRRNSGPVVEKLKQMQEFFGLKVTGKPDAETLKVMKQPRCGVPDVAQFVLTEGNPRWEQTHLTYRIENYTPDLPRADVDHAIEKAFQLWSNVTPLTFTKVSEGQADIMISFVRGDHRDNSPFDGPGGNLAHAFQPGPGIGGDAHFDEDERWTNNFREYNLHRVAAHELGHSLGLSHSTDIGALMYPSYTFSGDVQLAQDDIDGIQWIYGRSQNPVQPIGPQTPKACDSKLTFDAITTIRGEVMFFKDRFYMRTNPFYPEVELNFISVFWPQLPNGLEAAYEFADRDEVRFFKGNKYWAVQGQNVLHGYPKDIYSSFGFPRTVKHIDAALSEENTGKTYFFVANKYWRYDEYKRSMDPGYPKMIAHDFPGIGHKVDAVFMKDGFFYFFHGTRQYKFDPKTKRILTLQKANSWFNCRKN

SEQ ID NO: 3113 - protein, 450 aa, Artificial Sequence
  MMP-1 variant A239I
FPATLETQEQDVDLVQKYLEKYYNLKNDGRQVEKRRNSGPVVEKLKQMQEFFGLKVTGKPDAETLKVMKQPRCGVPDVAQFVLTEGNPRWEQTHLTYRIENYTPDLPRADVDHAIEKAFQLWSNVTPLTFTKVSEGQADIMISFVRGDHRDNSPFDGPGGNLAHAFQPGPGIGGDAHFDEDERWTNNFREYNLHRVAAHELGHSLGLSHSTDIGALMYPSYTFSGDVQLAQDDIDGIQIIYGRSQNPVQPIGPQTPKACDSKLTFDAITTIRGEVMFFKDRFYMRTNPFYPEVELNFISVFWPQLPNGLEAAYEFADRDEVRFFKGNKYWAVQGQNVLHGYPKDIYSSFGFPRTVKHIDAALSEENTGKTYFFVANKYWRYDEYKRSMDPGYPKMIAHDFPGIGHKVDAVFMKDGFFYFFHGTRQYKFDPKTKRILTLQKANSWFNCRKN

SEQ ID NO: 3114 - protein, 450 aa, Artificial Sequence
  MMP-1 variant A239V
FPATLETQEQDVDLVQKYLEKYYNLKNDGRQVEKRRNSGPVVEKLKQMQEFFGLKVTGKPDAETLKVMKQPRCGVPDVAQFVLTEGNPRWEQTHLTYRIENYTPDLPRADVDHAIEKAFQLWSNVTPLTFTKVSEGQADIMISFVRGDHRDNSPFDGPGGNLAHAFQPGPGIGGDAHFDEDERWTNNFREYNLHRVAAHELGHSLGLSHSTDIGALMYPSYTFSGDVQLAQDDIDGIQVIYGRSQNPVQPIGPQTPKACDSKLTFDAITTIRGEVMFFKDRFYMRTNPFYPEVELNFISVFWPQLPNGLEAAYEFADRDEVRFFKGNKYWAVQGQNVLHGYPKDIYSSFGFPRTVKHIDAALSEENTGKTYFFVANKYWRYDEYKRSMDPGYPKMIAHDFPGIGHKVDAVFMKDGFFYFFHGTRQYKFDPKTKRILTLQKANSWFNCRKN

SEQ ID NO: 3115 - protein, 450 aa, Artificial Sequence
  MMP-1 variant A239L
FPATLETQEQDVDLVQKYLEKYYNLKNDGRQVEKRRNSGPVVEKLKQMQEFFGLKVTGKPDAETLKVMKQPRCGVPDVAQFVLTEGNPRWEQTHLTYRIENYTPDLPRADVDHAIEKAFQLWSNVTPLTFTKVSEGQADIMISFVRGDHRDNSPFDGPGGNLAHAFQPGPGIGGDAHFDEDERWTNNFREYNLHRVAAHELGHSLGLSHSTDIGALMYPSYTFSGDVQLAQDDIDGIQLIYGRSQNPVQPIGPQTPKACDSKLTFDAITTIRGEVMFFKDRFYMRTNPFYPEVELNFISVFWPQLPNGLEAAYEFADRDEVRFFKGNKYWAVQGQNVLHGYPKDIYSSFGFPRTVKHIDAALSEENTGKTYFFVANKYWRYDEYKRSMDPGYPKMIAHDFPGIGHKVDAVFMKDGFFYFFHGTRQYKFDPKTKRILTLQKANSWFNCRKN

SEQ ID NO: 3116 - protein, 450 aa, Artificial Sequence
  MMP-1 variant A239P
FPATLETQEQDVDLVQKYLEKYYNLKNDGRQVEKRRNSGPVVEKLKQMQEFFGLKVTGKPDAETLKVMKQPRCGVPDVAQFVLTEGNPRWEQTHLTYRIENYTPDLPRADVDHAIEKAFQLWSNVTPLTFTKVSEGQADIMISFVRGDHRDNSPFDGPGGNLAHAFQPGPGIGGDAHFDEDERWTNNFREYNLHRVAAHELGHSLGLSHSTDIGALMYPSYTFSGDVQLAQDDIDGIQPIYGRSQNPVQPIGPQTPKACDSKLTFDAITTIRGEVMFFKDRFYMRTNPFYPEVELNFISVFWPQLPNGLEAAYEFADRDEVRFFKGNKYWAVQGQNVLHGYPKDIYSSFGFPRTVKHIDAALSEENTGKTYFFVANKYWRYDEYKRSMDPGYPKMIAHDFPGIGHKVDAVFMKDGFFYFFHGTRQYKFDPKTKRILTLQKANSWFNCRKN

SEQ ID NO: 3117 - protein, 450 aa, Artificial Sequence
  MMP-1 variant Y241D
FPATLETQEQDVDLVQKYLEKYYNLKNDGRQVEKRRNSGPVVEKLKQMQEFFGLKVTGKPDAETLKVMKQPRCGVPDVAQFVLTEGNPRWEQTHLTYRIENYTPDLPRADVDHAIEKAFQLWSNVTPLTFTKVSEGQADIMISFVRGDHRDNSPFDGPGGNLAHAFQPGPGIGGDAHFDEDERWTNNFREYNLHRVAAHELGHSLGLSHSTDIGALMYPSYTFSGDVQLAQDDIDGIQAIDGRSQNPVQPIGPQTPKACDSKLTFDAITTIRGEVMFFKDRFYMRTNPFYPEVELNFISVFWPQLPNGLEAAYEFADRDEVRFFKGNKYWAVQGQNVLHGYPKDIYSSFGFPRTVKHIDAALSEENTGKTYFFVANKYWRYDEYKRSMDPGYPKMIAHDFPGIGHKVDAVFMKDGFFYFFHGTRQYKFDPKTKRILTLQKANSWFNCRKN

SEQ ID NO: 3118 - protein, 450 aa, Artificial Sequence
  MMP-1 variant Y241E
FPATLETQEQDVDLVQKYLEKYYNLKNDGRQVEKRRNSGPVVEKLKQMQEFFGLKVTGKPDAETLKVMKQPRCGVPDVAQFVLTEGNPRWEQTHLTYRIENYTPDLPRADVDHAIEKAFQLWSNVTPLTFTKVSEGQADIMISFVRGDHRDNSPFDGPGGNLAHAFQPGPGIGGDAHFDEDERWTNNFREYNLHRVAAHELGHSLGLSHSTDIGALMYPSYTFSGDVQLAQDDIDGIQAIEGRSQNPVQPIGPQTPKACDSKLTFDAITTIRGEVMFFKDRFYMRTNPFYPEVELNFISVFWPQLPNGLEAAYEFADRDEVRFFKGNKYWAVQGQNVLHGYPKDIYSSFGFPRTVKHIDAALSEENTGKTYFFVANKYWRYDEYKRSMDPGYPKMIAHDFPGIGHKVDAVFMKDGFFYFFHGTRQYKFDPKTKRILTLQKANSWFNCRKN

SEQ ID NO: 3119 - protein, 450 aa, Artificial Sequence
  MMP-1 variant Y241H
FPATLETQEQDVDLVQKYLEKYYNLKNDGRQVEKRRNSGPVVEKLKQMQEFFGLKVTGKPDAETLKVMKQPRCGVPDVAQFVLTEGNPRWEQTHLTYRIENYTPDLPRADVDHAIEKAFQLWSNVTPLTFTKVSEGQADIMISFVRGDHRDNSPFDGPGGNLAHAFQPGPGIGGDAHFDEDERWTNNFREYNLHRVAAHELGHSLGLSHSTDIGALMYPSYTFSGDVQLAQDDIDGIQAIHGRSQNPVQPIGPQTPKACDSKLTFDAITTIRGEVMFFKDRFYMRTNPFYPEVELNFISVFWPQLPNGLEAAYEFADRDEVRFFKGNKYWAVQGQNVLHGYPKDIYSSFGFPRTVKHIDAALSEENTGKTYFFVANKYWRYDEYKRSMDPGYPKMIAHDFPGIGHKVDAVFMKDGFFYFFHGTRQYKFDPKTKRILTLQKANSWFNCRKN

SEQ ID NO: 3120 - protein, 450 aa, Artificial Sequence
  MMP-1 variant Y241K
FPATLETQEQDVDLVQKYLEKYYNLKNDGRQVEKRRNSGPVVEKLKQMQEFFGLKVTGKPDAETLKVMKQPRCGVPDVAQFVLTEGNPRWEQTHLTYRIENYTPDLPRADVDHAIEKAFQLWSNVTPLTFTKVSEGQADIMISFVRGDHRDNSPFDGPGGNLAHAFQPGPGIGGDAHFDEDERWTNNFREYNLHRVAAHELGHSLGLSHSTDIGALMYPSYTFSGDVQLAQDDIDGIQAIKGRSQNPVQPIGPQTPKACDSKLTFDAITTIRGEVMFFKDRFYMRTNPFYPEVELNFISVFWPQLPNGLEAAYEFADRDEVRFFKGNKYWAVQGQNVLHGYPKDIYSSFGFPRTVKHIDAALSEENTGKTYFFVANKYWRYDEYKRSMDPGYPKMIAHDFPGIGHKVDAVFMKDGFFYFFHGTRQYKFDPKTKRILTLQKANSWFNCRKN

SEQ ID NO: 3121 - protein, 450 aa, Artificial Sequence
  MMP-1 variant Y241R
FPATLETQEQDVDLVQKYLEKYYNLKNDGRQVEKRRNSGPVVEKLKQMQEFFGLKVTGKPDAETLKVMKQPRCGVPDVAQFVLTEGNPRWEQTHLTYRIENYTPDLPRADVDHAIEKAFQLWSNVTPLTFTKVSEGQADIMISFVRGDHRDNSPFDGPGGNLAHAFQPGPGIGGDAHFDEDERWTNNFREYNLHRVAAHELGHSLGLSHSTDIGALMYPSYTFSGDVQLAQDDIDGIQAIRGRSQNPVQPIGPQTPKACDSKLTFDAITTIRGEVMFFKDRFYMRTNPFYPEVELNFISVFWPQLPNGLEAAYEFADRDEVRFFKGNKYWAVQGQNVLHGYPKDIYSSFGFPRTVKHIDAALSEENTGKTYFFVANKYWRYDEYKRSMDPGYPKMIAHDFPGIGHKVDAVFMKDGFFYFFHGTRQYKFDPKTKRILTLQKANSWFNCRKN

SEQ ID NO: 3122 - protein, 450 aa, Artificial Sequence
  MMP-1 variant Y241C
FPATLETQEQDVDLVQKYLEKYYNLKNDGRQVEKRRNSGPVVEKLKQMQEFFGLKVTGKPDAETLKVMKQPRCGVPDVAQFVLTEGNPRWEQTHLTYRIENYTPDLPRADVDHAIEKAFQLWSNVTPLTFTKVSEGQADIMISFVRGDHRDNSPFDGPGGNLAHAFQPGPGIGGDAHFDEDERWTNNFREYNLHRVAAHELGHSLGLSHSTDIGALMYPSYTFSGDVQLAQDDIDGIQAICGRSQNPVQPIGPQTPKACDSKLTFDAITTIRGEVMFFKDRFYMRTNPFYPEVELNFISVFWPQLPNGLEAAYEFADRDEVRFFKGNKYWAVQGQNVLHGYPKDIYSSFGFPRTVKHIDAALSEENTGKTYFFVANKYWRYDEYKRSMDPGYPKMIAHDFPGIGHKVDAVFMKDGFFYFFHGTRQYKFDPKTKRILTLQKANSWFNCRKN

SEQ ID NO: 3123 - protein, 450 aa, Artificial Sequence
  MMP-1 variant Y241N
FPATLETQEQDVDLVQKYLEKYYNLKNDGRQVEKRRNSGPVVEKLKQMQEFFGLKVTGKPDAETLKVMKQPRCGVPDVAQFVLTEGNPRWEQTHLTYRIENYTPDLPRADVDHAIEKAFQLWSNVTPLTFTKVSEGQADIMISFVRGDHRDNSPFDGPGGNLAHAFQPGPGIGGDAHFDEDERWTNNFREYNLHRVAAHELGHSLGLSHSTDIGALMYPSYTFSGDVQLAQDDIDGIQAINGRSQNPVQPIGPQTPKACDSKLTFDAITTIRGEVMFFKDRFYMRTNPFYPEVELNFISVFWPQLPNGLEAAYEFADRDEVRFFKGNKYWAVQGQNVLHGYPKDIYSSFGFPRTVKHIDAALSEENTGKTYFFVANKYWRYDEYKRSMDPGYPKMIAHDFPGIGHKVDAVFMKDGFFYFFHGTRQYKFDPKTKRILTLQKANSWFNCRKN

SEQ ID NO: 3124 - protein, 450 aa, Artificial Sequence
  MMP-1 variant Y241Q
FPATLETQEQDVDLVQKYLEKYYNLKNDGRQVEKRRNSGPVVEKLKQMQEFFGLKVTGKPDAETLKVMKQPRCGVPDVAQFVLTEGNPRWEQTHLTYRIENYTPDLPRADVDHAIEKAFQLWSNVTPLTFTKVSEGQADIMISFVRGDHRDNSPFDGPGGNLAHAFQPGPGIGGDAHFDEDERWTNNFREYNLHRVAAHELGHSLGLSHSTDIGALMYPSYTFSGDVQLAQDDIDGIQAIQGRSQNPVQPIGPQTPKACDSKLTFDAITTIRGEVMFFKDRFYMRTNPFYPEVELNFISVFWPQLPNGLEAAYEFADRDEVRFFKGNKYWAVQGQNVLHGYPKDIYSSFGFPRTVKHIDAALSEENTGKTYFFVANKYWRYDEYKRSMDPGYPKMIAHDFPGIGHKVDAVFMKDGFFYFFHGTRQYKFDPKTKRILTLQKANSWFNCRKN

SEQ ID NO: 3125 - protein, 450 aa, Artificial Sequence
  MMP-1 variant Y241T
FPATLETQEQDVDLVQKYLEKYYNLKNDGRQVEKRRNSGPVVEKLKQMQEFFGLKVTGKPDAETLKVMKQPRCGVPDVAQFVLTEGNPRWEQTHLTYRIENYTPDLPRADVDHAIEKAFQLWSNVTPLTFTKVSEGQADIMISFVRGDHRDNSPFDGPGGNLAHAFQPGPGIGGDAHFDEDERWTNNFREYNLHRVAAHELGHSLGLSHSTDIGALMYPSYTFSGDVQLAQDDIDGIQAITGRSQNPVQPIGPQTPKACDSKLTFDAITTIRGEVMFFKDRFYMRTNPFYPEVELNFISVFWPQLPNGLEAAYEFADRDEVRFFKGNKYWAVQGQNVLHGYPKDIYSSFGFPRTVKHIDAALSEENTGKTYFFVANKYWRYDEYKRSMDPGYPKMIAHDFPGIGHKVDAVFMKDGFFYFFHGTRQYKFDPKTKRILTLQKANSWFNCRKN

SEQ ID NO: 3126 - protein, 450 aa, Artificial Sequence
  MMP-1 variant Y241S
FPATLETQEQDVDLVQKYLEKYYNLKNDGRQVEKRRNSGPVVEKLKQMQEFFGLKVTGKPDAETLKVMKQPRCGVPDVAQFVLTEGNPRWEQTHLTYRIENYTPDLPRADVDHAIEKAFQLWSNVTPLTFTKVSEGQADIMISFVRGDHRDNSPFDGPGGNLAHAFQPGPGIGGDAHFDEDERWTNNFREYNLHRVAAHELGHSLGLSHSTDIGALMYPSYTFSGDVQLAQDDIDGIQAISGRSQNPVQPIGPQTPKACDSKLTFDAITTIRGEVMFFKDRFYMRTNPFYPEVELNFISVFWPQLPNGLEAAYEFADRDEVRFFKGNKYWAVQGQNVLHGYPKDIYSSFGFPRTVKHIDAALSEENTGKTYFFVANKYWRYDEYKRSMDPGYPKMIAHDFPGIGHKVDAVFMKDGFFYFFHGTRQYKFDPKTKRILTLQKANSWFNCRKN

SEQ ID NO: 3127 - protein, 450 aa, Artificial Sequence
  MMP-1 variant Y241G
FPATLETQEQDVDLVQKYLEKYYNLKNDGRQVEKRRNSGPVVEKLKQMQEFFGLKVTGKPDAETLKVMKQPRCGVPDVAQFVLTEGNPRWEQTHLTYRIENYTPDLPRADVDHAIEKAFQLWSNVTPLTFTKVSEGQADIMISFVRGDHRDNSPFDGPGGNLAHAFQPGPGIGGDAHFDEDERWTNNFREYNLHRVAAHELGHSLGLSHSTDIGALMYPSYTFSGDVQLAQDDIDGIQAIGGRSQNPVQPIGPQTPKACDSKLTFDAITTIRGEVMFFKDRFYMRTNPFYPEVELNFISVFWPQLPNGLEAAYEFADRDEVRFFKGNKYWAVQGQNVLHGYPKDIYSSFGFPRTVKHIDAALSEENTGKTYFFVANKYWRYDEYKRSMDPGYPKMIAHDFPGIGHKVDAVFMKDGFFYFFHGTRQYKFDPKTKRILTLQKANSWFNCRKN

SEQ ID NO: 3128 - protein, 450 aa, Artificial Sequence
  MMP-1 variant Y241F
FPATLETQEQDVDLVQKYLEKYYNLKNDGRQVEKRRNSGPVVEKLKQMQEFFGLKVTGKPDAETLKVMKQPRCGVPDVAQFVLTEGNPRWEQTHLTYRIENYTPDLPRADVDHAIEKAFQLWSNVTPLTFTKVSEGQADIMISFVRGDHRDNSPFDGPGGNLAHAFQPGPGIGGDAHFDEDERWTNNFREYNLHRVAAHELGHSLGLSHSTDIGALMYPSYTFSGDVQLAQDDIDGIQAIFGRSQNPVQPIGPQTPKACDSKLTFDAITTIRGEVMFFKDRFYMRTNPFYPEVELNFISVFWPQLPNGLEAAYEFADRDEVRFFKGNKYWAVQGQNVLHGYPKDIYSSFGFPRTVKHIDAALSEENTGKTYFFVANKYWRYDEYKRSMDPGYPKMIAHDFPGIGHKVDAVFMKDGFFYFFHGTRQYKFDPKTKRILTLQKANSWFNCRKN

SEQ ID NO: 3129 - protein, 450 aa, Artificial Sequence
  MMP-1 variant Y241M
FPATLETQEQDVDLVQKYLEKYYNLKNDGRQVEKRRNSGPVVEKLKQMQEFFGLKVTGKPDAETLKVMKQPRCGVPDVAQFVLTEGNPRWEQTHLTYRIENYTPDLPRADVDHAIEKAFQLWSNVTPLTFTKVSEGQADIMISFVRGDHRDNSPFDGPGGNLAHAFQPGPGIGGDAHFDEDERWTNNFREYNLHRVAAHELGHSLGLSHSTDIGALMYPSYTFSGDVQLAQDDIDGIQAIMGRSQNPVQPIGPQTPKACDSKLTFDAITTIRGEVMFFKDRFYMRTNPFYPEVELNFISVFWPQLPNGLEAAYEFADRDEVRFFKGNKYWAVQGQNVLHGYPKDIYSSFGFPRTVKHIDAALSEENTGKTYFFVANKYWRYDEYKRSMDPGYPKMIAHDFPGIGHKVDAVFMKDGFFYFFHGTRQYKFDPKTKRILTLQKANSWFNCRKN

SEQ ID NO: 3130 - protein, 450 aa, Artificial Sequence
  MMP-1 variant Y241W
FPATLETQEQDVDLVQKYLEKYYNLKNDGRQVEKRRNSGPVVEKLKQMQEFFGLKVTGKPDAETLKVMKQPRCGVPDVAQFVLTEGNPRWEQTHLTYRIENYTPDLPRADVDHAIEKAFQLWSNVTPLTFTKVSEGQADIMISFVRGDHRDNSPFDGPGGNLAHAFQPGPGIGGDAHFDEDERWTNNFREYNLHRVAAHELGHSLGLSHSTDIGALMYPSYTFSGDVQLAQDDIDGIQAIWGRSQNPVQPIGPQTPKACDSKLTFDAITTIRGEVMFFKDRFYMRTNPFYPEVELNFISVFWPQLPNGLEAAYEFADRDEVRFFKGNKYWAVQGQNVLHGYPKDIYSSFGFPRTVKHIDAALSEENTGKTYFFVANKYWRYDEYKRSMDPGYPKMIAHDFPGIGHKVDAVFMKDGFFYFFHGTRQYKFDPKTKRILTLQKANSWFNCRKN

SEQ ID NO: 3131 - protein, 450 aa, Artificial Sequence
  MMP-1 variant Y241I
FPATLETQEQDVDLVQKYLEKYYNLKNDGRQVEKRRNSGPVVEKLKQMQEFFGLKVTGKPDAETLKVMKQPRCGVPDVAQFVLTEGNPRWEQTHLTYRIENYTPDLPRADVDHAIEKAFQLWSNVTPLTFTKVSEGQADIMISFVRGDHRDNSPFDGPGGNLAHAFQPGPGIGGDAHFDEDERWTNNFREYNLHRVAAHELGHSLGLSHSTDIGALMYPSYTFSGDVQLAQDDIDGIQAIIGRSQNPVQPIGPQTPKACDSKLTFDAITTIRGEVMFFKDRFYMRTNPFYPEVELNFISVFWPQLPNGLEAAYEFADRDEVRFFKGNKYWAVQGQNVLHGYPKDIYSSFGFPRTVKHIDAALSEENTGKTYFFVANKYWRYDEYKRSMDPGYPKMIAHDFPGIGHKVDAVFMKDGFFYFFHGTRQYKFDPKTKRILTLQKANSWFNCRKN

SEQ ID NO: 3132 - protein, 450 aa, Artificial Sequence
  MMP-1 variant Y241V
FPATLETQEQDVDLVQKYLEKYYNLKNDGRQVEKRRNSGPVVEKLKQMQEFFGLKVTGKPDAETLKVMKQPRCGVPDVAQFVLTEGNPRWEQTHLTYRIENYTPDLPRADVDHAIEKAFQLWSNVTPLTFTKVSEGQADIMISFVRGDHRDNSPFDGPGGNLAHAFQPGPGIGGDAHFDEDERWTNNFREYNLHRVAAHELGHSLGLSHSTDIGALMYPSYTFSGDVQLAQDDIDGIQAIVGRSQNPVQPIGPQTPKACDSKLTFDAITTIRGEVMFFKDRFYMRTNPFYPEVELNFISVFWPQLPNGLEAAYEFADRDEVRFFKGNKYWAVQGQNVLHGYPKDIYSSFGFPRTVKHIDAALSEENTGKTYFFVANKYWRYDEYKRSMDPGYPKMIAHDFPGIGHKVDAVFMKDGFFYFFHGTRQYKFDPKTKRILTLQKANSWFNCRKN

SEQ ID NO: 3133 - protein, 450 aa, Artificial Sequence
  MMP-1 variant Y241L
FPATLETQEQDVDLVQKYLEKYYNLKNDGRQVEKRRNSGPVVEKLKQMQEFFGLKVTGKPDAETLKVMKQPRCGVPDVAQFVLTEGNPRWEQTHLTYRIENYTPDLPRADVDHAIEKAFQLWSNVTPLTFTKVSEGQADIMISFVRGDHRDNSPFDGPGGNLAHAFQPGPGIGGDAHFDEDERWTNNFREYNLHRVAAHELGHSLGLSHSTDIGALMYPSYTFSGDVQLAQDDIDGIQAILGRSQNPVQPIGPQTPKACDSKLTFDAITTIRGEVMFFKDRFYMRTNPFYPEVELNFISVFWPQLPNGLEAAYEFADRDEVRFFKGNKYWAVQGQNVLHGYPKDIYSSFGFPRTVKHIDAALSEENTGKTYFFVANKYWRYDEYKRSMDPGYPKMIAHDFPGIGHKVDAVFMKDGFFYFFHGTRQYKFDPKTKRILTLQKANSWFNCRKN

SEQ ID NO: 3134 - protein, 450 aa, Artificial Sequence
  MMP-1 variant Y241A
FPATLETQEQDVDLVQKYLEKYYNLKNDGRQVEKRRNSGPVVEKLKQMQEFFGLKVTGKPDAETLKVMKQPRCGVPDVAQFVLTEGNPRWEQTHLTYRIENYTPDLPRADVDHAIEKAFQLWSNVTPLTFTKVSEGQADIMISFVRGDHRDNSPFDGPGGNLAHAFQPGPGIGGDAHFDEDERWTNNFREYNLHRVAAHELGHSLGLSHSTDIGALMYPSYTFSGDVQLAQDDIDGIQAIAGRSQNPVQPIGPQTPKACDSKLTFDAITTIRGEVMFFKDRFYMRTNPFYPEVELNFISVFWPQLPNGLEAAYEFADRDEVRFFKGNKYWAVQGQNVLHGYPKDIYSSFGFPRTVKHIDAALSEENTGKTYFFVANKYWRYDEYKRSMDPGYPKMIAHDFPGIGHKVDAVFMKDGFFYFFHGTRQYKFDPKTKRILTLQKANSWFNCRKN

SEQ ID NO: 3135 - protein, 450 aa, Artificial Sequence
  MMP-1 variant Y241P
FPATLETQEQDVDLVQKYLEKYYNLKNDGRQVEKRRNSGPVVEKLKQMQEFFGLKVTGKPDAETLKVMKQPRCGVPDVAQFVLTEGNPRWEQTHLTYRIENYTPDLPRADVDHAIEKAFQLWSNVTPLTFTKVSEGQADIMISFVRGDHRDNSPFDGPGGNLAHAFQPGPGIGGDAHFDEDERWTNNFREYNLHRVAAHELGHSLGLSHSTDIGALMYPSYTFSGDVQLAQDDIDGIQAIPGRSQNPVQPIGPQTPKACDSKLTFDAITTIRGEVMFFKDRFYMRTNPFYPEVELNFISVFWPQLPNGLEAAYEFADRDEVRFFKGNKYWAVQGQNVLHGYPKDIYSSFGFPRTVKHIDAALSEENTGKTYFFVANKYWRYDEYKRSMDPGYPKMIAHDFPGIGHKVDAVFMKDGFFYFFHGTRQYKFDPKTKRILTLQKANSWFNCRKN

SEQ ID NO: 3136 - protein, 450 aa, Artificial Sequence
  MMP-1 variant G242D
FPATLETQEQDVDLVQKYLEKYYNLKNDGRQVEKRRNSGPVVEKLKQMQEFFGLKVTGKPDAETLKVMKQPRCGVPDVAQFVLTEGNPRWEQTHLTYRIENYTPDLPRADVDHAIEKAFQLWSNVTPLTFTKVSEGQADIMISFVRGDHRDNSPFDGPGGNLAHAFQPGPGIGGDAHFDEDERWTNNFREYNLHRVAAHELGHSLGLSHSTDIGALMYPSYTFSGDVQLAQDDIDGIQAIYDRSQNPVQPIGPQTPKACDSKLTFDAITTIRGEVMFFKDRFYMRTNPFYPEVELNFISVFWPQLPNGLEAAYEFADRDEVRFFKGNKYWAVQGQNVLHGYPKDIYSSFGFPRTVKHIDAALSEENTGKTYFFVANKYWRYDEYKRSMDPGYPKMIAHDFPGIGHKVDAVFMKDGFFYFFHGTRQYKFDPKTKRILTLQKANSWFNCRKN

SEQ ID NO: 3137 - protein, 450 aa, Artificial Sequence
  MMP-1 variant G242E
FPATLETQEQDVDLVQKYLEKYYNLKNDGRQVEKRRNSGPVVEKLKQMQEFFGLKVTGKPDAETLKVMKQPRCGVPDVAQFVLTEGNPRWEQTHLTYRIENYTPDLPRADVDHAIEKAFQLWSNVTPLTFTKVSEGQADIMISFVRGDHRDNSPFDGPGGNLAHAFQPGPGIGGDAHFDEDERWTNNFREYNLHRVAAHELGHSLGLSHSTDIGALMYPSYTFSGDVQLAQDDIDGIQAIYERSQNPVQPIGPQTPKACDSKLTFDAITTIRGEVMFFKDRFYMRTNPFYPEVELNFISVFWPQLPNGLEAAYEFADRDEVRFFKGNKYWAVQGQNVLHGYPKDIYSSFGFPRTVKHIDAALSEENTGKTYFFVANKYWRYDEYKRSMDPGYPKMIAHDFPGIGHKVDAVFMKDGFFYFFHGTRQYKFDPKTKRILTLQKANSWFNCRKN

SEQ ID NO: 3138 - protein, 450 aa, Artificial Sequence
  MMP-1 variant G242H
FPATLETQEQDVDLVQKYLEKYYNLKNDGRQVEKRRNSGPVVEKLKQMQEFFGLKVTGKPDAETLKVMKQPRCGVPDVAQFVLTEGNPRWEQTHLTYRIENYTPDLPRADVDHAIEKAFQLWSNVTPLTFTKVSEGQADIMISFVRGDHRDNSPFDGPGGNLAHAFQPGPGIGGDAHFDEDERWTNNFREYNLHRVAAHELGHSLGLSHSTDIGALMYPSYTFSGDVQLAQDDIDGIQAIYHRSQNPVQPIGPQTPKACDSKLTFDAITTIRGEVMFFKDRFYMRTNPFYPEVELNFISVFWPQLPNGLEAAYEFADRDEVRFFKGNKYWAVQGQNVLHGYPKDIYSSFGFPRTVKHIDAALSEENTGKTYFFVANKYWRYDEYKRSMDPGYPKMIAHDFPGIGHKVDAVFMKDGFFYFFHGTRQYKFDPKTKRILTLQKANSWFNCRKN

SEQ ID NO: 3139 - protein, 450 aa, Artificial Sequence
  MMP-1 variant G242K
FPATLETQEQDVDLVQKYLEKYYNLKNDGRQVEKRRNSGPVVEKLKQMQEFFGLKVTGKPDAETLKVMKQPRCGVPDVAQFVLTEGNPRWEQTHLTYRIENYTPDLPRADVDHAIEKAFQLWSNVTPLTFTKVSEGQADIMISFVRGDHRDNSPFDGPGGNLAHAFQPGPGIGGDAHFDEDERWTNNFREYNLHRVAAHELGHSLGLSHSTDIGALMYPSYTFSGDVQLAQDDIDGIQAIYKRSQNPVQPIGPQTPKACDSKLTFDAITTIRGEVMFFKDRFYMRTNPFYPEVELNFISVFWPQLPNGLEAAYEFADRDEVRFFKGNKYWAVQGQNVLHGYPKDIYSSFGFPRTVKHIDAALSEENTGKTYFFVANKYWRYDEYKRSMDPGYPKMIAHDFPGIGHKVDAVFMKDGFFYFFHGTRQYKFDPKTKRILTLQKANSWFNCRKN

SEQ ID NO: 3140 - protein, 450 aa, Artificial Sequence
  MMP-1 variant G242R
FPATLETQEQDVDLVQKYLEKYYNLKNDGRQVEKRRNSGPVVEKLKQMQEFFGLKVTGKPDAETLKVMKQPRCGVPDVAQFVLTEGNPRWEQTHLTYRIENYTPDLPRADVDHAIEKAFQLWSNVTPLTFTKVSEGQADIMISFVRGDHRDNSPFDGPGGNLAHAFQPGPGIGGDAHFDEDERWTNNFREYNLHRVAAHELGHSLGLSHSTDIGALMYPSYTFSGDVQLAQDDIDGIQAIYRRSQNPVQPIGPQTPKACDSKLTFDAITTIRGEVMFFKDRFYMRTNPFYPEVELNFISVFWPQLPNGLEAAYEFADRDEVRFFKGNKYWAVQGQNVLHGYPKDIYSSFGFPRTVKHIDAALSEENTGKTYFFVANKYWRYDEYKRSMDPGYPKMIAHDFPGIGHKVDAVFMKDGFFYFFHGTRQYKFDPKTKRILTLQKANSWFNCRKN

SEQ ID NO: 3141 - protein, 450 aa, Artificial Sequence
  MMP-1 variant G242C
FPATLETQEQDVDLVQKYLEKYYNLKNDGRQVEKRRNSGPVVEKLKQMQEFFGLKVTGKPDAETLKVMKQPRCGVPDVAQFVLTEGNPRWEQTHLTYRIENYTPDLPRADVDHAIEKAFQLWSNVTPLTFTKVSEGQADIMISFVRGDHRDNSPFDGPGGNLAHAFQPGPGIGGDAHFDEDERWTNNFREYNLHRVAAHELGHSLGLSHSTDIGALMYPSYTFSGDVQLAQDDIDGIQAIYCRSQNPVQPIGPQTPKACDSKLTFDAITTIRGEVMFFKDRFYMRTNPFYPEVELNFISVFWPQLPNGLEAAYEFADRDEVRFFKGNKYWAVQGQNVLHGYPKDIYSSFGFPRTVKHIDAALSEENTGKTYFFVANKYWRYDEYKRSMDPGYPKMIAHDFPGIGHKVDAVFMKDGFFYFFHGTRQYKFDPKTKRILTLQKANSWFNCRKN

SEQ ID NO: 3142 - protein, 450 aa, Artificial Sequence
  MMP-1 variant G242N
FPATLETQEQDVDLVQKYLEKYYNLKNDGRQVEKRRNSGPVVEKLKQMQEFFGLKVTGKPDAETLKVMKQPRCGVPDVAQFVLTEGNPRWEQTHLTYRIENYTPDLPRADVDHAIEKAFQLWSNVTPLTFTKVSEGQADIMISFVRGDHRDNSPFDGPGGNLAHAFQPGPGIGGDAHFDEDERWTNNFREYNLHRVAAHELGHSLGLSHSTDIGALMYPSYTFSGDVQLAQDDIDGIQAIYNRSQNPVQPIGPQTPKACDSKLTFDAITTIRGEVMFFKDRFYMRTNPFYPEVELNFISVFWPQLPNGLEAAYEFADRDEVRFFKGNKYWAVQGQNVLHGYPKDIYSSFGFPRTVKHIDAALSEENTGKTYFFVANKYWRYDEYKRSMDPGYPKMIAHDFPGIGHKVDAVFMKDGFFYFFHGTRQYKFDPKTKRILTLQKANSWFNCRKN

SEQ ID NO: 3143 - protein, 450 aa, Artificial Sequence
  MMP-1 variant G242Q
FPATLETQEQDVDLVQKYLEKYYNLKNDGRQVEKRRNSGPVVEKLKQMQEFFGLKVTGKPDAETLKVMKQPRCGVPDVAQFVLTEGNPRWEQTHLTYRIENYTPDLPRADVDHAIEKAFQLWSNVTPLTFTKVSEGQADIMISFVRGDHRDNSPFDGPGGNLAHAFQPGPGIGGDAHFDEDERWTNNFREYNLHRVAAHELGHSLGLSHSTDIGALMYPSYTFSGDVQLAQDDIDGIQAIYQRSQNPVQPIGPQTPKACDSKLTFDAITTIRGEVMFFKDRFYMRTNPFYPEVELNFISVFWPQLPNGLEAAYEFADRDEVRFFKGNKYWAVQGQNVLHGYPKDIYSSFGFPRTVKHIDAALSEENTGKTYFFVANKYWRYDEYKRSMDPGYPKMIAHDFPGIGHKVDAVFMKDGFFYFFHGTRQYKFDPKTKRILTLQKANSWFNCRKN

SEQ ID NO: 3144 - protein, 450 aa, Artificial Sequence
  MMP-1 variant G242T
FPATLETQEQDVDLVQKYLEKYYNLKNDGRQVEKRRNSGPVVEKLKQMQEFFGLKVTGKPDAETLKVMKQPRCGVPDVAQFVLTEGNPRWEQTHLTYRIENYTPDLPRADVDHAIEKAFQLWSNVTPLTFTKVSEGQADIMISFVRGDHRDNSPFDGPGGNLAHAFQPGPGIGGDAHFDEDERWTNNFREYNLHRVAAHELGHSLGLSHSTDIGALMYPSYTFSGDVQLAQDDIDGIQAIYTRSQNPVQPIGPQTPKACDSKLTFDAITTIRGEVMFFKDRFYMRTNPFYPEVELNFISVFWPQLPNGLEAAYEFADRDEVRFFKGNKYWAVQGQNVLHGYPKDIYSSFGFPRTVKHIDAALSEENTGKTYFFVANKYWRYDEYKRSMDPGYPKMIAHDFPGIGHKVDAVFMKDGFFYFFHGTRQYKFDPKTKRILTLQKANSWFNCRKN

SEQ ID NO: 3145 - protein, 450 aa, Artificial Sequence
  MMP-1 variant G242Y
FPATLETQEQDVDLVQKYLEKYYNLKNDGRQVEKRRNSGPVVEKLKQMQEFFGLKVTGKPDAETLKVMKQPRCGVPDVAQFVLTEGNPRWEQTHLTYRIENYTPDLPRADVDHAIEKAFQLWSNVTPLTFTKVSEGQADIMISFVRGDHRDNSPFDGPGGNLAHAFQPGPGIGGDAHFDEDERWTNNFREYNLHRVAAHELGHSLGLSHSTDIGALMYPSYTFSGDVQLAQDDIDGIQAIYYRSQNPVQPIGPQTPKACDSKLTFDAITTIRGEVMFFKDRFYMRTNPFYPEVELNFISVFWPQLPNGLEAAYEFADRDEVRFFKGNKYWAVQGQNVLHGYPKDIYSSFGFPRTVKHIDAALSEENTGKTYFFVANKYWRYDEYKRSMDPGYPKMIAHDFPGIGHKVDAVFMKDGFFYFFHGTRQYKFDPKTKRILTLQKANSWFNCRKN

SEQ ID NO: 3146 - protein, 450 aa, Artificial Sequence
  MMP-1 variant G242S
FPATLETQEQDVDLVQKYLEKYYNLKNDGRQVEKRRNSGPVVEKLKQMQEFFGLKVTGKPDAETLKVMKQPRCGVPDVAQFVLTEGNPRWEQTHLTYRIENYTPDLPRADVDHAIEKAFQLWSNVTPLTFTKVSEGQADIMISFVRGDHRDNSPFDGPGGNLAHAFQPGPGIGGDAHFDEDERWTNNFREYNLHRVAAHELGHSLGLSHSTDIGALMYPSYTFSGDVQLAQDDIDGIQAIYSRSQNPVQPIGPQTPKACDSKLTFDAITTIRGEVMFFKDRFYMRTNPFYPEVELNFISVFWPQLPNGLEAAYEFADRDEVRFFKGNKYWAVQGQNVLHGYPKDIYSSFGFPRTVKHIDAALSEENTGKTYFFVANKYWRYDEYKRSMDPGYPKMIAHDFPGIGHKVDAVFMKDGFFYFFHGTRQYKFDPKTKRILTLQKANSWFNCRKN

SEQ ID NO: 3147 - protein, 450 aa, Artificial Sequence
  MMP-1 variant G242F
FPATLETQEQDVDLVQKYLEKYYNLKNDGRQVEKRRNSGPVVEKLKQMQEFFGLKVTGKPDAETLKVMKQPRCGVPDVAQFVLTEGNPRWEQTHLTYRIENYTPDLPRADVDHAIEKAFQLWSNVTPLTFTKVSEGQADIMISFVRGDHRDNSPFDGPGGNLAHAFQPGPGIGGDAHFDEDERWTNNFREYNLHRVAAHELGHSLGLSHSTDIGALMYPSYTFSGDVQLAQDDIDGIQAIYFRSQNPVQPIGPQTPKACDSKLTFDAITTIRGEVMFFKDRFYMRTNPFYPEVELNFISVFWPQLPNGLEAAYEFADRDEVRFFKGNKYWAVQGQNVLHGYPKDIYSSFGFPRTVKHIDAALSEENTGKTYFFVANKYWRYDEYKRSMDPGYPKMIAHDFPGIGHKVDAVFMKDGFFYFFHGTRQYKFDPKTKRILTLQKANSWFNCRKN

SEQ ID NO: 3148 - protein, 450 aa, Artificial Sequence
  MMP-1 variant G242M
FPATLETQEQDVDLVQKYLEKYYNLKNDGRQVEKRRNSGPVVEKLKQMQEFFGLKVTGKPDAETLKVMKQPRCGVPDVAQFVLTEGNPRWEQTHLTYRIENYTPDLPRADVDHAIEKAFQLWSNVTPLTFTKVSEGQADIMISFVRGDHRDNSPFDGPGGNLAHAFQPGPGIGGDAHFDEDERWTNNFREYNLHRVAAHELGHSLGLSHSTDIGALMYPSYTFSGDVQLAQDDIDGIQAIYMRSQNPVQPIGPQTPKACDSKLTFDAITTIRGEVMFFKDRFYMRTNPFYPEVELNFISVFWPQLPNGLEAAYEFADRDEVRFFKGNKYWAVQGQNVLHGYPKDIYSSFGFPRTVKHIDAALSEENTGKTYFFVANKYWRYDEYKRSMDPGYPKMIAHDFPGIGHKVDAVFMKDGFFYFFHGTRQYKFDPKTKRILTLQKANSWFNCRKN

SEQ ID NO: 3149 - protein, 450 aa, Artificial Sequence
  MMP-1 variant G242W
FPATLETQEQDVDLVQKYLEKYYNLKNDGRQVEKRRNSGPVVEKLKQMQEFFGLKVTGKPDAETLKVMKQPRCGVPDVAQFVLTEGNPRWEQTHLTYRIENYTPDLPRADVDHAIEKAFQLWSNVTPLTFTKVSEGQADIMISFVRGDHRDNSPFDGPGGNLAHAFQPGPGIGGDAHFDEDERWTNNFREYNLHRVAAHELGHSLGLSHSTDIGALMYPSYTFSGDVQLAQDDIDGIQAIYWRSQNPVQPIGPQTPKACDSKLTFDAITTIRGEVMFFKDRFYMRTNPFYPEVELNFISVFWPQLPNGLEAAYEFADRDEVRFFKGNKYWAVQGQNVLHGYPKDIYSSFGFPRTVKHIDAALSEENTGKTYFFVANKYWRYDEYKRSMDPGYPKMIAHDFPGIGHKVDAVFMKDGFFYFFHGTRQYKFDPKTKRILTLQKANSWFNCRKN

SEQ ID NO: 3150 - protein, 450 aa, Artificial Sequence
  MMP-1 variant G242I
FPATLETQEQDVDLVQKYLEKYYNLKNDGRQVEKRRNSGPVVEKLKQMQEFFGLKVTGKPDAETLKVMKQPRCGVPDVAQFVLTEGNPRWEQTHLTYRIENYTPDLPRADVDHAIEKAFQLWSNVTPLTFTKVSEGQADIMISFVRGDHRDNSPFDGPGGNLAHAFQPGPGIGGDAHFDEDERWTNNFREYNLHRVAAHELGHSLGLSHSTDIGALMYPSYTFSGDVQLAQDDIDGIQAIYIRSQNPVQPIGPQTPKACDSKLTFDAITTIRGEVMFFKDRFYMRTNPFYPEVELNFISVFWPQLPNGLEAAYEFADRDEVRFFKGNKYWAVQGQNVLHGYPKDIYSSFGFPRTVKHIDAALSEENTGKTYFFVANKYWRYDEYKRSMDPGYPKMIAHDFPGIGHKVDAVFMKDGFFYFFHGTRQYKFDPKTKRILTLQKANSWFNCRKN

SEQ ID NO: 3151 - protein, 450 aa, Artificial Sequence
  MMP-1 variant G242V
FPATLETQEQDVDLVQKYLEKYYNLKNDGRQVEKRRNSGPVVEKLKQMQEFFGLKVTGKPDAETLKVMKQPRCGVPDVAQFVLTEGNPRWEQTHLTYRIENYTPDLPRADVDHAIEKAFQLWSNVTPLTFTKVSEGQADIMISFVRGDHRDNSPFDGPGGNLAHAFQPGPGIGGDAHFDEDERWTNNFREYNLHRVAAHELGHSLGLSHSTDIGALMYPSYTFSGDVQLAQDDIDGIQAIYVRSQNPVQPIGPQTPKACDSKLTFDAITTIRGEVMFFKDRFYMRTNPFYPEVELNFISVFWPQLPNGLEAAYEFADRDEVRFFKGNKYWAVQGQNVLHGYPKDIYSSFGFPRTVKHIDAALSEENTGKTYFFVANKYWRYDEYKRSMDPGYPKMIAHDFPGIGHKVDAVFMKDGFFYFFHGTRQYKFDPKTKRILTLQKANSWFNCRKN

SEQ ID NO: 3152 - protein, 450 aa, Artificial Sequence
  MMP-1 variant G242L
FPATLETQEQDVDLVQKYLEKYYNLKNDGRQVEKRRNSGPVVEKLKQMQEFFGLKVTGKPDAETLKVMKQPRCGVPDVAQFVLTEGNPRWEQTHLTYRIENYTPDLPRADVDHAIEKAFQLWSNVTPLTFTKVSEGQADIMISFVRGDHRDNSPFDGPGGNLAHAFQPGPGIGGDAHFDEDERWTNNFREYNLHRVAAHELGHSLGLSHSTDIGALMYPSYTFSGDVQLAQDDIDGIQAIYLRSQNPVQPIGPQTPKACDSKLTFDAITTIRGEVMFFKDRFYMRTNPFYPEVELNFISVFWPQLPNGLEAAYEFADRDEVRFFKGNKYWAVQGQNVLHGYPKDIYSSFGFPRTVKHIDAALSEENTGKTYFFVANKYWRYDEYKRSMDPGYPKMIAHDFPGIGHKVDAVFMKDGFFYFFHGTRQYKFDPKTKRILTLQKANSWFNCRKN

SEQ ID NO: 3153 - protein, 450 aa, Artificial Sequence
  MMP-1 variant G242A
FPATLETQEQDVDLVQKYLEKYYNLKNDGRQVEKRRNSGPVVEKLKQMQEFFGLKVTGKPDAETLKVMKQPRCGVPDVAQFVLTEGNPRWEQTHLTYRIENYTPDLPRADVDHAIEKAFQLWSNVTPLTFTKVSEGQADIMISFVRGDHRDNSPFDGPGGNLAHAFQPGPGIGGDAHFDEDERWTNNFREYNLHRVAAHELGHSLGLSHSTDIGALMYPSYTFSGDVQLAQDDIDGIQAIYARSQNPVQPIGPQTPKACDSKLTFDAITTIRGEVMFFKDRFYMRTNPFYPEVELNFISVFWPQLPNGLEAAYEFADRDEVRFFKGNKYWAVQGQNVLHGYPKDIYSSFGFPRTVKHIDAALSEENTGKTYFFVANKYWRYDEYKRSMDPGYPKMIAHDFPGIGHKVDAVFMKDGFFYFFHGTRQYKFDPKTKRILTLQKANSWFNCRKN

SEQ ID NO: 3154 - protein, 450 aa, Artificial Sequence
  MMP-1 variant G242P
FPATLETQEQDVDLVQKYLEKYYNLKNDGRQVEKRRNSGPVVEKLKQMQEFFGLKVTGKPDAETLKVMKQPRCGVPDVAQFVLTEGNPRWEQTHLTYRIENYTPDLPRADVDHAIEKAFQLWSNVTPLTFTKVSEGQADIMISFVRGDHRDNSPFDGPGGNLAHAFQPGPGIGGDAHFDEDERWTNNFREYNLHRVAAHELGHSLGLSHSTDIGALMYPSYTFSGDVQLAQDDIDGIQAIYPRSQNPVQPIGPQTPKACDSKLTFDAITTIRGEVMFFKDRFYMRTNPFYPEVELNFISVFWPQLPNGLEAAYEFADRDEVRFFKGNKYWAVQGQNVLHGYPKDIYSSFGFPRTVKHIDAALSEENTGKTYFFVANKYWRYDEYKRSMDPGYPKMIAHDFPGIGHKVDAVFMKDGFFYFFHGTRQYKFDPKTKRILTLQKANSWFNCRKN

SEQ ID NO: 3155 - protein, 450 aa, Artificial Sequence
  MMP-1 variant R243D
FPATLETQEQDVDLVQKYLEKYYNLKNDGRQVEKRRNSGPVVEKLKQMQEFFGLKVTGKPDAETLKVMKQPRCGVPDVAQFVLTEGNPRWEQTHLTYRIENYTPDLPRADVDHAIEKAFQLWSNVTPLTFTKVSEGQADIMISFVRGDHRDNSPFDGPGGNLAHAFQPGPGIGGDAHFDEDERWTNNFREYNLHRVAAHELGHSLGLSHSTDIGALMYPSYTFSGDVQLAQDDIDGIQAIYGDSQNPVQPIGPQTPKACDSKLTFDAITTIRGEVMFFKDRFYMRTNPFYPEVELNFISVFWPQLPNGLEAAYEFADRDEVRFFKGNKYWAVQGQNVLHGYPKDIYSSFGFPRTVKHIDAALSEENTGKTYFFVANKYWRYDEYKRSMDPGYPKMIAHDFPGIGHKVDAVFMKDGFFYFFHGTRQYKFDPKTKRILTLQKANSWFNCRKN

SEQ ID NO: 3156 - protein, 450 aa, Artificial Sequence
  MMP-1 variant R243E
FPATLETQEQDVDLVQKYLEKYYNLKNDGRQVEKRRNSGPVVEKLKQMQEFFGLKVTGKPDAETLKVMKQPRCGVPDVAQFVLTEGNPRWEQTHLTYRIENYTPDLPRADVDHAIEKAFQLWSNVTPLTFTKVSEGQADIMISFVRGDHRDNSPFDGPGGNLAHAFQPGPGIGGDAHFDEDERWTNNFREYNLHRVAAHELGHSLGLSHSTDIGALMYPSYTFSGDVQLAQDDIDGIQAIYGESQNPVQPIGPQTPKACDSKLTFDAITTIRGEVMFFKDRFYMRTNPFYPEVELNFISVFWPQLPNGLEAAYEFADRDEVRFFKGNKYWAVQGQNVLHGYPKDIYSSFGFPRTVKHIDAALSEENTGKTYFFVANKYWRYDEYKRSMDPGYPKMIAHDFPGIGHKVDAVFMKDGFFYFFHGTRQYKFDPKTKRILTLQKANSWFNCRKN

SEQ ID NO: 3157 - protein, 450 aa, Artificial Sequence
  MMP-1 variant R243H
FPATLETQEQDVDLVQKYLEKYYNLKNDGRQVEKRRNSGPVVEKLKQMQEFFGLKVTGKPDAETLKVMKQPRCGVPDVAQFVLTEGNPRWEQTHLTYRIENYTPDLPRADVDHAIEKAFQLWSNVTPLTFTKVSEGQADIMISFVRGDHRDNSPFDGPGGNLAHAFQPGPGIGGDAHFDEDERWTNNFREYNLHRVAAHELGHSLGLSHSTDIGALMYPSYTFSGDVQLAQDDIDGIQAIYGHSQNPVQPIGPQTPKACDSKLTFDAITTIRGEVMFFKDRFYMRTNPFYPEVELNFISVFWPQLPNGLEAAYEFADRDEVRFFKGNKYWAVQGQNVLHGYPKDIYSSFGFPRTVKHIDAALSEENTGKTYFFVANKYWRYDEYKRSMDPGYPKMIAHDFPGIGHKVDAVFMKDGFFYFFHGTRQYKFDPKTKRILTLQKANSWFNCRKN

SEQ ID NO: 3158 - protein, 450 aa, Artificial Sequence
  MMP-1 variant R243K
FPATLETQEQDVDLVQKYLEKYYNLKNDGRQVEKRRNSGPVVEKLKQMQEFFGLKVTGKPDAETLKVMKQPRCGVPDVAQFVLTEGNPRWEQTHLTYRIENYTPDLPRADVDHAIEKAFQLWSNVTPLTFTKVSEGQADIMISFVRGDHRDNSPFDGPGGNLAHAFQPGPGIGGDAHFDEDERWTNNFREYNLHRVAAHELGHSLGLSHSTDIGALMYPSYTFSGDVQLAQDDIDGIQAIYGKSQNPVQPIGPQTPKACDSKLTFDAITTIRGEVMFFKDRFYMRTNPFYPEVELNFISVFWPQLPNGLEAAYEFADRDEVRFFKGNKYWAVQGQNVLHGYPKDIYSSFGFPRTVKHIDAALSEENTGKTYFFVANKYWRYDEYKRSMDPGYPKMIAHDFPGIGHKVDAVFMKDGFFYFFHGTRQYKFDPKTKRILTLQKANSWFNCRKN

SEQ ID NO: 3159 - protein, 450 aa, Artificial Sequence
  MMP-1 variant R243C
FPATLETQEQDVDLVQKYLEKYYNLKNDGRQVEKRRNSGPVVEKLKQMQEFFGLKVTGKPDAETLKVMKQPRCGVPDVAQFVLTEGNPRWEQTHLTYRIENYTPDLPRADVDHAIEKAFQLWSNVTPLTFTKVSEGQADIMISFVRGDHRDNSPFDGPGGNLAHAFQPGPGIGGDAHFDEDERWTNNFREYNLHRVAAHELGHSLGLSHSTDIGALMYPSYTFSGDVQLAQDDIDGIQAIYGCSQNPVQPIGPQTPKACDSKLTFDAITTIRGEVMFFKDRFYMRTNPFYPEVELNFISVFWPQLPNGLEAAYEFADRDEVRFFKGNKYWAVQGQNVLHGYPKDIYSSFGFPRTVKHIDAALSEENTGKTYFFVANKYWRYDEYKRSMDPGYPKMIAHDFPGIGHKVDAVFMKDGFFYFFHGTRQYKFDPKTKRILTLQKANSWFNCRKN

SEQ ID NO: 3160 - protein, 450 aa, Artificial Sequence
  MMP-1 variant R243N
FPATLETQEQDVDLVQKYLEKYYNLKNDGRQVEKRRNSGPVVEKLKQMQEFFGLKVTGKPDAETLKVMKQPRCGVPDVAQFVLTEGNPRWEQTHLTYRIENYTPDLPRADVDHAIEKAFQLWSNVTPLTFTKVSEGQADIMISFVRGDHRDNSPFDGPGGNLAHAFQPGPGIGGDAHFDEDERWTNNFREYNLHRVAAHELGHSLGLSHSTDIGALMYPSYTFSGDVQLAQDDIDGIQAIYGNSQNPVQPIGPQTPKACDSKLTFDAITTIRGEVMFFKDRFYMRTNPFYPEVELNFISVFWPQLPNGLEAAYEFADRDEVRFFKGNKYWAVQGQNVLHGYPKDIYSSFGFPRTVKHIDAALSEENTGKTYFFVANKYWRYDEYKRSMDPGYPKMIAHDFPGIGHKVDAVFMKDGFFYFFHGTRQYKFDPKTKRILTLQKANSWFNCRKN

SEQ ID NO: 3161 - protein, 450 aa, Artificial Sequence
  MMP-1 variant R243Q
FPATLETQEQDVDLVQKYLEKYYNLKNDGRQVEKRRNSGPVVEKLKQMQEFFGLKVTGKPDAETLKVMKQPRCGVPDVAQFVLTEGNPRWEQTHLTYRIENYTPDLPRADVDHAIEKAFQLWSNVTPLTFTKVSEGQADIMISFVRGDHRDNSPFDGPGGNLAHAFQPGPGIGGDAHFDEDERWTNNFREYNLHRVAAHELGHSLGLSHSTDIGALMYPSYTFSGDVQLAQDDIDGIQAIYGQSQNPVQPIGPQTPKACDSKLTFDAITTIRGEVMFFKDRFYMRTNPFYPEVELNFISVFWPQLPNGLEAAYEFADRDEVRFFKGNKYWAVQGQNVLHGYPKDIYSSFGFPRTVKHIDAALSEENTGKTYFFVANKYWRYDEYKRSMDPGYPKMIAHDFPGIGHKVDAVFMKDGFFYFFHGTRQYKFDPKTKRILTLQKANSWFNCRKN

SEQ ID NO: 3162 - protein, 450 aa, Artificial Sequence
  MMP-1 variant R243T
FPATLETQEQDVDLVQKYLEKYYNLKNDGRQVEKRRNSGPVVEKLKQMQEFFGLKVTGKPDAETLKVMKQPRCGVPDVAQFVLTEGNPRWEQTHLTYRIENYTPDLPRADVDHAIEKAFQLWSNVTPLTFTKVSEGQADIMISFVRGDHRDNSPFDGPGGNLAHAFQPGPGIGGDAHFDEDERWTNNFREYNLHRVAAHELGHSLGLSHSTDIGALMYPSYTFSGDVQLAQDDIDGIQAIYGTSQNPVQPIGPQTPKACDSKLTFDAITTIRGEVMFFKDRFYMRTNPFYPEVELNFISVFWPQLPNGLEAAYEFADRDEVRFFKGNKYWAVQGQNVLHGYPKDIYSSFGFPRTVKHIDAALSEENTGKTYFFVANKYWRYDEYKRSMDPGYPKMIAHDFPGIGHKVDAVFMKDGFFYFFHGTRQYKFDPKTKRILTLQKANSWFNCRKN

SEQ ID NO: 3163 - protein, 450 aa, Artificial Sequence
  MMP-1 variant R243Y
FPATLETQEQDVDLVQKYLEKYYNLKNDGRQVEKRRNSGPVVEKLKQMQEFFGLKVTGKPDAETLKVMKQPRCGVPDVAQFVLTEGNPRWEQTHLTYRIENYTPDLPRADVDHAIEKAFQLWSNVTPLTFTKVSEGQADIMISFVRGDHRDNSPFDGPGGNLAHAFQPGPGIGGDAHFDEDERWTNNFREYNLHRVAAHELGHSLGLSHSTDIGALMYPSYTFSGDVQLAQDDIDGIQAIYGYSQNPVQPIGPQTPKACDSKLTFDAITTIRGEVMFFKDRFYMRTNPFYPEVELNFISVFWPQLPNGLEAAYEFADRDEVRFFKGNKYWAVQGQNVLHGYPKDIYSSFGFPRTVKHIDAALSEENTGKTYFFVANKYWRYDEYKRSMDPGYPKMIAHDFPGIGHKVDAVFMKDGFFYFFHGTRQYKFDPKTKRILTLQKANSWFNCRKN

SEQ ID NO: 3164 - protein, 450 aa, Artificial Sequence
  MMP-1 variant R243S
FPATLETQEQDVDLVQKYLEKYYNLKNDGRQVEKRRNSGPVVEKLKQMQEFFGLKVTGKPDAETLKVMKQPRCGVPDVAQFVLTEGNPRWEQTHLTYRIENYTPDLPRADVDHAIEKAFQLWSNVTPLTFTKVSEGQADIMISFVRGDHRDNSPFDGPGGNLAHAFQPGPGIGGDAHFDEDERWTNNFREYNLHRVAAHELGHSLGLSHSTDIGALMYPSYTFSGDVQLAQDDIDGIQAIYGSSQNPVQPIGPQTPKACDSKLTFDAITTIRGEVMFFKDRFYMRTNPFYPEVELNFISVFWPQLPNGLEAAYEFADRDEVRFFKGNKYWAVQGQNVLHGYPKDIYSSFGFPRTVKHIDAALSEENTGKTYFFVANKYWRYDEYKRSMDPGYPKMIAHDFPGIGHKVDAVFMKDGFFYFFHGTRQYKFDPKTKRILTLQKANSWFNCRKN

SEQ ID NO: 3165 - protein, 450 aa, Artificial Sequence
  MMP-1 variant R243G
FPATLETQEQDVDLVQKYLEKYYNLKNDGRQVEKRRNSGPVVEKLKQMQEFFGLKVTGKPDAETLKVMKQPRCGVPDVAQFVLTEGNPRWEQTHLTYRIENYTPDLPRADVDHAIEKAFQLWSNVTPLTFTKVSEGQADIMISFVRGDHRDNSPFDGPGGNLAHAFQPGPGIGGDAHFDEDERWTNNFREYNLHRVAAHELGHSLGLSHSTDIGALMYPSYTFSGDVQLAQDDIDGIQAIYGGSQNPVQPIGPQTPKACDSKLTFDAITTIRGEVMFFKDRFYMRTNPFYPEVELNFISVFWPQLPNGLEAAYEFADRDEVRFFKGNKYWAVQGQNVLHGYPKDIYSSFGFPRTVKHIDAALSEENTGKTYFFVANKYWRYDEYKRSMDPGYPKMIAHDFPGIGHKVDAVFMKDGFFYFFHGTRQYKFDPKTKRILTLQKANSWFNCRKN

SEQ ID NO: 3166 - protein, 450 aa, Artificial Sequence
  MMP-1 variant R243F
FPATLETQEQDVDLVQKYLEKYYNLKNDGRQVEKRRNSGPVVEKLKQMQEFFGLKVTGKPDAETLKVMKQPRCGVPDVAQFVLTEGNPRWEQTHLTYRIENYTPDLPRADVDHAIEKAFQLWSNVTPLTFTKVSEGQADIMISFVRGDHRDNSPFDGPGGNLAHAFQPGPGIGGDAHFDEDERWTNNFREYNLHRVAAHELGHSLGLSHSTDIGALMYPSYTFSGDVQLAQDDIDGIQAIYGFSQNPVQPIGPQTPKACDSKLTFDAITTIRGEVMFFKDRFYMRTNPFYPEVELNFISVFWPQLPNGLEAAYEFADRDEVRFFKGNKYWAVQGQNVLHGYPKDIYSSFGFPRTVKHIDAALSEENTGKTYFFVANKYWRYDEYKRSMDPGYPKMIAHDFPGIGHKVDAVFMKDGFFYFFHGTRQYKFDPKTKRILTLQKANSWFNCRKN

SEQ ID NO: 3167 - protein, 450 aa, Artificial Sequence
  MMP-1 variant R243M
FPATLETQEQDVDLVQKYLEKYYNLKNDGRQVEKRRNSGPVVEKLKQMQEFFGLKVTGKPDAETLKVMKQPRCGVPDVAQFVLTEGNPRWEQTHLTYRIENYTPDLPRADVDHAIEKAFQLWSNVTPLTFTKVSEGQADIMISFVRGDHRDNSPFDGPGGNLAHAFQPGPGIGGDAHFDEDERWTNNFREYNLHRVAAHELGHSLGLSHSTDIGALMYPSYTFSGDVQLAQDDIDGIQAIYGMSQNPVQPIGPQTPKACDSKLTFDAITTIRGEVMFFKDRFYMRTNPFYPEVELNFISVFWPQLPNGLEAAYEFADRDEVRFFKGNKYWAVQGQNVLHGYPKDIYSSFGFPRTVKHIDAALSEENTGKTYFFVANKYWRYDEYKRSMDPGYPKMIAHDFPGIGHKVDAVFMKDGFFYFFHGTRQYKFDPKTKRILTLQKANSWFNCRKN

SEQ ID NO: 3168 - protein, 450 aa, Artificial Sequence
  MMP-1 variant R243W
FPATLETQEQDVDLVQKYLEKYYNLKNDGRQVEKRRNSGPVVEKLKQMQEFFGLKVTGKPDAETLKVMKQPRCGVPDVAQFVLTEGNPRWEQTHLTYRIENYTPDLPRADVDHAIEKAFQLWSNVTPLTFTKVSEGQADIMISFVRGDHRDNSPFDGPGGNLAHAFQPGPGIGGDAHFDEDERWTNNFREYNLHRVAAHELGHSLGLSHSTDIGALMYPSYTFSGDVQLAQDDIDGIQAIYGWSQNPVQPIGPQTPKACDSKLTFDAITTIRGEVMFFKDRFYMRTNPFYPEVELNFISVFWPQLPNGLEAAYEFADRDEVRFFKGNKYWAVQGQNVLHGYPKDIYSSFGFPRTVKHIDAALSEENTGKTYFFVANKYWRYDEYKRSMDPGYPKMIAHDFPGIGHKVDAVFMKDGFFYFFHGTRQYKFDPKTKRILTLQKANSWFNCRKN

SEQ ID NO: 3169 - protein, 450 aa, Artificial Sequence
  MMP-1 variant R243I
FPATLETQEQDVDLVQKYLEKYYNLKNDGRQVEKRRNSGPVVEKLKQMQEFFGLKVTGKPDAETLKVMKQPRCGVPDVAQFVLTEGNPRWEQTHLTYRIENYTPDLPRADVDHAIEKAFQLWSNVTPLTFTKVSEGQADIMISFVRGDHRDNSPFDGPGGNLAHAFQPGPGIGGDAHFDEDERWTNNFREYNLHRVAAHELGHSLGLSHSTDIGALMYPSYTFSGDVQLAQDDIDGIQAIYGISQNPVQPIGPQTPKACDSKLTFDAITTIRGEVMFFKDRFYMRTNPFYPEVELNFISVFWPQLPNGLEAAYEFADRDEVRFFKGNKYWAVQGQNVLHGYPKDIYSSFGFPRTVKHIDAALSEENTGKTYFFVANKYWRYDEYKRSMDPGYPKMIAHDFPGIGHKVDAVFMKDGFFYFFHGTRQYKFDPKTKRILTLQKANSWFNCRKN

SEQ ID NO: 3170 - protein, 450 aa, Artificial Sequence
  MMP-1 variant R243V
FPATLETQEQDVDLVQKYLEKYYNLKNDGRQVEKRRNSGPVVEKLKQMQEFFGLKVTGKPDAETLKVMKQPRCGVPDVAQFVLTEGNPRWEQTHLTYRIENYTPDLPRADVDHAIEKAFQLWSNVTPLTFTKVSEGQADIMISFVRGDHRDNSPFDGPGGNLAHAFQPGPGIGGDAHFDEDERWTNNFREYNLHRVAAHELGHSLGLSHSTDIGALMYPSYTFSGDVQLAQDDIDGIQAIYGVSQNPVQPIGPQTPKACDSKLTFDAITTIRGEVMFFKDRFYMRTNPFYPEVELNFISVFWPQLPNGLEAAYEFADRDEVRFFKGNKYWAVQGQNVLHGYPKDIYSSFGFPRTVKHIDAALSEENTGKTYFFVANKYWRYDEYKRSMDPGYPKMIAHDFPGIGHKVDAVFMKDGFFYFFHGTRQYKFDPKTKRILTLQKANSWFNCRKN

SEQ ID NO: 3171 - protein, 450 aa, Artificial Sequence
  MMP-1 variant R243L
FPATLETQEQDVDLVQKYLEKYYNLKNDGRQVEKRRNSGPVVEKLKQMQEFFGLKVTGKPDAETLKVMKQPRCGVPDVAQFVLTEGNPRWEQTHLTYRIENYTPDLPRADVDHAIEKAFQLWSNVTPLTFTKVSEGQADIMISFVRGDHRDNSPFDGPGGNLAHAFQPGPGIGGDAHFDEDERWTNNFREYNLHRVAAHELGHSLGLSHSTDIGALMYPSYTFSGDVQLAQDDIDGIQAIYGLSQNPVQPIGPQTPKACDSKLTFDAITTIRGEVMFFKDRFYMRTNPFYPEVELNFISVFWPQLPNGLEAAYEFADRDEVRFFKGNKYWAVQGQNVLHGYPKDIYSSFGFPRTVKHIDAALSEENTGKTYFFVANKYWRYDEYKRSMDPGYPKMIAHDFPGIGHKVDAVFMKDGFFYFFHGTRQYKFDPKTKRILTLQKANSWFNCRKN

SEQ ID NO: 3172 - protein, 450 aa, Artificial Sequence
  MMP-1 variant R243A
FPATLETQEQDVDLVQKYLEKYYNLKNDGRQVEKRRNSGPVVEKLKQMQEFFGLKVTGKPDAETLKVMKQPRCGVPDVAQFVLTEGNPRWEQTHLTYRIENYTPDLPRADVDHAIEKAFQLWSNVTPLTFTKVSEGQADIMISFVRGDHRDNSPFDGPGGNLAHAFQPGPGIGGDAHFDEDERWTNNFREYNLHRVAAHELGHSLGLSHSTDIGALMYPSYTFSGDVQLAQDDIDGIQAIYGASQNPVQPIGPQTPKACDSKLTFDAITTIRGEVMFFKDRFYMRTNPFYPEVELNFISVFWPQLPNGLEAAYEFADRDEVRFFKGNKYWAVQGQNVLHGYPKDIYSSFGFPRTVKHIDAALSEENTGKTYFFVANKYWRYDEYKRSMDPGYPKMIAHDFPGIGHKVDAVFMKDGFFYFFHGTRQYKFDPKTKRILTLQKANSWFNCRKN

SEQ ID NO: 3173 - protein, 450 aa, Artificial Sequence
  MMP-1 variant R243P
FPATLETQEQDVDLVQKYLEKYYNLKNDGRQVEKRRNSGPVVEKLKQMQEFFGLKVTGKPDAETLKVMKQPRCGVPDVAQFVLTEGNPRWEQTHLTYRIENYTPDLPRADVDHAIEKAFQLWSNVTPLTFTKVSEGQADIMISFVRGDHRDNSPFDGPGGNLAHAFQPGPGIGGDAHFDEDERWTNNFREYNLHRVAAHELGHSLGLSHSTDIGALMYPSYTFSGDVQLAQDDIDGIQAIYGPSQNPVQPIGPQTPKACDSKLTFDAITTIRGEVMFFKDRFYMRTNPFYPEVELNFISVFWPQLPNGLEAAYEFADRDEVRFFKGNKYWAVQGQNVLHGYPKDIYSSFGFPRTVKHIDAALSEENTGKTYFFVANKYWRYDEYKRSMDPGYPKMIAHDFPGIGHKVDAVFMKDGFFYFFHGTRQYKFDPKTKRILTLQKANSWFNCRKN

SEQ ID NO: 3174 - protein, 450 aa, Artificial Sequence
  MMP-1 variant S244D
FPATLETQEQDVDLVQKYLEKYYNLKNDGRQVEKRRNSGPVVEKLKQMQEFFGLKVTGKPDAETLKVMKQPRCGVPDVAQFVLTEGNPRWEQTHLTYRIENYTPDLPRADVDHAIEKAFQLWSNVTPLTFTKVSEGQADIMISFVRGDHRDNSPFDGPGGNLAHAFQPGPGIGGDAHFDEDERWTNNFREYNLHRVAAHELGHSLGLSHSTDIGALMYPSYTFSGDVQLAQDDIDGIQAIYGRDQNPVQPIGPQTPKACDSKLTFDAITTIRGEVMFFKDRFYMRTNPFYPEVELNFISVFWPQLPNGLEAAYEFADRDEVRFFKGNKYWAVQGQNVLHGYPKDIYSSFGFPRTVKHIDAALSEENTGKTYFFVANKYWRYDEYKRSMDPGYPKMIAHDFPGIGHKVDAVFMKDGFFYFFHGTRQYKFDPKTKRILTLQKANSWFNCRKN

SEQ ID NO: 3175 - protein, 450 aa, Artificial Sequence
  MMP-1 variant S244E
FPATLETQEQDVDLVQKYLEKYYNLKNDGRQVEKRRNSGPVVEKLKQMQEFFGLKVTGKPDAETLKVMKQPRCGVPDVAQFVLTEGNPRWEQTHLTYRIENYTPDLPRADVDHAIEKAFQLWSNVTPLTFTKVSEGQADIMISFVRGDHRDNSPFDGPGGNLAHAFQPGPGIGGDAHFDEDERWTNNFREYNLHRVAAHELGHSLGLSHSTDIGALMYPSYTFSGDVQLAQDDIDGIQAIYGREQNPVQPIGPQTPKACDSKLTFDAITTIRGEVMFFKDRFYMRTNPFYPEVELNFISVFWPQLPNGLEAAYEFADRDEVRFFKGNKYWAVQGQNVLHGYPKDIYSSFGFPRTVKHIDAALSEENTGKTYFFVANKYWRYDEYKRSMDPGYPKMIAHDFPGIGHKVDAVFMKDGFFYFFHGTRQYKFDPKTKRILTLQKANSWFNCRKN

SEQ ID NO: 3176 - protein, 450 aa, Artificial Sequence
  MMP-1 variant S244H
FPATLETQEQDVDLVQKYLEKYYNLKNDGRQVEKRRNSGPVVEKLKQMQEFFGLKVTGKPDAETLKVMKQPRCGVPDVAQFVLTEGNPRWEQTHLTYRIENYTPDLPRADVDHAIEKAFQLWSNVTPLTFTKVSEGQADIMISFVRGDHRDNSPFDGPGGNLAHAFQPGPGIGGDAHFDEDERWTNNFREYNLHRVAAHELGHSLGLSHSTDIGALMYPSYTFSGDVQLAQDDIDGIQAIYGRHQNPVQPIGPQTPKACDSKLTFDAITTIRGEVMFFKDRFYMRTNPFYPEVELNFISVFWPQLPNGLEAAYEFADRDEVRFFKGNKYWAVQGQNVLHGYPKDIYSSFGFPRTVKHIDAALSEENTGKTYFFVANKYWRYDEYKRSMDPGYPKMIAHDFPGIGHKVDAVFMKDGFFYFFHGTRQYKFDPKTKRILTLQKANSWFNCRKN

SEQ ID NO: 3177 - protein, 450 aa, Artificial Sequence
  MMP-1 variant S244K
FPATLETQEQDVDLVQKYLEKYYNLKNDGRQVEKRRNSGPVVEKLKQMQEFFGLKVTGKPDAETLKVMKQPRCGVPDVAQFVLTEGNPRWEQTHLTYRIENYTPDLPRADVDHAIEKAFQLWSNVTPLTFTKVSEGQADIMISFVRGDHRDNSPFDGPGGNLAHAFQPGPGIGGDAHFDEDERWTNNFREYNLHRVAAHELGHSLGLSHSTDIGALMYPSYTFSGDVQLAQDDIDGIQAIYGRKQNPVQPIGPQTPKACDSKLTFDAITTIRGEVMFFKDRFYMRTNPFYPEVELNFISVFWPQLPNGLEAAYEFADRDEVRFFKGNKYWAVQGQNVLHGYPKDIYSSFGFPRTVKHIDAALSEENTGKTYFFVANKYWRYDEYKRSMDPGYPKMIAHDFPGIGHKVDAVFMKDGFFYFFHGTRQYKFDPKTKRILTLQKANSWFNCRKN

SEQ ID NO: 3178 - protein, 450 aa, Artificial Sequence
  MMP-1 variant S244R
FPATLETQEQDVDLVQKYLEKYYNLKNDGRQVEKRRNSGPVVEKLKQMQEFFGLKVTGKPDAETLKVMKQPRCGVPDVAQFVLTEGNPRWEQTHLTYRIENYTPDLPRADVDHAIEKAFQLWSNVTPLTFTKVSEGQADIMISFVRGDHRDNSPFDGPGGNLAHAFQPGPGIGGDAHFDEDERWTNNFREYNLHRVAAHELGHSLGLSHSTDIGALMYPSYTFSGDVQLAQDDIDGIQAIYGRRQNPVQPIGPQTPKACDSKLTFDAITTIRGEVMFFKDRFYMRTNPFYPEVELNFISVFWPQLPNGLEAAYEFADRDEVRFFKGNKYWAVQGQNVLHGYPKDIYSSFGFPRTVKHIDAALSEENTGKTYFFVANKYWRYDEYKRSMDPGYPKMIAHDFPGIGHKVDAVFMKDGFFYFFHGTRQYKFDPKTKRILTLQKANSWFNCRKN

SEQ ID NO: 3179 - protein, 450 aa, Artificial Sequence
  MMP-1 variant S244C
FPATLETQEQDVDLVQKYLEKYYNLKNDGRQVEKRRNSGPVVEKLKQMQEFFGLKVTGKPDAETLKVMKQPRCGVPDVAQFVLTEGNPRWEQTHLTYRIENYTPDLPRADVDHAIEKAFQLWSNVTPLTFTKVSEGQADIMISFVRGDHRDNSPFDGPGGNLAHAFQPGPGIGGDAHFDEDERWTNNFREYNLHRVAAHELGHSLGLSHSTDIGALMYPSYTFSGDVQLAQDDIDGIQAIYGRCQNPVQPIGPQTPKACDSKLTFDAITTIRGEVMFFKDRFYMRTNPFYPEVELNFISVFWPQLPNGLEAAYEFADRDEVRFFKGNKYWAVQGQNVLHGYPKDIYSSFGFPRTVKHIDAALSEENTGKTYFFVANKYWRYDEYKRSMDPGYPKMIAHDFPGIGHKVDAVFMKDGFFYFFHGTRQYKFDPKTKRILTLQKANSWFNCRKN

SEQ ID NO: 3180 - protein, 450 aa, Artificial Sequence
  MMP-1 variant S244N
FPATLETQEQDVDLVQKYLEKYYNLKNDGRQVEKRRNSGPVVEKLKQMQEFFGLKVTGKPDAETLKVMKQPRCGVPDVAQFVLTEGNPRWEQTHLTYRIENYTPDLPRADVDHAIEKAFQLWSNVTPLTFTKVSEGQADIMISFVRGDHRDNSPFDGPGGNLAHAFQPGPGIGGDAHFDEDERWTNNFREYNLHRVAAHELGHSLGLSHSTDIGALMYPSYTFSGDVQLAQDDIDGIQAIYGRNQNPVQPIGPQTPKACDSKLTFDAITTIRGEVMFFKDRFYMRTNPFYPEVELNFISVFWPQLPNGLEAAYEFADRDEVRFFKGNKYWAVQGQNVLHGYPKDIYSSFGFPRTVKHIDAALSEENTGKTYFFVANKYWRYDEYKRSMDPGYPKMIAHDFPGIGHKVDAVFMKDGFFYFFHGTRQYKFDPKTKRILTLQKANSWFNCRKN

SEQ ID NO: 3181 - protein, 450 aa, Artificial Sequence
  MMP-1 variant S244Q
FPATLETQEQDVDLVQKYLEKYYNLKNDGRQVEKRRNSGPVVEKLKQMQEFFGLKVTGKPDAETLKVMKQPRCGVPDVAQFVLTEGNPRWEQTHLTYRIENYTPDLPRADVDHAIEKAFQLWSNVTPLTFTKVSEGQADIMISFVRGDHRDNSPFDGPGGNLAHAFQPGPGIGGDAHFDEDERWTNNFREYNLHRVAAHELGHSLGLSHSTDIGALMYPSYTFSGDVQLAQDDIDGIQAIYGRQQNPVQPIGPQTPKACDSKLTFDAITTIRGEVMFFKDRFYMRTNPFYPEVELNFISVFWPQLPNGLEAAYEFADRDEVRFFKGNKYWAVQGQNVLHGYPKDIYSSFGFPRTVKHIDAALSEENTGKTYFFVANKYWRYDEYKRSMDPGYPKMIAHDFPGIGHKVDAVFMKDGFFYFFHGTRQYKFDPKTKRILTLQKANSWFNCRKN

SEQ ID NO: 3182 - protein, 450 aa, Artificial Sequence
  MMP-1 variant S244T
FPATLETQEQDVDLVQKYLEKYYNLKNDGRQVEKRRNSGPVVEKLKQMQEFFGLKVTGKPDAETLKVMKQPRCGVPDVAQFVLTEGNPRWEQTHLTYRIENYTPDLPRADVDHAIEKAFQLWSNVTPLTFTKVSEGQADIMISFVRGDHRDNSPFDGPGGNLAHAFQPGPGIGGDAHFDEDERWTNNFREYNLHRVAAHELGHSLGLSHSTDIGALMYPSYTFSGDVQLAQDDIDGIQAIYGRTQNPVQPIGPQTPKACDSKLTFDAITTIRGEVMFFKDRFYMRTNPFYPEVELNFISVFWPQLPNGLEAAYEFADRDEVRFFKGNKYWAVQGQNVLHGYPKDIYSSFGFPRTVKHIDAALSEENTGKTYFFVANKYWRYDEYKRSMDPGYPKMIAHDFPGIGHKVDAVFMKDGFFYFFHGTRQYKFDPKTKRILTLQKANSWFNCRKN

SEQ ID NO: 3183 - protein, 450 aa, Artificial Sequence
  MMP-1 variant S244Y
FPATLETQEQDVDLVQKYLEKYYNLKNDGRQVEKRRNSGPVVEKLKQMQEFFGLKVTGKPDAETLKVMKQPRCGVPDVAQFVLTEGNPRWEQTHLTYRIENYTPDLPRADVDHAIEKAFQLWSNVTPLTFTKVSEGQADIMISFVRGDHRDNSPFDGPGGNLAHAFQPGPGIGGDAHFDEDERWTNNFREYNLHRVAAHELGHSLGLSHSTDIGALMYPSYTFSGDVQLAQDDIDGIQAIYGRYQNPVQPIGPQTPKACDSKLTFDAITTIRGEVMFFKDRFYMRTNPFYPEVELNFISVFWPQLPNGLEAAYEFADRDEVRFFKGNKYWAVQGQNVLHGYPKDIYSSFGFPRTVKHIDAALSEENTGKTYFFVANKYWRYDEYKRSMDPGYPKMIAHDFPGIGHKVDAVFMKDGFFYFFHGTRQYKFDPKTKRILTLQKANSWFNCRKN

SEQ ID NO: 3184 - protein, 450 aa, Artificial Sequence
  MMP-1 variant S244G
FPATLETQEQDVDLVQKYLEKYYNLKNDGRQVEKRRNSGPVVEKLKQMQEFFGLKVTGKPDAETLKVMKQPRCGVPDVAQFVLTEGNPRWEQTHLTYRIENYTPDLPRADVDHAIEKAFQLWSNVTPLTFTKVSEGQADIMISFVRGDHRDNSPFDGPGGNLAHAFQPGPGIGGDAHFDEDERWTNNFREYNLHRVAAHELGHSLGLSHSTDIGALMYPSYTFSGDVQLAQDDIDGIQAIYGRGQNPVQPIGPQTPKACDSKLTFDAITTIRGEVMFFKDRFYMRTNPFYPEVELNFISVFWPQLPNGLEAAYEFADRDEVRFFKGNKYWAVQGQNVLHGYPKDIYSSFGFPRTVKHIDAALSEENTGKTYFFVANKYWRYDEYKRSMDPGYPKMIAHDFPGIGHKVDAVFMKDGFFYFFHGTRQYKFDPKTKRILTLQKANSWFNCRKN

SEQ ID NO: 3185 - protein, 450 aa, Artificial Sequence
  MMP-1 variant S244F
FPATLETQEQDVDLVQKYLEKYYNLKNDGRQVEKRRNSGPVVEKLKQMQEFFGLKVTGKPDAETLKVMKQPRCGVPDVAQFVLTEGNPRWEQTHLTYRIENYTPDLPRADVDHAIEKAFQLWSNVTPLTFTKVSEGQADIMISFVRGDHRDNSPFDGPGGNLAHAFQPGPGIGGDAHFDEDERWTNNFREYNLHRVAAHELGHSLGLSHSTDIGALMYPSYTFSGDVQLAQDDIDGIQAIYGRFQNPVQPIGPQTPKACDSKLTFDAITTIRGEVMFFKDRFYMRTNPFYPEVELNFISVFWPQLPNGLEAAYEFADRDEVRFFKGNKYWAVQGQNVLHGYPKDIYSSFGFPRTVKHIDAALSEENTGKTYFFVANKYWRYDEYKRSMDPGYPKMIAHDFPGIGHKVDAVFMKDGFFYFFHGTRQYKFDPKTKRILTLQKANSWFNCRKN

SEQ ID NO: 3186 - protein, 450 aa, Artificial Sequence
  MMP-1 variant S244M
FPATLETQEQDVDLVQKYLEKYYNLKNDGRQVEKRRNSGPVVEKLKQMQEFFGLKVTGKPDAETLKVMKQPRCGVPDVAQFVLTEGNPRWEQTHLTYRIENYTPDLPRADVDHAIEKAFQLWSNVTPLTFTKVSEGQADIMISFVRGDHRDNSPFDGPGGNLAHAFQPGPGIGGDAHFDEDERWTNNFREYNLHRVAAHELGHSLGLSHSTDIGALMYPSYTFSGDVQLAQDDIDGIQAIYGRMQNPVQPIGPQTPKACDSKLTFDAITTIRGEVMFFKDRFYMRTNPFYPEVELNFISVFWPQLPNGLEAAYEFADRDEVRFFKGNKYWAVQGQNVLHGYPKDIYSSFGFPRTVKHIDAALSEENTGKTYFFVANKYWRYDEYKRSMDPGYPKMIAHDFPGIGHKVDAVFMKDGFFYFFHGTRQYKFDPKTKRILTLQKANSWFNCRKN

SEQ ID NO: 3187 - protein, 450 aa, Artificial Sequence
  MMP-1 variant S244W
FPATLETQEQDVDLVQKYLEKYYNLKNDGRQVEKRRNSGPVVEKLKQMQEFFGLKVTGKPDAETLKVMKQPRCGVPDVAQFVLTEGNPRWEQTHLTYRIENYTPDLPRADVDHAIEKAFQLWSNVTPLTFTKVSEGQADIMISFVRGDHRDNSPFDGPGGNLAHAFQPGPGIGGDAHFDEDERWTNNFREYNLHRVAAHELGHSLGLSHSTDIGALMYPSYTFSGDVQLAQDDIDGIQAIYGRWQNPVQPIGPQTPKACDSKLTFDAITTIRGEVMFFKDRFYMRTNPFYPEVELNFISVFWPQLPNGLEAAYEFADRDEVRFFKGNKYWAVQGQNVLHGYPKDIYSSFGFPRTVKHIDAALSEENTGKTYFFVANKYWRYDEYKRSMDPGYPKMIAHDFPGIGHKVDAVFMKDGFFYFFHGTRQYKFDPKTKRILTLQKANSWFNCRKN

SEQ ID NO: 3188 - protein, 450 aa, Artificial Sequence
  MMP-1 variant S244I
FPATLETQEQDVDLVQKYLEKYYNLKNDGRQVEKRRNSGPVVEKLKQMQEFFGLKVTGKPDAETLKVMKQPRCGVPDVAQFVLTEGNPRWEQTHLTYRIENYTPDLPRADVDHAIEKAFQLWSNVTPLTFTKVSEGQADIMISFVRGDHRDNSPFDGPGGNLAHAFQPGPGIGGDAHFDEDERWTNNFREYNLHRVAAHELGHSLGLSHSTDIGALMYPSYTFSGDVQLAQDDIDGIQAIYGRIQNPVQPIGPQTPKACDSKLTFDAITTIRGEVMFFKDRFYMRTNPFYPEVELNFISVFWPQLPNGLEAAYEFADRDEVRFFKGNKYWAVQGQNVLHGYPKDIYSSFGFPRTVKHIDAALSEENTGKTYFFVANKYWRYDEYKRSMDPGYPKMIAHDFPGIGHKVDAVFMKDGFFYFFHGTRQYKFDPKTKRILTLQKANSWFNCRKN

SEQ ID NO: 3189 - protein, 450 aa, Artificial Sequence
  MMP-1 variant S244V
FPATLETQEQDVDLVQKYLEKYYNLKNDGRQVEKRRNSGPVVEKLKQMQEFFGLKVTGKPDAETLKVMKQPRCGVPDVAQFVLTEGNPRWEQTHLTYRIENYTPDLPRADVDHAIEKAFQLWSNVTPLTFTKVSEGQADIMISFVRGDHRDNSPFDGPGGNLAHAFQPGPGIGGDAHFDEDERWTNNFREYNLHRVAAHELGHSLGLSHSTDIGALMYPSYTFSGDVQLAQDDIDGIQAIYGRVQNPVQPIGPQTPKACDSKLTFDAITTIRGEVMFFKDRFYMRTNPFYPEVELNFISVFWPQLPNGLEAAYEFADRDEVRFFKGNKYWAVQGQNVLHGYPKDIYSSFGFPRTVKHIDAALSEENTGKTYFFVANKYWRYDEYKRSMDPGYPKMIAHDFPGIGHKVDAVFMKDGFFYFFHGTRQYKFDPKTKRILTLQKANSWFNCRKN

SEQ ID NO: 3190 - protein, 450 aa, Artificial Sequence
  MMP-1 variant S244L
FPATLETQEQDVDLVQKYLEKYYNLKNDGRQVEKRRNSGPVVEKLKQMQEFFGLKVTGKPDAETLKVMKQPRCGVPDVAQFVLTEGNPRWEQTHLTYRIENYTPDLPRADVDHAIEKAFQLWSNVTPLTFTKVSEGQADIMISFVRGDHRDNSPFDGPGGNLAHAFQPGPGIGGDAHFDEDERWTNNFREYNLHRVAAHELGHSLGLSHSTDIGALMYPSYTFSGDVQLAQDDIDGIQAIYGRLQNPVQPIGPQTPKACDSKLTFDAITTIRGEVMFFKDRFYMRTNPFYPEVELNFISVFWPQLPNGLEAAYEFADRDEVRFFKGNKYWAVQGQNVLHGYPKDIYSSFGFPRTVKHIDAALSEENTGKTYFFVANKYWRYDEYKRSMDPGYPKMIAHDFPGIGHKVDAVFMKDGFFYFFHGTRQYKFDPKTKRILTLQKANSWFNCRKN

SEQ ID NO: 3191 - protein, 450 aa, Artificial Sequence
  MMP-1 variant S244A
FPATLETQEQDVDLVQKYLEKYYNLKNDGRQVEKRRNSGPVVEKLKQMQEFFGLKVTGKPDAETLKVMKQPRCGVPDVAQFVLTEGNPRWEQTHLTYRIENYTPDLPRADVDHAIEKAFQLWSNVTPLTFTKVSEGQADIMISFVRGDHRDNSPFDGPGGNLAHAFQPGPGIGGDAHFDEDERWTNNFREYNLHRVAAHELGHSLGLSHSTDIGALMYPSYTFSGDVQLAQDDIDGIQAIYGRAQNPVQPIGPQTPKACDSKLTFDAITTIRGEVMFFKDRFYMRTNPFYPEVELNFISVFWPQLPNGLEAAYEFADRDEVRFFKGNKYWAVQGQNVLHGYPKDIYSSFGFPRTVKHIDAALSEENTGKTYFFVANKYWRYDEYKRSMDPGYPKMIAHDFPGIGHKVDAVFMKDGFFYFFHGTRQYKFDPKTKRILTLQKANSWFNCRKN

SEQ ID NO: 3192 - protein, 450 aa, Artificial Sequence
  MMP-1 variant S244P
FPATLETQEQDVDLVQKYLEKYYNLKNDGRQVEKRRNSGPVVEKLKQMQEFFGLKVTGKPDAETLKVMKQPRCGVPDVAQFVLTEGNPRWEQTHLTYRIENYTPDLPRADVDHAIEKAFQLWSNVTPLTFTKVSEGQADIMISFVRGDHRDNSPFDGPGGNLAHAFQPGPGIGGDAHFDEDERWTNNFREYNLHRVAAHELGHSLGLSHSTDIGALMYPSYTFSGDVQLAQDDIDGIQAIYGRPQNPVQPIGPQTPKACDSKLTFDAITTIRGEVMFFKDRFYMRTNPFYPEVELNFISVFWPQLPNGLEAAYEFADRDEVRFFKGNKYWAVQGQNVLHGYPKDIYSSFGFPRTVKHIDAALSEENTGKTYFFVANKYWRYDEYKRSMDPGYPKMIAHDFPGIGHKVDAVFMKDGFFYFFHGTRQYKFDPKTKRILTLQKANSWFNCRKN

SEQ ID NO: 3193 - protein, 450 aa, Artificial Sequence
  MMP-1 variant Q245D
FPATLETQEQDVDLVQKYLEKYYNLKNDGRQVEKRRNSGPVVEKLKQMQEFFGLKVTGKPDAETLKVMKQPRCGVPDVAQFVLTEGNPRWEQTHLTYRIENYTPDLPRADVDHAIEKAFQLWSNVTPLTFTKVSEGQADIMISFVRGDHRDNSPFDGPGGNLAHAFQPGPGIGGDAHFDEDERWTNNFREYNLHRVAAHELGHSLGLSHSTDIGALMYPSYTFSGDVQLAQDDIDGIQAIYGRSDNPVQPIGPQTPKACDSKLTFDAITTIRGEVMFFKDRFYMRTNPFYPEVELNFISVFWPQLPNGLEAAYEFADRDEVRFFKGNKYWAVQGQNVLHGYPKDIYSSFGFPRTVKHIDAALSEENTGKTYFFVANKYWRYDEYKRSMDPGYPKMIAHDFPGIGHKVDAVFMKDGFFYFFHGTRQYKFDPKTKRILTLQKANSWFNCRKN

SEQ ID NO: 3194 - protein, 450 aa, Artificial Sequence
  MMP-1 variant Q245E
FPATLETQEQDVDLVQKYLEKYYNLKNDGRQVEKRRNSGPVVEKLKQMQEFFGLKVTGKPDAETLKVMKQPRCGVPDVAQFVLTEGNPRWEQTHLTYRIENYTPDLPRADVDHAIEKAFQLWSNVTPLTFTKVSEGQADIMISFVRGDHRDNSPFDGPGGNLAHAFQPGPGIGGDAHFDEDERWTNNFREYNLHRVAAHELGHSLGLSHSTDIGALMYPSYTFSGDVQLAQDDIDGIQAIYGRSENPVQPIGPQTPKACDSKLTFDAITTIRGEVMFFKDRFYMRTNPFYPEVELNFISVFWPQLPNGLEAAYEFADRDEVRFFKGNKYWAVQGQNVLHGYPKDIYSSFGFPRTVKHIDAALSEENTGKTYFFVANKYWRYDEYKRSMDPGYPKMIAHDFPGIGHKVDAVFMKDGFFYFFHGTRQYKFDPKTKRILTLQKANSWFNCRKN

SEQ ID NO: 3195 - protein, 450 aa, Artificial Sequence
  MMP-1 variant Q245H
FPATLETQEQDVDLVQKYLEKYYNLKNDGRQVEKRRNSGPVVEKLKQMQEFFGLKVTGKPDAETLKVMKQPRCGVPDVAQFVLTEGNPRWEQTHLTYRIENYTPDLPRADVDHAIEKAFQLWSNVTPLTFTKVSEGQADIMISFVRGDHRDNSPFDGPGGNLAHAFQPGPGIGGDAHFDEDERWTNNFREYNLHRVAAHELGHSLGLSHSTDIGALMYPSYTFSGDVQLAQDDIDGIQAIYGRSHNPVQPIGPQTPKACDSKLTFDAITTIRGEVMFFKDRFYMRTNPFYPEVELNFISVFWPQLPNGLEAAYEFADRDEVRFFKGNKYWAVQGQNVLHGYPKDIYSSFGFPRTVKHIDAALSEENTGKTYFFVANKYWRYDEYKRSMDPGYPKMIAHDFPGIGHKVDAVFMKDGFFYFFHGTRQYKFDPKTKRILTLQKANSWFNCRKN

SEQ ID NO: 3196 - protein, 450 aa, Artificial Sequence
  MMP-1 variant Q245K
FPATLETQEQDVDLVQKYLEKYYNLKNDGRQVEKRRNSGPVVEKLKQMQEFFGLKVTGKPDAETLKVMKQPRCGVPDVAQFVLTEGNPRWEQTHLTYRIENYTPDLPRADVDHAIEKAFQLWSNVTPLTFTKVSEGQADIMISFVRGDHRDNSPFDGPGGNLAHAFQPGPGIGGDAHFDEDERWTNNFREYNLHRVAAHELGHSLGLSHSTDIGALMYPSYTFSGDVQLAQDDIDGIQAIYGRSKNPVQPIGPQTPKACDSKLTFDAITTIRGEVMFFKDRFYMRTNPFYPEVELNFISVFWPQLPNGLEAAYEFADRDEVRFFKGNKYWAVQGQNVLHGYPKDIYSSFGFPRTVKHIDAALSEENTGKTYFFVANKYWRYDEYKRSMDPGYPKMIAHDFPGIGHKVDAVFMKDGFFYFFHGTRQYKFDPKTKRILTLQKANSWFNCRKN

(The sequence listing continues in the following parts.)

1. A modified matrix metalloprotease-1 (MMP-1), comprising one or more modification(s) in the sequence of amino acid residues of an MMP-1 polypeptide or a catalytically active fragment thereof, wherein:
the modification(s) confer to the MMP-1 or the catalytically active fragment thereof, a ratio of enzymatic activity at a permissive temperature compared to at a nonpermissive temperature of at least 1.2; and
if the modified MMP-1 is a catalytically active fragment thereof, the active fragment exhibits the ratio of enzymatic activity.

2. The modified MMP-1 of claim 1, wherein the modification is selected from among an amino acid replacement(s), insertion, deletion and combinations thereof.

3. The modified MMP-1 of claim 1, wherein the unmodified polypeptide comprises the sequence of amino acids set forth in SEQ ID NO:1, or is an allelic or species variant thereof, a zymogen, a mature form, or a catalytically active fragment that contains the modification.

4. The modified MMP-1 polypeptide of claim 3, wherein the unmodified MMP-1 polypeptide comprises the sequence of amino acids set forth in SEQ ID NO:2, or is an allelic and species variant thereof, a mature form, or a catalytically fragment thereof that contains the modification.

5. The modified MMP-1 polypeptide of claim 3, wherein the catalytically active fragment comprises the catalytic domain or a catalytically active portion of the catalytic domain.

6. A modified MMP-1 of claim 1 that has lower activity at the nonpermissive temperature than the MMP-1 that does not include the modification has at the nonpermissive temperature.

7. A modified MMP-1 of claim 1, wherein the permissive temperature is lower than the nonpermissive temperature.

8. The modified MMP-1 polypeptide of claim 1, wherein the permissive temperature is between 18° C., 19° C. or 20° C. and 30° C.

9. The modified MMP-1 polypeptide of claim 8, wherein the permissive temperature is or is about 25° C.

10. The modified MMP-1 polypeptide of claim 1, wherein the non-permissive temperature is between 34° C. and 39° C.

11. The modified MMP-1 polypeptide of claim 10, wherein the nonpermissive temperature is or is about 34° C. or 37° C.

12. The modified MMP-1 polypeptide of claim 1, wherein:
the modification is an amino acid replacement(s) and the polypeptide comprises 1, 2, 3, 4, 5, 6, 7, 8, 9, 10, 11, 12, 13, 14, 15, 16, 17, 18, 19 or 20 replacements.

13. The modified MMP-1 polypeptide of claim 1 that contains only one amino acid replacement to confer the ratio of enzymatic activity.

14. The modified MMP-1 polypeptide of claim 1 that contains only two amino acid replacements to confer the ratio of enzymatic activity.

15. The modified MMP-1 polypeptide of claim 1 that contains only the catalytic domain of an MMP-1 or a catalytically active portion thereof, wherein the catalytic domain contains at least one of the amino acid replacements that confers the ratio of enzymatic activity.

16. A fusion protein, comprising the modified MMP-1 polypeptide of claim 15 with a second but different polypeptide that is not an MMP-1.

17. The modified MMP-1 polypeptide of claim 1 wherein:
a modification is an amino acid replacement(s) and the replacement(s) is at a position corresponding to any one or more of positions 84, 85, 95, 98, 99, 100, 103, 104, 105, 106, 109, 110, 111, 112, 118, 123, 124, 126, 147, 150, 151, 152, 153, 155, 156, 158, 159, 170, 171, 176, 178, 179, 180, 181, 182, 183, 185, 187, 188, 189, 190, 191, 192, 194, 195, 197, 198, 206, 207, 208, 210, 211, 212, 218, 223, 227, 228, 229, 230, 233, 234, 237, 240, 251, 254, 255, 256, 257 and 258 in an MMP-1 polypeptide comprising the sequence of amino acids set forth in SEQ ID NO:2.

18. The modified MMP-1 polypeptide of claim 17, wherein the modification is selected from among T84F, E85F, L95K, L95I, R98D, I99Q, E100V, E100R, E100S, E100T, E100F, E100I, E100N, T103Y, P104A, P104M, D105A, D105F, D105G, D105I, D105L, D105N, D105R, D105S, D105T, D105W, D105E, L106C, L106S, A109H, D110A, V111R, D112S, A118T, S123V, N124D, T126S, G147P, R150P, R150V, R150D, R150I, R150H, D151G, N152A, N152S, S153T, F155L, F155A, D156H, D156L, D156A, D156W, D156V, D156K, D156T, D156R, D156M, P158T, P158G, P158K, P158N, G159V, G159T, G159M, G159I, G159W, G159L, G159C, P170D, P170A, G171P, G171E, G171D, A176F, A176W, F178T, F178L, D179N, D179V, D179C, E180Y, E180R, E180T, E180F, E180G, E180S, E180N, E180D, D181T, D181L, D181K, D181C, D181G, E182T, E182Q, E182M, E182G, E183G, R183S, T185R, T185Y, T185H, T185G, T185V, T185Q, T185A, T185E, T185D, N187R, N187M, N187W, N187F, N187K, N187I, N187A, N187G, N187C, N187H, F188V, R189N, R189T, R189Q, E190G, E190Y, E190D, Y191V, N192H, N192S, N192D, N192C, H194P, R195C, R195W, R195L, R195G, R195Q, R195A, R195D, R195V, A197V, A197C, A198G, A198L, A198M, G206A, G206S, L207R, L207V, L207I, L207G, S208R, S208L, S210V, S210A, T211L, D212G, D212H, Y218S, F223C, F223E, F223G, F223A, F223S, F223K, F223M, V227C, V227D, V227E, V227L, V227S, V227W, V227G, V227H, V227Q, V227R, Q228P, L229A, L229T, L229I, A230V, D233E, I234A, I234T, I234E, I234Q, I237L, I237W, I237N, I240S, I240A, I240C, I251S, I251W, Q254S, T255H, P256C, K257P, K257T and A258P.

19. The modified MMP-1 polypeptide of claim 1 wherein:
the modification is an amino acid replacement(s) and the replacement(s) is at a position corresponding to any one or more of positions 95, 105, 150, 151, 155, 156, 159, 176, 179, 180, 181, 182, 185, 187, 195, 198, 206, 210, 212, 218, 223, 227, 228, 229, 230, 233, 234, and 240 in an MMP-1 polypeptide having a sequence of amino acids set forth in SEQ ID NO:2; and
the modification(s) confer to the MMP-1, allelic or species variant thereof or an active fragment thereof, a ratio of enzymatic activity at a permissive temperature compared to at a nonpermissive temperature of at least 1.5.

20. The modified MMP-1 polypeptide of claim 19, wherein the modification is selected from among L95K, D105A, D105F, D105G, D105I, D105L, D105N, D105R, D105S, D105T, D105W, R150P, D151G, F155A, D156K, D156T, D156L, D156A, D156W, D156V, D156H, D156R, G159V, G159T, A176F, D179N, E180Y, E180T, E180F, D181L, D181K, E182T, E182Q, T185R, T185H, T185Q, T185A, T185E, N187R, N187M, N187F, N187K, N187I, R195V, A198L, A198M, G206A, G206S, S210V, Y218S, F223E, V227C, V227E, V227W, Q228P, L229T, L229I, D233E, I234A, I234T, I234E, I240S, and I240C.

21. The modified MMP-1 polypeptide of claim 1, wherein the polypeptide retains the activity of the unmodified MMP-1 at the permissive temperature.

22. The modified MMP-1 polypeptide of claim 1, wherein the activity of the polypeptide, following exposure to the nonpermissive temperature, is reversible upon exposure to the permissive temperature.

23. The modified MMP-1 polypeptide of claim 22, wherein the modification is selected from among D105A, D105F, D105G, D105S, D105T, R150P, G159T, E180Y, E180T, E180F, T185H, T185Q, T185A, T185E, N187R, N187M, N187K, R195V, A198L, A198M, S210V, Y218S, F223E, V227W, L229I and I240C.

24. The modified MMP-1 polypeptide of claim 1, wherein the activity of the polypeptide is irreversibly inactive upon exposure to the nonpermissive temperature.

25. The modified MMP-1 polypeptide of claim 24, wherein the modification is selected from among L95K, D105I, D105L, D105N, D105R, D105W, D151G, F155A, D156K, D156T, D156L, D156A, D156W, D156V, D156H, D156R, G159V, A176F, D179N, D181L, D181K, E182T, E182Q, T185R, N187F, N187I, G206A, G206S, V227C, V227E, Q228E, L229T, D233E, I234A, I234T, I234E and I240S.

26. The modified MMP-1 polypeptide of claim 1 that has a sequence of amino acids set forth in any of SEQ ID NOS: 3-705, 779-3458 3507-3531 and 3541-3546.

27. The modified MMP-1 polypeptide of claim 1, wherein the polypeptide comprises two or more amino acid replacement(s) and the replacement(s) is at a position corresponding to any two or more of positions 95, 105, 150, 156, 159, 179, 180, 182, 185, 187, 198, 227, 234 and 240 in an MMP-1 polypeptide having a sequence of amino acids set forth in SEQ ID NO:2.

28. The modified MMP-1 polypeptide of claim 27, wherein the two or more modifications are selected from among L95K, D105N, R150P, D156K, D156T, G159V, D179N, E180T, A198L, V227E, and I240S.

29. The modified MMP-1 polypeptide of claim 28, wherein the modified MMP-1 polypeptide is selected from among a polypeptide having amino acid replacements D156K/G159V/D179N; R150P/V227E; D156T/V227E; G159V/A198L; D105N/A198L; D179N/V227E; A198L/V227E; E180T/V227E; D179N/A198L; D156K/D179N; D105N/R150P/D156K/G159V/D179N/E180T; D105N/R150P/E180T; G159V/I240S; D156T/D179N/I240S; D156T/G159V; R150P/E180T; D156T/D179N; D179N/I240S; L95K/D156T/D179N; G159V/D179N; L95K/D105N/E180T; R150P/D156T/A198L; L95K/D105N/R150P/D156T/G159V/A198L/V227E/I240S; L95K/R150P; and D105N/E180T.

30. The modified MMP-1 polypeptide of claim 1, further comprising at least one amino acid replacement(s) that confers increased activity compared to the MMP-1 polypeptide not containing the amino acid replacement(s).

31. The modified MMP-1 polypeptide of claim 30, wherein the amino acid replacement(s) is at a position corresponding to any one or more of positions 81, 84, 85, 86, 87, 89, 104, 105, 106, 107, 108, 109, 124, 131, 133, 134, 135, 143, 146, 147, 150, 152, 153, 154, 157, 158, 160, 161, 164, 166, 167, 180, 183, 189, 190, 207, 208, 211, 213, 214, 216, 218, 220, 222, 223, 224, 225, 226, 227, 228, 229, 230, 231, 232, 235, 236, 238, 239, 244, 249, 254, 256, 257 and 258 in an MMP-1 polypeptide comprising the sequence of amino acids set forth in SEQ ID NO:2.

32. The modified MMP-1 polypeptide of claim 31, wherein the amino acid replacement is selected from among F81L, F81A, F81G, F81Q, F81R, F81H, T84H, T84L, T84D, T84R, T84G, T84A, E85S, E85V, G86S, N87P, N87R, N87G, N87Q, R89A, R89T, R89G, R89K, P104E, P104D, P104Q, D105V, L106V, P107T, P107S, P107A, R108E, R108A, R108K, R108S, A109S, A109R, A109G, A109M, A109V, N124G, T131D, K132R, V133T, V133L, S134E, S134D, E135M, S143I, R146S, G147R, G147F, R150E, R150G, R150M, T150T, R150A, R150N, R150K, R150L, R150V, R150D, N152G, N152F, N152L, N152I, S153T, S153P, S153F, S153D, S153Y, P154S, P154I, G157F, P158V, P158I, G160Q, N161L, N161R, N161Y, N161E, N161T, N161I, N161V, N161F, N161Q, H164S, F166W, Q167R, Q167A, Q167S, Q167F, Q167P, Q167T, Q167V, Q167M, E180D, R183S, R189N, R189T, R189Q, E190D, L207M, S208K, S208R, S208L, T211N, I213G, G214L, G214E, L216I, Y218W, S220R, S220A, S220Q, S220T, S220G, S220M, S220V, S220N, T222R, T222P, T222S, T222F, T222N, F223Y, F223H, 2224Q, S224K, S224D, G225Q, G225E, G225H, D226S, D226E, D226P, D226I, V227T, Q228A, Q228D, Q228E, Q228G, Q228H, Q228K, Q228L, Q228M, Q228N, Q228R, Q228S, Q228T, Q228W, Q228Y, L229Q, L229P, L229V, A230G, A230W, A230D, A230I, A230S, A230C, A230V, A230T, A230M, A230N, A230H, Q231I, Q231A, Q231F, Q231D, Q231G, Q231V, Q231W, Q231S, Q231H, Q231M, D232H, D232G, D232R, D232P, D232Y, D232S, D232F, D232V, D232K, D232W, D232Q, D232E, D232T, D232L, D235G, D235A, D235L, D235E, D235R, D235Q, D235T, D235N, G236M, G236R, G236S, G236T, G236C, G236K, G236E, G236L, G236N, Q238T, A239S, A239V, A239L, A239I, A239G, A239K, A239H, A239R, S244W, S244Q, Q249W, Q254S, P256S, K257E, K257R, and A258P.

33. The modified MMP-1 polypeptide of claim 32, wherein the modified MMP-1 polypeptide is selected from a polypeptide having amino acid replacements S208K/G159V; S208K/D179N; S208K/V227E; G214E/G159V; G214E/D179N; and I213G/D179N.

34. A modified MMP-1 polypeptide, comprising one or more amino acid replacement(s) in the sequence of amino acid residues of an MMP-1 polypeptide or a catalytically active fragment thereof, wherein the replacement(s) confer to the MMP-1 or the catalytically active fragment thereof increased activity compared to the MMP-1 polypeptide not containing the amino acid replacement(s).

35. A modified MMP-1 polypeptide, comprising at least two amino acid replacement(s) in the sequence of amino acid residues of an MMP-1 polypeptide or a catalytically active fragment thereof, wherein:
at least one amino acid replacement confers to the MMP-1 or the catalytically active fragment thereof, a ratio of enzymatic activity at a permissive temperature compared to at a nonpermissive temperature of at least 1.2; and
at least one amino acid replacement confers to the MMP-1 or the catalytically active fragment thereof increased activity compared to the MMP-1 polypeptide not containing the amino acid replacement.

36. The modified MMP-1 polypeptide of claim 1 that is a zymogen.

37. The modified MMP-1 polypeptide of claim 1 that is a mature enzyme.

38. The modified MMP-1 polypeptide of claim 1 that contains only the catalytically active domain or a catalytically active portion of the catalytic domain.

39. The modified MMP-1 polypeptide of claim 1 that lacks all or a portion of a proline rich linker and/or a hemopexin domain.

40. The modified MMP-1 polypeptide of claim 1 that comprises one or more additional modifications, wherein the one or more additional modifications confer increased stability, increased half-life, altered substrate specificity and/or increased resistance to inhibitors.

41. The modified MMP-1 polypeptide of claim 1 that is glycosylated or PEGylated.

42. The modified MMP-1 polypeptide of claim 1 that is a fusion protein.

43. The modified MMP-1 polypeptide of claim 42 that is fused to an Fc domain or other multimerization domain.

44. A nucleic acid molecule, comprising a sequence of nucleotides encoding a modified MMP polypeptide of claim 1.

45. A vector, comprising the nucleic acid molecule of claim 44.

46. The vector of claim 45, wherein the vector is a prokaryotic vector, viral vector or a eukaryotic vector.

47. The vector of claim 46, wherein the vector is a mammalian vector or a yeast vector.

48. A cell, comprising the vector of claim 45.

49. The cell of claim 48 that is a prokaryotic cell or a mammalian cell.

50. A method of producing a modified MMP-1 polypeptide, comprising:
culturing a cell of claim 48 under conditions whereby the cell expresses the modified MMP-1 polypeptide; and
purifying the MMP-1 polypeptide.

51. A pharmaceutical composition, comprising a modified MMP-polypeptide of claim 1.

52. A method of treating a disease or condition of the extracellular matrix (ECM), comprising administering to the ECM a pharmaceutical composition of claim 51, wherein:
the permissive temperature is below the normal temperature of the ECM; and
the MMP-1 is administered at or below the permissive temperature.

53. The method of claim 52, wherein the MMP-1 is provided in a composition that is at or below the permissive temperature.

54. The method of claim 52, wherein the MMP-1 is mixed with a composition that is at or below the permissive temperature immediately before administration.

55. The method of claim 52, wherein, prior to administration, the ECM is cooled to below the physiological temperature of the body.

56. The method of claim 52, wherein following administration, the ECM is maintained below the physiological temperature of the body for a predetermined time.

57. A method of treating a disease or condition of the extracellular matrix (ECM), comprising administering to the ECM a pharmaceutical composition of claim 51, wherein:
the permissive temperature is above the normal temperature of the ECM; and
the MMP-1 is administered at or above the permissive temperature.

58. The method of claim 57, wherein the MMP-1 is provided in a composition that is at or above the permissive temperature.

59. The method of claim 57, wherein the MMP-1 is mixed with a composition that is at or above the permissive temperature immediately before administration.

60. The method of claim 57, wherein, prior to administration, the ECM is heated to above the physiological temperature of the body.

61. The method of claim 57, wherein following administration, the ECM is maintained at above the physiological temperature of the body for a predetermined time.

62. The method of claim 52, wherein the MMP-1 is a zymogen and is processed before administration.

63. The method of claim 62, wherein the MMP-1 is processed by a processing agent.

64. The method of claim 63, wherein the processing agent is selected from among plasmin, plasma kallikrein, trypsin-1, trypsin-2, neutrophil elastase, cathepsin G, tryptase, chymase, proteinase-3, proteinase-3, furin, urinary plasminogen activator (uPA), an active MMP, 4-aminophenylmercuric acetate (AMPA), HgCl₂, N-ethylmaleimide, sodium dodecyl sulfate (SDS), chaotropic agents, oxidized glutathione, reactive oxygen, Au(I) salts, acidic pH and heat.

65. The method of claim 64, wherein the active MMP is selected from among an MMP-1, MMP-2, MMP-3, MMP-7, MMP-10, MMP-26 and MT1-MMP.

66. The method of claim 64, wherein the processing agent is AMPA.

67. The method of claim 63, wherein the processing agent is purified away from the modified MMP-1 polypeptide before administration.

68. The method of claim 52, wherein the modified MMP-1 polypeptide is administered at a therapeutically effective amount to treat the disease or condition.

69. The method of claim 52, wherein administration is selected from among subcutaneous, intramuscular, intralesional, intradermal, topical, transdermal, intravenous, oral and rectal.

70. The method of claim 52, wherein administration is sub-epidermal administration.

71. The method of claim 52, wherein administration is subcutaneous administration.

72. The method of claim 52, further comprising administering a pharmacologic agent selected from among other biologics, small molecule compounds, dispersing agents, anesthetics and vasoconstrictors or combinations thereof.

73. The method of claim 72, wherein the dispersing agent is a hyaluronan-degrading enzyme.

74. The method of claim 73, wherein the hyaluronan degrading enzyme is a hyaluronidase.

75. The method of claim 72, wherein the other pharmacologic agent(s) is administered simultaneously, sequentially or intermittently from the MMP-1.

76. The method of claim 72, wherein the other agent(s) is administered prior to administration of the MMP-1.

77. The method of claim 52, wherein the disease or condition of the ECM is a collagen-mediated disease or condition.

78. The method of claim 77, wherein the collagen-mediated disease or condition is selected from among cellulite, Dupuytren's disease, Peyronie's disease, Ledderhose fibrosis, stiff joints, existing scars, scleroderma, lymphedema and collagenous colitis.

79. The method of claim 78, wherein the collagen-mediated disease or condition is stiff joints that is frozen shoulder.

80. The method of claim 78, wherein the collagen-mediated disease or condition is existing scars that is selected from among surgical adhesions, keloids, hypertrophic scars and depressed scars.

81. The method of claim 52, wherein the ECM-mediated disease or condition is herniated protruding discs.
